(19) United States
(12) Patent Application Publication
(10) Pub. No.: US 2010/0190656 A1
(43) Pub. Date: Jul. 29, 2010

(54) Breast Cancer Specific Markers and Methods of Use

(75) Inventors: Xiaojun Li, Bellevue, WA (US); Patricia Beckmann, Hansville, WA (US); Heinrich Dreismann, Danville, CA (US)

Correspondence Address: FISH & RICHARDSON PC, P.O. BOX 1022, MINNEAPOLIS, MN, 55440-1022, US

(73) Assignee: INTEGRATED DIAGNOSTICS, INC., Seattle, WA (US)

(21) Appl. No.: 12/538,045

(22) Filed: Aug. 7, 2009

Related U.S. Application Data
(60) Provisional application No. 61/087,559, filed on Aug. 8, 2008.

(51) Int. Cl. C40B 30/04; C40B 40/06; C40B 40/10

(52) U.S. Cl. 506/9; 506/16; 506/18

(57) ABSTRACT

The present invention relates to breast cancer biomarkers useful for the detection, diagnosis and therapeutic treatment of breast cancer.

### CROSS-REFERENCE TO RELATED APPLICATIONS

[0001] This application claims priority from U.S. Provisional Application Ser. No. 61/087,559, filed on Aug. 8, 2008, which is incorporated herein by reference in its entirety.

### TECHNICAL FIELD

[0002] The present invention relates to breast cancer biomarkers useful for the detection, diagnosis and therapeutic treatment of breast cancer.

### BACKGROUND

[0003] Breast cancer is a significant health problem for women and men in the United States and throughout the world. Although advances have been made in the detection and treatment of the disease, breast cancer remains the second leading cause of cancer-related deaths in women, affecting more than 180,000 women in the United States each year. For women in North America, the life-time odds of getting breast cancer are now one in eight.

[0004] Despite considerable research into biomarkers for the diagnosis and prognosis of breast and other cancers, breast cancer is difficult to diagnose and treat effectively. Accordingly, there is a need in the art for improved methods for detecting and treating such cancers.

### SUMMARY

[0005] The present disclosure features, inter alia, compositions (e.g., pluralities of polynucleotides, polypeptides and/or antibodies, and diagnostic and prognostic panels comprising same) and methods employing these compositions for detecting breast cancer and/or an increased risk of developing breast cancer in a subject.

[0006] In one aspect, the invention provides various polynucleotides, polypeptides, and antibodies. For example, the invention provides a polynucleotide or plurality of polynucleotides selected from among those listed in Tables 2 and 3 (e.g., a polynucleotide as set forth in SEQ ID NOs: 1-3005), or a fragment thereof. As another example, the invention provides a polynucleotide or plurality of polynucleotides that binds to a polynucleotide selected from among those listed in Tables 2 and 3 (e.g., a polynucleotide as set forth in SEQ ID NOs: 1-3005). As another example, the invention provides an antibody or plurality of antibodies that binds specifically to a polypeptide selected from among those listed in Tables 2 and 3 (e.g., a polypeptide as set forth in SEQ ID NOs: 3006-5970), or an antigenic fragment thereof. As still another example, the invention provides a polypeptide or plurality of polypeptides selected from among those listed in Tables 2 and 3 (e.g., a polypeptide as set forth in SEQ ID NOs: 3006-5970), or an antigenic fragment thereof.

[0007] In one aspect, the invention provides a polynucleotide, e.g., a plurality of polynucleotides, that binds specifically to a nucleic acid(s) encoding at least one breast cancer marker selected from PTCD2, SLC25A20, NFKB2, RASGRP2, PTCD2, PDE7A, MLL, PTCD2, PRKCE, GPATC3, PRIC285 and GSTA4, or fragments thereof. For example, a plurality of polynucleotides may comprise or consist of polynucleotides that bind specifically to nucleic acids that encode no more than 1000, e.g., no more than 500, 400, 300, 200, 100, 50, 20, or 10, breast cancer markers, wherein the breast cancer markers comprise PTCD2, SLC25A20, NFKB2 and/or RASGRP2; PTCD2, PDE7A and/or MLL; or PTCD2, PRKCE, GPATC3, PRIC285 and/or GSTA4, or fragments thereof. A diagnostic panel comprising or consisting of a polynucleotide or plurality of polynucleotides described herein, and optionally at least one non-polynucleotide component (e.g., at least one reagent, buffer, and/or control) is also provided.

[0008] In another aspect, the invention provides an isolated antibody, e.g., a plurality of antibodies, or antigen-binding fragment(s) thereof, which binds specifically to a polypeptide selected from PTCD2, SLC25A20, NFKB2, RASGRP2, PTCD2, PDE7A, MLL, PTCD2, PRKCE, GPATC3, PRIC285 and GSTA4 polypeptides. For example, a plurality of isolated antibodies is provided wherein the plurality comprises antibodies that bind specifically to PTCD2, SLC25A20, NFKB2 and/or RASGRP2 polypeptides; PTCD2, PDE7A and/or MLL polypeptides; and/or PTCD2, PRKCE, GPATC3, PRIC285 and/or GSTA4 polypeptides. In some instances, the plurality may comprise or consist of antibodies that bind specifically to no more than 1000, e.g., no more than 500, 400, 300, 200, 100, 50, 20, or 10 breast cancer markers. In some instances, the plurality may comprise or consist of antibodies that bind specifically to at least 1000, e.g., at least 500, 400, 300, 200, 100, 50, 20, or 10 breast cancer markers. A diagnostic panel comprising or consisting of an antibody or plurality of antibodies described herein is also provided.

[0009] In still another aspect, the invention provides an isolated breast cancer marker polypeptide, e.g., a plurality of breast cancer marker polypeptides, selected from PTCD2, SLC25A20, NFKB2, RASGRP2, PTCD2, PDE7A, MLL, PTCD2, PRKCE, GPATC3, PRIC285 and GSTA4 polypeptides, or fragments (e.g., antigenic fragments) thereof. For example, a plurality of polypeptides can include PTCD2, SLC25A20, NFKB2 and/or RASGRP2 polypeptides, or antigenic fragments thereof; PTCD2, PDE7A and/or MLL polypeptides, or antigenic fragments thereof; or PTCD2, PRKCE, GPATC3, PRIC285 and/or GSTA4 polypeptides, or antigenic fragments thereof. In some instances, the plurality may comprise or consist of no more than 1000, e.g., no more than 500, 400, 300, 200, 100, 50, 20, or 10 breast cancer marker polypeptides. In some instances, the plurality may comprise or consist of at least 1000, e.g., at least 500, 400, 300, 200, 100, 50, 20, or 10 breast cancer marker polypeptides. A diagnostic panel comprising or consisting of a plurality of polypeptides, or fragments (e.g., antigenic fragments) described herein is also provided.

[0010] In yet another aspect, the invention provides a polynucleotide, e.g., a plurality of polynucleotides, that binds specifically to a nucleic acid encoding a breast cancer marker selected from SLC25A20, NFKB2, RASGRP2, PTCD2, AUP1, SYVN1, CALML4, REEP5, MGA, GSTA4, MIPEP, PLCB2, SLC25A19, DEF6, ZNF236, C18orf22, COX7A2, DDX11, TOP3A, C9orf6, UFC1, PFDN2, KLRD1, LOC643641, HSP90AB1, CLCN7, TNFAIP2, PRKCE, MRPL40, FBF1, ANKRD44, CCT5, USP40, UBXD4, LRCH1, MRPL4, SCCPDH, STX6, LOC284184, FLJ23235, GPATC3, CPSF4, CREM, HIST1H1D, HPS4, FN3KRP, ANKRD16, C8 orf16, ATF71P2, and PRIC285, or fragments thereof. For example, a plurality of polynucleotides may comprise or consist of polynucleotides that bind specifically to nucleic acids that encode no more than 1000, e.g., no more than 500, 400, 300, 200, 100, 50, 20, or 10, breast cancer markers, wherein the breast cancer markers include SLC25A20, NFKB2 and/or RASGRP2. The breast cancer markers may include PTCD2, AUP1, SYVN1, CALML4, REEP5, MGA, and/or GSTA4, and may include MIPEP, PLCB2, SLC25A19, DEF6, ZNF236, C18orf22, COX7A2, DDX11, TOP3A, C9orf6, UFC1, PFDN2, KLRD1, LOC643641, HSP90AB1, CLCN7, TNFAIP2, PRKCE, MRPL40, FBF1, ANKRD44, CCT5, USP40, UBXD4, LRCH1, MRPL4, SCCPDH, STX6, LOC284184, FLJ23235, GPATC3, CPSF4, CREM, HIST1H1D, HPS4, FN3KRP, ANKRD16, C8orf16, ATF71P2, and/or PRIC285. A diagnostic panel comprising or consisting of a polynucleotide or plurality of polynucleotides described herein, and optionally at least one non-polynucleotide component (e.g., at least one support, reagent, buffer, and/or control) is also provided.

[0011] In a further aspect, the invention provides an isolated antibody, e.g., a plurality of antibodies, or antigen-binding fragment(s) thereof, which binds specifically to a polypeptide selected from SLC25A20, NFKB2, RASGRP2, PTCD2, AUP1, SYVN1, CALML4, REEP5, MGA, GSTA4, MIPEP, PLCB2, SLC25A19, DEF6, ZNF236, C18orf22, COX7A2, DDX11, TOP3A, C9orf6, UFC1, PFDN2, KLRD1, LOC643641, HSP90AB1, CLCN7, TNFAIP2, PRKCE, MRPL40, FBF1, ANKRD44, CCT5, USP40, UBXD4, LRCH1, MRPL4, SCCPDH, STX6, LOC284184, FLJ23235, GPATC3, CPSF4, CREM, HIST1H1D, HPS4, FN3KRP, ANKRD16, C8orf16, ATF71P2, and PRIC285 polypeptides, or fragments (e.g., antigenic fragments) thereof. For example, a plurality of isolated antibodies, or antigen-binding fragments thereof, is provided wherein the plurality comprises antibodies that bind specifically to SLC25A20, NFKB2 and/or RASGRP2 polypeptides. The plurality may include antibodies that bind specifically to PTCD2, AUP1, SYVN1, CALML4, REEP5, MGA, and/or GSTA4, and may include antibodies that bind specifically to MIPEP, PLCB2, SLC25A19, DEF6, ZNF236, C18orf22, COX7A2, DDX11, TOP3A, C9orf6, UFC1, PFDN2, KLRD1, LOC643641, HSP90AB1, CLCN7, TNFAIP2, PRKCE, MRPL40, FBF1, ANKRD44, CCT5, USP40, UBXD4, LRCH1, MRPL4, SCCPDH, STX6, LOC284184, FLJ23235, GPATC3, CPSF4, CREM, HIST1H1D, HPS4, FN3KRP, ANKRD16, C8orf16, ATF71P2, and/or PRIC285 polypeptides. In some instances, the plurality may comprise or consist of antibodies that bind specifically to no more than 1000, e.g., no more than 500, 400, 300, 200, 100, 50, 20, or 10 breast cancer markers. In some instances, the plurality may comprise or consist of antibodies that bind specifically to at least 1000, e.g., at least 500, 400, 300, 200, 100, 50, 20, or 10 breast cancer markers. A diagnostic panel comprising or consisting of a plurality of antibodies or antigen-binding fragments thereof described herein is also provided.

[0012] In one aspect, the invention provides an isolated breast cancer marker polypeptide, e.g., a plurality of polypeptides, or antigenic fragment(s) thereof, selected from SLC25A20, NFKB2, RASGRP2, PTCD2, AUP1, SYVN1, CALML4, REEP5, MGA, GSTA4, MIPEP, PLCB2, SLC25A19, DEF6, ZNF236, C18orf22, COX7A2, DDX11, TOP3A, C9orf6, UFC1, PFDN2, KLRD1, LOC643641, HSP90AB1, CLCN7, TNFAIP2, PRKCE, MRPL40, FBF1, ANKRD44, CCT5, USP40, UBXD4, LRCH1, MRPL4, SCCPDH, STX6, LOC284184, FLJ23235, GPATC3, CPSF4, CREM, HIST1H1D, HPS4, FN3KRP, ANKRD16, C8orf16, ATF71P2, and PRIC285 polypeptides. For example, a plurality of isolated polypeptides is provided wherein the plurality comprises SLC25A20, NFKB2 and/or RASGRP2 polypeptides, or antigenic fragments thereof. The plurality may include PTCD2, AUP1, SYVN1, CALML4, REEP5, MGA, and/or GSTA4 polypeptides, and may include MIPEP, PLCB2, SLC25A19, DEF6, ZNF236, C18orf22, COX7A2, DDX11, TOP3A, C9orf6, UFC1, PFDN2, KLRD1, LOC643641, HSP90AB1, CLCN7, TNFAIP2, PRKCE, MRPL40, FBF1, ANKRD44, CCT5, USP40, UBXD4, LRCH1, MRPL4, SCCPDH, STX6, LOC284184, FLJ23235, GPATC3, CPSF4, CREM, HIST1H1D, HPS4, FN3KRP, ANKRD16, C8orf16, ATF71P2, and/or PRIC285 polypeptides, or antigenic fragments thereof. In some instances, the plurality may comprise or consist of no more than 1000, e.g., no more than 500, 400, 300, 200, 100, 50, 20, or 10 breast cancer marker polypeptides. In some instances, the plurality may comprise or consist of at least 1000, e.g., at least 500, 400, 300, 200, 100, 50, 20, or 10 breast cancer marker polypeptides. A diagnostic panel comprising or consisting of a plurality of polypeptides described herein is also provided.

[0013] In another aspect, the invention provides a polynucleotide, e.g., a plurality of polynucleotides, that binds specifically to a nucleic acid encoding a breast cancer marker selected from PDE7A, MLL, PTCD2, ZNF669, SNRP70, MGC35402, GSTA4, ATHL1, PRSS23, TMEM80, FLJ40432 STX5A, PRKCE, MTMR11, TNPO1, MGC3731, FKBP5, C3orf62, IRS2, GPATC3, SUSD1, CCM2, ZBTB7A, RAB11A, GSDML, MAPK9, DRG2, PDZD8, LOC339804, PPARD, DDIT3, FAM113A, RHBDD3, TIMM44, ATP6AP2, ME2, PRIC285, TNFSF14, ABCA2, EML2, Magmas, EVI2A, USP37, GATAD1, CHN2, PSCD4, CHTF18, SFRS8, DICER1, and PIAS1, or fragment thereof. For example, a plurality of polynucleotides may comprise or consist of polynucleotides that bind specifically to nucleic acids that encode no more than 1000, e.g., no more than 500, 400, 300, 200, 100, 50, 20, or 10, breast cancer markers, wherein the breast cancer markers include PDE7A, MLL, and/or PTCD2. The breast cancer markers may include ZNF669, SNRP70, MGC35402, GSTA4, ATHL1, PRSS23, and/or TMEM80, and may include FLJ40432 STX5A, PRKCE, MTMR11, TNPO1, MGC3731, FKBP5, C3orf62, IRS2, GPATC3, SUSD1, CCM2, ZBTB7A, RAB11A, GSDML, MAPK9, DRG2, PDZD8, LOC339804, PPARD, DDIT3, FAM113A, RHBDD3, TIMM44, ATP6AP2, ME2, PRIC285, TNFSF14, ABCA2, EML2, Magmas, EVI2A, USP37, GATAD1, CHN2, PSCD4, CHTF18, SFRS8, DICER1, and/or PIAS1. A diagnostic panel comprising or consisting of a polynucleotide or plurality of polynucleotides described herein, and optionally at least one non-polynucleotide component (e.g., at least one support, reagent, buffer, and/or control) is also provided.

[0014] In yet another aspect, the invention provides an isolated antibody, e.g., a plurality of antibodies, or antigen-binding fragment(s) thereof, which binds specifically to a polypeptide selected from PDE7A, MLL, PTCD2, ZNF669, SNRP70, MGC35402, GSTA4, ATHL1, PRSS23, TMEM80, FLJ40432 STX5A, PRKCE, MTMR11, TNPO1, MGC3731, FKBP5, C3orf62, IRS2, GPATC3, SUSD1, CCM2, ZBTB7A, RAB11A, GSDML, MAPK9, DRG2, PDZD8, LOC339804, PPARD, DDIT3, FAM113A, RHBDD3, TIMM44, ATP6AP2, ME2, PRIC285, TNFSF14, ABCA2, EML2, Magmas, EVI2A, USP37, GATAD1, CHN2, PSCD4, CHTF18, SFRS8, DICER1, and PIAS1 polypeptides, or fragment (e.g., antigenic fragment) thereof. For example, a plurality of isolated antibodies is provided wherein the plurality comprises antibodies that bind specifically to PDE7A, MLL, and/or PTCD2 polypeptides. The plurality may include antibodies that bind specifically to ZNF669, SNRP70, MGC35402, GSTA4, ATHL1, PRSS23, and/or TMEM80, and may include FLJ40432 STX5A, PRKCE, MTMR11, TNPO1, MGC3731, FKBP5, C3orf62, IRS2, GPATC3, SUSD1, CCM2, ZBTB7A, RAB11A, GSDML, MAPK9, DRG2, PDZD8, LOC339804, PPARD, DDIT3, FAM113A, RHBDD3, TIMM44, ATP6AP2, ME2, PRIC285, TNFSF14, ABCA2, EML2, Magmas, EVI2A, USP37, GATAD1, CHN2, PSCD4, CHTF18, SFRS8, DICER1, and/or PIAS1polypeptides. In some instances, the plurality may comprise or consist of antibodies that bind specifically to no more than 1000, e.g., no more than 500, 400, 300, 200, 100, 50, 20, or 10 breast cancer markers. In some instances, the plurality may comprise or consist of antibodies that bind specifically to at least 1000, e.g., at least 500, 400, 300, 200, 100, 50, 20, or 10 breast cancer markers. A diagnostic panel comprising or consisting of a plurality of antibodies, or antigen-binding fragments thereof, described herein is also provided.

[0015] In still a further aspect, the invention provides an isolated breast cancer marker polypeptide, e.g., a plurality of polypeptides, or antigenic fragment(s) thereof, selected from PDE7A, MLL, PTCD2, ZNF669, SNRP70, MGC35402, GSTA4, ATHL1, PRSS23, TMEM80, FLJ40432 STX5A, PRKCE, MTMR11, TNPO1, MGC3731, FKBP5, C3orf62, IRS2, GPATC3, SUSD1, CCM2, ZBTB7A, RAB11A, GSDML, MAPK9, DRG2, PDZD8, LOC339804, PPARD, DDIT3, FAM113A, RHBDD3, TIMM44, ATP6AP2, ME2, PRIC285, TNFSF14, ABCA2, EML2, Magmas, EVI2A, USP37, GATAD1, CHN2, PSCD4, CHTF18, SFRS8, DICER1, and PIAS1 polypeptides. For example, a plurality of isolated polypeptides is provided wherein the plurality comprises PDE7A, MLL, and/or PTCD2 polypeptides, or antigenic fragments thereof. The plurality may include ZNF669, SNRP70, MGC35402, GSTA4, ATHL1, PRSS23, and/or TMEM80 polypeptides, and may include FLJ40432 STX5A, PRKCE, MTMR11, TNPO1, MGC3731, FKBP5, C3orf62, IRS2, GPATC3, SUSD1, CCM2, ZBTB7A, RAB11A, GSDML, MAPK9, DRG2, PDZD8, LOC339804, PPARD, DDIT3, FAM113A, RHBDD3, TIMM44, ATP6AP2, ME2, PRIC285, TNFSF14, ABCA2, EML2, Magmas, EVI2A, USP37, GATAD1, CHN2, PSCD4, CHTF18, SFRS8, DICER1, and/or PIAS1 polypeptides, or antigenic fragments thereof. In some instances, the plurality may comprise or consist of no more than 1000, e.g., no more than 500, 400, 300, 200, 100, 50, 20, or 10 breast cancer marker polypeptides. In some instances, the plurality may comprise or consist of at least 1000, e.g., at least 500, 400, 300, 200, 100, 50, 20, or 10 breast cancer marker polypeptides. A diagnostic panel comprising or consisting of a plurality of polypeptides, or fragments (e.g., antigenic fragments) thereof described herein is also provided.

[0016] In a further aspect, the invention provides a polynucleotide, e.g., a plurality of polynucleotides, that binds specifically to a nucleic acid encoding a breast cancer marker selected from ACAA2, SLC25A20, SREBF1, TMEM63A, ARL16, PRO1580, RASGRP2, C19orf6, STX16, MLLT6, Clorf71, ENTPD4, DGKA, PPP6C, PDE7A, RUTBC1, PRPF3, MBTD1, SPG7, TNFRSF25, PDK4, MS4A4A, TBC1D10C, MGC10471, FAM73B, SF1, MTA1, NFKB2, FLAD1, COPS7B, CSTA, MGC42174, ARRDC2, VAMP1, C16orf58, TMEM55B, NAT9, LIMD1, TNFRSF10A, PTCD2, ZDHHC8, STX12, RXRB, MLL, WDR39, ZC3H12A, FLJ21106, KLHDC3, NOL9, and WDR73, or fragment thereof. For example, a plurality of polynucleotides may comprise or consist of polynucleotides that bind specifically to nucleic acids that encode no more than 1000, e.g., no more than 500, 400, 300, 200, 100, 50, 20, or 10, breast cancer markers, wherein the breast cancer markers include ACAA2, SLC25A20, and/or SREBF1. The breast cancer markers may include TMEM63A, ARL16, PRO1580, RASGRP2, C19orf6, STX16 and/or MLLT6, and may include Clorf71, ENTPD4, DGKA, PPP6C, PDE7A, RUTBC1, PRPF3, MBTD1, SPG7, TNFRSF25, PDK4, MS4A4A, TBC1D10C, MGC10471, FAM73B, SF1, MTA1, NFKB2, FLAD1, COPS7B, CSTA, MGC42174, ARRDC2, VAMP1, C16orf58, TMEM55B, NAT9, LIMD1, TNFRSF10A, PTCD2, ZDHHC8, STX12, RXRB, MLL, WDR39, ZC3H12A, FLJ21106, KLHDC3, NOL9, and/or WDR73. A diagnostic panel comprising or consisting of a polynucleotide or plurality of polynucleotides described herein, and optionally at least one non-polynucleotide component (e.g., at least one support, reagent, buffer, and/or control) is also provided.

[0017] In another aspect, the invention provides an isolated antibody, e.g., a plurality of antibodies, or antigen-binding fragment(s) thereof, which binds specifically to a polypeptide selected from ACAA2, SLC25A20, SREBF1, TMEM63A, ARL16, PRO1580, RASGRP2, C19orf6, STX16, MLLT6, Clorf71, ENTPD4, DGKA, PPP6C, PDE7A, RUTBC1, PRPF3, MBTD1, SPG7, TNFRSF25, PDK4, MS4A4A, TBC1D10C, MGC10471, FAM73B, SF1, MTA1, NFKB2, FLAD1, COPS7B, CSTA, MGC42174, ARRDC2, VAMP1, C16orf58, TMEM55B, NAT9, LIMD1, TNFRSF10A, PTCD2, ZDHHC8, STX12, RXRB, MLL, WDR39, ZC3H12A, FLJ21106, KLHDC3, NOL9, and WDR73 polypeptides, or fragment (e.g., antigenic fragment) thereof. For example, a plurality of isolated antibodies is provided wherein the plurality comprises antibodies that bind specifically to ACAA2, SLC25A20, and/or SREBF1 polypeptides. The plurality may include antibodies that bind specifically to TMEM63A, ARL16, PRO1580, RASGRP2, C19orf6, STX16 and/or MLLT6, and may include Clorf71, ENTPD4, DGKA, PPP6C, PDE7A, RUTBC1, PRPF3, MBTD1, SPG7, TNFRSF25, PDK4, MS4A4A, TBC1D10C, MGC10471, FAM73B, SF1, MTA1, NFKB2, FLAD1, COPS7B, CSTA, MGC42174, ARRDC2, VAMP1, C16orf58, TMEM55B, NAT9, LIMD1, TNFRSF10A, PTCD2, ZDHHC8, STX12, RXRB, MLL, WDR39, ZC3H12A, FLJ21106, KLHDC3, NOL9, and/or WDR73 polypeptides. In some instances, the plurality may comprise or consist of antibodies that bind specifically to no more than 1000, e.g., no more than 500, 400, 300, 200, 100, 50, 20, or 10 breast cancer markers. In some instances, the plurality may comprise or consist of antibodies that bind specifically to at least 1000, e.g., at least 500, 400, 300, 200, 100, 50, 20, or 10 breast cancer markers. A diagnostic panel comprising or consisting of a plurality of antibodies, or antigen-binding fragments thereof described herein is also provided.

[0018] In yet another aspect, the invention provides an isolated breast cancer marker polypeptide, e.g., a plurality of polypeptides, or antigenic fragment(s) thereof, selected from ACAA2, SLC25A20, SREBF1, TMEM63A, ARL16, PRO1580, RASGRP2, C19orf6, STX16, MLLT6, Clorf71, ENTPD4, DGKA, PPP6C, PDE7A, RUTBC1, PRPF3, MBTD1, SPG7, TNFRSF25, PDK4, MS4A4A, TBC1D10C, MGC10471, FAM73B, SF1, MTA1, NFKB2, FLAD1, COPS7B, CSTA, MGC42174, ARRDC2, VAMP1, C16orf58, TMEM55B, NAT9, LIMD1, TNFRSF10A, PTCD2, ZDHHC8, STX12, RXRB, MLL, WDR39, ZC3H12A, FLJ21106, KLHDC3, NOL9, and WDR73 polypeptides. For example, a plurality of isolated polypeptides is provided wherein the plurality comprises ACAA2, SLC25A20, and/or SREBF1 polypeptides, or antigenic fragments thereof. The plurality may include TMEM63A, ARL16, PRO1580, RASGRP2, C19orf6, STX16 and/or MLLT6 polypeptides, and may include Clorf71, ENTPD4, DGKA, PPP6C, PDE7A, RUTBC1, PRPF3, MBTD1, SPG7, TNFRSF25, PDK4, MS4A4A, TBC1D10C, MGC10471, FAM73B, SF1, MTA1, NFKB2, FLAD1, COPS7B, CSTA, MGC42174, ARRDC2, VAMP1, C16orf58, TMEM55B, NAT9, LIMD1, TNFRSF10A, PTCD2, ZDHHC8, STX12, RXRB, MLL, WDR39, ZC3H12A, FLJ21106, KLHDC3, NOL9, and/or WDR73 polypeptides, or antigenic fragments thereof. In some instances, the plurality may comprise or consist of no more than 1000, e.g., no more than 500, 400, 300, 200, 100, 50, 20, or 10 breast cancer marker polypeptides. In some instances, the plurality may comprise or consist of at least 1000, e.g., at least 500, 400, 300, 200, 100, 50, 20, or 10 breast cancer marker polypeptides. A diagnostic panel comprising or consisting of a plurality of polypeptides, or fragments (e.g., antigenic fragments) described herein is also provided.

[0019] In yet another aspect, the invention provides a polynucleotide, e.g., a plurality of polynucleotides, wherein the polynucleotide(s) binds specifically to a nucleic acid encoding a breast cancer marker selected from ACAA2, SLC25A20, SREBF1, and MRPL40, or fragment thereof. The specification includes a diagnostic panel consisting of one or more polynucleotides and optionally at least one non-polynucleotide component (e.g., at least one support, buffer, reagent and/or control), wherein the polynucleotides bind specifically to a nucleic acid encoding at least one breast cancer marker selected from the group consisting of ACAA2, SLC25A20, SREBF1, and MRPL40, or fragment thereof and to no more than 1000, e.g., no more than 500, 400, 300, 200, 100, 50, 20, or breast cancer markers.

[0020] In a further aspect, the invention provides an antibody, e.g., a plurality of antibodies, or antigen-binding fragment thereof, that binds specifically to at least one breast cancer marker selected from ACAA2, SLC25A20, SREBF1, and MRPL40. The specification includes a diagnostic panel that includes at least one antibody, or antigen-binding fragment thereof, wherein the antibody binds specifically to a breast cancer marker selected from ACAA2, SLC25A20, SREBF1, and MRPL40, or a combination thereof. In some instances, the diagnostic panel or plurality may comprise or consist of antibodies that bind specifically to no more than 1000, e.g., no more than 500, 400, 300, 200, 100, 50, 20, or 10 breast cancer markers. In some instances, the diagnostic panel or plurality may comprise or consist of antibodies that bind specifically to at least 1000, e.g., at least 500, 400, 300, 200, 100, 50, 20, or 10 breast cancer markers.

[0021] In another aspect, the invention provides at least one breast cancer marker polypeptide, e.g., a plurality of breast cancer marker polypeptides, selected from ACAA2, SLC25A20, SREBF1, and MRPL40, or fragment (e.g., antigenic fragment) thereof. The specification further provides a diagnostic panel comprising at least one breast cancer marker polypeptide selected from ACAA2, SLC25A20, SREBF1, and MRPL40, or fragment thereof. In some instances, the plurality or diagnostic panel may comprise or consist of no more than 1000, e.g., no more than 500, 400, 300, 200, 100, 50, 20, or 10 breast cancer marker polypeptides. In some instances, the plurality or diagnostic panel may comprise or consist of at least 1000, e.g., at least 500, 400, 300, 200, 100, 50, 20, or breast cancer marker polypeptides.

[0022] In still another aspect, the invention provides a method for detecting the presence of breast cancer in a patient. The method generally includes: (a) obtaining a biological sample from the patient; and (b) detecting the level of expression of a breast cancer marker(s) (e.g., multiple markers) described herein in the biological sample using a polynucleotide or plurality of polynucleotides described herein, or a diagnostic/prognostic panel described herein, wherein a modulated (e.g., increased or decreased) level of expression as compared to a predetermined cut-off value for a breast cancer marker (e.g., multiple markers) indicates the presence of breast cancer in the patient. In some instances, (b) can include detecting the level of mRNA expression. In other instances, (b) can include detecting the level of mRNA expression using a nucleic acid hybridization technique. In still other instances, (b) can include detecting the level of mRNA expression using a nucleic acid amplification method. In still other instances, (b) can include detecting the level of mRNA expression using a nucleic acid amplification method such as transcription-mediated amplification, polymerase chain reaction amplification (PCR), reverse-transcription polymerase chain reaction amplification (RT-PCR), ligase chain reaction amplification (LCR), strand displacement amplification (SDA), and/or nucleic acid sequence based amplification (NASBA).

[0023] In a further aspect, the invention provides a method for detecting the presence of breast cancer in a patient that includes (a) obtaining a biological sample from the patient; and (b) detecting the level of protein expression of a breast cancer marker(s) (e.g., multiple markers) described herein in the biological sample using an antibody or plurality of antibodies or fragments thereof described herein, or a diagnostic/prognostic panel described herein, wherein a modulated level of protein expression as compared to a predetermined cut-off value for a breast cancer marker (e.g., multiple markers) indicates the presence of breast cancer in the patient. In some instances, (b) can include detecting the level of protein expression using an immunoassay. In other instances, (b) can include detecting the level of protein expression using an immunoassay such as ELISA, an immunohistochemical assay, and/or an immunocytochemical assay.

[0024] In yet another aspect, the invention provides a method for detecting the presence of breast cancer in a patient that includes (a) obtaining a biological sample from the patient; and (b) detecting the level of antibodies directed against a breast cancer marker(s) (e.g., multiple markers) in the biological sample using a polypeptide or plurality of polypeptides or fragments (e.g., antigenic fragments) thereof described herein, or a diagnostic/prognostic panel described herein, wherein a modulated (e.g., increased or decreased) level of antibodies as compared to a predetermined cut-off value for a breast cancer marker (e.g., multiple markers) indicates the presence of breast cancer in the patient.

[0025] In any method described herein, the biological sample may be, but is not limited to, blood, biopsy tissue (e.g., a breast biopsy tissue), lavage, sputum, serum, lymph node tissue, bone marrow, urine, or pleural effusion.

[0026] One aspect of the present invention provides a diagnostic panel comprising one or more binding agents, wherein each binding agent specifically binds one breast cancer marker selected from the breast cancer markers provided herein, such as those listed in Table 2 and/or Table 3. In one embodiment, the binding agents comprise a polynucleotide, a polypeptide, or an antibody. In certain embodiments, the diagnostic panel may comprise two or more binding agents. In this regard, the diagnostic panel may comprise, 2, 3, 4, 5, 6, 7, 8, 9, 10, 11, 12, 13, 14, 15, 16, 17, 18, 19, 20 or more binding agents. In one embodiment, the diagnostic panels described herein may comprise at least four binding agents. In a further embodiment, the diagnostic panel comprises at least one binding agent specifically binds any one of the markers listed in Table 2.

[0027] Another aspect of the invention provides a method for detecting the presence of breast cancer cells in a biological sample comprising the steps of:
[0028] (a) detecting the level of expression in the biological sample of any one or more of the breast cancer markers provided herein, such as those provided in Table 2 and Table 3; and
[0029] (b) comparing the level of expression detected in the biological sample for each marker to a predetermined cut-off value for each marker;

[0030] wherein a detected level of expression above or below the predetermined cut-off value for one or more markers is indicative of the presence of cancer cells in the biological sample. In one embodiment, detecting the level of expression in the biological sample of any one or more of the breast cancer markers provided herein comprises detecting the level of mRNA expression. In this regard, mRNA expression may be detected using a nucleic acid hybridization technique or other methods for detecting mRNA expression such as, but not limited to, transcription-mediated amplification (TMA), polymerase chain reaction amplification (PCR), reverse-transcription polymerase chain reaction amplification (RT-PCR), ligase chain reaction amplification (LCR), strand displacement amplification (SDA), and nucleic acid sequence based amplification (NASBA). In a further embodiment, the breast cancer markers of the panels and methods describe herein comprises a nucleic acid sequence set forth in any one of SEQ ID NOs:1-3005 or a nucleic acid sequence encoding an amino acid sequence set forth in any one of SEQ ID NOs:3006-5970. In yet a further embodiment of the method, detecting the level of expression in the biological sample of any one or more of the breast cancer markers provided herein comprises detecting the level of protein expression. Protein expression can be measured using any of a number of assays, including but not limited to an immunoassay (e.g., an ELISA, an immunohistochemical assay, an immunocytochemical assay, or a flow cytometry assay of antibody-labeled cells. In certain embodiments, the breast cancer marker comprises an amino acid sequence set forth in any one of SEQ ID NOs:3006-5970.

[0031] In certain embodiments, the biological sample is a sample suspected of containing breast cancer markers, antibodies to such breast cancer markers or cancer cells expressing such markers or antibodies. In this regard, the biological sample may be, but is not limited to, a peripheral blood sample, biopsy sample, lavage sample, sputum sample, serum sample, lymph node sample, bone marrow sample, urine sample, or pleural effusion sample.

[0032] Another aspect of the invention provides a diagnostic panel comprising one or more binding agents, wherein each binding agent specifically binds one breast cancer marker selected from the breast cancer markers provided in Table 3. In one embodiment, one or more binding agents in a panel specifically binds to a breast cancer marker selected from the group consisting of ACAA2, SLC25A20, SREBF1, TMEM63A, ARL16, PRO1580, RASGRP2, C19orf6, STX16, and MLLT6. In a further embodiment, the one or more binding agents specifically binds to a breast cancer marker selected from the group consisting of SLC25A20, STX16, MLLT6, DEF6, GOS2, ZNF160, FKBP5, FLJ40432, ZFP36L1 and DALRD3. In another embodiment, the one or more binding agents specifically binds to a breast cancer marker selected from the group consisting of ACAA2, SLC25A20, SREBF1, TMEM63A, ARL16, PRO1580, RASGRP2, C19orf6, STX16, MLLT6, DEF6, GOS2, NSUN5B, C9orf114, FAM98C, PCGF1, LIPA, CPNE5, LOC221955, and FLJ22709. In yet another embodiment, the one or more binding agents specifically binds to a breast cancer marker selected from the group consisting of ACAA2, SLC25A20, SREBF1, TMEM63A, ARL16, PRO1580, RASGRP2, C19orf6, STX16, MLLT6, FKBP5, CPNE5, PHF22, MRPL47, CREM, FLJ40432, ZNF160, ZFP36L1, DDX10, and IL8. In a further embodiment, the one or more binding agents specifically binds to a breast cancer marker selected from the group consisting of ACAA2, SLC25A20, SREBF1, TMEM63A, ARL16, PRO1580, RASGRP2, C19orf6, STX16, MLLT6, FKBP5, FLJ23235, MIPEP, ZCRB1, RAP1GDS1, DALRD3, DEXI, FLJ40432, GGA2, and C20orf14.

[0033] In certain embodiments, the diagnostic panel of the invention comprises a combination of 2, 3, 4, 5, 6, 7 or more binding agents, wherein each binding agent specifically binds one breast cancer marker selected from the group consisting of ACAA2, SLC25A20, SREBF1, TMEM63A, ARL16, PRO1580, RASGRP2, C19orf6, STX16, and MLLT6. In another embodiment the diagnostic panel of the invention comprises a combination of 2, 3, 4, 5, 6, 7 or more binding agents, wherein each binding agent specifically binds one breast cancer marker selected from the group consisting of SLC25A20, STX16, MLLT6, DEF6, GOS2, ZNF160, FKBP5, FLJ40432, ZFP36L1 and DALRD3. In yet a further embodiment, the diagnostic panel of the invention comprises a combination of 2, 3, 4, 5, 6, 7 or more binding agents, wherein each binding agent specifically binds one breast cancer marker selected from the group consisting of ACAA2, SLC25A20, SREBF1, TMEM63A, ARL16, PRO1580, RASGRP2, C19orf6, STX16, MLLT6, DEF6, GOS2, NSUN5B, C9orf114, FAM98C, PCGF1, LIPA, CPNE5, LOC221955, and FLJ22709. In another embodiment, the diagnostic panel may comprise a combination of 2, 3, 4, 5, 6, 7 or more binding agents, wherein each binding agent specifically binds one breast cancer marker selected from the group consisting of ACAA2, SLC25A20, SREBF1, TMEM63A, ARL16, PRO1580, RASGRP2, C19orf6, STX16, MLLT6, FKBP5, CPNE5, PHF22, MRPL47, CREM, FLJ40432, ZNF160, ZFP36L1, DDX10, and IL8. In a further embodiment, the diagnostic panel may comprise a combination of 2, 3, 4, 5, 6, 7 or more binding agents, wherein each binding agent specifically binds one breast cancer marker selected from the group consisting of ACAA2, SLC25A20, SREBF1, TMEM63A, ARL16, PRO1580, RASGRP2, C19orf6, STX16, MLLT6, FKBP5, FLJ23235, MIPEP, ZCRB1, RAP1GDS1, DALRD3, DEXI, FLJ40432, GGA2, and C20orf14.

[0034] Another aspect of the present invention provides a diagnostic panel comprising 10 binding agents, wherein each binding agent specifically binds one breast cancer marker selected from the group consisting of ACAA2, SLC25A20, SREBF1, TMEM63A, ARL16, PRO1580, RASGRP2, C19orf6, STX16, and MLLT6. In one embodiment, each binding agent specifically binds one breast cancer marker selected from the group consisting of SLC25A20, STX16, MLLT6, DEF6, GOS2, ZNF160, FKBP5, FLJ40432, ZFP36L1 and DALRD3.

[0035] A further aspect of the invention provides a diagnostic panel comprising 20 binding agents, wherein each binding agent specifically binds one breast cancer marker selected from the group consisting of ACAA2, SLC25A20, SREBF1, TMEM63A, ARL16, PRO1580, RASGRP2, C19orf6, STX16, MLLT6, DEF6, GOS2, NSUN5B, C9 orf114, FAM98C, PCGF1, LIPA, CPNE5, LOC221955, and FLJ22709. In one embodiment, each binding agent specifically binds one breast cancer marker selected from the group consisting of ACAA2, SLC25A20, SREBF1, TMEM63A, ARL16, PRO1580, RASGRP2, C19orf6, STX16, MLLT6, FKBP5, CPNE5, PHF22, MRPL47, CREM, FLJ40432, ZNF160, ZFP36L1, DDX10, and IL8. In another embodiment, each binding agent specifically binds one breast cancer marker selected from the group consisting of ACAA2, SLC25A20, SREBF1, TMEM63A, ARL16, PRO1580, RASGRP2, C19orf6, STX16, MLLT6, FKBP5, FLJ23235, MIPEP, ZCRB1, RAP1GDS1, DALRD3, DEXI, FLJ40432, GGA2, and C20orf14. In certain embodiments, the binding agents my comprise polynucleotides or antibodies.

[0036] Unless otherwise defined, all technical and scientific terms used herein have the same meaning as commonly understood by one of ordinary skill in the art to which this invention belongs. Methods and materials are described herein for use in the present invention; other, suitable methods and materials known in the art can also be used. The materials, methods, and examples are illustrative only and not intended to be limiting. All publications, patent applications, patents, sequences, database entries, and other references mentioned herein are incorporated by reference in their entirety. In case of conflict, the present specification, including definitions, will control.

[0037] Other features and advantages of the invention will be apparent from the following detailed description and figures, and from the claims.

### DESCRIPTION OF DRAWINGS

[0038] FIG. 1 is a line graph showing the accuracy, the sensitivity and the specificity of the biomarker panel as a function of the number of breast cancer markers in the panel using breast cancer markers selected by the LIMMA approach.

[0039] FIG. 2 is a line graph showing the accuracy, the sensitivity and the specificity of the biomarker panel as a function of the number of breast cancer markers in the panel using breast cancer markers selected by the LDA approach.

[0040] FIG. 3 is a line graph showing the accuracy, the sensitivity and the specificity of the biomarker panel as a function of the number of breast cancer markers in the panel using breast cancer markers selected by the SVM approach.

[0041] FIG. 4 shows the nucleic acid sequence of PTCD2 (SEQ ID NO:64).

[0042] FIG. 5 shows the amino acid sequence of PTCD2 (SEQ ID NO3069).

[0043] FIG. 6 shows the nucleic acid sequence of SLC25A20 (SEQ ID N0:2).

[0044] FIG. 7 shows the amino acid sequence of SLC25A20 (SEQ ID NO:3007).

[0045] FIGS. 8A-8B show the nucleic acid sequence of NFKB2 (SEQ ID N0:48).

[0046] FIGS. 9A-9D show the amino acid sequence of NFKB2 (SEQ ID NO:3053).

[0047] FIGS. 10A-10B show the nucleic acid sequences of RASGRP2 (SEQ ID NOs:9 (10A) and 10 (10B)).

[0048] FIGS. 11A-11D show the amino acid sequences of RASGRP2 (SEQ ID N0:3014 (11A-11B) and 3015 (11C-11D)).

[0049] FIGS. 12A-12C show the nucleic acid sequences of PDE7A (SEQ ID NOs:24 (12A) and 25 (12B-12C)).

[0050] FIGS. 13A-13D show the amino acid sequences of PDE7A (SEQ ID NOs:3029 (13A-13B) and 3030 (13C-13D)).

[0051] FIGS. 14A-14F show the nucleic acid sequence of MLL (SEQ ID N0:68).

[0052] FIGS. 15A-15L show the amino acid sequence of MLL (SEQ ID NO:3073).

[0053] FIGS. 16A-16C show the nucleic acid sequence of PRKCE (SEQ ID NO:1545).

[0054] FIGS. 17A-17C show the amino acid sequence of PRKCE (SEQ ID NO4544).

[0055] FIG. 18 shows the nucleic acid sequence of GPATC3 (SEQ ID NO:2757).

[0056] FIGS. 19A-19B show the amino acid sequence of GPATC3 (SEQ ID NO:5724).

[0057] FIGS. 20A-20H show the nucleic acid sequences of PRIC285 (SEQ ID NOs:2059 (20A-20D) and 2060 (20E-20H)).

[0058] FIGS. 21A-21O show the amino acid sequences of PRIC285 (SEQ ID NOs:5055 (21A-21H) and 5056 (21I-21O)).

[0059] FIG. 22 shows the nucleic acid sequence of GSTA4 (SEQ ID NO:482).

[0060] FIG. 23 shows the amino acid sequence of GSTA4 (SEQ ID NO:3483).

### DETAILED DESCRIPTION

[0061] The present disclosure is based, at least in part, on the discovery that the expression of certain polynucleotides and polypeptides, referred to herein as breast cancer biomarkers, is altered in subjects that have breast cancer. In general, the methods described herein are based on the identification of the biomarkers, which can be used as predictors of disease and to monitor therapy. The biomarkers show either increased or decreased protein levels in subjects diagnosed with breast cancer when compared to control individuals, e.g., as determined by microarray data and computational analysis. The breast cancer biomarkers are described throughout the present specification and are listed, for example, in Tables 2 and 3.

[0062] Accordingly, the present disclosure provides, inter alia, breast cancer biomarker polynucleotide and polypeptides, binding agents (e.g., for the detection of one or more breast cancer biomarkers or antibodies directed against biomarkers (e.g., pluralities of binding agents, such as polynucleotides, polypeptides, and/or antibodies)) and panels (e.g., diagnostic and/or prognostic panels) that comprise one or more binding agents. The disclosure also provides methods that allow the detection (e.g., the evaluation) of altered levels of one or more breast cancer biomarkers ((e.g., markers provided in SEQ ID NOs:1-5970), e.g., in soluble form and/or on the surface of a cancer cell) in a biological sample derived from a subject. The breast cancer biomarkers, binding agents, and panels described herein can be used, e.g., to determine whether a subject has or is at increased risk for developing breast cancer and/or to monitor a subject's breast cancer while the subject is undergoing breast cancer treatment.

[0063] As used herein, the terms “breast cancer marker”, “breast cancer-associated marker”, or “breast cancer biomarker” means a polynucleotide or polypeptide sequence described herein whose expression is either lower or higher, e.g., to a statistically significant degree, e.g., in a statistically significant proportion of biological samples, derived from breast cancer patients, for example greater than about 20%, about 30%, and in certain embodiments, greater than about 50% or more, of biological samples from breast cancer patients tested, than the level of expression in a normal control biological sample, as determined using a representative assay provided herein (see e.g., Table 2). In some embodiments, a sequence shown to have an increased or decreased level of expression in samples derived from breast cancer patients as compared to a predetermined cut-off value (methods for determining which are provided below) has particular utility as a cancer diagnostic/prognostic marker and can, individually or in a group with other markers (e.g., as part of a panel), be used to detect breast cancer or an increased risk of breast cancer in a subject. Further, in certain embodiments, such biomarkers can be used as a therapeutic targets.

### A. Panels, Breast Cancer Markers, and Binding Agents

[0064] The present disclosure provides panels (e.g., diagnostic and/or prognostic panels) for detecting and/or measuring the levels of expression of one or more of breast cancer markers (see e.g., Tables 2 and 3 and/or in SEQ ID NOs: 1-5970). As used herein, the term panel (e.g., “diagnostic panel” or “prognostic panel”) includes, but is not limited to panels, arrays, mixtures, and kits that comprise binding agents or probes specific for detecting the breast cancer markers disclosed herein or a control and any of a variety of associated buffers, solutions, appropriate negative and positive controls, instruction sets, detection reagents, reporter groups.

[0065] As used herein, a “binding agent” means any agent that specifically associates or specifically binds directly or indirectly to a breast cancer marker in the test sample and that can be detected using one or more detection methods, as described below (see, e.g., sections titled detection methods). A binding agent may be, for example, a polynucleotide, polypeptide, or an antibody binding agent. The term “specifically” is a term of art that would be readily understood by the skilled artisan to mean, in this context, that the breast cancer marker of interest (e.g., protein, nucleic acid, etc) is bound by the particular binding agent but other markers, e.g., control markers, are not significantly bound. Specificity can be determined using appropriate positive and negative controls and by routinely optimizing conditions. In some instances, binding agents can be bispecific such that the panel is comprised of one or more bispecific binding agents that may specifically detect more than one breast cancer marker. Panels can also comprise a binding agent that does not detect a breast cancer biomarker disclosed herein, for example, a control binding agent that is not specific for a breast cancer biomarker.

[0066] Panels may also include detection reagents and reporter groups. Reporter groups may include radioactive groups, dyes, fluorophores, biotin, colorimetric substrates, enzymes, or colloidal compounds. Illustrative reporter groups include but are not limited to, fluorescein, tetramethyl rhodamine, Texas Red, coumarins, carbonic anhydrase, urease, horseradish peroxidase, dehydrogenases and/or colloidal gold or silver. For radioactive groups, scintillation counting or autoradiographic methods are generally appropriate for detection. Spectroscopic methods may be used to detect dyes, luminescent groups and fluorescent groups. Biotin may be detected using avidin, coupled to a different reporter group (commonly a radioactive or fluorescent group or an enzyme). Enzyme reporter groups may generally be detected by the addition of substrate (generally for a specific period of time), followed by spectroscopic or other analysis of the reaction products.

[0067] Panels can comprise binding agents for binding and detecting any combination of one or more of the breast cancer markers as described herein to detect breast cancer. Thus, in one embodiment, the panels can comprise binding agents for specifically detecting 2, 3, 4, 5, 6, 7, 8, 9, 10, 11, 12, 13, 14, 15, 16, 17, 18, 19, or 20 (e.g., up to 100) of the cancer-associated markers described herein simultaneously. In a further embodiment, the panels can comprise binding agents for specifically detecting 21, 22, 23, 24, 25, 26, 27, 28, 29, 30, 31, 32, 33, 34, 35, 36, 37, 38, 39, or 40 (e.g., up to 100) of the cancer-associated markers described herein simultaneously. In another embodiment, the panels can comprise binding agents for specifically detecting 45, 50, 55, 60, 65, 70, 75, 80, 85, 90, 95, 100 or more of the cancer-associated markers described herein simultaneously. In certain embodiments, panels can comprise binding agents for specifically detecting all of the breast cancer markers described herein simultaneously.

[0068] In general, a panel can include a solid support. By “solid support” is meant a material that is essentially insoluble under the solvent and temperature conditions of the method comprising free chemical groups available for joining an oligonucleotide or nucleic acid. The solid support can be covalently coupled to an oligonucleotide designed to bind, either directly or indirectly, a target nucleic acid. When the target nucleic acid is an mRNA, the oligonucleotide attached to the solid support is preferably a poly-T sequence.

[0069] Skilled practitioners will appreciate that the solid support may be any material known to those of ordinary skill in the art to which a binding agent may be attached. For example, the solid support may be a test well in a microtiter plate or a nitrocellulose or other suitable membrane. Alternatively, the support may be a bead or disc, such as glass, fiberglass, latex, or a plastic material such as polystyrene or polyvinylchloride. The support may also be a magnetic particle or a fiber optic sensor, such as those disclosed, for example, in U.S. Pat. No. 5,359,681. Other exemplary solid support materials include, but are not limited to silica, polyacrylate, polyacrylamide, metal, polystyrene, latex, nitrocellulose, polypropylene, nylon or combinations thereof. In some embodiments, the solid support is capable of being attracted to a location by means of a magnetic field, such as a solid support having a magnetite core. An exemplary solid support is a particle, such as a micron- or submicron-sized bead or sphere. In some embodiments, the supports are monodisperse magnetic spheres.

[0070] Methods for immobilizing the binding agents disclosed herein in or on the surface of a solid support are known in the art. In the context of the present invention, the term “immobilization” refers to both noncovalent association, such as adsorption, and covalent attachment, which may be a direct linkage between the agent and functional groups on the support or may be a linkage by way of a cross-linking agent. Immobilization by adsorption to a well in a microtiter plate or to a membrane is preferred. In such cases, adsorption may be achieved by contacting the binding agent, in a suitable buffer, with the solid support for a suitable amount of time. The contact time varies with temperature, but is typically between about 1 hour and about 1 day. In general, contacting a well of a plastic microtiter plate (such as polystyrene or polyvinylchloride) with an amount of binding agent ranging from about 10 ng to about 10 μg, and preferably about 100 ng to about 1 μg, is sufficient to immobilize an adequate amount of binding agent.

[0071] Covalent attachment of a binding agent to a solid support may generally be achieved by first reacting the support with a bifunctional reagent that will react with both the support and a functional group, such as a hydroxyl or amino group, on the binding agent. For example, the binding agent may be covalently attached to supports having an appropriate polymer coating using benzoquinone or by condensation of an aldehyde group on the support with an amine and an active hydrogen on the binding partner (see, e.g., Pierce Immunotechnology Catalog and Handbook, A12 A13 (1991)).

[0072] In some embodiments, the present disclosure provides kits comprising one or more of the panels disclosed herein and instructions for use. For example, provided herein is an article of manufacture comprising a container and a composition of matter contained within the container, wherein the composition of matter may comprise a breast cancer polypeptide, an anti breast cancer polypeptide antibody, an oligopeptide, or a binding organic molecule, each as described herein. The article may further optionally comprise a label affixed to the container, or a package insert included with the container, that refers to the use of the composition of matter for the therapeutic treatment or diagnostic detection of breast cancer.

[0073] (1) Polynucleotides and Polynucleotide Panels

[0074] The present disclosure provides isolated breast cancer biomarker polynucleotides (e.g., one or more of the nucleic acids disclosed in Tables 2 and 3 and/or one or more of SEQ ID NOs:1-3005), polynucleotide binding agents that bind to the breast cancer biomarker polynucleotides, and panels that include the polynucleotide binding agents.

[0075] “Isolated,” as used herein, means that a polynucleotide is substantially away from other coding sequences, and that a DNA molecule does not contain large portions of unrelated coding DNA, such as large chromosomal fragments or other functional genes or polypeptide coding regions. Of course, this refers to the DNA molecule as originally isolated, and does not exclude genes or coding regions later added to the segment by the hand of man.

[0076] By “nucleotide sequence”, “nucleic acid sequence” or “polynucleotide” is meant the sequence of nitrogenous bases along a linear information-containing molecule (e.g., DNA or RNA; including cDNA and various forms of RNA such as mRNA, tRNA, hnRNA, and the like) that is capable of hydrogen-bonding with another linear information-containing molecule having a complementary base sequence. The terms are not meant to limit such information-containing molecules to polymers of nucleotides per se but are also meant to include molecular structures containing one or more nucleotide analogs or abasic subunits in the polymer. The polymers may include base subunits containing a sugar moiety or a substitute for the ribose or deoxyribose sugar moiety (e.g., 2′ halide- or methoxy-substituted pentose sugars), and may be linked by linkages other than phosphodiester bonds (e.g., phosphorothioate, methylphosphonate or peptide linkages). As will be understood by those skilled in the art, polynucleotides can include genomic sequences, extra-genomic and plasmid-encoded sequences and smaller engineered gene segments that express, or may be adapted to express, proteins, polypeptides, peptides and the like. Such segments may be naturally isolated, or modified synthetically by the hand of man.

[0077] As will also be recognized by the skilled artisan, polynucleotides may be single-stranded (coding or antisense) or double-stranded, and may be DNA (genomic, cDNA or synthetic) or RNA molecules. RNA molecules may include hnRNA molecules, which contain introns and correspond to a DNA molecule in a one-to-one manner, and mRNA molecules, which do not contain introns. Additional coding or non-coding sequences may, but need not, be present within a polynucleotide of the present invention, and a polynucleotide may, but need not, be linked to other molecules and/or support materials.

[0078] Polynucleotides can comprise some or all of a polynucleotide sequence set forth in any one of SEQ ID NOs:1-3005, the complement of some or all of a polynucleotide sequence set forth in any one of SEQ ID NOs:1-3005, and degenerate variants of a polynucleotide sequence set forth in any one of SEQ ID NOs:1-3005.

[0079] Polynucleotide variants having substantial identity to the sequences disclosed in SEQ ID NOs:1-3005 are also included, for example those comprising at least 70% sequence identity, preferably at least 75%, 80%, 85%, 90%, 95%, 96%, 97%, 98%, or 99% or higher, sequence identity compared to a polynucleotide sequence of this invention using the methods described herein, (e.g., BLAST analysis using standard parameters, as described below). One skilled in this art will recognize that these values can be appropriately adjusted to determine corresponding identity of proteins encoded by two nucleotide sequences by taking into account codon degeneracy, amino acid similarity, reading frame positioning and the like.

[0080] Polynucleotide fragments provided herein can comprise or consist of various lengths of contiguous stretches of sequence identical to or complementary to one or more of the cancer-associated polynucleotides disclosed herein, e.g., immobilized in or on the surface of a support. For example, polynucleotides can comprise or consist of at least about 10, 15, 20, 30, 40, 50, 75, 100, 150, 200, 300, 400, 500 or 1000 or more contiguous nucleotides of one or more of the sequences disclosed herein, or of the complement of the sequences, as well as all intermediate lengths there between. It will be readily understood that “intermediate lengths”, in this context, means any length between the quoted values, such as 16, 17, 18, 19, etc.; 21, 22, 23, etc.; 30, 31, 32, etc.; 50, 51, 52, 53, etc.; 100, 101, 102, 103, etc.; 150, 151, 152, 153, etc.; including all integers through 200-500; 500-1,000, and the like. A polynucleotide sequence as described herein may be extended at one or both ends by additional nucleotides not found in the native sequence. This additional sequence may consist of 1, 2, 3, 4, 5, 6, 7, 8, 9, 10, 11, 12, 13, 14, 15, 16, 17, 18, 19, or 20 nucleotides at either end of the disclosed sequence or at both ends of the disclosed sequence.

[0081] The present invention further provides oligonucleotides and compositions comprising oligonucleotides, e.g., immobilized in or on the surface of a support. By “oligonucleotide” is meant a polymeric chain of two or more chemical subunits, each subunit comprising a nucleotide base moiety, a sugar moiety, and a linking moiety that joins the subunits in a linear spacial configuration. An oligonucleotide may contain up to thousands of such subunits, but generally contains subunits in a range having a lower limit of between about 5 to about 10 subunits, and an upper limit of between about 20 to about 1,000 subunits.

[0082] In some embodiments, the oligonucleotides comprise no more than 10, 15, 20, 25, 30, 35, 40, 45, 50, 55, 60, 65, 70, 75, 80, 85, 90, 95 or 100 contiguous nucleotides of any one of the polynucleotides recited in SEQ ID NOs: 1-3005, or their complements, and may also comprise additional nucleotides unrelated to the polynucleotides recited in SEQ ID NOs: 1-3005. For example, as would be readily recognized by the skilled artisan, oligonucleotide primers and probes can also comprise additional sequence unrelated to the target nucleic acid, such as restriction endonuclease cleavage sites, linkers, and the like. This additional sequence may consist of 1, 2, 3, 4, 5, 6, 7, 8, 9, 10, 11, 12, 13, 14, 15, 16, 17, 18, 19, or 20, or more nucleotides at either end of the disclosed sequence or at both ends of the disclosed sequence. Skilled practitioners will appreciate that primers are useful in the present methods and are included in the present invention. By “primer” or “amplification primer” is meant an oligonucleotide capable of binding to a region of a target nucleic acid or its complement and promoting, either directly or indirectly, nucleic acid amplification of the target nucleic acid. Such primers can be binding agents and used to identify and/or amplify one or more of the breast cancer marker polynucleotides disclosed herein.

[0083] (2) Polypeptides and Polypeptide Panels

[0084] In some embodiments, the panels can comprise one or more of the breast cancer associated polypeptides (e.g., one or more isolated polypeptides) disclosed herein (e.g., one or more of the polypeptides encoded by the nucleic acid sequences disclosed in Tables 2 and 3 and/or SEQ ID NOs: 1-3005, and/or one or more of the polypeptides shown in SEQ ID NOs:3006-5970, or fragments thereof). Accordingly, various polypeptides are also included within the invention.

[0085] As used herein, the term “polypeptide” is used in its conventional meaning, i.e., as a sequence of amino acids. The polypeptides are not limited to a specific length of the product; thus, peptides, oligopeptides, and proteins are included within the definition of polypeptide, and such terms may be used interchangeably herein unless specifically indicated otherwise. This term also does not refer to or exclude post-expression modifications of the polypeptide, for example, glycosylations, acetylations, phosphorylations and the like, as well as other modifications known in the art, both naturally occurring and non-naturally occurring. A polypeptide may be an entire protein, or a subsequence thereof. In certain embodiments, polypeptides of interest in the context of this invention are amino acid subsequences comprising epitopes, e.g., antigenic determinants recognized by antibodies.

[0086] Particularly illustrative polypeptides of the present invention comprise those encoded by a polynucleotide sequence set forth in any one of SEQ ID NOs:1-3005. Certain other illustrative polypeptides of the invention comprise amino acid sequences as set forth in any one of SEQ ID NOs:3006-5970.

[0087] The polypeptides disclosed herein are sometimes referred to herein as “breast cancer-associated proteins”, “breast cancer-specific proteins”, “breast cancer-associated markers”, “breast cancer markers”, or “breast cancer biomarkers”, as an indication that their identification has been based at least in part upon their differential expression levels in samples from breast cancer patients as compared to samples from normal controls. Thus, these terms refer generally to a polypeptide sequence of the present invention whose expression is either lower or higher to a statistically significant degree than the level of expression in a normal control biological sample (e.g., blood sample) in a statistically significant proportion of biological samples derived from breast cancer patients, for example greater than about 20%, more preferably greater than about 30%, and most preferably greater than about 50% or more of breast cancer samples tested, as compared to normal controls, as determined using a representative assay provided herein. A breast cancer-associated polypeptide sequence of the invention, based upon its increased or decreased level of expression in samples from breast cancer patients, has particular utility both as a diagnostic marker as well as a therapeutic target, as further described herein.

[0088] In some embodiments, the polypeptides disclosed herein are immunogenic in that they react detectably within an immunoassay (such as an ELISA) with antisera from a patient with breast cancer. As would be recognized by the skilled artisan, immunogenic portions of the polypeptides disclosed herein are also encompassed by the present invention and can be included in a diagnostic/prognostic panel. An “immunogenic portion,” or polypeptide “fragment” as used herein, is a fragment of a polypeptide of the invention that itself is immunologically reactive (i.e., specifically binds) with antibodies that recognize the full-length polypeptide. Such polypeptide fragments may generally be identified using well known techniques, such as those summarized in Paul, Fundamental Immunology, pp. 243 47 (3rd ed., 1993) and references cited therein. Such techniques include screening polypeptides for the ability to react with antigen-specific antibodies or antisera.

[0089] As used herein, antisera and antibodies are “antigen-specific” if they specifically bind to an antigen (i.e., they react with the protein in an ELISA or other immunoassay, and do not react in a statistically significant manner under similar conditions with suitable control proteins). Such antisera and antibodies may be prepared using well-known techniques.

[0090] An immunogenic portion of a polypeptide of the present invention can be a fragment that reacts with antisera and/or monoclonal antibodies at a level that is not statistically significantly less than the reactivity of the full-length polypeptide (e.g., in an ELISA or similar immunoassay). In this manner, fragments of a breast cancer marker polypeptide as disclosed herein can be used in lieu of, or in addition to, a full-length polypeptide in any number of methods for detecting breast cancer. The level of immunogenic activity of the immunogenic portion may be, e.g., at least about 50%, e.g., preferably at least about 70% and most preferably greater than about 90% of the immunogenicity for the full-length polypeptide. In some instances, polypeptide fragments useful in the present invention will be identified that have a level of reactivity greater than that of the corresponding full-length polypeptide, e.g., having greater than about 100% or 150% or more immunogenic activity.

[0091] Polypeptide fragments can include at least about 5, 10, 15, 20, 25, 30, 35, 40, 45, 50, 55, 60, 65, 70, 75, 80, 85, 90, 95 or 100 contiguous amino acids, or more, including all intermediate lengths, of a cancer-associated polypeptide set forth herein, such as those set forth in SEQ ID NOs:3006-5970, or those encoded by a polynucleotide sequence set forth in a sequence of SEQ ID NOs: 1-3005. In certain embodiments, the present invention provides polypeptide fragments that consist of no more than about 5, 10, 15, 20, 25, 30, 35, 40, 45, 50, 55, 60, 65, 70, 75, 80, 85, 90, 95 or 100 contiguous amino acids, including all intermediate lengths, of a cancer-associated polypeptide set forth herein, such as those set forth in SEQ ID NOs:3006-5970, or those encoded by a polynucleotide sequence set forth in a sequence of SEQ ID NOs: 1-3005 and may also comprise additional amino acids unrelated to the polypeptides recited in SEQ ID NOs:3006-5970. For example, as would be readily recognized by the skilled artisan, polypeptide fragments such as antibody epitopes can also comprise additional sequence for use in purification or attachment to solid surfaces as described herein (e.g., His tags or other similar tags). This additional sequence may consist of 1, 2, 3, 4, 5, 6, 7, 8, 9, 10, 11, 12, 13, 14, 15, 16, 17, 18, 19, or 20, or more amino acids at either end of the fragment of interest or at both ends of the fragment of interest.

[0092] Any of the polypeptides can be recombinant and, e.g., comprise one or more fragments that are specifically recognized by antibodies that are immunologically reactive with one or more cancer-associated polypeptides described herein.

[0093] In another embodiment, the present invention provides variants of the polypeptide compositions described herein, e.g., in or on the surface of a support. Polypeptide variants will typically exhibit at least about 70%, 75%, 80%, 85%, 90%, 91%, 92%, 93%, 94%, 95%, 96%, 97%, 98%, or 99% or more identity (determined as described below), along its length, to a polypeptide sequences set forth herein. The polypeptide variants are immunologically reactive with an antibody that reacts with the corresponding non-variant full-length cancer-associated polypeptide as set forth in SEQ ID NOs:3006-5970. In certain embodiments, the polypeptide variants exhibit a level of immunogenic activity of at least about 50%, e.g., at least about 70%, and most preferably at least about 90% or more of that exhibited by a non-variant polypeptide sequence specifically set forth herein.

[0094] A polypeptide “variant,” as the term is used herein, is a polypeptide that typically differs from a polypeptide specifically disclosed herein in one or more substitutions, deletions, additions and/or insertions. Such variants may be naturally occurring or may be synthetically generated, for example, by modifying one or more of the polypeptide sequences described herein and evaluating their immunogenic activity using any of a number of techniques well known in the art.

[0095] For example, certain illustrative variants of the polypeptides of the invention include those in which one or more portions, such as an N terminal leader sequence or transmembrane domain, have been removed. Other illustrative variants include variants in which a small portion (e.g., 1-30 amino acids, e.g., 5-15 amino acids) has been removed from the N and/or C terminal of the mature protein.

[0096] In some instances, a variant will contain conservative substitutions. A “conservative substitution” is one in which an amino acid is substituted for another amino acid that has similar properties, such that one skilled in the art of peptide chemistry would expect the secondary structure and hydropathic nature of the polypeptide to be substantially unchanged. Amino acid substitutions are generally based on the relative similarity of the amino acid side-chain substituents, for example, their hydrophobicity, hydrophilicity, charge, size, and the like. Exemplary substitutions that take various characteristics into consideration are well known to those of skill in the art and include: arginine and lysine; glutamate and aspartate; serine and threonine; glutamine and asparagine; and valine, leucine and isoleucine.

[0097] Polypeptides may comprise a signal (or leader) sequence at the N terminal end of the protein, which co translationally or post-translationally directs transfer of the protein. The polypeptide may also be conjugated to a linker or other sequence for ease of synthesis, purification or identification of the polypeptide (e.g., poly-His), or to enhance binding of the polypeptide to a solid support. For example, a polypeptide may be conjugated to an immunoglobulin Fc region.

[0098] Polypeptides of the invention are prepared using any of a variety of well known synthetic and/or recombinant techniques. Polypeptides, portions and other variants generally less than about 150 amino acids can be generated by synthetic means. Techniques for preparing polypeptides are well known to those of ordinary skill in the art (see, e.g., J. Am. Chem. Soc. 85:2149-46 (1963)).

[0099] In general, polypeptide compositions (including fusion polypeptides) of the invention are isolated. An “isolated” polypeptide is one that is removed from its original environment. For example, a naturally-occurring protein or polypeptide is isolated if it is separated from some or all of the coexisting materials in the natural system. Preferably, such polypeptides are also purified, e.g., are at least about 90% pure, more preferably at least about 95% pure and most preferably at least about 99% pure.

[0100] When comparing polypeptide or polynucleotide sequences, two sequences are said to be “identical” if the nucleotide or amino acid sequence in the two sequences is the same when aligned for maximum correspondence, as described below. Comparisons between two sequences are typically performed by comparing the sequences over a comparison window to identify and compare local regions of sequence similarity. A “comparison window” as used herein, refers to a segment of at least about 20 contiguous positions, usually 30 to about 75, 40 to about 50, in which a sequence may be compared to a reference sequence of the same number of contiguous positions after the two sequences are optimally aligned.

[0101] Optimal alignment of sequences for comparison may be conducted using the BLAST and BLAST 2.0 algorithms, which are described in Altschul et al., Nucl. Acids Res. 25:3389-3402 (1977), and Altschul et al., J. Mol. Biol. 215:403-10 (1990), respectively. BLAST and BLAST 2.0 can be used, for example, with the parameters described herein, to determine percent sequence identity for the polynucleotides and polypeptides of the invention. Software for performing BLAST analyses is publicly available through the National Center for Biotechnology Information. For amino acid sequences, a scoring matrix can be used to calculate the cumulative score. Extension of the word hits in each direction are halted when: the cumulative alignment score falls off by the quantity X from its maximum achieved value; the cumulative score goes to zero or below, due to the accumulation of one or more negative-scoring residue alignments; or the end of either sequence is reached. The BLAST algorithm parameters W, T and X determine the sensitivity and speed of the alignment.

[0102] In one approach, the “percentage of sequence identity” is determined by comparing two optimally aligned sequences over a window of comparison of at least 20 positions, wherein the portion of the polypeptide or polynucleotide sequence in the comparison window may comprise additions or deletions (i.e., gaps) of 20 percent or less, usually 5 to 15 percent, or 10 to 12 percent, as compared to the reference sequences (which does not comprise additions or deletions) for optimal alignment of the two sequences. The percentage is calculated by determining the number of positions at which the identical amino acid or nucleic acid residue occurs in both sequences to yield the number of matched positions, dividing the number of matched positions by the total number of positions in the reference sequence (i.e., the window size) and multiplying the results by 100 to yield the percentage of sequence identity.

[0103] (3) Antibodies and Antibody Panels

[0104] In some embodiments, a panel can comprise one or more antibodies (e.g., isolated antibodies) or antigen binding fragments thereof, e.g., that bind specifically to one or more of the breast cancer associated polypeptides disclosed herein (e.g., one or more of the polypeptides encoded by the nucleic acid sequences disclosed in Tables 2 and 3 and/or SEQ ID NOs: 1-3005, and/or one or more of SEQ ID NOs:3006-5970).

[0105] An antibody or antigen-binding fragment thereof specifically binds to a polypeptide (e.g., a polypeptide disclosed herein) if it reacts or interacts at a detectable level (e.g., detectable via any art recognized method (e.g., an enzyme-linked immunosorbent assay (ELISA)) with the polypeptide but does not react with a biologically unrelated polypeptide in any statistically significant fashion under the same or similar conditions. Specific binding, as used in this context, generally refers to the non-covalent interactions of the type that occur between an immunoglobulin molecule and an antigen for which the immunoglobulin is specific. The strength or affinity of immunological binding interactions can be expressed in terms of the dissociation constant (Kd) of the interaction, wherein a smaller Kd represents a greater affinity. Immunological binding properties of selected polypeptides can be quantified using methods well known in the art, see, e.g., Davies et al., Annual Rev. Biochem. 59:439-73 (1990).

[0106] Fragments of antibodies may be used and are included within the present invention. An “antigen-binding site” or “binding portion” or “antigen binding fragment” of an antibody refers to the part of the immunoglobulin molecule that participates in antigen binding. Such regions are known in the art and can include, for example, a fragment antigen binding (Fab) region or the paratope thereof, single chain Fv fragments, and one or more complementarity determining regions (CRRs (e.g., one or more of CDR1, CDR2, and/or CDR3) of an antibody that binds specifically to one or more of the polypeptides disclosed herein,

[0107] In some embodiments, antibodies or other binding agents that bind to a cancer-associated marker described herein will generate a signal indicating the presence of a cancer in at least about 20%, 30% or 50% of samples and/or patients with the disease. As noted elsewhere herein, the signal indicating the presence of a cancer may be lower or higher than a predetermined cutoff value (as determined using appropriate controls), depending on the breast cancer marker as some breast cancer genes are overexpressed in breast cancer samples as compared to controls while others are underexpressed as compared to controls.

[0108] Antibodies and antigen binding fragments can be prepared by any of a variety of techniques known to those of ordinary skill in the art (see, e.g., Harlow et al., Antibodies: A Laboratory Manual (1988); Ausubel et al., Current Protocols in Molecular Biology (2001 and later updates thereto)). Monoclonal antibodies specific for a polypeptide of interest may be prepared, for example, using the technique of Kohler et al., Eur. J. Immunol. 6:511-19 (1976). Humanized antibodies can also be prepared using art known methods, see, e.g., Winter et al., Nature 349:293-99 (1991); Lobuglio et al., Proc. Nat. Acad. Sci. USA 86:4220-24 (1989); Shaw et al., J. Immunol. 138:4534-38 (1987); and Brown et al., Cancer Res. 47:3577-83 (1987)), Riechmann et al., Nature 332:323-27 (1988); Verhoeyen et al., Science 239:1534-36 (1988); Jones et al., Nature 321:522-25 (1986), and European Patent No. 0 519 596).

[0109] Methods for producing antibodies can include the use of polypeptides (e.g., breast cancer marker polypeptide), produced by either recombinant or synthetic approaches, as immunogens, see, e.g., Sambrook et al., Molecular Cloning, A Laboratory Manual (1989); and, Current Protocols in Molecular Biology (Ausubel et al., eds., 2001 and later updates thereto) and Caruthers et al., Nucl. Acids Res. Symp. Ser. 215-223 (1980); Horn et al., Nucl. Acids Res. Symp. Ser. 225-232 (1980); Roberge et al., Science 269:202-04 (1995). In some instances, newly synthesized polypeptides (e.g., breast cancer marker polypeptide) can be purified (e.g., substantially purified), e.g., by preparative HPLC (e.g., Creighton, T., Proteins, Structures and Molecular Principles (1983)) or other comparable techniques available in the art, e.g., prior to raising an antibody against it. The composition of the synthetic peptides can also be confirmed by amino acid analysis or sequencing (e.g., the Edman degradation procedure). Additionally, the amino acid sequence of a polypeptide, or any part thereof, may be altered during direct synthesis and/or combined using chemical methods with sequences from other proteins, or any part thereof, to produce a variant polypeptide. Such peptides can then be used to generate and antibody or antigen binding fragment that binds specifically to the polypeptide.

[0110] Skilled practitioners will appreciate that any antibody format may be useful in the invention. For example, a number of “humanized” antibody molecules comprising an antigen-binding site derived from a non-human immunoglobulin have been described, including chimeric antibodies having rodent V regions and their associated CDRs fused to human constant domains (Winter et al., Nature 349:293-99 (1991); Lobuglio et al., Proc. Nat. Acad. Sci. USA 86:4220-24 (1989); Shaw et al., J Immunol. 138:4534-38 (1987); and Brown et al., Cancer Res. 47:3577-83 (1987)), rodent CDRs grafted into a human supporting FR prior to fusion with an appropriate human antibody constant domain (Riechmann et al., Nature 332:323-27 (1988); Verhoeyen et al., Science 239:1534-36 (1988); and Jones et al., Nature 321:522-25 (1986)), and rodent CDRs supported by recombinantly veneered rodent FRs (European Patent No. 0 519 596). These “humanized” molecules are designed to minimize unwanted immunological response toward rodent anti-human antibody molecules and are useful in the present invention.

[0111] In some instances, pluralities of binding agents, and panels including same, can include any combination of polynucleotides, polypeptides, antibodies, and/or other binding agents disclosed herein.

### (B) Methods of Use

[0112] The present disclosure provides methods for detecting breast cancer (e.g., the presence of one or more breast cancer cells) in a subject. For example, the present disclosure provides methods for detecting an increased risk for developing breast cancer in a subject (e.g., wherein the subject does not have breast cancer but has increased odds for developing breast cancer due, e.g., to environmental, physiological, and/or pharmacological factors known to be associated with the development of breast cancer and/or due to genetics). Also provided are methods of monitoring progression of, or monitoring therapeutic regimens for the treatment of, breast cancer.

[0113] In some embodiments, the methods provided herein include (1) contacting a biological sample (e.g., a biological sample obtained from a subject in need of testing for breast cancer) with one or more panels provided herein; (2) detecting (e.g., detecting and evaluating) the level of one or more of the breast cancer markers detected by the panel; and (3) comparing the level of the breast cancer marker to the level of the same breast cancer marker measured at the same time or previously (e.g., a previously recorded level) in a sample obtained from a subject that does not have breast cancer (e.g., a control).

[0114] In other embodiments, the presence or absence of a cancer in a patient may be determined by (a) contacting a biological sample, e.g., obtained from a patient, with one or more (e.g., a plurality of) binding agents (e.g., binding agents that are polynucleotides, polypeptides, or antibodies) specific for one or more of the breast cancer markers selected from the group consisting of the markers provided in the Tables herein (e.g., Table 2) and set forth in SEQ ID NOs:1-5970; (b) detecting in the sample a level of breast cancer biomarker polynucleotide or polypeptide that binds to each binding agent (generally via the amount of binding agent that binds to the breast cancer marker present in the sample); and, (c) comparing the level of polynucleotide or polypeptide with a predetermined cut-off value, wherein a level of polynucleotide or polypeptide present in a biological sample that is above or below the predetermined cut-off value (depending on the particular marker) for one or more marker is indicative of the presence of cancer cells in the biological sample.

[0115] In some embodiments, multiple breast cancer sequences described herein can be used in combination in a “complementary” fashion. For example, two or more of the breast cancer markers disclosed herein (e.g., two or more of the breast cancer markers set forth Tables 2 and 3 and/or one of SEQ ID NOs: 1-5970) can be detected and their levels evaluated (e.g., compared to a control), e.g., simultaneously.

[0116] The present disclosure provides a variety of methods for the detection of the breast cancer markers disclosed herein. Furthermore, the breast cancer sequences of the invention may be used in the detection of essentially any breast cancer type where differential expression of one or more of the breast cancer markers disclosed herein are observed or suspected.

[0117] The present invention also provides, within other aspects, methods for monitoring the progression of breast cancer in a patient. Such methods comprise detecting the level of expression of any one or more of the breast cancer markers provided herein in a biological sample obtained from a patient at a first point in time; and then detecting the level of expression of any one or more of the breast cancer markers provided herein using a biological sample obtained from the patient at a subsequent point in time; and comparing the level of expression from the two time points and therefrom monitoring the progression of the cancer in the patient. Similar methods can be used to monitor progression of cancer in response to a variety of treatments. Any of a variety of methods for detecting the level of expression of any one or more of the breast cancer markers described herein can be used, such as described further herein and known in the art.

[0118] In an exemplary embodiment, the methods can include the use of one or more binding agents (e.g., one or more polynucleotides, one or more polypeptides, and/or one or more antibodies) immobilized on a solid support to bind to and remove a polynucleotide and/or a polypeptide from a sample. The bound polynucleotide and/or polypeptide may then be detected using a detection reagent that contains a reporter group and specifically binds to the binding agent/polypeptide complex. Exemplary methods for the detection of polynucleotides and polypeptides are provided below. In the case of the polypeptide, such reagents may comprise, for example, a binding agent that specifically binds to the polypeptide or an antibody or other agent that specifically binds to the binding agent, such as an anti-immunoglobulin, protein G, protein A or a lectin. Alternatively, a competitive assay may be utilized in which a polypeptide is labeled with a reporter group and allowed to bind to the immobilized binding agent after incubation of the binding agent with the sample. The extent to which components of the sample inhibit the binding of the labeled polypeptide to the binding agent is indicative of the reactivity of the sample with the immobilized binding agent. Suitable polypeptides for use within such assays include full length proteins and polypeptide portions thereof to which the binding agent binds.

[0119] As noted above, in some embodiments, multiple breast cancer sequences described herein can be used in combination in a “complementary” fashion to detect breast cancer. Thus, in certain embodiments, any combination of one or more of the breast cancer markers as described herein can be used in any of a variety of diagnostic assays as described herein to detect breast cancer. Thus, in one embodiment 2, 3, 4, 5, 6, 7, 8, 9, 10, 11, 12, 13, 14, 15, 16, 17, 18, 19, or 20 of the cancer-associated markers described herein can be detected simultaneously using the panels and methods to detect breast cancer. In a further embodiment 21, 22, 23, 24, 25, 26, 27, 28, 29, 30, 31, 32, 33, 34, 35, 36, 37, 38, 39, or 40 of the cancer-associated markers described herein can be detected simultaneously using the panels and methods to detect breast cancer. In a further embodiment 45, 50, 55, 60, 65, 70, 75, 80, 85, 90, 95, 100 or more of the cancer-associated markers described herein can be detected simultaneously using the panels and methods to detect breast cancer. In certain embodiments all of the cancer-associated markers described herein can be detected simultaneously using the panels and methods to detect breast cancer. Using such an approach, the breast cancer markers described herein can be detected in combination with any known cancer markers in a complementary fashion to detect breast cancer. In certain embodiments, use of multiple markers may increase the sensitivity and/or specificity of cancers detected. Illustrative cancer markers that can be used in combination with the cancer markers disclosed herein include, but are not limited to Her2/Neu, BRCA1, BRCA2, MUC1, and mammaglobin.

[0120] Other methods of using the present compositions and panels includes the use for evaluation of test compounds in a biological system to monitor changes in the system. As one of skill in the art could readily appreciate, when observing a breast cancer related expression profile, a test compound that changes the profile to be more similar to a normal profile is of significant interest as a drug lead. Accordingly, the present invention also provides a method for optimizing drug/test compound leads by treating an animal, cell, or tissue with a compound and observing whether the breast cancer marker expression profile changes to deviate from the diseased profile toward a more normal profile.

[0121] (1) Subjects and Samples

[0122] Methods of detecting breast cancer in a subject can include obtaining a biological sample from the subject. Examples of subjects include humans and non-humans, e.g., monkeys, apes, dogs, cats, mice, rats, fish, zebra fish, birds, horses, pigs, cows, sheep, goats, chickens, ducks, donkeys, turkeys, peacocks, chinchillas, ferrets, gerbils, rabbits, guinea pigs, hamsters and transgenic species thereof. Further subjects contemplated herein include, but are not limited to, reptiles and amphibians, e.g., lizards, snakes, turtles, frogs, toads, salamanders, and newts and transgenic species thereof.

[0123] A biological sample can be obtained from a subject immediately prior (e.g., within 12 hours) to testing or optionally stored (e.g., frozen). Essentially any biological sample suspected of containing breast cancer markers, antibodies to such cancer-associated markers and/or cancer cells expressing such markers or antibodies may be used in the methods. For example, the biological sample can be a tissue sample, such as a tissue biopsy sample, known or suspected of containing cancer cells. The biological sample may be derived from a tissue suspected of being the site of origin of a primary tumor. Alternatively, the biological sample may be derived from a tissue or other biological sample distinct from the suspected site of origin of a primary tumor in order to detect the presence of metastatic cancer cells in the tissue or sample that have escaped the site of origin of the primary tumor. In certain embodiments, the biological sample is a tissue biopsy sample derived from breast tissue. In other embodiments, the biological sample tested is selected from the group consisting of a peripheral blood sample, biopsy sample, lavage sample, sputum sample, serum sample, lymph node sample, bone marrow sample, urine sample, and pleural effusion sample.

[0124] (2) Use of Nucleic Acid Panels

[0125] The present disclosure provides methods for detecting breast cancer using nucleic acid panels. For example, a biological sample can be contacted with a panel comprising one or more polynucleotide binding agents disclosed herein. The levels of one or more of the breast cancer markers detected can then be evaluated according to the methods disclosed below, e.g., with or without the use of nucleic acid amplification methods.

[0126] Skilled practitioners will appreciate that in the methods described herein, a measurement of gene expression can be automated, e.g., using a device or system capable of doing so. For example, a system that can carry out multiplexed measurement of gene expression can be used, e.g., providing digital readouts of the relative abundance of hundreds of mRNA species simultaneously.

[0127] (i) Amplification Methods

[0128] In some embodiments, nucleic acid amplification methods can be used to detect a breast cancer marker, e.g., wherein the breast cancer marker is a polynucleotide. For example, the oligonucleotide primers and probes of the present invention may be used in amplification and detection methods that use nucleic acid substrates isolated by any of a variety of well-known and established methodologies (e.g., Sambrook et al., Molecular Cloning, A laboratory Manual, pp. 7.37-7.57 (2nd ed., 1989); Lin et al., in Diagnostic Molecular Microbiology, Principles and Applications, pp. 605-16 (Persing et al., eds. (1993); Ausubel et al., Current Protocols in Molecular Biology (2001 and later updates thereto)). In one illustrative example, the target mRNA may be prepared by the following procedure to yield mRNA suitable for use in amplification. Briefly, cells in a biological sample (e.g., peripheral blood or bone marrow cells) are lysed by contacting the cell suspension with a lysing solution containing at least about 150 mM of a soluble salt, such as lithium halide, a chelating agent and a non-ionic detergent in an effective amount to lyse the cellular cytoplasmic membrane without causing substantial release of nuclear DNA or RNA. The cell suspension and lysing solution are mixed at a ratio of about 1:1 to 1:3. The detergent concentration in the lysing solution is between about 0.5-1.5% (v/v). Any of a variety of known non-ionic detergents are effective in the lysing solution (e.g., TRITON™-type, TWEEN™-type and NP-type); typically, the lysing solution contains an octylphenoxy polyethoxyethanol detergent, preferably 1% TRITON™ X-102. This procedure may work advantageously with biological samples that contain cell suspensions (e.g., blood and bone marrow), but it works equally well on other tissues if the cells are separated using standard mincing, screening and/or proteolysis methods to separate cells individually or into small clumps. After cell lysis, the released total RNA is stable and may be stored at room temperature for at least 2 hours without significant RNA degradation without additional RNase inhibitors. Total RNA may be used in amplification without further purification or mRNA may be isolated using standard methods generally dependent on affinity binding to the poly-A portion of mRNA.

[0129] mRNA isolation can employ capture particles consisting essentially of poly-dT oligonucleotides attached to insoluble particles. The capture particles are added to the above-described lysis mixture, the poly-dT moieties annealed to the poly-A mRNA, and the particles separated physically from the mixture. Generally, superparamagnetic particles may be used and separated by applying a magnetic field to the outside of the container. Preferably, a suspension of about 300 μg of particles (in a standard phosphate buffered saline (PBS), pH 7.4, of 140 mM NaCl) having either dT14 or dT30 linked at a density of about 1 to 100 pmoles per mg (preferably 10-100 pmols/mg, more preferably 10-50 pmols/mg) are added to about 1 mL of lysis mixture. Any superparamagnetic particles may be used, although typically the particles are a magnetite core coated with latex or silica (e.g., commercially available from Serodyn or Dynal) to which poly-dT oligonucleotides are attached using standard procedures (Lund et al., Nucl. Acids Res. 16:10861-80 (1988)). The lysis mixture containing the particles is gently mixed and incubated at about 22-42° C. for about 30 minutes, when a magnetic field is applied to the outside of the tube to separate the particles with attached mRNA from the mixture and the supernatant is removed. The particles are washed one or more times, generally three, using standard resuspension methods and magnetic separation as described above. Then, the particles are suspended in a buffer solution and can be used immediately in amplification or stored frozen.

[0130] A number of parameters may be varied without substantially affecting the sample preparation. For example, the number of particle washing steps may be varied or the particles may be separated from the supernatant by other means (e.g., filtration, precipitation, centrifugation). The solid support may have nucleic acid capture probes affixed thereto that are complementary to the specific target sequence or any particle or solid support that non-specifically binds the target nucleic acid may be used (e.g., polycationic supports as described, for example, in U.S. Pat. No. 5,599,667). For amplification, the isolated RNA is released from the capture particles using a standard low salt elution process or amplified while retained on the particles by using primers that bind to regions of the RNA not involved in base pairing with the poly-dT or in other interactions with the solid-phase matrix. The exact volumes and proportions described above are not critical and may be varied so long as significant release of nuclear material does not occur. Vortex mixing is preferred for small-scale preparations but other mixing procedures may be substituted. It is important, however, that samples derived from biological tissue be treated to prevent coagulation and that the ionic strength of the lysing solution be at least about 150 mM, preferably 150 mM to 1 M, because lower ionic strengths lead to nuclear material contamination (e.g., DNA) that increases viscosity and may interfere with amplification and/or detection steps to produce false positives. Lithium salts are preferred in the lysing solution to prevent RNA degradation, although other soluble salts (e.g., NaCl) combined with one or more known RNase inhibitors would be equally effective.

[0131] By “nucleic acid amplification conditions” is meant environmental conditions, including salt concentration, temperature, the presence or absence of temperature cycling, the presence of a nucleic acid polymerase, nucleoside triphosphates, and cofactors, that are sufficient to permit the production of multiple copies of a target nucleic acid or its complementary strand using a nucleic acid amplification method.

[0132] By “amplification” or “nucleic acid amplification” is meant production of multiple copies of a target nucleic acid that contains at least a portion of the intended specific target nucleic acid sequence (e.g., those provided in SEQ ID NOs:1-3005). The multiple copies may be referred to as amplicons or amplification products. In certain embodiments, the amplified target contains less than the complete target gene sequence (introns and exons) or an expressed target gene sequence (spliced transcript of exons and flanking untranslated sequences). For example, specific amplicons may be produced by amplifying a portion of the target polynucleotide by using amplification primers that hybridize to, and initiate polymerization from, internal positions of the target polynucleotide. The amplified portion may contain a detectable target sequence that may be detected using any of a variety of well-known methods. Detection may take place during amplification of a target sequence.

[0133] As discussed above, the present invention also provides oligonucleotide primers. Skilled practitioners will appreciate that appropriate primers can be designed using the sequences provided herein. In most cases, a primer will have a free 3′ end that can be extended by a nucleic acid polymerase. In certain embodiments, the 3′ end of a promoter-primer, or a subpopulation of such promoter-primers, may be modified to block or reduce primer extension. All amplification primers include a base sequence capable of hybridizing via complementary base interactions to at least one strand of the target nucleic acid or a strand that is complementary to the target sequence. For example, in PCR, amplification primers anneal to opposite strands of a double-stranded target DNA that has been denatured. The primers are extended by a thermostable DNA polymerase to produce double-stranded DNA products, which are then denatured with heat, cooled and annealed to amplification primers. Multiple cycles of the foregoing steps (e.g., about 20 to about 50 thermic cycles) exponentially amplifies the double-stranded target DNA.

[0134] A “target-binding sequence” of an amplification primer is the portion that determines target specificity because that portion is capable of annealing to the target nucleic acid strand or its complementary strand but does not detectably anneal to non-target nucleic acid strands under the same conditions. The complementary target sequence to which the target-binding sequence hybridizes is referred to as a primer-binding sequence. For primers or amplification methods that do not require additional functional sequences in the primer (e.g., PCR amplification), the primer sequence consists essentially of a target-binding sequence, whereas other methods (e.g., TMA or SDA) include additional specialized sequences adjacent to the target-binding sequence (e.g., an RNA polymerase promoter sequence adjacent to a target-binding sequence in a promoter-primer or a restriction endonuclease recognition sequence for an SDA primer). It will be appreciated by those skilled in the art that all of the primer and probe sequences of the present invention may be synthesized using standard in vitro synthetic methods. Also, it will be appreciated that those skilled in the art could modify primer sequences disclosed herein using routine methods to add additional specialized sequences (e.g., promoter or restriction endonuclease recognition sequences, linker sequences, and the like) to make primers suitable for use in a variety of amplification methods. Similarly, promoter-primer sequences described herein can be modified by removing the promoter sequences to produce amplification primers that are essentially target-binding sequences suitable for amplification procedures that do not use these additional functional sequences.

[0135] By “target sequence” is meant the nucleotide base sequence of a nucleic acid strand, at least a portion of which is capable of being detected using primers and/or probes in the methods as described herein, such as a labeled oligonucleotide probe. Primers and probes bind to a portion of a target sequence, which includes either complementary strand when the target sequence is a double-stranded nucleic acid.

[0136] By “equivalent RNA” is meant a ribonucleic acid (RNA) having the same nucleotide base sequence as a deoxyribonucleic acid (DNA) with the appropriate U for T substitution(s). Similarly, an “equivalent DNA” is a DNA having the same nucleotide base sequence as an RNA with the appropriate T for U substitution(s). It will be appreciated by those skilled in the art that the terms “nucleic acid” and “oligonucleotide” refer to molecular structures having either a DNA or RNA base sequence or a synthetic combination of DNA and RNA base sequences, including analogs thereof, which include “abasic” residues.

[0137] The term “specific for” in the context of oligonucleotide primers and probes, is a term of art well understood by the skilled artisan to refer to a particular primer or probe capable of annealing/hybridizing/binding to a target nucleic acid or its complement but which primer or probe does not anneal/hybridize/bind to non-target nucleic acid sequences under the same conditions in a statistically significant or detectable manner. Thus, for example, in the setting of an amplification technique, a primer, primer set (e.g., a primer pair), or probe that is specific for a target nucleic acid of interest would amplify the target nucleic acid of interest but would not detectably amplify sequences that are not of interest. Note that a primer pair generally for the purposes of amplification comprises a first primer and a second primer wherein the first and second primers specifically hybridize to opposite strands (e.g., sense/antisense, polynucleotide/complement thereof) of a target polynucleotide. Note that in certain embodiments, a primer or probe can be “specific for” a group of related sequences in that the primer or probe will anneal/hybridize/bind to several related sequences under the same conditions but will not anneal/hybridize/bind to non-target nucleic acid sequences that are not related to the sequences of interest. In this regard, the primer or probe is usually designed to anneal/hybridize/bind to a region of the nucleic acid sequence that is conserved among the related sequences but differs from other sequences not of interest. As would be recognized by the skilled artisan, primers and probes that are specific for a particular target nucleic acid sequence or sequences of interest can be designed using any of a variety of computer programs available in the art (see, e.g., Methods Mol Biol. 192:19-29 (2002)) or can be designed by eye by comparing the nucleic acid sequence of interest to other relevant known sequences, e.g., those described herein. In certain embodiments, the conditions under which a primer or probe is specific for a target nucleic acid of interest can be routinely optimized by changing parameters of the reaction conditions. For example, in PCR, a variety of parameters can be changed, such as annealing or extension temperature, concentration of primer and/or probe, magnesium concentration, the use of “hot start” conditions such as wax beads or specifically modified polymerase enzymes, addition of formamide, DMSO or other similar compounds. In other hybridization methods, conditions can similarly be routinely optimized by the skilled artisan using techniques known in the art.

[0138] Methods for amplifying nucleic acids include, but are not limited to, for example the polymerase chain reaction (PCR) and reverse transcription PCR (RT-PCR) (see e.g., U.S. Pat. Nos. 4,683,195; 4,683,202; 4,800,159; 4,965,188), ligase chain reaction (LCR) (see, e.g., Weiss, Science 254:1292-93 (1991)), strand displacement amplification (SDA) (see e.g., Walker et al., Proc. Natl. Acad. Sci. USA 89:392-396 (1992); U.S. Pat. Nos. 5,270,184 and 5,455,166), Thermophilic SDA (tSDA) (see e.g., European Pat. No. 0 684 315) and methods described in U.S. Pat. No. 5,130,238; Lizardi et al., BioTechnol. 6:1197-1202 (1988); Kwoh et al., Proc. Natl. Acad. Sci. USA 86:1173-77 (1989); Guatelli et al., Proc. Natl. Acad. Sci. USA 87:1874-78 (1990); U.S. Pat. Nos. 5,480,784; 5,399,491; US Publication No. 2006/46265.

[0139] In some embodiments, the methods include the use of TMA, which employs an RNA polymerase to produce multiple RNA transcripts of a target region (see, e.g., U.S. Pat. Nos. 5,480,784; 5,399,491 and US Publication No. 2006/46265).

[0140] The one or more polynucleotide breast cancer markers detected by the methods described above can then be observed (e.g., qualitatively, semi-quantitatively, or quantitatively), and optionally compared to a control or reference value, using methods that are known in the art (e.g., electrophoresis and/or RT-PCR).

[0141] By “detecting” an amplification product is meant any of a variety of methods for determining the presence of an amplified nucleic acid, such as, for example, hybridizing a labeled probe to a portion of the amplified product. A labeled probe is an oligonucleotide that specifically binds to another sequence and contains a detectable group that may be, for example, a fluorescent moiety, chemiluminescent moiety, radioisotope, biotin, avidin, enzyme, enzyme substrate, or other reactive group. In certain embodiments, a labeled probe includes an acridinium ester (AE) moiety that can be detected chemiluminescently under appropriate conditions (as described, e.g., in U.S. Pat. No. 5,283,174). Other well-known detection techniques include, for example, gel filtration, gel electrophoresis and visualization of the amplicons, and High Performance Liquid Chromatography (HPLC). In certain embodiments, for example using real-time TMA or real-time PCR, the level of amplified product is detected as the product accumulates. The detecting step may either be qualitative and/or quantitative, although in some embodiments quantitative detection of amplicons may be preferred, as the level of gene expression may be indicative of the degree of metastasis, recurrence of cancer and/or responsiveness to therapy.

[0142] In certain embodiments, the methods of the invention detect the expression of mRNA of any one or more of the breast cancer markers in biological samples. Expression of the breast cancer sequences of the invention may be detected at the mRNA level using methodologies well-known and established in the art, including, for example, in situ and in vitro hybridization, and/or any of a variety of nucleic acid amplification methods, as further described herein.

[0143] In some embodiments, methods for detecting (e.g., and optionally purifying) a target breast cancer marker polynucleotide can include capturing a target polynucleotide on a solid support. The solid support retains the target polynucleotide during one or more washing steps of a target polynucleotide purification procedure. One technique involves capture of the target polynucleotide by a polynucleotide fixed to a solid support and hybridization of a detection probe to the captured target polynucleotide (e.g., U.S. Pat. No. 4,486,539). Detection probes not hybridized to the target polynucleotide are readily washed away from the solid support. Thus, remaining label is associated with the target polynucleotide initially present in the sample. Another technique uses a mediator polynucleotide that hybridizes to both a target polynucleotide and a polynucleotide fixed to a solid support such that the mediator polynucleotide joins the target polynucleotide to the solid support to produce a bound target (e.g., U.S. Pat. No. 4,751,177). A labeled probe can be hybridized to the bound target and unbound labeled probe can be washed away from the solid support.

[0144] (3) Use of Polypeptide and Antibody Panels

[0145] The present disclosure provides methods for detecting breast cancer using polypeptide panels and antibody panels. For example, a biological sample can be contacted with a panel comprising one or more polypeptide binding agents disclosed herein. In some embodiments, the polypeptide binding agents can be used to detect polypeptide breast cancer markers in the biological sample. Alternatively or in addition, the polypeptide binding agents can be used to detect antibodies directed against breast cancer markers in the biological sample. The detection of such antibodies specific for breast cancer polypeptides may be indicative of the presence of cancer in the patient from which the biological sample was derived. In other embodiments, a biological sample can be contacted with a panel comprising one or more antibody binding agents disclosed herein.

[0146] In one illustrative example, a biological sample is contacted with a solid phase to which one or more breast cancer polypeptides, such as recombinant or synthetic polypeptides comprising an amino acid sequence provided in any one of SEQ ID NOs:3006-5970, or portions thereof, have been attached. In another embodiment, the cancer-associated polypeptides used in this aspect of the invention comprise two or more polypeptides, or portions thereof, selected from the group consisting of SEQ ID NOs:3006-5970 or polypeptides encoded by the polynucleotides set forth in SEQ ID NOs:1-3005. In one illustrative embodiment, the biological sample tested according to this aspect of the invention is a peripheral blood sample. A biological sample is generally contacted with the polypeptides for a time and under conditions sufficient to form detectable antigen/antibody complexes. Indicator reagents may be used to facilitate detection, depending upon the assay system chosen. In another embodiment, a biological sample is contacted with a solid phase to which a recombinant or synthetic polypeptide is attached and is also contacted with a monoclonal or polyclonal antibody specific for the polypeptide, which preferably has been labeled with an indicator reagent. After incubation for a time and under conditions sufficient for antibody/antigen complexes to form, the solid phase is separated from the free phase and the label is detected in either the solid or free phase as an indication of the presence of antibodies. Other assay formats utilizing recombinant and/or synthetic polypeptides for the detection of antibodies are available in the art and may be employed in the practice of the present invention.

[0147] The levels of one or more of the breast cancer markers detected can then be evaluated according to the methods disclosed below. For example, binding agents bound to breast cancer marker polypeptides and/or antibodies directed against breast cancer markers can be detected via detection reagent that may comprise a detectable reporter group. A variety of protocols for detecting and/or measuring the level of expression of polypeptides, using either polyclonal or monoclonal antibodies specific for the product, are known in the art. Examples include, but are not limited to, enzyme-linked immunosorbent assay (ELISA), immunohistochemistry (IHC), radioimmunoassay (RIA), fluorescence activated cell sorting (FACS), immunocytochemistry, flow cytometry and/or other known immunoassays and the like. A two-site, monoclonal-based immunoassay utilizing monoclonal antibodies reactive to two non-interfering epitopes on a given polypeptide may be preferred for some applications, but a competitive binding assay may also be employed. These and other assays are described, among other places, in Hampton et al., Serological Methods, a Laboratory Manual (1990); Maddox et al., J. Exp. Med. 158:1211-16 (1983); Harlow et al., Antibodies: A Laboratory Manual (1988); and Ausubel et al., Current Protocols in Molecular Biology (2001 and later updates thereto).

[0148] (i) Sandwich Assay

[0149] In certain embodiments, detecting breast cancer using a panel involves a two-antibody sandwich assay. This assay may be performed by first contacting an antibody that has been immobilized on a solid support, commonly the well of a microtiter plate, with the sample, such that polypeptides within the sample are allowed to bind to the immobilized antibody. Unbound sample is then removed from the immobilized polypeptide-antibody complexes and a detection reagent (preferably a second antibody capable of binding to a different site on the polypeptide) containing a reporter group is added. The amount of detection reagent that remains bound to the solid support is then determined using a method appropriate for the specific reporter group.

[0150] More specifically, once the antibody is immobilized on the support as described above, the remaining protein binding sites on the support are typically blocked. Any suitable blocking agent known to those of ordinary skill in the art, such as bovine serum albumin or Tween 20™ (Sigma Chemical Co., St. Louis, Mo.). The immobilized antibody is then incubated with the sample and polypeptide is allowed to bind to the antibody. The sample may be diluted with a suitable diluent, such as phosphate-buffered saline (PBS), prior to incubation. In general, an appropriate contact time (i.e., incubation time) is a period of time that is sufficient to detect the presence of polypeptide within a sample obtained from an individual with cancer. Those of ordinary skill in the art will recognize that the time necessary to achieve equilibrium may be readily determined by assaying the level of binding that occurs over a period of time. At room temperature, an incubation time of about 30 minutes is generally sufficient.

[0151] Unbound sample may then be removed by washing the solid support with an appropriate buffer, such as PBS containing 0.1% Tween 20™. The second antibody, which contains a reporter group, may then be added to the solid support. Preferred reporter groups include those groups recited above as well as other known in the art.

[0152] The detection reagent is then incubated with the immobilized antibody-polypeptide complex for an amount of time sufficient to detect the bound polypeptide. An appropriate amount of time may generally be determined by assaying the level of binding that occurs over a period of time. Unbound detection reagent is then removed and bound detection reagent is detected using the reporter group. The method employed for detecting the reporter group depends upon the nature of the reporter group. For radioactive groups, scintillation counting or autoradiographic methods are generally appropriate. Spectroscopic methods may be used to detect dyes, luminescent groups and fluorescent groups. Biotin may be detected using avidin, coupled to a different reporter group (commonly a radioactive or fluorescent group or an enzyme). Enzyme reporter groups may generally be detected by the addition of substrate (generally for a specific period of time), followed by spectroscopic or other analysis of the reaction products.

[0153] To determine the presence or absence of a breast cancer, the signal detected from the reporter group that remains bound to the solid support is generally compared to a signal that corresponds to a predetermined cut-off value. In one embodiment, the cut-off value for the detection of a cancer is the average mean signal obtained when the immobilized antibody is incubated with samples from patients without the cancer. In another embodiment, a sample generating a signal that is three standard deviations above the predetermined cut-off value is considered positive for the cancer. In another embodiment, the cut-off value is determined using a Receiver Operator Curve, according to the method of Sackett et al., Clinical Epidemiology: A Basic Science for Clinical Medicine, pp. 106 07 (1985). Briefly, in this embodiment, the cut-off value may be determined from a plot of pairs of true positive rates (i.e., sensitivity) and false positive rates (100%-specificity) that correspond to each possible cut-off value for the diagnostic test result. The cut-off value on the plot that is the closest to the upper left-hand corner (i.e., the value that encloses the largest area) is the most accurate cut-off value, and a sample generating a signal that is higher than the cut-off value determined by this method may be considered positive. Alternatively, the cut-off value may be shifted to the left along the plot, to minimize the false positive rate, or to the right, to minimize the false negative rate.

[0154] (ii) Flow Through Assay

[0155] In some embodiments, detecting breast cancer using a panel involves a flow-through or strip test format, wherein the binding agent is immobilized on a membrane, such as nitrocellulose. In the flow-through test, polypeptides within the sample bind to the immobilized binding agent as the sample passes through the membrane. A second, labeled binding agent then binds to the binding agent-polypeptide complex as a solution containing the second binding agent flows through the membrane. The detection of bound second binding agent may then be performed as described above. In the strip test format, one end of the membrane to which binding agent is bound is immersed in a solution containing the sample. The sample migrates along the membrane through a region containing second binding agent and to the area of immobilized binding agent. Concentration of second binding agent at the area of immobilized antibody indicates the presence of a cancer. Typically, the concentration of second binding agent at that site generates a pattern, such as a line, that can be read visually. The absence of such a pattern indicates a negative result. In general, the amount of binding agent immobilized on the membrane is selected to generate a visually discernible pattern when the biological sample contains a level of polypeptide that would be sufficient to generate a positive signal in the two-antibody sandwich assay, in the format discussed above. Preferred binding agents for use in such assays are antibodies and antigen-binding fragments thereof. In certain embodiments, the amount of antibody immobilized on the membrane ranges from about 25 ng to about 1 μg, and in other embodiments is from about 50 ng to about 500 ng. Such tests can typically be performed with a very small amount of biological sample.

[0156] Any of the methods described herein can be performed, e.g., in a high-throughput format.

[0157] (4) Assay Interpretation

[0158] The methods provided herein can include comparing the level of one or more breast cancer makers detected in a biological sample to a reference value or control sample that represents the level of the same breast cancer marker in a subject or sample that does not have breast cancer. Accordingly, methods are provided for detecting the presence of cancer cells in a biological sample comprising the steps of: detecting the level of expression in the biological sample of at least one breast cancer marker, wherein the cancer-associated marker comprises a polynucleotide set forth in any one of SEQ ID NOs: 1-3005; or a polypeptide set forth in any one of SEQ ID NOs: 3006-5970 and comparing the level of expression detected in the biological sample for the breast cancer marker to a predetermined cut-off value for the breast cancer marker; wherein a detected level of expression above or below (depending on the marker) the predetermined cut-off value for the breast cancer marker is indicative of the presence of cancer cells in the individual from which the biological sample was derived.

[0159] A predetermined cut-off value used in the methods described herein for determining the presence or absence of cancer can be readily identified using well-known techniques. For example, in one illustrative embodiment, the predetermined cut-off value for the detection of cancer is the average mean signal obtained when the relevant method of the invention is performed on suitable negative control samples, e.g., samples from patients without cancer. In another illustrative embodiment, a sample generating a signal that is at least two or three standard deviations above or below the predetermined cut-off value is considered positive.

[0160] In another embodiment, the cut-off value is determined using a Receiver Operator Curve, according to the method of Sackett et al., Clinical Epidemiology: A Basic Science for Clinical Medicine, pp. 106 07 (1985). Briefly, in this embodiment, the cut-off value may be determined from a plot of pairs of true positive rates (i.e., sensitivity) and false positive rates (100%-specificity) that correspond to each possible cut-off value for the diagnostic test result. The cut-off value on the plot that is the closest to the upper left-hand corner (i.e., the value that encloses the largest area) is the most accurate cut-off value, and a sample generating a signal that is higher or lower than the cut-off value determined by this method may be considered positive. Alternatively, the cut-off value may be shifted to the left along the plot, to minimize the false positive rate, or to the right, to minimize the false negative rate. In general, a sample generating a signal that is higher or lower than the cut-off value determined by this method is considered positive for a cancer.

[0161] In some embodiments, some genes are overexpressed in cancer as compared to normals and some genes are underexpressed in cancer as compared to normals (see for example Table 2, LogFC where some identified breast cancer markers showed an increase in expression (positive values) while some breast cancer markers showed a decrease in expression (negative values) as compared to normal samples. Thus, those markers in Table 2 with negative LogFC numbers are positive for cancer below their corresponding Threshold number while those markers in Table 2 with positive LogFC numbers are positive for cancer above their corresponding Threshold number). Thus, whether a sample is positive for cancer by being either above or below the cut-off (threshold) value depends on whether the fold change in expression in cancer versus normal is positive or negative.

[0162] It should be noted that in certain embodiments, the breast cancer markers of the present invention may be expressed in normal breast tissue as well as breast cancer/tumor tissue. Expression levels of a particular cancer marker sequence in tissue types other than breast are irrelevant in certain diagnostic embodiments since the presence of tumor cells can be confirmed by observation of predetermined differential expression levels.

[0163] Other differential expression patterns can be utilized advantageously for diagnostic purposes. For example, overexpression or underexpression of a cancer-associated sequence of the invention in tumor tissue and normal tissue of the same type, but not in other normal tissue types, e.g., PBMCs, can be exploited diagnostically. In such a scenario, the presence of metastatic tumor cells, for example in a sample taken from the blood (or from some other tissue site different from that in which the tumor arose), can be identified and/or confirmed by detecting over- or under-expression of the cancer-associated sequence in the sample, for example using any of a variety of amplification methods as described herein. In this setting, expression of the cancer-associated sequence in normal tissue of the same type in which the tumor arose, does not affect its diagnostic utility.

[0164] Skilled practitioners will appreciate that various statistical analyses and software can be used in the methods of the present invention, and such methods and software are well known to those of ordinary skill in the art (e.g., Linear Models for Microarray Data, linear discriminant analysis and support vector machines analysis, and the like).

### (C) Screening Methods and Small Molecules

[0165] In some embodiments, the present disclosure provides methods for identifying small molecules that bind (e.g., bind specifically) to the breast cancer markers disclosed herein. Accordingly, the disclosure also provides small organic molecules (“breast cancer marker binding organic molecules”) which bind, e.g., specifically, to any of the breast cancer marker polypeptides as described herein. Optionally, the breast cancer marker binding organic molecules of the present invention may be conjugated to a growth inhibitory agent or cytotoxic agent such as a toxin, including, for example, a maytansinoid or calicheamicin, an antibiotic, a radioactive isotope, a nucleolytic enzyme, or the like. The binding organic molecules of the present invention preferably induce death of a cell to which they bind. For diagnostic purposes, the organic molecules of the present invention may be detectably labeled, attached to a solid support, or the like.

[0166] Breast cancer marker binding organic molecules are organic molecules other than oligopeptides or antibodies as defined herein that bind, preferably specifically, to a breast cancer polypeptide as described herein. Binding organic molecules may be identified and chemically synthesized using known methodology (see, e.g., PCT Publication Nos. WO00/00823 and WO00/39585). Binding organic molecules are usually less than about 2000 daltons in size, alternatively less than about 1500, 750, 500, 250, or 200 daltons in size, wherein such organic molecules that are capable of binding, preferably specifically, to a breast cancer polypeptide as described herein may be identified without undue experimentation using well known techniques. In this regard, it is noted that techniques for screening organic molecule libraries for molecules that are capable of binding to a polypeptide target are well known in the art (see, e.g., PCT Publication Nos. WO00/00823 and WO00/39585).

### (D) Methods of Treatment

[0167] As will be recognized by the skilled artisan, in certain embodiments, the breast cancer markers of the present invention can be used as therapeutic targets for the treatment of breast cancer. Thus, the present disclosure provides for the use of one or more breast cancer polynucleotides or polypeptides (e.g., an anti-breast cancer polypeptide antibody, a breast cancer polypeptide binding oligopeptide, or a breast cancer polypeptide binding organic molecule as described herein), for the preparation of a medicament useful in the treatment of a breast cancer.

[0168] Another embodiment of the present invention is directed to a method for inhibiting the growth of a cell that expresses a breast cancer polypeptide, wherein the method comprises contacting the cell with an antibody, an oligopeptide or a small organic molecule that binds to the breast cancer polypeptide, and wherein the binding of the antibody, oligopeptide or organic molecule to the breast cancer polypeptide causes inhibition of the growth of the cell expressing the breast cancer polypeptide. The cell can be a cancer cell and binding of the antibody, oligopeptide or organic molecule to the breast cancer polypeptide can cause death of the cell expressing the breast cancer polypeptide. Optionally, the antibody is a monoclonal antibody, antibody fragment, chimeric antibody, humanized antibody, or single-chain antibody. Antibodies, breast cancer polypeptide binding oligopeptides and breast cancer polypeptide binding organic molecules employed in the methods of the present invention may optionally be conjugated to a growth inhibitory agent or cytotoxic agent such as a toxin, including, for example, a maytansinoid or calicheamicin, an antibiotic, a radioactive isotope, a nucleolytic enzyme, or the like. The antibodies and breast cancer polypeptide binding oligopeptides employed in the methods of the present invention may optionally be produced in CHO cells or bacterial cells.

[0169] Another embodiment is directed to a method of therapeutically treating a mammal having cancerous cells that express a breast cancer polypeptide, wherein the method comprises administering to the mammal a therapeutically effective amount of an antibody, an oligopeptide or a small organic molecule that binds to the breast cancer polypeptide, thereby resulting in the effective therapeutic treatment of the tumor.

[0170] Another embodiment is directed to a method for treating or preventing a breast cancer associated with altered, preferably increased, expression or activity of a breast cancer polypeptide, the method comprising administering to a subject in need of such treatment an effective amount of an antagonist of a breast cancer polypeptide. Preferably, the antagonist of the breast cancer polypeptide is an anti-breast cancer polypeptide antibody, breast cancer polypeptide binding oligopeptide, breast cancer polypeptide binding organic molecule or antisense oligonucleotide. Effective treatment or prevention of the cancer may be a result of direct killing or growth inhibition of cells that express a breast cancer polypeptide or by antagonizing the cell growth potentiating activity of a breast cancer polypeptide.

[0171] Other embodiments of the present invention are directed to the use of (a) a breast cancer polypeptide, (b) a nucleic acid encoding a breast cancer polypeptide or a vector or host cell comprising that nucleic acid, (c) a breast cancer polypeptide antibody, (d) a breast cancer polypeptide-binding oligopeptide, or (e) a breast cancer polypeptide-binding small organic molecule in the preparation of a medicament useful for (i) the therapeutic treatment or diagnostic detection of a breast cancer or tumor, or (ii) the therapeutic treatment or prevention of a breast cancer.

[0172] Another embodiment of the present invention is directed to a method for inhibiting the growth of a cancer cell, wherein the growth of said cancer cell is at least in part dependent upon the growth potentiating effect(s) of a breast cancer polypeptide (wherein the breast cancer polypeptide may be expressed either by the cancer cell itself or a cell that produces polypeptide(s) that have a growth potentiating effect on cancer cells), wherein the method comprises contacting the breast cancer polypeptide with an antibody, an oligopeptide or a small organic molecule that binds to the breast cancer polypeptide, thereby antagonizing the growth-potentiating activity of the breast cancer polypeptide and, in turn, inhibiting the growth of the cancer cell. Preferably the growth of the cancer cell is completely inhibited. Even more preferably, binding of the antibody, oligopeptide or small organic molecule to the breast cancer polypeptide induces the death of the cancer cell. Optionally, the antibody is a monoclonal antibody, antibody fragment, chimeric antibody, humanized antibody, or single-chain antibody. Antibodies, breast cancer polypeptide binding oligopeptides and breast cancer polypeptide binding organic molecules employed in the methods of the present invention may optionally be conjugated to a growth inhibitory agent or cytotoxic agent such as a toxin, including, for example, a maytansinoid or calicheamicin, an antibiotic, a radioactive isotope, a nucleolytic enzyme, or the like. The antibodies and breast cancer polypeptide binding oligopeptides employed in the methods of the present invention may optionally be produced in CHO cells or bacterial cells.

### (E) Pharmaceutical Compositions

[0173] The present invention further provides compositions comprising the breast cancer markers (polynucleotides, polypeptides, antibodies specific thereto), binding oligopeptides, and binding organic molecules. For in vivo use, a composition comprising polynucleotides, polypeptides, antibodies specific thereto, breast cancer polypeptide binding oligopeptides, and binding organic molecules as described herein is generally incorporated into a pharmaceutical composition prior to administration. A pharmaceutical composition comprises one or more polynucleotides, polypeptides, antibodies specific thereto, breast cancer polypeptide binding oligopeptides, or binding organic molecules as described herein in combination with a physiologically acceptable carrier. To prepare a pharmaceutical composition, an effective amount of one or more polynucleotides, polypeptides, antibodies specific thereto, breast cancer polypeptide binding oligopeptides, or binding organic molecules as described herein is mixed with any pharmaceutical carrier(s) known to those skilled in the art to be suitable for the particular mode of administration. A pharmaceutical carrier may be liquid, semi-liquid or solid. Solutions or suspensions used for parenteral, intradermal, subcutaneous or topical application may include, for example, a sterile diluent (such as water), saline solution, fixed oil, polyethylene glycol, glycerine, propylene glycol or other synthetic solvent; antimicrobial agents (such as benzyl alcohol and methyl parabens); antioxidants (such as ascorbic acid and sodium bisulfite) and chelating agents (such as ethylenediaminetetraacetic acid (EDTA)); buffers (such as acetates, citrates and phosphates). If administered intravenously, suitable carriers include physiological saline or phosphate buffered saline (PBS), and solutions containing thickening and solubilizing agents, such as glucose, polyethylene glycol, polypropylene glycol and mixtures thereof. In addition, other pharmaceutically active ingredients (including other anti-cancer agents) and/or suitable excipients such as salts, buffers and stabilizers may, but need not, be present within the composition.

[0174] Polynucleotides, polypeptides, antibodies specific thereto, breast cancer polypeptide binding oligopeptides, and binding organic molecules as described herein of the present invention may be prepared with carriers that protect it against rapid elimination from the body, such as time release formulations or coatings. Such carriers include controlled release formulations, such as, but not limited to, implants and microencapsulated delivery systems, and biodegradable, biocompatible polymers, such as ethylene vinyl acetate, polyanhydrides, polyglycolic acid, polyorthoesters, polylactic acid and others known to those of ordinary skill in the art.

[0175] Routes of Administration

[0176] Administration may be achieved by a variety of different routes, including oral, parenteral, nasal, intravenous, intradermal, subcutaneous or topical. Preferred modes of administration depend upon the nature of the condition to be treated or prevented. An amount that, following administration, inhibits, prevents or reduces breast cancer is considered effective. The precise dosage and duration of treatment is a function of the cancer being treated and may be determined empirically using known testing protocols or by testing the compositions in model systems known in the art and extrapolating therefrom. Controlled clinical trials may also be performed. Dosages may also vary with the severity of the condition to be alleviated. A pharmaceutical composition is generally formulated and administered to exert a therapeutically useful effect while minimizing undesirable side effects. The composition may be administered one time, or may be divided into a number of smaller doses to be administered at intervals of time. For any particular subject, specific dosage regimens may be adjusted over time according to the individual need.

[0177] In certain embodiments, a polynucleotide encoding a breast cancer polypeptide may be administered. Such a polynucleotide may be present in a pharmaceutical composition within any of a variety of delivery systems known to those of ordinary skill in the art, including nucleic acid, bacterial and viral expression systems, and colloidal dispersion systems such as liposomes.

[0178] The practice of the present invention will employ, unless indicated specifically to the contrary, conventional methods of virology, immunology, microbiology, molecular biology and recombinant DNA techniques within the skill of the art, many of which are described below for the purpose of illustration. Such techniques are explained fully in the literature. See, e.g., Ausubel et al. (2007 Current Protocols in Molecular Biology, Greene Publ. Assoc. Inc. & John Wiley & Sons, Inc., NY, N.Y.); Sambrook et al. (1989 Molecular Cloning, Second Ed., Cold Spring Harbor Laboratory, Plainview, N.Y.); Maniatis et al. (1982 Molecular Cloning, Cold Spring Harbor Laboratory, Plainview, N.Y.); DNA Cloning: A Practical Approach, vol. I & II (D. Glover, ed.); Oligonucleotide Synthesis (N. Gait, ed., 1984); Nucleic Acid Hybridization (B. Hames et al., eds., 1985); Transcription and Translation (B. Hames et al., eds., 1984); Animal Cell Culture (R. Freshney, ed., 1986); Perbal, A Practical Guide to Molecular Cloning (1984), and elsewhere.

### EXAMPLES

[0179] The invention is further described in the following examples, which do not limit the scope of the invention described in the claims.

### Example 1

### Identification of Breast Cancer Biomarkers from Blood

[0180] This example describes the identification of breast cancer biomarkers identified from blood samples from breast cancer patients.

[0181] Blood samples were collected from 261 patients. The classification of the patients is summarized in Table 1. RNAs were extracted from whole blood samples (minus erythrocytes) using PAXgene™ blood RNA Kits (PreAnalytiX, a Qiagen-BD joint venture company, Franklin Lakes, N.J.) and analyzed by Affymetrix Human Genome U133 Plus 2.0 Array (Affymetrix, Santa Clara, Calif.).

[0182] According to the Human Genome U133 Plus 2.0 Array information data sheet, the sequences from which these probe sets were derived were selected from GenBank®, dbEST, and RefSeq. The sequence clusters were created from the UniGene database (Build 133, Apr. 20, 2001) and then refined by analysis and comparison with a number of other publicly available databases, including the Washington University EST trace repository and the University of California, Santa Cruz Golden-Path human genome database (April 2001 release).

[0183] In addition, the Human Genome U133 Plus 2.0 Array includes 9,921 new probe sets representing approximately 6,500 new genes. These gene sequences were selected from GenBank, dbEST, and RefSeq. Sequence clusters were created from the UniGene database (Build 159, Jan. 25, 2003) and refined by analysis and comparison with a number of other publicly available databases, including the Washington University EST trace repository and the NCBI human genome assembly (Build 31). (See Affymetrix Human Genome U133 Plus 2.0 Array Data Sheet, Part No. 701484, Rev. 4, 2003-2004).

[0184] The array data were collected on 35 separate days.

TABLE 1
Classification of Patients Included in Study

| Patient Classification | Number |
|---|---|
| Control | 102 |
| Control with previous atypical biopsy | 4 |
| Control with previous benign biopsy | 36 |
| Control with previous invasive disease | 17 |
| Invasive | 97 |
| Invasive with previous cancer history | 2 |
| Nominal invasive due to previous cancer history | 3 |
| Total | 261 |

[0185] Several different statistical analyses were performed to identify biomarkers as described in more detail below. Breast-cancer-specific biomarkers identified in this study are shown in Table 2A, Table 2B, and Table 2C (provided separately as an appendix, which is hereby incorporated by reference in its entirety), ranked in order of adjusted p-value. All genes in Table 2 have B (log-odds that the gene is differentially expressed)>=0. Therefore, the cutoff value is B=0 and all genes in the table are potential biomarkers. It should be specifically noted that some identified breast cancer markers showed an increase in expression as compared to normal samples (positive LogFC values) while some breast cancer markers showed a decrease in expression as compared to normal samples (negative values). Thus, those markers in Table 2 with negative LogFC numbers are positive for cancer below their corresponding Threshold number (see second column in Table 2B) while those markers in Table 2 with positive LogFC numbers are positive for cancer above their corresponding Threshold number. As would be recognized by the skilled artisan, the Threshold number (cut-off value) can be determined for each type of detection method (e.g., real-time PCR, ELISA, etc.) using methods known in the art and described elsewhere herein and this number will change depending on the specific detection method being used.

[0186] Table 2, provided as three separate parts as an appendix, is part of the application, and is incorporated by reference, provides the following information:

[0187] Table 2A: ID: Entrez Gene ID number; Gene: gene name; PN SEQ ID NO: polynucleotide sequence identifier numbers; AA SEQ ID NO: amino acid sequence identifier numbers; Description.

[0188] Table 2B: Gene: gene name; logFC: logarithm (base 2) of fold change between average expression in cancer patients and average expression in controls; AveExpr: average expression in all samples; t: t score, as in student t distribution, measuring expression difference between cancer patients and controls; P.Value: p value based on student t distribution; adj.P.Val: p value adjusted for multiple testing using Benjamini and Hochberg's method;

[0189] Table 2C:*Gene identified as a pseudogene; gene: gene name; B:log(B)-odds that the gene is differentially expressed; AreaROC; Accur.: accuracy; Sens.: Sensitivity; Spec.: Specificity; Cutoff: Cutoff (Threshold).

[0190] Clustering Analysis

[0191] Clustering analysis was performed to identify any date-dependent experimental artifacts. For this analysis, all array data were processed and normalized by MASS methods. Only probes present in all experiments were kept in the analysis. Further, all expression data were log-transformed and centered against mediums across genes and arrays. Two specific approaches were carried out in the analysis: hierarchical clustering analysis and k-mean clustering analysis. The program Cluster was used in both approaches.

[0192] In hierarchical clustering analysis, centered correlation and averaged linkage were selected. Using this analysis, no obvious date-dependent experimental artifacts were found.

[0193] In k-mean clustering analysis, all samples were forced to cluster into 35 groups, mimicking the 35 days in which the data were collected. Parameters selected in the analysis included: k-Means for Method, Euclidean distance for Similarity Metric and 100 iterations. Most samples analyzed on the same day were clustered into separate groups.

[0194] In the most significant case against randomness, 4 out of the 8 samples generated on Jan. 15, 2007 were clustered in one group. The corresponding p value was 1.45×10−3. Again, no obvious date-dependent experimental artifacts were found.

[0195] Identification of Individual Biomarker Candidates

[0196] LIMMA analysis was carried out to identify potential biomarkers (Smyth, G. K. (2004). Statistical Applications in Genetics and Molecular Biology 3, No. 1, Article 3). For this analysis, two types of cases were analyzed against each other: cancer versus control. Cancer cases included the 97 cases of “Invasive” as listed in Table 1. The control cases included the 102 cases of “Control” as listed in Table 1. Other cases were ignored in this analysis due to ambiguity in their disease status. The analysis was carried out with R, Bioconductor and PERL.

[0197] All array data were processed and normalized using the GCRMA methods (Z. Wu et al., 2004 Journal of the American Statistical Association 99:909-917). Instead of using Affymetrix default annotation, probes were annotated to ENTREZG genes. The LIMMA analysis was carried out using the R library “limma”. The Benjamini and Hochberg's method was selected to adjust p values in multiple testing. A total of 2045 genes were identified as discriminative with positive B values between cancer cases and control cases. These genes are listed in Table 2. PERL scripts were then written to evaluate the performance of these genes: area under the ROC curve (AUC), accuracy, sensitivity, specificity and the corresponding threshold value on log-transformed (base 2) intensity.

[0198] As would be recognized by the skilled artisan, receiver operating characteristic (ROC) curve is a graphical depiction of the relationship between the true positive ratio (sensitivity) and false positive ratio (1-specificity) as a function of the cutoff level of a disease (or condition) marker. ROC curves help to demonstrate how raising or lowering the cutoff point for defining a positive test result affects tradeoffs between correctly identifying people with a disease (true positives) and incorrectly labeling a person as positive who does not have the condition (false positives).

[0199] The best biomarker candidate identified by the analysis was ACAA2, acetyl-Coenzyme A acyltransferase 2 (mitochondrial 3-oxoacyl-Coenzyme A thiolase) (see Table 2; SEQ ID NOs:1 and 3006). On average, ACAA2 expression level in cancer cases was higher than in control cases. It had an adjusted p value of 4.81×10−14, an AUC value of 0.833, an accuracy of 0.749, a sensitivity of 0.763 and a specificity of 0.735. Although there was overlap in the probe intensity between cancer and control cases, the performance of ACAA2 was good in distinguishing cancer cases from control cases.

[0200] As shown in Table 2, the second best biomarker candidate identified by the analysis was SLC25A20, solute carrier family 25 (carnitine/acylcarnitine translocase), member 20. On average, SLC25A20 expression level in cancer cases was higher than that in control cases. It had an adjusted p value of 2.97×10−12, an AUC value of 0.832, an accuracy of 0.759, a sensitivity of 0.711 and a specificity of 0.804. Although its p value was higher than that of the best gene ACCA2, its accuracy was slightly better.

[0201] The third best biomarker candidate identified by the analysis was SREBF1, sterol regulatory element binding transcription factor 1 (see Table 2). On average, its expression level in cancer cases was lower than in control cases. It had an adjusted p value of 2.79×10−10, an AUC value of 0.792, an accuracy of 0.719, a sensitivity of 0.742 and a specificity of 0.696.

[0202] The last biomarker candidate identified by the analysis was MRPL40, mitochondrial ribosomal protein L40 (see Table 2). On average, MRPL40 expression level in cancer cases was higher than that in control cases. It had an adjusted p value of 1.87×10−3, an AUC value of 0.652, an accuracy of 0.638, a sensitivity of 0.577 and a specificity of 0.696.

[0203] It should be noted that while the specific markers identified and discussed hereinabove were identified as being the most powerful for distinguishing breast cancer from control cases, all of the biomarkers listed in Table 2 perform reasonably well in distinguishing cancer cases from control cases and are therefore useful for the detection of breast cancer, particularly when combined together, for example in a diagnostic panel.

[0204] Identification of Biomarkers Panels

[0205] Although the top genes identified by the LIMMA method demonstrated good performance in distinguishing cancer cases from control cases, their performance can be further improved by combining various different discriminative genes in biomarker panels. For this purpose, up to fifty biomarkers were selected, from among the 2045 discriminative markers identified by the LIMMA method, to construct multi-gene biomarker panels for the detection and diagnosis of breast cancer. Such panels can be validated independently by other experimental technologies such as quantitative polymerase chain reaction (qPCR).

[0206] Seventy five cancer cases and the same number of control cases were initially randomly selected as a training dataset, and the remaining twenty seven cancer cases and twenty two control cases served as the test dataset. A training dataset was then used to identify a biomarker panel of ten genes and then evaluate the performance of the panel against the test dataset. Three-fold cross validation (CV) and twenty bootstrap iterations were also applied to the training dataset. Thus, in every bootstrap iteration, the seventy five cancer cases and the seventy five control cases in the training dataset were randomly assigned to three groups, each group containing twenty five cancer cases and twenty five control cases. Cases in two of the three groups were then used to optimize a cancer versus control classifier and evaluate its performance by the accuracy of the classifier in correctly classifying cases in the third group. Each of the three groups served as the CV test dataset once. Therefore, there were a total of three optimization/evaluation events during each bootstrap iteration. A total of twenty bootstrap iterations were carried out for each gene panel. The performance of a gene panel was then determined by the averaged accuracy over the sixty CV and bootstrap events.

[0207] Three different approaches were applied to the selection of biomarker panels. In the first approach, a biomarker panel was constructed from the top fifty genes identified by LIMMA. Starting with the top gene ACAA2, the top fifty genes were added one by one to the biomarker panel and evaluated the corresponding performance. The top fifty genes as identified by LIMMA are listed in Table 3. In FIG. 1, the accuracy, the sensitivity and the specificity of the biomarker panel is plotted as a function of the number of genes in the panel. The performance of the panel was evaluated by averaging results from two different methods of multivariate analysis: linear discriminant analysis (LDA) and support vector machines (SVM) analysis.

[0208] As shown in FIG. 1, the accuracy of the biomarker panel first increased from 0.720 (when the panel consisted of only ACAA2) to 0.804 (when the panel consisted of the top twenty genes), then decreased to 0.753 (when the panel consisted of all the top fifty genes). Similar performance was observed in sensitivity and specificity.

[0209] In a second approach, LDA was applied to select the fifty best genes from among the 2045 discriminative genes identified by LIMMA to construct a biomarker panel. Since it is impractical to evaluate the performance of all fifty-gene combinations among the 2045 genes, the following approach was used to identify a fifty-gene biomarker panel for breast cancer: The gene of the best accuracy (PTCD2) was first identified from the 2045 genes and selected as the initial biomarker panel. The gene among the unselected genes that most improved the performance of the existing biomarker panel was then identified and added to the panel. This step was repeated until the number of genes in the biomarker panel reached fifty. The top fifty genes as identified by LDA are listed in Table 3. In FIG. 2, the accuracy, the sensitivity and the specificity of the biomarker panel was plotted as a function of the number of genes in the panel.

[0210] As shown in FIG. 2, the accuracy of the biomarker panel first increased from 0.744 (when the panel consisted of only PTCD2) to 0.935 (when the panel consisted of the top forty two genes) then diseased slightly to 0.928 (when the panel consisted of all the top fifty genes). Similar performance was observed in sensitivity and specificity. Clearly the performance of the biomarker panel identified by LDA was much better than the performance of the panel identified by LIMMA or the performance of any individual genes.

[0211] A third approach, similar to the second approach with the exception that SVM instead of LDA, was also applied to allow selection of the best fifty genes for a biomarker panel. Consistent with the first and second approach, PTCD2 was identified by SVM as the gene of the best accuracy from among the 2045 discriminative genes identified by LIMMA. The top fifty genes as identified by SVM are listed in Table 3. In FIG. 3, the accuracy, sensitivity and specificity of the biomarker panel was plotted as a function of the number of genes in the panel.

[0212] As shown in FIG. 3, the accuracy of the biomarker panel first increased from 0.746 (when the panel consisted of only PTCD2) to 0.928 (when the panel consisted of the top 18 genes) and then decreased to 0.900 (when the panel consisted of all the top fifty genes). Similar performance was observed in sensitivity and specificity. Thus, the performance of the biomarker panel identified by SVM was comparable to the performance of the panel identified by LDA, but much better than the performance of the panel identified by LIMMA or the performance of any individual genes.

TABLE 3
Top fifty genes identified by various methods.

| LIMMA | | LDA | | SVM | |
|---|---|---|---|---|---|
| Gene | Rank | Gene | Rank | Gene | Rank |
| ACAA2 | 1 | PTCD2 | 40 | PTCD2 | 40 |
| SLC25A20 | 2 | SYVN1 | 235 | FLJ40432 | 1335 |
| SREBF1 | 3 | MIPEP | 1435 | STX5A | 910 |
| TMEM63A | 4 | PRKCE | 1052 | PDE7A | 15 |
| ARL16 | 5 | LOC284184 | 1448 | PRKCE | 1052 |
| PRO1580 | 6 | ANKRD16 | 1680 | MTMR11 | 681 |
| RASGRP2 | 7 | C8orf16 | 1453 | TNPO1 | 2003 |
| C19orf6 | 8 | ATF7IP2 | 1660 | MGC3731 | 1358 |
| STX16 | 9 | PRIC285 | 1418 | FKBP5 | 680 |
| MLLT6 | 10 | MGA | 221 | C3orf62 | 1331 |
| C1orf71 | 11 | SLC25A20 | 2 | IRS2 | 472 |
| ENTPD4 | 12 | FN3KRP | 822 | GPATC3 | 1871 |
| DGKA | 13 | HPS4 | 1946 | SUSD1 | 926 |
| PPP6C | 14 | HIST1H1D | 1419 | CCM2 | 1220 |
| PDE7A | 15 | CREM | 1974 | ZBTB7A | 1968 |
| RUTBC1 | 16 | CPSF4 | 477 | RAB11A | 893 |
| PRPF3 | 17 | GPATC3 | 1871 | GSDML | 1389 |
| MBTD1 | 18 | FLJ23235 | 695 | MAPK9 | 1657 |
| SPG7 | 19 | STX6 | 1287 | MGC35402 | 173 |
| TNFRSF25 | 20 | SCCPDH | 912 | DRG2 | 1348 |
| PDK4 | 21 | GSTA4 | 317 | TMEM80 | 309 |
| MS4A4A | 22 | MRPL4 | 1175 | PDZD8 | 668 |
| TBC1D10C | 23 | LRCH1 | 1192 | LOC339804 | 1495 |
| MGC10471 | 24 | NFKB2 | 28 | PPARD | 561 |
| FAM73B | 25 | UBXD4 | 1551 | DDIT3 | 942 |
| SF1 | 26 | USP40 | 374 | FAM113A | 443 |
| MTA1 | 27 | CCT5 | 1652 | RHBDD3 | 1614 |
| NFKB2 | 28 | ANKRD44 | 647 | TIMM44 | 708 |
| FLAD1 | 29 | FBF1 | 1517 | ATP6AP2 | 1243 |
| COPS7B | 30 | MRPL40 | 2045 | ME2 | 901 |
| CSTA | 31 | TNFAIP2 | 1947 | ATHL1 | 379 |
| MGC42174 | 32 | CLCN7 | 1750 | PRIC285 | 1418 |
| ARRDC2 | 33 | HSP90AB1 | 1537 | TNFSF14 | 754 |
| VAMP1 | 34 | RASGRP2 | 7 | ABCA2 | 906 |
| C16orf58 | 35 | REEP5 | 386 | EML2 | 1894 |
| TMEM55B | 36 | LOC643641 | 536 | Magmas | 1021 |
| NAT9 | 37 | KLRD1 | 1115 | EVI2A | 1394 |
| LIMD1 | 38 | PFDN2 | 1986 | USP37 | 1017 |
| TNFRSF10A | 39 | UFC1 | 1390 | GATAD1 | 1083 |
| PTCD2 | 40 | C9orf6 | 1481 | CHN2 | 913 |
| ZDHHC8 | 41 | TOP3A | 1789 | PSCD4 | 447 |
| STX12 | 42 | AUP1 | 165 | ZNF669 | 74 |
| RXRB | 43 | DDX11 | 1610 | PRSS23 | 301 |
| MLL | 44 | COX7A2 | 1282 | CHTF18 | 1877 |
| WDR39 | 45 | C18orf22 | 350 | GSTA4 | 317 |
| ZC3H12A | 46 | ZNF236 | 1588 | SFRS8 | 689 |
| FLJ21106 | 47 | CALML4 | 481 | DICER1 | 385 |
| KLHDC3 | 48 | DEF6 | 771 | PIAS1 | 1492 |
| NOL9 | 49 | SLC25A19 | 1473 | SNRP70 | 67 |
| WDR73 | 50 | PLCB2 | 1183 | MLL | 44 |

The ranks shown are based on LIMMA method.

[0213] As shown in Table 3, the fifty markers selected by each of the three approaches were quite different. Only PTCD2 was selected by all three approaches. Four genes (PTCD2, SLC25A20, NFKB2 and RASGRP2) were selected by both LIMMA and LDA, three (PTCD2, PDE7A and MLL) by LIMMA and SVM, and five (PTCD2, PRKCE, GPATC3, PRIC285 and GSTA4) by LDA and SVM. All other genes were unique to each individual approach. This observation suggests that the selection of individual markers to a marker panel is quite sensitive to the approach used in the selection process. It also indicates that different marker combinations may give similar performance in the discrimination of cancer cases from control cases. As such, a variety of combinations of biomarkers present in Table 2 are useful for the detection and diagnosis of breast cancer.

[0214] Thus, this Example shows the identification of individual biomarkers that can be used for the detection of breast cancer and further identifies panels comprising combinations of these biomarkers that result in high specificity and sensitivity for breast cancer diagnostics. This example also demonstrates that a variety of combinations of biomarkers present in Table 2, other than the combinations identified in Table 3, are useful for the detection and diagnosis of breast cancer.

[0215] All of the U.S. patents, U.S. patent application publications, U.S. patent applications, foreign patents, foreign patent applications and non-patent publications referred to in this specification and/or listed in the Application Data Sheet, are incorporated herein by reference, in their entirety.

[0216] From the foregoing it will be appreciated that, although specific embodiments of the invention have been described herein for purposes of illustration, various modifications may be made without deviating from the spirit and scope of the invention. Accordingly, the invention is not limited except as by the appended claims.

### Other Embodiments

[0217] It is to be understood that while the invention has been described in conjunction with the detailed description thereof, the foregoing description is intended to illustrate and not limit the scope of the invention, which is defined by the scope of the appended claims. Other aspects, advantages, and modifications are within the scope of the following claims.

The application's sequence listing, which the Patent Office published only in electronic form, follows.

SEQUENCE LISTING (5970 sequences)

SEQ ID NO: 1 - DNA, 1584 bp, Homo sapiens
gcgtcccccacaccacagacccgcgccgccgacgacccagcagccgccatgcgtctgctccgaggtgtgtttgtagttgctgctaagcgaacgccctttggagcttacggaggccttctgaaagacttcactgctactgacttgtctgaatttgctgccaaggctgccttgtctgctggcaaagtctcacctgaaacagttgacagtgtgattatgggcaatgtcctgcagagttcttcagatgctatatatttggcaaggcatgttggtttgcgtgtgggaatcccaaaggagaccccagctctcacgattaataggctctgtggttctggttttcagtccattgtgaatggatgtcaggaaatttgtgttaaagaagctgaagttgttttatgtggaggaaccgaaagcatgagccaagctccctactgtgtcagaaatgtgcgttttggaaccaagcttggatcagatatcaagctggaagattctttatgggtatcattaacagatcagcatgtccagctccccatggcaatgactgcagagaatcttactgtaaaacacaaaataagcagagaagaatgtgacaaatatgccctgcagtcacagcagagatggaaagctgctaatgatgctggctactttaatgatgaaatggcaccaattgaagtgaagacaaagaaaggaaaacagacaatgcaggtagacgagcatgctcggccccaaaccaccctggaacagttacagaaacttcctccagtattcaagaaagatggaactgttactgcagggaatgcatcgggtgtagctgatggtgctggagctgttatcatagctagtgaagatgctgttaagaaacataacttcacaccactggcaagaattgtgggctactttgtatctggatgtgatccctctatcatgggtattggtcctgtccctgctatcagtggggcactgaagaaagcaggactgagtcttaaggacatggatttggtagaggtgaatgaagcttttgctccccagtacttggctgttgagaggagtttggatcttgacataagtaaaaccaatgtgaatggaggagccattgctttgggtcacccactgggaggatctggatcaagaattactgcacacctggttcacgaattaaggcgtcgaggtggaaaatatgccgttggatcagcttgcattggaggtggccaaggtattgctgtcatcattcagagcacagcctgaagagaccagtgagctcactgtgacccatccttactctacttggccaggccacagtaaaacaagtgaccttcagagcagctgccacaactggccatgccctgccattgaaacagtgattaagtttgatcaagccatggtgacacaaaaatgcattgatcatgaataggagcccatgctagaagtacattctctcagatttgaaccagtgaaatatgatgtatttctgagctaaaactcaactatagaagacattaaaagaaatcgtattcttgccaagtaaccaccacttctgccttagataatatgattataaggaaatcaaataaatgttgccttaacttc

SEQ ID NO: 2 - DNA, 1803 bp, Homo sapiens
acccaaaagtgggtgaaaggtcggcggcgccggcactgcagctggggctgagaagccaggacggcccgagaactgacagacggagtgacagacggactgaccatggccgaccagccaaaacccatcagcccgctcaagaacctgctggccggcggctttggcggcgtgtgcctggtgttcgtcggtcaccctctggacacggtcaaggtccgactgcagacacagccaccgagtttgcctggacaacctcccatgtactctgggacctttgactgtttccggaagactctttttagagagggcatcacggggctatatcggggaatggctgcccctatcatcggggtcactcccatgtttgccgtgtgcttctttgggtttggtttggggaagaaactacaacagaaacacccagaagatgtgctcagctatccccagctttttgcagctgggatgttatctggcgtattcaccacaggaatcatgactcctggagaacggatcaagtgcttattacagattcaggcttcttcaggagaaagcaagtacactggtaccttggactgtgcaaagaagctgtaccaggagtttgggatccgaggcatctacaaagggactgtgcttacccttatgcgagatgtcccagctagtggaatgtatttcatgacatatgaatggctgaaaaatatcttcactccggagggaaagagggtcagtgagctcagtgcccctcggatcttggtggctgggggcattgcagggatcttcaactgggctgtggcaatccccccagatgtgctcaagtctcgattccagactgcacctcctgggaaatatcctaatggtttcagagatgtgctgagggagctgatccgggatgaaggagtcacatccttgtacaaagggttcaatgcagtgatgatccgagccttcccagccaatgcggcctgtttccttggctttgaagttgccatgaagttccttaattgggccacccccaacttgtgaggctgaaggctgctcaagttcacttctggatgctggaagctgtcgttgaggagaaggagtagtaagcagaactaagcagtcttggagggcaaggggaggggaatggtgagatccgagccctgtgcatggacttggtgagactgttgccttaatgacatcctgcaccgtgtataacttagtgtgtcattttgaaacttgaattcattcttatcaatttaagggatcttaaaaggatttggaaatggaacaagtagcttccagaccagatactacctgtggcaagaatgctgcctaccagttaactgctggtcctaccacagtcaaagtattcctcattaaagagagaatctcaggttctcactggaggcactgtgcatattttcaaccagatcaccaggagctgagatcttcttcagtccctagccaggaatacccatttgatttccagggtgccatctaatcctgggctgtacatgtggatatggacttgaggcccacctctgtgtccaagtggattgagcatatatgcctaggaggagatagactgttaatcgttggattttgattttttttttttatgcctgcaaataatcaaaagtaaaactggagtagcctaattttctgggagcaggtggagaactttccctcctacacagtgaggacagtcccagtctgctgggataagtgagaaagcccagggtgtaggaaggccctttttacatactcttttctcatgagagctcactattttaacaataaacaataaacgttgtttctaaaaaaaaaaaaaaaaaa

SEQ ID NO: 3 - DNA, 4284 bp, Homo sapiens
agcagagctgcggccgggggaacccagtttccgaggaacttttcgccggcgccgggccgcctctgaggccagggcaggacacgaacgcgcggagcggcggcggcgactgagagccggggccgcggcggcgctccctaggaagggccgtacgaggcggcgggcccggcgggcctcccggaggaggcggctgcgccatggacgagccacccttcagcgaggcggctttggagcaggcgctgggcgagccgtgcgatctggacgcggcgctgctgaccgacatcgaaggtgaagtcggcgcggggaggggtagggccaacggcctggacgccccaagggcgggcgcagatcgcggagccatggattgcactttcgaagacatgcttcagcttatcaacaaccaagacagtgacttccctggcctatttgacccaccctatgctgggagtggggcagggggcacagaccctgccagccccgataccagctccccaggcagcttgtctccacctcctgccacattgagctcctctcttgaagccttcctgagcgggccgcaggcagcgccctcacccctgtcccctccccagcctgcacccactccattgaagatgtacccgtccatgcccgctttctcccctgggcctggtatcaaggaagagtcagtgccactgagcatcctgcagacccccaccccacagcccctgccaggggccctcctgccacagagcttcccagccccagccccaccgcagttcagctccacccctgtgttaggctaccccagccctccgggaggcttctctacaggaagccctcccgggaacacccagcagccgctgcctggcctgccactggcttccccgccaggggtcccgcccgtctccttgcacacccaggtccagagtgtggtcccccagcagctactgacagtcacagctgcccccacggcagcccctgtaacgaccactgtgacctcgcagatccagcaggtcccggtcctgctgcagccccacttcatcaaggcagactcgctgcttctgacagccatgaagacagacggagccactgtgaaggcggcaggtctcagtcccctggtctctggcaccactgtgcagacagggcctttgccgaccctggtgagtggcggaaccatcttggcaacagtcccactggtcgtagatgcggagaagctgcctatcaaccggctcgcagctggcagcaaggccccggcctctgcccagagccgtggagagaagcgcacagcccacaacgccattgagaagcgctaccgctcctccatcaatgacaaaatcattgagctcaaggatctggtggtgggcactgaggcaaagctgaataaatctgctgtcttgcgcaaggccatcgactacattcgctttctgcaacacagcaaccagaaactcaagcaggagaacctaagtctgcgcactgctgtccacaaaagcaaatctctgaaggatctggtgtcggcctgtggcagtggagggaacacagacgtgctcatggagggcgtgaagactgaggtggaggacacactgaccccacccccctcggatgctggctcacctttccagagcagccccttgtcccttggcagcaggggcagtggcagcggtggcagtggcagtgactcggagcctgacagcccagtctttgaggacagcaaggcaaagccagagcagcggccgtctctgcacagccggggcatgctggaccgctcccgcctggccctgtgcacgctcgtcttcctctgcctgtcctgcaaccccttggcctccttgctgggggcccgggggcttcccagcccctcagataccaccagcgtctaccatagccctgggcgcaacgtgctgggcaccgagagcagagatggccctggctgggcccagtggctgctgcccccagtggtctggctgctcaatgggctgttggtgctcgtctccttggtgcttctctttgtctacggtgagccagtcacacggccccactcaggccccgccgtgtacttctggaggcatcgcaagcaggctgacctggacctggcccggggagactttgcccaggctgcccagcagctgtggctggccctgcgggcactgggccggcccctgcccacctcccacctggacctggcttgtagcctcctctggaacctcatccgtcacctgctgcagcgtctctgggtgggccgctggctggcaggccgggcagggggcctgcagcaggactgtgctctgcgagtggatgctagcgccagcgcccgagacgcagccctggtctaccataagctgcaccagctgcacaccatggggaagcacacaggcgggcacctcactgccaccaacctggcgctgagtgccctgaacctggcagagtgtgcaggggatgccgtgtctgtggcgacgctggccgagatctatgtggcggctgcattgagagtgaagaccagtctcccacgggccttgcattttctgacacgcttcttcctgagcagtgcccgccaggcctgcctggcacagagtggctcagtgcctcctgccatgcagtggctctgccaccccgtgggccaccgtttcttcgtggatggggactggtccgtgctcagtaccccatgggagagcctgtacagcttggccgggaacccagtggaccccctggcccaggtgactcagctattccgggaacatctcttagagcgagcactgaactgtgtgacccagcccaaccccagccctgggtcagctgatggggacaaggaattctcggatgccctcgggtacctgcagctgctgaacagctgttctgatgctgcgggggctcctgcctacagcttctccatcagttccagcatggccaccaccaccggcgtagacccggtggccaagtggtgggcctctctgacagctgtggtgatccactggctgcggcgggatgaggaggcggctgagcggctgtgcccgctggtggagcacctgccccgggtgctgcaggagtctgagagacccctgcccagggcagctctgcactccttcaaggctgcccgggccctgctgggctgtgccaaggcagagtctggtccagccagcctgaccatctgtgagaaggccagtgggtacctgcaggacagcctggctaccacaccagccagcagctccattgacaaggccgtgcagctgttcctgtgtgacctgcttcttgtggtgcgcaccagcctgtggcggcagcagcagcccccggccccggccccagcagcccagggcaccagcagcaggccccaggcttccgcccttgagctgcgtggcttccaacgggacctgagcagcctgaggcggctggcacagagcttccggcccgccatgcggagggtgttcctacatgaggccacggcccggctgatggcgggggccagccccacacggacacaccagctcctcgaccgcagtctgaggcggcgggcaggccccggtggcaaaggaggcgcggtggcggagctggagccgcggcccacgcggcgggagcacgcggaggccttgctgctggcctcctgctacctgccccccggcttcctgtcggcgcccgggcagcgcgtgggcatgctggctgaggcggcgcgcacactcgagaagcttggcgatcgccggctgctgcacgactgtcagcagatgctcatgcgcctgggcggtgggaccactgtcacttccagctagaccccgtgtccccggcctcagcacccctgtctctagccactttggtcccgtgcagcttctgtcctgcgtcgaagctttgaaggccgaaggcagtgcaagagactctggcctccacagttcgacctgcggctgctgtgtgccttcgcggtggaaggcccgaggggcgcgatcttgaccctaagaccggcggccatgatggtgctgacctctggtggccgatcggggcactgcaggggccgagccattttggggggcccccctccttgctctgcaggcaccttagtggcttttttcctcctgtgtacagggaagagaggggtacatttccctgtgctgacggaagccaacttggctttcccggactgcaagcagggctctgccccagaggcctctctctccgtcgtgggagagagacgtgtacatagtgtaggtcagcgtgcttagcctcctgacctgaggctcctgtgctactttgccttttgcaaactttattttcatagattgagaagttttgtacagagaattaaaaatgaaattatttataatctggaaaaaa

SEQ ID NO: 4 - DNA, 4194 bp, Homo sapiens
agcagagctgcggccgggggaacccagtttccgaggaacttttcgccggcgccgggccgcctctgaggccagggcaggacacgaacgcgcggagcggcggcggcgactgagagccggggccgcggcggcgctccctaggaagggccgtacgaggcggcgggcccggcgggcctcccggaggaggcggctgcgccatggacgagccacccttcagcgaggcggctttggagcaggcgctgggcgagccgtgcgatctggacgcggcgctgctgaccgacatcgaagacatgcttcagcttatcaacaaccaagacagtgacttccctggcctatttgacccaccctatgctgggagtggggcagggggcacagaccctgccagccccgataccagctccccaggcagcttgtctccacctcctgccacattgagctcctctcttgaagccttcctgagcgggccgcaggcagcgccctcacccctgtcccctccccagcctgcacccactccattgaagatgtacccgtccatgcccgctttctcccctgggcctggtatcaaggaagagtcagtgccactgagcatcctgcagacccccaccccacagcccctgccaggggccctcctgccacagagcttcccagccccagccccaccgcagttcagctccacccctgtgttaggctaccccagccctccgggaggcttctctacaggaagccctcccgggaacacccagcagccgctgcctggcctgccactggcttccccgccaggggtcccgcccgtctccttgcacacccaggtccagagtgtggtcccccagcagctactgacagtcacagctgcccccacggcagcccctgtaacgaccactgtgacctcgcagatccagcaggtcccggtcctgctgcagccccacttcatcaaggcagactcgctgcttctgacagccatgaagacagacggagccactgtgaaggcggcaggtctcagtcccctggtctctggcaccactgtgcagacagggcctttgccgaccctggtgagtggcggaaccatcttggcaacagtcccactggtcgtagatgcggagaagctgcctatcaaccggctcgcagctggcagcaaggccccggcctctgcccagagccgtggagagaagcgcacagcccacaacgccattgagaagcgctaccgctcctccatcaatgacaaaatcattgagctcaaggatctggtggtgggcactgaggcaaagctgaataaatctgctgtcttgcgcaaggccatcgactacattcgctttctgcaacacagcaaccagaaactcaagcaggagaacctaagtctgcgcactgctgtccacaaaagcaaatctctgaaggatctggtgtcggcctgtggcagtggagggaacacagacgtgctcatggagggcgtgaagactgaggtggaggacacactgaccccacccccctcggatgctggctcacctttccagagcagccccttgtcccttggcagcaggggcagtggcagcggtggcagtggcagtgactcggagcctgacagcccagtctttgaggacagcaaggcaaagccagagcagcggccgtctctgcacagccggggcatgctggaccgctcccgcctggccctgtgcacgctcgtcttcctctgcctgtcctgcaaccccttggcctccttgctgggggcccgggggcttcccagcccctcagataccaccagcgtctaccatagccctgggcgcaacgtgctgggcaccgagagcagagatggccctggctgggcccagtggctgctgcccccagtggtctggctgctcaatgggctgttggtgctcgtctccttggtgcttctctttgtctacggtgagccagtcacacggccccactcaggccccgccgtgtacttctggaggcatcgcaagcaggctgacctggacctggcccggggagactttgcccaggctgcccagcagctgtggctggccctgcgggcactgggccggcccctgcccacctcccacctggacctggcttgtagcctcctctggaacctcatccgtcacctgctgcagcgtctctgggtgggccgctggctggcaggccgggcagggggcctgcagcaggactgtgctctgcgagtggatgctagcgccagcgcccgagacgcagccctggtctaccataagctgcaccagctgcacaccatggggaagcacacaggcgggcacctcactgccaccaacctggcgctgagtgccctgaacctggcagagtgtgcaggggatgccgtgtctgtggcgacgctggccgagatctatgtggcggctgcattgagagtgaagaccagtctcccacgggccttgcattttctgacacgcttcttcctgagcagtgcccgccaggcctgcctggcacagagtggctcagtgcctcctgccatgcagtggctctgccaccccgtgggccaccgtttcttcgtggatggggactggtccgtgctcagtaccccatgggagagcctgtacagcttggccgggaacccagtggaccccctggcccaggtgactcagctattccgggaacatctcttagagcgagcactgaactgtgtgacccagcccaaccccagccctgggtcagctgatggggacaaggaattctcggatgccctcgggtacctgcagctgctgaacagctgttctgatgctgcgggggctcctgcctacagcttctccatcagttccagcatggccaccaccaccggcgtagacccggtggccaagtggtgggcctctctgacagctgtggtgatccactggctgcggcgggatgaggaggcggctgagcggctgtgcccgctggtggagcacctgccccgggtgctgcaggagtctgagagacccctgcccagggcagctctgcactccttcaaggctgcccgggccctgctgggctgtgccaaggcagagtctggtccagccagcctgaccatctgtgagaaggccagtgggtacctgcaggacagcctggctaccacaccagccagcagctccattgacaaggccgtgcagctgttcctgtgtgacctgcttcttgtggtgcgcaccagcctgtggcggcagcagcagcccccggccccggccccagcagcccagggcaccagcagcaggccccaggcttccgcccttgagctgcgtggcttccaacgggacctgagcagcctgaggcggctggcacagagcttccggcccgccatgcggagggtgttcctacatgaggccacggcccggctgatggcgggggccagccccacacggacacaccagctcctcgaccgcagtctgaggcggcgggcaggccccggtggcaaaggaggcgcggtggcggagctggagccgcggcccacgcggcgggagcacgcggaggccttgctgctggcctcctgctacctgccccccggcttcctgtcggcgcccgggcagcgcgtgggcatgctggctgaggcggcgcgcacactcgagaagcttggcgatcgccggctgctgcacgactgtcagcagatgctcatgcgcctgggcggtgggaccactgtcacttccagctagaccccgtgtccccggcctcagcacccctgtctctagccactttggtcccgtgcagcttctgtcctgcgtcgaagctttgaaggccgaaggcagtgcaagagactctggcctccacagttcgacctgcggctgctgtgtgccttcgcggtggaaggcccgaggggcgcgatcttgaccctaagaccggcggccatgatggtgctgacctctggtggccgatcggggcactgcaggggccgagccattttggggggcccccctccttgctctgcaggcaccttagtggcttttttcctcctgtgtacagggaagagaggggtacatttccctgtgctgacggaagccaacttggctttcccggactgcaagcagggctctgccccagaggcctctctctccgtcgtgggagagagacgtgtacatagtgtaggtcagcgtgcttagcctcctgacctgaggctcctgtgctactttgccttttgcaaactttattttcatagattgagaagttttgtacagagaattaaaaatgaaattatttataatctggaaaaaa

SEQ ID NO: 5 - DNA, 4074 bp, Homo sapiens
cacgccccgcgctgctgggtcccgccagacacgccgccgccgcaggaaagtctacagtttggtaccccaggactcgctggtcaggaaagccctgcaggacatgagtgttaggcccgacgcctggcccttggcagcttgggaggtggctggggctgcttttgcctttgccagagacagctccaactgaggacctctccaacgggcccatccacagtccttccttcccctagtgtctgggaagacaggcgcgatgatggactccccgttcctggagctgtggcagtccaaggcagtgtccatcagggagcagctgggactcggggaccggcccaacgactcctattgctacaactcggccaaaaacagcaccgtgctccagggggtcacctttggtggcatccccactgtcctgctcatagacgtcagctgcttcctgttcttaatcttggtgttttctattataagaagaagattctgggactatggccgcattgccctggtgtcagaagcagacagcgagtccagatttcagagattgtcatcgacttcctcctcaggtcaacaagactttgaaaatgagctgggatgctgtccctggctgactgccatcttccgtctgcatgatgaccagatcctggaatggtgtggggaggacgccatccactacctgtccttccagaggcacatcatcttcctgttggtggtggtcagctttttgtccctgtgtgtcatcctgcctgtcaacctctcaggggatttgctggacaaagacccgtatagttttgggaggacaacaatagcaaacctacagactgacaatgacctcctttggctgcacaccatctttgctgtcatttacctcttcttcactgtgggtttcatgcggcaccacactcagtccattaagtacaaagaggagaacctggtgaggcggaccctgttcatcacaggactccccagagatgccaggaaggagactgtggagagccacttccgggacgcgtatcccacgtgtgaggtggttgatgtgcagctgtgctacaacgtggccaaactgatctacctgtgcaaggagaaaaagaagactgagaagagcctgacctattacacaaacctgcaggtgaagacaggccagcggaccctcatcaaccccaagccctgtggccagttttgctgctgtgaagtgctgggctgtgagtgggaagacgccatctcttactacacacggatgaaggacaggctgctggagaggatcacagaggaagaacgccacgtccaggaccagcccctgggaatggccttcgtcaccttccaggagaagtccatggccacctacatcctgaaagatttcaatgcctgcaagtgtcagagccttcagtgcaaaggtgagccccagccgtcctcccatagcagggagctctatacctccaagtggacagtcacctttgctgctgaccctgaggacatctgctggaagaacctctctatccagggcctccgctggtggctacagtggctgggcatcaacttcaccctcttcctggggctatttttcctgaccacaccctccatcatcctgtccaccatggacaagtttaatgtcaccaaacccatccatgcgctgaataacccgatcatcagccagttcttccccaccctcctgctctggtccttctcggccctgctcccctccattgtctactactctacactgctggagtctcactggaccaagtcgggggaaaaccagatcatgatgaccaaagtctacatattcttgatcttcatggtgctgatcctgccctccctgggtctcaccagtctagattttttcttccggtggctctttgacaaaacttcctcggaggcctccatcaggttggagtgcgtcttcctgcctgaccagggtgccttctttgtgaactatgtcatcgcctcggccttcatcggcaatggcatggagctgctgcggctgccaggtctcatcctctataccttccgcatgatcatggccaagacggctgctgaccgcaggaatgtcaagcagaaccaggccttccagtacgagtttggagccatgtatgcatggatgctgtgtgtcttcactgtcatcgtggcctacagcatcacttgtcccatcatcgcgccatttggcctcatctacatcctgctcaagcacatggtggaccggcacaacctctacttcgtctacctcccagccaagctggagaaggggatccactttgccgctgtgaaccaggccttggcagcccccatcctgtgcctcttctggctctacttcttttccttcctgcgcctgggtatgaaggcccccgccactctgttcaccttcctggtgctgctgctcaccatcctggtctgcctggctcacacctgctttggatgcttcaagcacctcagccctctgaactacaaaacagaagagcctgcaagtgacaaaggaagtgaggcagaggcccacatgcccccaccgttcacaccctacgtgcctcggattctgaacggcttggcctcggagaggacagcactgtctccgcagcagcagcagcagcagacctatggtgccatccacaacatcagcgggactatccctggacagtgcttggcgcagagcgccacgggcagtgtggctgctgccccccaggaggcctgaggctgggtctcactgctctgaaaagacacaaccagaatggcctggggctcaggcccttggctgagtgggaatgcgttgggactgcccagctgagctatcaggtgcccatcttttctggtcccagcagtggtgaggagagcacaggcaggcctcgcccctcccttgctcacccagtttcccctccggcacaagcttccagctctgcagctggggtgacatccccagtggtttgtcgccaagaccatgtggtggacttttcgccccccaaactgatgagtccgggagaatatatggagagagagatgtaacaaggggaaggcctcctcccttctgagcacacacacaaccgataaccaaagagatgctgcagtccaggtctgaggtcccgctggcatccagctccctgctccatggccagtccctccccagcccagcagtccctccaggctacatccaggagtaagctatggggaacaggttgggaggtggccagtgctcctgccagctgtgcacacatctctgtatcccgctagagttctgtgtttttgtatcatgttgtcagggacgctagctgggtcagggttaccccatagcaggcagggacaaggaccactcataatatgcccattggaccacagttaagatccagcctctctcacctcttcagggctgagtgcatgagtctgcacctccaggcaggctctgtgcagtactcaccccctccgtctgctccctccaaggtgtgggggtgggcagtgctcagggcctcctcggagccaaaggacagcatggtcggcacagaggaaggggtacctgggctgggtgcagggccatcccactgcccttgagctgtggctctggcaggaaggaggggcagcccatccctcttctccctcctggggattctggggaatgggatgcaacttaagacttctgcctgagaagcctcctccctgctgcctccagggggcaccaaggcacaagcctgtgcagtaggggcgggatgggggtgtggaagagcaggtccaggctcctagcacaactggcctggggccttggcacctctgtaggccctgcctgtgcctgtccgctggcctggggggcctgggcttatctgggccttctcactcagggactctcttgacgctgacttgcccccgcagcggtggccagtgctgcctctgctccaagctgcccctgcgctgggaggggtgggggcggtgccattggtctggtgcagcatagccctggccagtggcctcatccccagcaggcctcccgtgcctctgccagcaaggaggggccggccagctctgcttgcacagggggccccatgtggggtcagcgcacgctcatgtcactgagttccagccgcttttagagtaaagtcgtttatcatc

SEQ ID NO: 6 - DNA, 1131 bp, Homo sapiens
atgagagtggccggtgggcgggccttgagccgcggcgccgagctacgggtgccgggtggagcgaagcacggaatgtgtctcctgctgggggccacgggcgtcgggaagacgctgctggtgaaacggctgcaggaggtgagctcccgggatgggaaaggcgacctgggggagccgcccccgacacggcccacggtgggcaccaatcttactgacatcgtggcacagagaaagatcaccatccgggagcttggggggtgcatgggccccatctggtccagttactatggaaactgccgttctctcctgtttgtgatggacgcctctgaccccacccagctctctgcatcctgtgtgcagctcttaggtctcctttctgcagaacaacttgcagaagcatcggtgctgatactcttcaataaaatcgacctaccctgttacatgtccacggaggagatgaagtcattaatcaggcttccagacatcattgcttgtgccaagcagaacatcaccacggcagaaatcagcgcccgtgaaggcactggcttagcaggggtgctggcctggctccaggccacccacagagccaacgattgactgcacggcagaggcgcagctggcctgagctggggagaggtggcagagggcagtatggctttgctgccaatagtttcttctcacaggggcagaataacccaaagtaaccctacatgatggggctctgtgctgagatgcaatgatgtgtaaactgaggcatgtggagatggaagttgacatctggcctctgaaaaaagtgtccccaggggctaggcatggtggctcacacctgtaatcccagcactttgagaggccgaggcgggtgtatcacctgaggtcgggagttcgagactagcctgaccaacatggagaaaccctgtctctactaaaaatacaaaattagctgggtgtgctggtgcatgcctgtaatctcagctacttgggaggctgagacaggagaatcccttgaacctgggaggtggaggttgcagtgagtcgagatcatgccattgcactgcacctgggcaacaagagtgaaactccgtcttaaaaaatataagaaataaaaaaataaaaacctgtccccagactggatga

SEQ ID NO: 7 - DNA, 1131 bp, Homo sapiens; identical to SEQ ID NO: 6

SEQ ID NO: 8 - DNA, 1859 bp, Homo sapiens
cggctttcctcctcctgctccaccatgtggagccgacggcagggccgcctcaggcccacggtctgcggggtggaggagctacggcgccgccggcgggagcgggaggcagcactgcggaaggcgcggagggagcagcagctggtcagcaagaggctgctgagaaacgacgccccagaggaagctggagagggatgtgtggctgcgatcctcggggaaaccgaggtgcagcagttcctgcggcaagcccagcgggggacagaggaaaaggagagagagggggctctggtcagccttcgtcgaggcttgcagcaccctgaaacacagcaaaccttcatccggctggagggcagcatgcggaccctggtcgggctcctgaccagcaaccaggccctgctgcagcttgaggcggctcggtgcctgcatgagctctctcactccgagcagtccactgttgctgaggcctgcctgccagccacttcttacctcctcacctacctctccagtcacagctcagacttcatagagctgtgtctgtatacactgggtaacctgatcgtggagagtgaggctgtgagaaggcagctcctgccacagggcattgttccagccttggctgcctgcatccagtccccccatgtggctgtgctggaagctctcggatatgccttgtcccagcttctacaggctgaggaagctccagagaagatcattccccctgcttctgccagcagctccatcttggcctccactctccctcagcacatgctacaaatgttgcaacctggcccaaagctcaaccctggggtcgctgtggagtttgcctggtgccttcattacatcatctgcagccaggtcagcaatcctctgctcattggccatggggctctgtctactctggggttgctgctgttggacttggctggggctgtccagaaaagcgaggatgcaggactggagctgctggcatgccccgtgcttcgatgtctaagcaacctgctaactgaggcagcagtggagactgtgggagggcaaatgcagctcagagatgagcgtgttgtggcagccttatttatccttctgcagttctttttccagaaacagcccagtctgctccctgagggcctttggctcctcaacaacctcactgcaaacagtcctagtttctgtacctccttgctctccctggatctgattgagcctctcttacagctgttgccagtatctaacgtggtgagcgtaatggtgctcacagttctgtgcaatgttgcagaaaagggtcctgcttactgccagcggctgtggccagggcccctgcttcccgccttgctgcacacactagccttttctgacactgaagtagtaggccagagtttggagctgctgcatctgctgttcctgtatcagccagaggctgttcaggtcttcctgcagcagtcagggctgcaagccctggaaaggcatcaggaagaggcccagctccaggatcgtgtgtatgctctccagcagacagctcttcaagggtgatcttgtttctcaatgtcactcattcccctctctcttaacatcaagcttgtttgtccagtagagcctttggagatttaggaccataatgaggtctcatgttctctgctcccacacctaagccaagacctttgggtcccagctcctccccttccactcagcactatccaggcaggaggaccaaaagggactcagtgtggtctacttactctggggccctagaatccctgcccccccgccacccttcatgtttgcttcagcagctggtagcttttgatgagacagaataaagttttatttttatattaaaaaaaaaaaaaaaaaaaaaaaaaaaaaaa

SEQ ID NO: 9 - DNA, 2416 bp, Homo sapiens
cgatttcattcctcgctccccacaggtccctctccccaaaatattcccatcttgtcctagcccatcccccagactatctcaaggaccagctgtccccacgcccccgacctccactaggcctgtgccacccgctgcctgcaggaagacgcccggtcccgggccgggttagccccatgggaacgcagcgcctgtgtggccgcgggactcaaggctggcctggctcaagtgaacagcacgtccaggaggcgacctcgtccgcgggtttgcattctggggtggacgagctgggggttcggtccgagcccggtgggaggctcccggagcgcagcctgggcccagcccaccccgcgccggcggccatggcaggcaccctggacctggacaagggctgcacggtggaggagctgctccgcgggtgcatcgaagccttcgatgactccgggaaggtgcgggacccgcagctggtgcgcatgttcctcatgatgcacccctggtacatcccctcctctcagctggcggccaagctgctccacatctaccaacaatcccggaaggacaactccaattccctgcaggtgaaaacgtgccacctggtcaggtactggatctccgccttcccagcggagtttgacttgaacccggagttggctgagcagatcaaggagctgaaggctctgctagaccaagaagggaaccgacggcacagcagcctaatcgacatagacagcgtccctacctacaagtggaagcggcaggtgactcagcggaaccctgtgggacagaaaaagcgcaagatgtccctgttgtttgaccacctggagcccatggagctggcggagcatctcacctacttggagtatcgctccttctgcaagatcctgtttcaggactatcacagtttcgtgactcatggctgcactgtggacaaccccgtcctggagcggttcatctccctcttcaacagcgtctcacagtgggtgcagctcatgatcctcagcaaacccacagccccgcagcgggccctggtcatcacacactttgtccacgtggcggagaagctgctacagctgcagaacttcaacacgctgatggcagtggtcgggggcctgagccacagctccatctcccgcctcaaggagacccacagccacgttagccctgagaccatcaagctctgggagggtctcacggaactagtgacggcgacaggcaactatggcaactaccggcgtcggctggcagcctgtgtgggcttccgcttcccgatcctgggtgtgcacctcaaggacctggtggccctgcagctggcactgcctgactggctggacccagcccggacccggctcaacggggccaagatgaagcagctctttagcatcctggaggagctggccatggtgaccagcctgcggccaccagtacaggccaaccccgacctgctgagcctgctcacggtgtctctggatcagtatcagacggaggatgagctgtaccagctgtccctgcagcgggagccgcgctccaagtcctcgccaaccagccccacgagttgcaccccaccaccccggcccccggtactggaggagtggacctcggctgccaaacccaagctggatcaggccctcgtggtggagcacatcgagaagatggtggagtctgtgttccggaactttgacgtcgatggggatggccacatctcacaggaagaattccagatcatccgtgggaacttcccttacctcagcgcctttggggacctcgaccagaaccaggatggctgcatcagcagggaggagatggtttcctatttcctgcgctccagctctgtgttgggggggcgcatgggcttcgtacacaacttccaggagagcaactccttgcgccccgtcgcctgccgccactgcaaagccctgatcctgggcatctacaagcagggcctcaaatgccgagcctgtggagtgaactgccacaagcagtgcaaggatcgcctgtcagttgagtgtcggcgcagggcccagagtgtgagcctggaggggtctgcaccctcaccctcacccatgcacagccaccatcaccgcgccttcagcttctctctgccccgccctggcaggcgaggctccaggcctccagagatccgtgaggaggaggtacagacggtggaggatggggtgtttgacatccacttgtaatagatgctgtggttggatcaaggactcattcctgccttggagaaaatacttcaaccagagcagggagcctgggggtgtcggggcaggaggctggggatgggggtgggatatgagggtggcatgcagctgagggcagggccagggctggtgtccctaaggttgtacagactcttgtgaatatttgtattttccagatggaataaaaaggcccgtgtaattaaccttca

SEQ ID NO: 10 - DNA, 2310 bp, Homo sapiens
cgatttcattcctcgctccccacaggtccctctccccaaaatattcccatcttgtcctagcccatcccccagactatctcaaggaccagctgtccccacgcccccgacctccactaggcctgtgccacccgctgcctgcaggaagacgcccggtcccgggccgggttagccccatgggaacggggttcggtccgagcccggtgggaggctcccggagcgcagcctgggcccagcccaccccgcgccggcggccatggcaggcaccctggacctggacaagggctgcacggtggaggagctgctccgcgggtgcatcgaagccttcgatgactccgggaaggtgcgggacccgcagctggtgcgcatgttcctcatgatgcacccctggtacatcccctcctctcagctggcggccaagctgctccacatctaccaacaatcccggaaggacaactccaattccctgcaggtgaaaacgtgccacctggtcaggtactggatctccgccttcccagcggagtttgacttgaacccggagttggctgagcagatcaaggagctgaaggctctgctagaccaagaagggaaccgacggcacagcagcctaatcgacatagacagcgtccctacctacaagtggaagcggcaggtgactcagcggaaccctgtgggacagaaaaagcgcaagatgtccctgttgtttgaccacctggagcccatggagctggcggagcatctcacctacttggagtatcgctccttctgcaagatcctgtttcaggactatcacagtttcgtgactcatggctgcactgtggacaaccccgtcctggagcggttcatctccctcttcaacagcgtctcacagtgggtgcagctcatgatcctcagcaaacccacagccccgcagcgggccctggtcatcacacactttgtccacgtggcggagaagctgctacagctgcagaacttcaacacgctgatggcagtggtcgggggcctgagccacagctccatctcccgcctcaaggagacccacagccacgttagccctgagaccatcaagctctgggagggtctcacggaactagtgacggcgacaggcaactatggcaactaccggcgtcggctggcagcctgtgtgggcttccgcttcccgatcctgggtgtgcacctcaaggacctggtggccctgcagctggcactgcctgactggctggacccagcccggacccggctcaacggggccaagatgaagcagctctttagcatcctggaggagctggccatggtgaccagcctgcggccaccagtacaggccaaccccgacctgctgagcctgctcacggtgtctctggatcagtatcagacggaggatgagctgtaccagctgtccctgcagcgggagccgcgctccaagtcctcgccaaccagccccacgagttgcaccccaccaccccggcccccggtactggaggagtggacctcggctgccaaacccaagctggatcaggccctcgtggtggagcacatcgagaagatggtggagtctgtgttccggaactttgacgtcgatggggatggccacatctcacaggaagaattccagatcatccgtgggaacttcccttacctcagcgcctttggggacctcgaccagaaccaggatggctgcatcagcagggaggagatggtttcctatttcctgcgctccagctctgtgttgggggggcgcatgggcttcgtacacaacttccaggagagcaactccttgcgccccgtcgcctgccgccactgcaaagccctgatcctgggcatctacaagcagggcctcaaatgccgagcctgtggagtgaactgccacaagcagtgcaaggatcgcctgtcagttgagtgtcggcgcagggcccagagtgtgagcctggaggggtctgcaccctcaccctcacccatgcacagccaccatcaccgcgccttcagcttctctctgccccgccctggcaggcgaggctccaggcctccagagatccgtgaggaggaggtacagacggtggaggatggggtgtttgacatccacttgtaatagatgctgtggttggatcaaggactcattcctgccttggagaaaatacttcaaccagagcagggagcctgggggtgtcggggcaggaggctggggatgggggtgggatatgagggtggcatgcagctgagggcagggccagggctggtgtccctaaggttgtacagactcttgtgaatatttgtattttccagatggaataaaaaggcccgtgtaattaaccttca

SEQ ID NO: 11 - DNA, 2754 bp, Homo sapiens
agcagcgccgcagccggacgagaaagcggaagatggcggcggcggccgggaggccgtgaggagagcggcggctgcgagggcggccgatggcggccgggaggcgccctcggacacttgcgggtcgttagggcgcgacgctgggaggcatgtcggagcacgtggagcccgcagctccggggcccgggcccaacggcggcggcggcggcccggcccccgcgcgcgggcctcgcacccccaatctcaaccccaaccccctcatcaacgtgcgcgaccggctcttccacgcgctgttcttcaagatggctgtcacctattcgcggctcttcccgcccgccttccgccgtctcttcgagttcttcgtgctgctcaaggccctgtttgtgctcttcgtcctggcctacatccacatcgtcttctcccgctcgcccatcaactgcctggagcatgtgcgtgacaagtggccgcgtgagggcatcctgcgtgtggaagtgcggcacaactcgagccgcgcgcccgtcttcctacagttctgtgacagcggcggccgcgggagcttcccgggcctggccgtggaaccaggcagcaacctggacatggaagatgaggaggaggaagagctgaccatggagatgtttgggaacagctccatcaagtttgagctggacatcgagcccaaggtgttcaagccgccgagtagcacagaggccctgaatgacagccaggagttccccttccccgagacgcccaccaaagtgtggccgcaggacgagtacatcgtggagtactcactagagtatggcttccttcgcctgtcgcaggccacccgccagcgcctgagcatccccgtcatggtggtcaccctggaccccacgcgggaccagtgcttcggggaccgcttcagccgcctgctgctggatgagttcctgggctacgatgacatcctcatgtccagcgtgaagggcctggccgagaacgaggagaacaagggcttcctgcggaatgtggtgtcgggcgagcactaccgctttgtgagcatgtggatggcgcggacgtcctacctggccgccttcgccatcatggtcatcttcacgctgagcgtgtccatgctgctgcggtactcacaccaccagatcttcgtcttcatcgtggacctgctgcagatgctggagatgaacatggccatcgccttccccgcagcgcccctgctgaccgtcatcctggccctcgtcgggatggaggccatcatgtcggagttcttcaacgacaccaccaccgccttctacatcatcctcatcgtgtggctcgcggaccagtatgacgccatctgctgccacaccagcaccagcaagcggcattggctgcggttcttctatctctaccacttcgccttctatgcctatcactaccgcttcaatgggcagtatagcagcctggccctggtcacctcctggctcttcatccagcattccatgatctacttcttccaccactacgagctgcctgccatcctgcagcaggtccgcatccaggagatgctgcttcaggcgccgccactgggccccgggacccccacggcgctgcccgatgacatgaacaacaactcgggcgccccggctacagcccctgactctgccggccagccccccgccctgggccccgtctcgcctggggccagcgggagtcccgggcctgtggcagcggcgcccagctccctggtggccgcggcagcctcagtggcagcagctgccggtggtgacctgggttggatggcagagaccgctgccatcatcacagacgcctccttcctgtccggcctgagcgcctccctcctggagcggcgtccagccagcccgctgggccctgctgggggcctcccccacgccccccaggacagtgtccccccgagtgactccgcagcttctgacacaactcccctgggggctgcggtaggcgggcctagcccggcctccatggccccaacggaggcgccctcggaggtggggtcctgagccgcacagctgagccgcctctgacccctgctggctgggcctgaccttcccgagcccgtgggggtgggggaggccagccacctccttcctctgggactgcccagcctgtgtcgggggctttcagggtttcgtggggtttgcccggaaggcggctttcctccccctggtgtgaggtcgcgcccgaggcttgtacccgctagtgaggtgtttgagctggtcagcaaggagagggggtggggttccgcggaaggttctggaggggtcttggtaggtctgcagtgaaccgtcctgaggatggagtggggtcccatggtgcaggtctctgagcaaggcggaggtgtggaggagaggccggcttggggtggggcctcgcgccctagtgccggccggcctcagcccggctctgcctggtgctccctgcagtgccttctccatggccccgccctccccgcgtgtgcgccaggcttggggtccccgggagagcagagcttgcgcctcgggcatagggacgtggggtgcaggcgccaacatcagtggcagcagccagggccgtggtccagtcccactcggggatggagtgggccggcggccaaaccagtcactcggggaggaatgcggaggagcgctcattccattctatttaattgcagtgtacaaaattgtgtttgtatatagaataaactgtctgttgacagcggcaaaaaaaaaaaaaaaaaaaaaaaaaaaaaaaaaaaaaaaaaaaaaa

SEQ ID NO: 12 - DNA, 2654 bp, Homo sapiens
agcagcgccgcagccggacgagaaagcggaagatggcggcggcggccgggaggccgtgaggagagcggcggctgcgagggcggccgatggcggccgggaggcgccctcggacacttgcgggtcgttagggcgcgacgctgggaggcatgtcggagcacgtggagcccgcagctccggggcccgggcccaacggcggcggcggcggcccggcccccgcgcgcgggcctcgcacccccaatctcaaccccaaccccctcatcaacgtgcgcgaccggctcttccacgcgctgttcttcaagatggctgtcacctattcgcggctcttcccgcccgccttccgccgtctcttcgagttcttcgtgctgctcaaggccctgtttgtgctcttcgtcctggcctacatccacatcgtcttctcccgctcgcccatcaactgcctggagcatgtgcgtgacaagtggccgcgtgagggcatcctgcgtgtggaagtgcggcacaactcgagccgcgcgcccgtcttcctacagttctgtgacagcggcggccgcgggagcttcccgggcctggccgtggaaccaggcagcaacctggacatggaagatgaggaggaggaagagctgaccatggagatgtttgggaacagctccatcaagtttgagctggacatcgagcccaaggtgttcaagccgccgagtagcacagaggccctgaatgacagccaggagttccccttccccgagacgcccaccaaagtgtggccgcaggacgagtacatcgtggagtactcactagagtatggcttccttcgcctgtcgcaggccacccgccagcgcctgagcatccccgtcatggtggtcaccctggaccccacgcgggaccagtgcttcggggaccgcttcagccgcctgctgctggatgagttcctgggctacgatgacatcctcatgtccagcgtgaagggcctggccgagaacgaggagaacaagggcttcctgcggaatgtggtgtcgggcgagcactaccgctttgtgagcatgtggatggcgcggacgtcctacctggccgccttcgccatcatggtcatcttcacgctgagcgtgtccatgctgctgcggtactcacaccaccagatcttcgtcttcatcgtggacctgctgcagatgctggagatgaacatggccatcgccttccccgcagcgcccctgctgaccgtcatcctggccctcgtcgggatggaggccatcatgtcggagttcttcaacgacaccaccaccgccttctacatcatcctcatcgtgtggctcgcggaccagtatgacgccatctgctgccacaccagcaccagcaagcggcattggctgcgcattccatgatctacttcttccaccactacgagctgcctgccatcctgcagcaggtccgcatccaggagatgctgcttcaggcgccgccactgggccccgggacccccacggcgctgcccgatgacatgaacaacaactcgggcgccccggctacagcccctgactctgccggccagccccccgccctgggccccgtctcgcctggggccagcgggagtcccgggcctgtggcagcggcgcccagctccctggtggccgcggcagcctcagtggcagcagctgccggtggtgacctgggttggatggcagagaccgctgccatcatcacagacgcctccttcctgtccggcctgagcgcctccctcctggagcggcgtccagccagcccgctgggccctgctgggggcctcccccacgccccccaggacagtgtccccccgagtgactccgcagcttctgacacaactcccctgggggctgcggtaggcgggcctagcccggcctccatggccccaacggaggcgccctcggaggtggggtcctgagccgcacagctgagccgcctctgacccctgctggctgggcctgaccttcccgagcccgtgggggtgggggaggccagccacctccttcctctgggactgcccagcctgtgtcgggggctttcagggtttcgtggggtttgcccggaaggcggctttcctccccctggtgtgaggtcgcgcccgaggcttgtacccgctagtgaggtgtttgagctggtcagcaaggagagggggtggggttccgcggaaggttctggaggggtcttggtaggtctgcagtgaaccgtcctgaggatggagtggggtcccatggtgcaggtctctgagcaaggcggaggtgtggaggagaggccggcttggggtggggcctcgcgccctagtgccggccggcctcagcccggctctgcctggtgctccctgcagtgccttctccatggccccgccctccccgcgtgtgcgccaggcttggggtccccgggagagcagagcttgcgcctcgggcatagggacgtggggtgcaggcgccaacatcagtggcagcagccagggccgtggtccagtcccactcggggatggagtgggccggcggccaaaccagtcactcggggaggaatgcggaggagcgctcattccattctatttaattgcagtgtacaaaattgtgtttgtatatagaataaactgtctgttgacagcggcaaaaaaaaaaaaaaaaaaaaaaaaaaaaaaaaaaaaaaaaaaaaaa

SEQ ID NO: 13 - DNA, 4959 bp, Homo sapiens
gagctgcagtcagatccggggatggagggagccggagaagaggagtgagaaggccggggaggcaggccctgctgtcttcctgcaggccggcagcctgctggcagtggaggaccaggccgtccaggaaaggaaggggtcaggaggtcgggcagggcctcagcaggttcagacaagtccccagaagggagctgcaggcgccctcgagtccaggccccaagcctggctccggttgtccaaagagggcctaggccaggcctctggtgcggaaactgagtcacagccagacctcagggcacggcctagacgcttacgagccaaagttaggggtagagagcagagacctccggggggtctcagggagtagggggcttcagggcctcccagtctagagccggattggcgagttagacgcttgtagatccaaggttggattggggtggggtctctgggacgttggatcgctacgcaaggattggggggattcaagtgcttagagatcgaagtctgccctgggtagggggagtcagacaattggaaagcctaggtagttatttggggaggggtctctacgccttggcgaagcgcacagctgcatctttttggcttgaggcctgaggccttgtcgagaagcttccgtgaaagggtgggccagccgggccacgagaaagaaagtgaataaatcaggaatataagtgggcggggggcccctgagaggggggtcgcaaagggtgagacatggccaccaggcgtttaaccgacgctttcttgttgttgcggaataattccatccaaaaccggcagctgttagccgagcaagtgagtagtcacatcacctccagccctctgcattcacgtagcattgctgcggagctggacgagcttgctgatgaccgtatggcactggtgtcaggcatcagcttagatccagaagcagcgattggtgtgacaaaacggccacctcctaagtgggtggatggagtggatgaaattcagtatgatgttggccggattaagcagaagatgaaagaattggccagccttcatgacaagcatttaaacagacccaccctggatgacagcagcgaagaggaacatgccattgagataactacccaagagatcactcagctcttccacaggtgccagcgtgccgtgcaggccctgccgagccgggcccgggcctgctccgagcaggaggggcggctgcttgggaacgtggtggcctcgctggcgcaggccctgcaggaactctccaccagcttccggcacgcacagtcaggctacctcaaacgcatgaagaatcgagaggaaagatcccagcattttttcgacacatcagtaccactaatggatgatggagacgataacactctttaccatcggggttttacagaggaccagttagttctggtggagcagaacacactgatggtggaagagcgggaacgagagattcgccagattgtacagtccatttctgacctgaatgaaatattcagggacttaggggcgatgattgtagaacagggtacagtccttgacagaattgactataacgttgaacagtcctgtatcaaaactgaagatggtttgaaacagcttcacaaggcagaacagtatcaaaagaagaatcggaagatgcttgtgattttaatattatttgtcatcatcattgtgctcattgttgtcctcgttggcgtgaagtctcgataagtggcattgggttttcgtgtgtgccgcgcgtgtggatctcccgggtgtgaggggcttggcctgcgccccgccagctgcccgcagaggtgcagcctcgaggaatctgagggcgtcggggcagcgaacctttgcatccacggactcctccttccctagtcctgctcaagcggtccggggaatgggtttttgtttttccttcattgttgagaatttaaggacctttgatactgctgcacaatagagattgagttctgggatcagttataatatatattttttttagaaagagaaaatgagctgagagtttacaggcactgcagaagctgttcagtattatatgtgtatatgctatttttttagcagccatgtctgagcagaatgttaacataatttttggaaaaattttctttaaaccatctggtttttaagaaatttggtaccaaaaattgatgagtagaggcaaaaatgccccttcatctttctctatatattttccagttgaaaacaaactaagaagtcctttaagaatttataatccgttccccattaacttaatttagcttttccatcactgttaatgatcagagtaacaaagtgtgaaaaataagaaaccatcattgatgttaattaacacatttagatgggccagttaaaacagcttcataagttttaaattaattgtaaatggaatattcctcatttaaaatttttgcactgcattttctactgtaaaccaaaagaggttactaagcaaaaccacctaaatttaagttggtgatttaaatgaatctcacattaaaagaaagcttgacagtgttatgaaagccaccagactcagccagtgtgtccccatgggtatccccagccatccttgctcaatccattacttatatactaactacataatgacctgttcaaaccagactctatttaatgaactgtgaatttacacagaggccattttaaatgggtcaccccatttaggattagtggatctcaaattattaaccaaacatcactccatttcaaagtaaaatattccaccagcgatttgatttattggctcttccattgccactgagcaatgcccaggaagcaggcacattgccaaggactgggggcatcttgactaggaagctcctcgtttgtgtgagcgtgggtcagaccgccaaagtaggacttcatcgtttacctacctattatcaatatggtgcttgaatatattcctataactgtagaacagtgtggaaagtgatggtaactttgaagttgttcatgttttattggctttgttttaattgacactagtagagttttaatggtctttgtgtaaattttaatggcttttccattgtttttgcttctcttaaaaagtttaagaagaatatgacctcattaaatgtgctgttttatttggaccagtcacacaaaatgtctctctagagttgactttaaagttgtttacagaaatttaaactcaattccagagattgaagttgtccaaacagctcatgggcttagtgtccaaacccctgcccagccttccctttccaagttggtgccacctccaggtagccattggtggttttcctattactgatgtggctgtggaatgataaggtcctagaggggccctggcatttcaggaagcggacctggtattccctgacaaacattgcttaggaaagagggccggagaataagaagccagcacctcatcagtcagccctgcaatgtgagacttccgtagctgttgagagtcactgcaggtgttctttcatcccatctgattttaacccatggttgagacgttccaagttagatctgctgctcttaggtgtggggctgtccacattagggaacttgcctcaaaaacagtccacagtggcaataccggacttctgttcaagctttttaaagtgctgagccttacaaacccctgaaggaaggtgaccctttaagagaggatcatctttttttatatttattttcaccaaatagggtgatgagggttggtttttgttccctcaacccatttgggtaaaataacggatctgattagaaactgttttaaggaggggctgggctcggtggctcacgcctgtaatcccagactttgagaggccaaggcggtcacgaggtcaggagttcgagaccagcctagccaacatggtgaaaccccgtctctacaaaaaatacaaaaattagccgggtgggacacgcctgtaatcccagctactcaagaggctgaggcaggagaatagcttgaacccgggaggcagaggttgcagtgagccgagatcacaccactgcactccagcctgggtgacagagcgaggctccgtctcaaaaaaaaaaaaaaaaaattgttttagcgctgggtttcccaaggtgggagagacagacccagcctggagctggcccctggcctgtgtgctgacttcttggggtcctcaaaccactgtatttttctgttgagcctgtacttggggagagatcagtagcatttgaggaagtaagagaaaagaatcatggtacctcagggtttctttccctttactcgctggcagccattgtctgtgggcacctcatgtttttccacactctactgggccgtggaggtaacgatcacccaggccagtctcctctgcctgggatgcgccctctgagaggaggcctagcagggcaggctccctctgggcatccctggatgcagcctctggacacatgcctcctttaaagtgtccgggtgcagctcaggttgagtggaggtagaaggagaaacagacatgtttaccacgcgttttccaaagctcctgatctttcccaagattgtaactgaaaactgctgtctcttgttttgttcgttttgggggtggtggtgctggctgggccatgcttgtgaagtgatgtgtgtctctgatttaacggattcactgttttctctgctaattgagagagcgttatttacattatttatttgttttgacacaagtgctttcagtgttttatcctagctaatggcttcttaaaggtaataaaacccttccaacgtaattggtcagataaaactttttttcttgtatgcttaaataaagcaattagtgaagcacttctatccaaaatgacttttttgtccttttttaaaaccaatttactgttactggaaactttttgtacaataaagcaatcacgcagattaaagaacatcctgcaatcctagtattaattttaaaaaaaaaaaaa

SEQ ID NO: 14 - DNA, 4745 bp, Homo sapiens
gagctgcagtcagatccggggatggagggagccggagaagaggagtgagaaggccggggaggcaggccctgctgtcttcctgcaggccggcagcctgctggcagtggaggaccaggccgtccaggaaaggaaggggtcaggaggtcgggcagggcctcagcaggttcagacaagtccccagaagggagctgcaggcgccctcgagtccaggccccaagcctggctccggttgtccaaagagggcctaggccaggcctctggtgcggaaactgagtcacagccagacctcagggcacggcctagacgcttacgagccaaagttaggggtagagagcagagacctccggggggtctcagggagtagggggcttcagggcctcccagtctagagccggattggcgagttagacgcttgtagatccaaggttggattggggtggggtctctgggacgttggatcgctacgcaaggattggggggattcaagtgcttagagatcgaagtctgccctgggtagggggagtcagacaattggaaagcctaggtagttatttggggaggggtctctacgccttggcgaagcgcacagctgcatctttttggcttgaggcctgaggccttgtcgagaagcttccgtgaaagggtgggccagccgggccacgagaaagaaagtgaataaatcaggaatataagtgggcggggggcccctgagaggggggtcgcaaagggtgagacatggccaccaggcgtttaaccgacgctttcttgttgttgcggaataattccatccaaaaccggcagctgttagccgagcaagagctggacgagcttgctgatgaccgtatggcactggtgtcaggcatcagcttagatccagaagcagcgattggtgtgacaaaacggccacctcctaagtgggtggatggagtggatgaaattcagtatgatgttggccggattaagcagaagatgaaagaattggccagccttcatgacaagcatttaaacagacccaccctggatgacagcagcgaagaggaacatgccattgagataactacccaagagatcactcaggcatgaagaatcgagaggaaagatcccagcattttttcgacacatcagtaccactaatggatgatggagacgataacactctttaccatcggggttttacagaggaccagttagttctggtggagcagaacacactgatggtggaagagcgggaacgagagattcgccagattgtacagtccatttctgacctgaatgaaatattcagggacttaggggcgatgattgtagaacagggtacagtccttgacagaattgactataacgttgaacagtcctgtatcaaaactgaagatggtttgaaacagcttcacaaggcagaacagtatcaaaagaagaatcggaagatgcttgtgattttaatattatttgtcatcatcattgtgctcattgttgtcctcgttggcgtgaagtctcgataagtggcattgggttttcgtgtgtgccgcgcgtgtggatctcccgggtgtgaggggcttggcctgcgccccgccagctgcccgcagaggtgcagcctcgaggaatctgagggcgtcggggcagcgaacctttgcatccacggactcctccttccctagtcctgctcaagcggtccggggaatgggtttttgtttttccttcattgttgagaatttaaggacctttgatactgctgcacaatagagattgagttctgggatcagttataatatatattttttttagaaagagaaaatgagctgagagtttacaggcactgcagaagctgttcagtattatatgtgtatatgctatttttttagcagccatgtctgagcagaatgttaacataatttttggaaaaattttctttaaaccatctggtttttaagaaatttggtaccaaaaattgatgagtagaggcaaaaatgccccttcatctttctctatatattttccagttgaaaacaaactaagaagtcctttaagaatttataatccgttccccattaacttaatttagcttttccatcactgttaatgatcagagtaacaaagtgtgaaaaataagaaaccatcattgatgttaattaacacatttagatgggccagttaaaacagcttcataagttttaaattaattgtaaatggaatattcctcatttaaaatttttgcactgcattttctactgtaaaccaaaagaggttactaagcaaaaccacctaaatttaagttggtgatttaaatgaatctcacattaaaagaaagcttgacagtgttatgaaagccaccagactcagccagtgtgtccccatgggtatccccagccatccttgctcaatccattacttatatactaactacataatgacctgttcaaaccagactctatttaatgaactgtgaatttacacagaggccattttaaatgggtcaccccatttaggattagtggatctcaaattattaaccaaacatcactccatttcaaagtaaaatattccaccagcgatttgatttattggctcttccattgccactgagcaatgcccaggaagcaggcacattgccaaggactgggggcatcttgactaggaagctcctcgtttgtgtgagcgtgggtcagaccgccaaagtaggacttcatcgtttacctacctattatcaatatggtgcttgaatatattcctataactgtagaacagtgtggaaagtgatggtaactttgaagttgttcatgttttattggctttgttttaattgacactagtagagttttaatggtctttgtgtaaattttaatggcttttccattgtttttgcttctcttaaaaagtttaagaagaatatgacctcattaaatgtgctgttttatttggaccagtcacacaaaatgtctctctagagttgactttaaagttgtttacagaaatttaaactcaattccagagattgaagttgtccaaacagctcatgggcttagtgtccaaacccctgcccagccttccctttccaagttggtgccacctccaggtagccattggtggttttcctattactgatgtggctgtggaatgataaggtcctagaggggccctggcatttcaggaagcggacctggtattccctgacaaacattgcttaggaaagagggccggagaataagaagccagcacctcatcagtcagccctgcaatgtgagacttccgtagctgttgagagtcactgcaggtgttctttcatcccatctgattttaacccatggttgagacgttccaagttagatctgctgctcttaggtgtggggctgtccacattagggaacttgcctcaaaaacagtccacagtggcaataccggacttctgttcaagctttttaaagtgctgagccttacaaacccctgaaggaaggtgaccctttaagagaggatcatctttttttatatttattttcaccaaatagggtgatgagggttggtttttgttccctcaacccatttgggtaaaataacggatctgattagaaactgttttaaggaggggctgggctcggtggctcacgcctgtaatcccagactttgagaggccaaggcggtcacgaggtcaggagttcgagaccagcctagccaacatggtgaaaccccgtctctacaaaaaatacaaaaattagccgggtgggacacgcctgtaatcccagctactcaagaggctgaggcaggagaatagcttgaacccgggaggcagaggttgcagtgagccgagatcacaccactgcactccagcctgggtgacagagcgaggctccgtctcaaaaaaaaaaaaaaaaaattgttttagcgctgggtttcccaaggtgggagagacagacccagcctggagctggcccctggcctgtgtgctgacttcttggggtcctcaaaccactgtatttttctgttgagcctgtacttggggagagatcagtagcatttgaggaagtaagagaaaagaatcatggtacctcagggtttctttccctttactcgctggcagccattgtctgtgggcacctcatgtttttccacactctactgggccgtggaggtaacgatcacccaggccagtctcctctgcctgggatgcgccctctgagaggaggcctagcagggcaggctccctctgggcatccctggatgcagcctctggacacatgcctcctttaaagtgtccgggtgcagctcaggttgagtggaggtagaaggagaaacagacatgtttaccacgcgttttccaaagctcctgatctttcccaagattgtaactgaaaactgctgtctcttgttttgttcgttttgggggtggtggtgctggctgggccatgcttgtgaagtgatgtgtgtctctgatttaacggattcactgttttctctgctaattgagagagcgttatttacattatttatttgttttgacacaagtgctttcagtgttttatcctagctaatggcttcttaaaggtaataaaacccttccaacgtaattggtcagataaaactttttttcttgtatgcttaaataaagcaattagtgaagcacttctatccaaaatgacttttttgtccttttttaaaaccaatttactgttactggaaactttttgtacaataaagcaatcacgcagattaaagaacatcctgcaatcctagtattaattttaaaaaaaaaaaaa

SEQ ID NO: 15 - DNA, 4896 bp, Homo sapiens
gagctgcagtcagatccggggatggagggagccggagaagaggagtgagaaggccggggaggcaggccctgctgtcttcctgcaggccggcagcctgctggcagtggaggaccaggccgtccaggaaaggaaggggtcaggaggtcgggcagggcctcagcaggttcagacaagtccccagaagggagctgcaggcgccctcgagtccaggccccaagcctggctccggttgtccaaagagggcctaggccaggcctctggtgcggaaactgagtcacagccagacctcagggcacggcctagacgcttacgagccaaagttaggggtagagagcagagacctccggggggtctcagggagtagggggcttcagggcctcccagtctagagccggattggcgagttagacgcttgtagatccaaggttggattggggtggggtctctgggacgttggatcgctacgcaaggattggggggattcaagtgcttagagatcgaagtctgccctgggtagggggagtcagacaattggaaagcctaggtagttatttggggaggggtctctacgccttggcgaagcgcacagctgcatctttttggcttgaggcctgaggccttgtcgagaagcttccgtgaaagggtgggccagccgggccacgagaaagaaagtgaataaatcaggaatataagtgggcggggggcccctgagaggggggtcgcaaagggtgagacatggccaccaggcgtttaaccgacgctttcttgttgttgcggaataattccatccaaaaccggcagctgttagccgagcaacttgctgatgaccgtatggcactggtgtcaggcatcagcttagatccagaagcagcgattggtgtgacaaaacggccacctcctaagtgggtggatggagtggatgaaattcagtatgatgttggccggattaagcagaagatgaaagaattggccagccttcatgacaagcatttaaacagacccaccctggatgacagcagcgaagaggaacatgccattgagataactacccaagagatcactcagctcttccacaggtgccagcgtgccgtgcaggccctgccgagccgggcccgggcctgctccgagcaggaggggcggctgcttgggaacgtggtggcctcgctggcgcaggccctgcaggaactctccaccagcttccggcacgcacagtcaggctacctcaaacgcatgaagaatcgagaggaaagatcccagcattttttcgacacatcagtaccactaatggatgatggagacgataacactctttaccatcggggttttacagaggaccagttagttctggtggagcagaacacactgatggtggaagagcgggaacgagagattcgccagattgtacagtccatttctgacctgaatgaaatattcagggacttaggggcgatgattgtagaacagggtacagtccttgacagaattgactataacgttgaacagtcctgtatcaaaactgaagatggtttgaaacagcttcacaaggcagaacagtatcaaaagaagaatcggaagatgcttgtgattttaatattatttgtcatcatcattgtgctcattgttgtcctcgttggcgtgaagtctcgataagtggcattgggttttcgtgtgtgccgcgcgtgtggatctcccgggtgtgaggggcttggcctgcgccccgccagctgcccgcagaggtgcagcctcgaggaatctgagggcgtcggggcagcgaacctttgcatccacggactcctccttccctagtcctgctcaagcggtccggggaatgggtttttgtttttccttcattgttgagaatttaaggacctttgatactgctgcacaatagagattgagttctgggatcagttataatatatattttttttagaaagagaaaatgagctgagagtttacaggcactgcagaagctgttcagtattatatgtgtatatgctatttttttagcagccatgtctgagcagaatgttaacataatttttggaaaaattttctttaaaccatctggtttttaagaaatttggtaccaaaaattgatgagtagaggcaaaaatgccccttcatctttctctatatattttccagttgaaaacaaactaagaagtcctttaagaatttataatccgttccccattaacttaatttagcttttccatcactgttaatgatcagagtaacaaagtgtgaaaaataagaaaccatcattgatgttaattaacacatttagatgggccagttaaaacagcttcataagttttaaattaattgtaaatggaatattcctcatttaaaatttttgcactgcattttctactgtaaaccaaaagaggttactaagcaaaaccacctaaatttaagttggtgatttaaatgaatctcacattaaaagaaagcttgacagtgttatgaaagccaccagactcagccagtgtgtccccatgggtatccccagccatccttgctcaatccattacttatatactaactacataatgacctgttcaaaccagactctatttaatgaactgtgaatttacacagaggccattttaaatgggtcaccccatttaggattagtggatctcaaattattaaccaaacatcactccatttcaaagtaaaatattccaccagcgatttgatttattggctcttccattgccactgagcaatgcccaggaagcaggcacattgccaaggactgggggcatcttgactaggaagctcctcgtttgtgtgagcgtgggtcagaccgccaaagtaggacttcatcgtttacctacctattatcaatatggtgcttgaatatattcctataactgtagaacagtgtggaaagtgatggtaactttgaagttgttcatgttttattggctttgttttaattgacactagtagagttttaatggtctttgtgtaaattttaatggcttttccattgtttttgcttctcttaaaaagtttaagaagaatatgacctcattaaatgtgctgttttatttggaccagtcacacaaaatgtctctctagagttgactttaaagttgtttacagaaatttaaactcaattccagagattgaagttgtccaaacagctcatgggcttagtgtccaaacccctgcccagccttccctttccaagttggtgccacctccaggtagccattggtggttttcctattactgatgtggctgtggaatgataaggtcctagaggggccctggcatttcaggaagcggacctggtattccctgacaaacattgcttaggaaagagggccggagaataagaagccagcacctcatcagtcagccctgcaatgtgagacttccgtagctgttgagagtcactgcaggtgttctttcatcccatctgattttaacccatggttgagacgttccaagttagatctgctgctcttaggtgtggggctgtccacattagggaacttgcctcaaaaacagtccacagtggcaataccggacttctgttcaagctttttaaagtgctgagccttacaaacccctgaaggaaggtgaccctttaagagaggatcatctttttttatatttattttcaccaaatagggtgatgagggttggtttttgttccctcaacccatttgggtaaaataacggatctgattagaaactgttttaaggaggggctgggctcggtggctcacgcctgtaatcccagactttgagaggccaaggcggtcacgaggtcaggagttcgagaccagcctagccaacatggtgaaaccccgtctctacaaaaaatacaaaaattagccgggtgggacacgcctgtaatcccagctactcaagaggctgaggcaggagaatagcttgaacccgggaggcagaggttgcagtgagccgagatcacaccactgcactccagcctgggtgacagagcgaggctccgtctcaaaaaaaaaaaaaaaaaattgttttagcgctgggtttcccaaggtgggagagacagacccagcctggagctggcccctggcctgtgtgctgacttcttggggtcctcaaaccactgtatttttctgttgagcctgtacttggggagagatcagtagcatttgaggaagtaagagaaaagaatcatggtacctcagggtttctttccctttactcgctggcagccattgtctgtgggcacctcatgtttttccacactctactgggccgtggaggtaacgatcacccaggccagtctcctctgcctgggatgcgccctctgagaggaggcctagcagggcaggctccctctgggcatccctggatgcagcctctggacacatgcctcctttaaagtgtccgggtgcagctcaggttgagtggaggtagaaggagaaacagacatgtttaccacgcgttttccaaagctcctgatctttcccaagattgtaactgaaaactgctgtctcttgttttgttcgttttgggggtggtggtgctggctgggccatgcttgtgaagtgatgtgtgtctctgatttaacggattcactgttttctctgctaattgagagagcgttatttacattatttatttgttttgacacaagtgctttcagtgttttatcctagctaatggcttcttaaaggtaataaaacccttccaacgtaattggtcagataaaactttttttcttgtatgcttaaataaagcaattagtgaagcacttctatccaaaatgacttttttgtccttttttaaaaccaatttactgttactggaaactttttgtacaataaagcaatcacgcagattaaagaacatcctgcaatcctagtattaattttaaaaaaaaaaaaa

SEQ ID NO: 16 - DNA, 4914 bp, Homo sapiens
ctcatgggagtatgaaggagatggtaggaggctgctgcgtatgttcggacgagaggggctgggccgagaacccgctggtctactgcgatgggcacgcgtgcagcgtggccgtccaccaagcttgctatggcatcgttcaggtgccaacgggaccctggttctgccggaaatgtgaatctcaggagcgagcagccagggtgaggtgtgagctgtgcccacacaaagacggggcattgaagaggactgataatggaggctgggcacacgtggtgtgtgccctctacatccccgaggtgcaatttgccaacgtgctcaccatggagcccatcgtgctgcagtacgtgcctcatgatcgcttcaacaagacctgttacatctgcgaggagcagggccgggagagcaaggcggcctcgggagcctgcatgacctgtaaccgccatggatgtcgacaagctttccacgtcacctgtgcccaaatggcaggcttgctgtgtgaggaagaagtgctggaggtggacaacgtcaagtactgcggctactgcaaataccacttcagcaagatgaagacatcccggcacagcagcgggggaggcggaggaggcgctggaggaggaggtggcagcatggggggaggtggcagtggtttcatctctgggaggagaagccggtcagcctcaccatccacgcagcaggagaagcaccccacccaccacgagaggggccagaagaagagtcgaaaggacaaagaacgccttaagcagaagcacaagaagcggcctgagtcgccccccagcatcctcaccccgcccgtggtccccactgctgacaaggtctcctcctcggcttcctcttcctcccaccacgaggccagcacgcaggagacctctgagagcagcagggagtcaaaggggaaaaagtcttccagccatagcctgagtcataaagggaagaaactgagcagtgggaaaggtgtgagcagttttacctccgcctcctcttcttcctcctcctcttcctcctcctctggggggcccttccagcctgcagtctcgtccctgcagagctcccctgacttctctgcattccccaagctggagcagccagaggaggacaagtactccaagcccacagcccccgccccttcagcccctccttctccctcagctcccgagccccccaaggctgacctttttgagcagaaggtggtcttctctggctttgggcccatcatgcgcttctccaccaccacctccagctcaggccgggcccgggcgccctcccctggggactataagtctccccacgtcacggggtctggggcctcggcaggcacccacaaacggatgcccgcactgagtgccacccctgtgcctgctgatgagacccctgagacaggcctgaaggagaagaagcacaaagccagcaagaggagccgccatgggccaggccgtcccaagggcagccggaacaaggagggcactgggggcccagctgccccatccttgcccagtgcccagctggctggctttaccgccactgctgcctcacccttctctggaggttccctggtcagctccggcctgggaggtctgtcctcccgaacctttgggccttctgggagcttgcccagcttgagcctggagtcccccttactaggggcaggcatctacaccagtaataaggaccccatctcccacagtggcgggatgctgcgggctgtctgcagcacccctctctcctccagcctcctggggcccccagggacctcggccctgccccgcctcagccgctccccgttcaccagcaccctcccctcctcttctgcttctatctccaccactcaggtgttttctctggctggctctacctttagcctcccttctacccacatctttggaacccccatgggtgccgttaatcccctcctctcccaagctgagagcagccacacagagccagacctggaggactgcagcttccggtgtcgggggacctcccctcaggagagtctgtcttccatgtcccccatcagcagcctccccgcactcttcgaccagacagcctctgcaccctgtgggggcggccagttagacccggcggccccagggacgactaacatggagcagcttctggagaagcagggcgacggggaggccggcgtcaacatcgtggagatgctgaaggcgctgcacgcgctgcagaaggagaaccagcggctgcaagagcagatcctgagcctgacggccaaaaaggagcggctgcagattctcaacgtgcagctctctgtgcccttccctgccctgcctgctgccctgcctgccgccaacggccctgtccctgggccctatggcctgcctccccaagccggcagcagcgactccttgagcaccagcaagagccctccgggaaagagcagcctcggcctggacaactcgctgtccacttcttctgaggacccacactcaggctgcccgagccgcagcagctcgtcgctgtccttccacagcacgcccccaccgctgcccctcctccagcagagccctgccactctgcccctggccctgcctggggcccctgccccactcccgccccagccgcagaacgggttgggccgggcacccggggcagcggggctgggggccatgcccatggctgaggggctgttgggggggctggcaggcagtgggggcctgcccctcaatgggctccttggggggttgaatggggccgctgcccccaaccccgcaagcttgagccaggctggcggggcccccacgctgcagctgccaggctgtctcaacagccttacagagcagcagagacatctccttcagcagcaagagcagcagctccagcaactccagcagctcctggcctccccgcagctgaccccggaacaccagactgttgtctaccagatgatccagcagatccagcagaaacgggagctgcagcgcctgcagatggctgggggctcccagctgcccatggccagcctgctggcaggaagctccaccccgctgctgtctgcgggtacccctggcctgctgcccacagcgtctgctccacccctgctgcccgctggagccctagtggctccctcgcttggcaacaacacaagtctcatggccgcagcagctgcagctgcagcagtagcagcagcaggcggacctccagtcctcactgcccagaccaaccccttcctcagcctgtcgggagcagagggcagtggcggtggccccaaaggagggaccgctgacaaaggagcctcagccaaccaggaaaaaggctaaatccacccttacccctcctgacccccccaagtggagggaacagatcctggcctgaggggtcctagcctggagcaggcgcctgcgcccagaccctggagagccttgacccagagcctgtgctgaggtccagggagtgtggagagctcctggtgtcgaggactgagactgagaggggagccccctccatctggcccccttccctttccgcactgtccgctttgtgaggctcagaggaaggacagtctgcaagcccgcctaggaggtccatccccagcaaatgttttggaggtccccccagagagcagagtgggccatggcagaagtagggggttggttggacctgtcacatgaaatggatcagcacttgaatggggagaagtggagggagaggccctgggcctgtccctgcggggaaatcttttatggaagaagggctggacccactttacctgcagtttcttcccagctcgggcagatggcagaagggaccccttggactttttctcgccatccctccccccagcgcaggggcacaagctgagcttgtaaaagcccacagatgttgggggctggagaaggggcaggagagcatcacactcagccccagcctcctcaacctcttggggccccgtgatggggaggagagggcaggtgcggggaggctctggccttccttggtgccccgccctttgtttgcactattggacttaggagtgccgagggtggggagatggagctgcccgtctcagtgtgtgagtgtgtgtgtgcgtgcatgtgtgtgtgtgtgtgtgtgtgtgtgtgtgtctgtctgcctgtctctctcctcctggacccagggcagccaagggcagggataggcgcagtggtcagatgaagcagcgccagagaggggacctcccagctcttatttgcaccctccccacctcaccaactttggtccctctctgggggcatgaatggttaacaaacaccagagcagtactccaatattggagagtcgctgggggcacagggctttgaatcagggtagtatcctgccttccctcccctgaccccacatggtctcagggcccccttagggccccctaccccactgatagcttcctccttctctggcacaaggggagccccagggcttgggggagggcgtaaggtggggggaaatgccactgcttttagcaaaagcctccctcccagaattagccagcttgcctcctgcaccccacccccaccaaccaggggagccactaagctgactaacaactgtcccctcacccaccagctatttccccagggtagagtgggcaattctcaccttcaaagagtccccgcctgcccaggcctttggcacagaggctgagtggacagtcaggagagaggcgagaggcaaggcgaagcctgtgtccctgtttcagttgcactggggttggagcccagggtaggggtttccagcttccccaggctccggccttgtcagtctctttgcatgtgtggatttttctgtgtgtgtttctgtttgggtttttgttgttgggttttttttttttttttaataaagaaaagaagatgtgtatatttttggcaacgacaaaaaaaaaaaaaaaaaaaaaaaaaaaaaaaa

SEQ ID NO: 17 - DNA, 3608 bp, Homo sapiens
agagggaggcggggcggaaaggcgagaggtgtctcctccaccggagccaggggagacccgagcaagctccgtgacagcacgtcggccgccatgtcgccgagtggggctggaaacagacccggcgcccagcggtagccctccttgcgcctccgattcccagacatggaaggtctttaatgtaactttaaatggttcaccaaaggatgctctaatggatgacagcgatactcctacatattatctgcaaatagaaccacaagatggatgtcatcctggtgacagcgtggaaaggagtgtgacctgtctgccttctgcatcagatgaaaatgaaaatcagcttgacggggacgggcatgagcatctgaccagcagtgacagtgcgatgggaaagccccaagtgtctgagcaggacagtctcaataataatgaaagctgcacattgagctgcgaggtggctgcaggtgagaactcgcaaaacaccctttgtgaagcctccagagatgaacaggccttcttgggaaaggacaaaaaaattcctggaaaaagaagtccaagaagcaaaaaagggactgctaagaagataccaccaggacttttttcaggagatattgcacctttaatgcaagaaaaagtactaagcgcagtcacatatgctgttgatgatgaagaagctgctgaagtaaatgctaatgagcagccagaggcgccaaagcttgttctgcagtctctgttttcacttatacgaggtgaagttgagcagttggattcaagagcacttcccctttgccttcatcagatagcagaatcctatttccaggaggaggactacgagaaagcaatgaaattcattcagctagaacgattgtatcatgagcaattgctcgcaaatctttctgccattcaagaacagtgggaaacaaaatggaaaactgtgcaaccacatacagttacggctctaaggaattcagaaaagggatttaatggtgaagattttgaacggcttacgaaaatttgtgcaacacatcaagatcctcttttatccaaacataagatagcagctgtggagaagtcccaggaaaggaaatgctccacgcagttactagtgtctgaagatccaaaggaaggaggagctaccaccaaagagtcagagagtaaaacttgtctcggcacagagtcaagtaaagaaagccaacatacagtggagcccctggggagcagtccctgctgtcatcagatggacgtgcaaacagattccccaagcctttcggtaactgcaggaaaggaccacatggaggagctgctctgcagcgctgaagccacgttagcgctccacacccagtcctccgagacagcagggagcccgtctgggccagactcttctgaggatgcttgtgaggatgacagtcgcttgcagctggctcaaacagaggcctgccaggatgtggccagaatagagggcattgctgaagaccctaaggtgtttctttccagcaagtcaaagacagagccgttgatttcaccaggctgtgaccgtatacctcctgcattgatttctgagggtaaatattcacaggctcagaggaaagaactccgtttgccacttcgggatgcttctgaggcgttgcccacagaccaacttgagaacaatgaattaaatgagctgcagcagcctgatcttacagacagtgatggaaaatcaccacaggcgcaggctgactcagacggttctgagaatgtgctctgtggaaataatcaaatatctgacttaggcatactgcttccagaggtgtgtatggccccagaggaaaagggagataaagacgaccaactcaacaaagaaacagaagactatttgaacagccttttagaaggatgtttaaaagatactgaagattccctttcctatgaagataaccaagacgacgactccgatctccttcaagatctctctcctgaagaagcatcctatagtctccaggagaatctgccttctgatgagagctgtctttctcttgatgatcttgccaaaaggatagagattgcagaggttgttcctactgaaggattggtctccatattaaagaagaggaatgatactgtaggagatcatcctgcccaaatgcaacacaaaccatctaagcgaagagtgagattccaagaaatagacgatagcttggatcaagatgaagttggaggtggctcctgtattttgctggtcttgctgtgcatagcaacggttttcctcagtgttggaggaactgcattatactgcactttcggtgacatggagtcacctgtttgtactgactttgcagacaacatggacttctattacactaagttacttcagggagtggcagaactgaagcactggatctacctctcctagcagcattccagacacagacatgctggcagtgagagtgaaaggcgggagactttctaaacagtttttctttcaggaattctgtagcattcccccttccctctgttaggaaccaaggacatcagaaatagcaactttaagtggcaagccggaggaactctgttagaataatccacacagtgaggcaaatatcaatctaagcattgtggatggaaggaatggtctttggagagagcatatccatctcctcctcactgcctcctaatgtcatgaggtacactgagcagaattaaacagggtagtcttaaccacactatttttagctaccttgtcaagctaatggttaaagaacacttttggtttacacttgttgggtcatagaagttgctttccgccatcacgcaataagtttgtgtgtaatcagaaggagttaccttatggtttcagtgtcattctttagttaacttgggagctgtgtaatttaggctttgcgtattatttcacttctgttctccacttatgaagtgattgtgtgtttgcgtgtgtgtgcgtgcgcatgtgcttccggcagttaacataagcaaatacccaacatcacaaagatgatctttcttcttttaacttgatgatgatgtgcaggcacaaatctttggagaaggcttaactgtggaatagatgaattctagaactcttgaccctgcaatgagaaactgtgacagatctgtgtcaattaacttgattagccagaaattaatcacaggcctagagaccaaagaaaaagctcccctgagtctcaggcaacagttttgtcacggatgcaaagcttcctgaaatcatgaatgctggactcagtttggcaaacgcttacacctattatgttctgagattctgagaaccagaatgcaaacttaagtaagatacagttcccactgtaggtgttttaatcctggtcttatatagaataaaccagtactttgctgagtgaaatcaccatatagaattcagtattaacagatcatgcattcagatgcttgaatgtgcattcttgttgtgggcttgatttagatcctattgcggggtcattacgcaaaaattcaatcataccttccatagacaaatgtctgatttttgtttaaatctgtccgttaggtggcctttccttatctgaggtgtagtggtctaacatttaggaagccttgctttgactttatcgggcagcatt

SEQ ID NO: 18 - DNA, 2330 bp, Homo sapiens
gcacgagccggctggccgtgatgctgcccactggtggtcccccgctcccggggtccccggccggccaagcaggagggctctaactccgtgaggaccccagcattatttctataattgtttgtgagaaggactgaatcccagagcattgccttgttgctgacctttcagtatggggaggattggcatctcctgtctttttcctgcttcttggcattttagcatatctccagtagggtgtcctcgaattctgaataccaatttacgccaaattatggtcattagtgtcctggctgctgctgtttcacttttatatttttctgttgtcataatccgaaataagtatgggcgactaaccagagacaagaaatttcaaaggtacctggcacgagttaccgacattgaagctacagacaccaataaccccaatgtgaactatgggatcgtggtggactgtggtagcagtgggtctcgagtatttgtttactgctggccaaggcataatggcaatccacatgatctgttggatatcaggcaaatgagggataaaaaccgaaagccagtggtcatgaaaataaaaccgggcatttcagaatttgctacctctccagagaaagtcagtgattacatttctccacttttgaactttgctgcagagcatgtgccacgggcaaaacacaaagagacacctctctacattctctgcacggctggaatgagaatcctccccgaaagccagcagaaagctattctggaagaccttctgaccgatatccccgtgcactttgactttctgttttctgactctcatgcagaagtaatttctgggaaacaggaaggtgtgtatgcttggattggcattaattttgtccttggacgatttgagcatattgaagatgatgatgaggccgttgtggaagttaacattcctggaagtgaaagcagcgaagccattgtccgtaaaaggacagcgggcattctcgacatgggcggcgtgtcgactcagatagcgtacgaagtccccaaaactgtaagctttgcgtcctcacagcaggaagaagtagctaaaaacttgttagctgaatttaacttgggatgtgatgttcaccaaactgagcatgtgtatcgagtctatgtggccacgtttcttgggtttggtggcaatgctgctcgacagagatacgaagacagaatatttgccaacaccattcaaaagaacaggctcctgggtaaacagactggtctgactcctgatatgccgtacttggacccctgcctacccctagacattaaagatgaaatccagcaaaatggacaaaccatatacctacgagggactggagactttgacctgtgtcgagagactatccagcctttcatgaataaaacaaacgagacccagacttccctcaatggggtctaccagcccccaattcacttccagaacagtgaattctatggcttctccgaattctactactgcaccgaggatgtgttacgaatggggggagactacaatgctgctaaatttactaaagctgcaaaggattattgtgcaacaaagtggtccattttgcgggaacgctttgaccgaggactgtacgcctctcatgctgacctccacaggcttaagtatcagtgcttcaaatcggcctggatgtttgaggtgtttcataggggcttttcgtttcctgtcaactataaaagcttaaagactgccttgcaagtttacgacaaggaggttcagtggacccttggagccatcctctacaggacccgctttctaccgttaagagacatccagcaggaggccttccgagccagtcacacccactggcggggcgtttcctttgtctacaaccactacctgttctctggctgcttcctggtggtgctgctggccatcctgctgtacctgctgcggctgcggcgcatccacaggcgcactccccggagcagctcggccgccgccctctggatggaggagggccttcccgcccagaatgccccggggaccttgtgatccagctcacagctccacgaagactcaaaaggaaaagccatttttgcctcagggtttctcctctttattttcctgtggttttgttttttctttcccttttttgttcctccaaacaaaaacaaaatgcaggccgagcgcggtggctcacgcctgtaatcccagcactttgggaggccgaggcgggcggatcatgaggtcaggagatcgagaccatcctggctaacacggtgaaaccccgtctctactaaaaatacaaaaaattagctgggtgtggtggcgggcgcccgttagtccaactactcaggaaggc

SEQ ID NO: 19 - DNA, 2756 bp, Homo sapiens
agttcctgccagtgagtccctaggcctccatctctctcccttgctgtaccaccttcaccaccatccatgcgaccccaagagccttaatgactctagaagagactccaggcaggggaagctgaaaggacctttcactccctacttttggccagggccttctgtgccacctgccaagaccagcaggcctaccctctgaagaggtccaagcaacggaagtactactacgaagctgcctttctggccatccttgagaaaaatagacagatggccaaggagaggggcctaataagccccagtgattttgcccagctgcaaaaatacatggaatactccaccaaaaaggtcagtgatgtcctaaagctcttcgaggatggcgagatggctaaatatgtccaaggagatgccattgggtacgagggattccagcaattcctgaaaatctatctcgaagtggataatgttcccagacacctaagcctggcactgtttcaatcctttgagactggtcactgcttaaatgagacaaatgtgacaaaagatgtggtgtgtctcaatgatgtttcctgctacttttcccttctggagggtggtcggccagaagacaagttagaattcaccttcaagctgtacgacacggacagaaatgggatcctggacagctcagaagtggacaaaattatcctacagatgatgcgagtggctgaatacctggattgggatgtgtctgagctgaggccgattcttcaggagatgatgaaagagattgactatgatggcagtggctctgtctctcaagctgagtgggtccgggctggggccaccaccgtgccactgctagtgctgctgggtctggagatgactctgaaggacgacggacagcacatgtggaggcccaagaggttccccagaccagtctactgcaatctgtgcgagtcaagcattggtcttggcaaacagggactgagctgtaacctctgtaagtacactgttcacgaccagtgtgccatgaaagccctgccttgtgaagtcagcacctatgccaagtctcggaaggacattggtgtccaatcacatgtgtgggtgcgaggaggctgtgagtccgggcgctgcgaccgctgtcagaaaaagatccggatctaccacagtctgaccgggctgcattgtgtatggtgccacctagagatccacgatgactgcctgcaagcggtgggccatgagtgtgactgtgggctgctccgggatcacatcctgcctccatcttccatctatcccagtgtcctggcctctggaccggatcgtaaaaatagcaaaacaagccagaagaccatggatgatttaaatttgagcacctctgaggctctgcggattgaccctgttcctaacacccacccacttctcgtctttgtcaatcctaagagtggcgggaagcaggggcaaagggtgctctggaagttccagtatatattaaaccctcgacaggtgttcaacctcctaaaggatggtcctgagatagggctccgattattcaaggatgttcctgatagccggattttggtgtgtggtggagacggcacagtaggctggattctagagaccattgacaaagctaacttgccagttttgcctcctgttgctgtgttgcccctgggtactggaaatgatctggctcgatgcctaagatggggaggaggttatgaaggacagaatctggcaaagatcctcaaggatttagagatgagtaaagtggtacatatggatcgatggtctgtggaggtgatacctcaacaaactgaagaaaaaagtgacccagtcccctttcaaatcatcaataactacttctctattggcgtggatgcctctattgctcatcgattccacatcatgcgagagaaatatccggagaagttcaacagcagaatgaagaacaagctatggtacttcgaatttgccacatctgaatccatcttctcaacatgcaaaaagctggaggagtctttgacagttgagatctgtgggaaaccgctggatctgagcaacctgtccctagaaggcatcgcagtgctaaacatccctagcatgcatggtggctccaacctctggggtgataccaggagaccccatggggatatctatgggatcaaccaggccttaggtgctacagctaaagtcatcaccgaccctgatatcctgaaaacctgtgtaccagacctaagtgacaagagactggaagtggttgggctggagggtgcaattgagatgggccaaatctataccaagctcaagaatgctggacgtcggctggccaagtgctctgagatcaccttccacaccacaaaaacccttcccatgcaaattgacggagaaccctggatgcagacgccctgtacaatcaagatcacccacaagaaccagatgcccatgctcatgggcccacccccccgctccaccaatttctttggcttcttgagctaagggggacacccttggcctccaagccagccttgaacccacctccctgtccctggactctactcccgaggctctgtacattgctgccacatactcctgccagcttgggggagtgttccttcaccctcacagtatttattatcctgcaccacctcactgttccccatgcgcacacacatacacacaccccaaaacacatacattgaaagtgcctcatctgaataaaatgacttgtgtttcccctttgggatctgctaaaaaaaaaaaaaaaaaaaaaaaaaaaaaaa

SEQ ID NO: 20 - DNA, 2801 bp, Homo sapiens
gcggccgcgtctgcctggcccgtcccctccagcccagctcgggctccagctccagcgccggcgcttcagctgcgaccgcgagccctctcaagcaaggtagagaccccgcgagccccccagcgccccaccctcccccatcggaaaaggacaggggtagggaagccgaggacccacgggctgcgttcgtgctgctgggtcgggaaggaggaagcgtgacagctggagcgggcctaccctctgaagaggtccaagcaacggaagtactactacgaagctgcctttctggccatccttgagaaaaatagacagatggccaaggagaggggcctaataagccccagtgattttgcccagctgcaaaaatacatggaatactccaccaaaaaggtcagtgatgtcctaaagctcttcgaggatggcgagatggctaaatatgtccaaggagatgccattgggtacgagggattccagcaattcctgaaaatctatctcgaagtggataatgttcccagacacctaagcctggcactgtttcaatcctttgagactggtcactgcttaaatgagacaaatgtgacaaaagatgtggtgtgtctcaatgatgtttcctgctacttttcccttctggagggtggtcggccagaagacaagttagaattcaccttcaagctgtacgacacggacagaaatgggatcctggacagctcagaagtggacaaaattatcctacagatgatgcgagtggctgaatacctggattgggatgtgtctgagctgaggccgattcttcaggagatgatgaaagagattgactatgatggcagtggctctgtctctcaagctgagtgggtccgggctggggccaccaccgtgccactgctagtgctgctgggtctggagatgactctgaaggacgacggacagcacatgtggaggcccaagaggttccccagaccagtctactgcaatctgtgcgagtcaagcattggtcttggcaaacagggactgagctgtaacctctgtaagtacactgttcacgaccagtgtgccatgaaagccctgccttgtgaagtcagcacctatgccaagtctcggaaggacattggtgtccaatcacatgtgtgggtgcgaggaggctgtgagtccgggcgctgcgaccgctgtcagaaaaagatccggatctaccacagtctgaccgggctgcattgtgtatggtgccacctagagatccacgatgactgcctgcaagcggtgggccatgagtgtgactgtgggctgctccgggatcacatcctgcctccatcttccatctatcccagtgtcctggcctctggaccggatcgtaaaaatagcaaaacaagccagaagaccatggatgatttaaatttgagcacctctgaggctctgcggattgaccctgttcctaacacccacccacttctcgtctttgtcaatcctaagagtggcgggaagcaggggcaaagggtgctctggaagttccagtatatattaaaccctcgacaggtgttcaacctcctaaaggatggtcctgagatagggctccgattattcaaggatgttcctgatagccggattttggtgtgtggtggagacggcacagtaggctggattctagagaccattgacaaagctaacttgccagttttgcctcctgttgctgtgttgcccctgggtactggaaatgatctggctcgatgcctaagatggggaggaggttatgaaggacagaatctggcaaagatcctcaaggatttagagatgagtaaagtggtacatatggatcgatggtctgtggaggtgatacctcaacaaactgaagaaaaaagtgacccagtcccctttcaaatcatcaataactacttctctattggcgtggatgcctctattgctcatcgattccacatcatgcgagagaaatatccggagaagttcaacagcagaatgaagaacaagctatggtacttcgaatttgccacatctgaatccatcttctcaacatgcaaaaagctggaggagtctttgacagttgagatctgtgggaaaccgctggatctgagcaacctgtccctagaaggcatcgcagtgctaaacatccctagcatgcatggtggctccaacctctggggtgataccaggagaccccatggggatatctatgggatcaaccaggccttaggtgctacagctaaagtcatcaccgaccctgatatcctgaaaacctgtgtaccagacctaagtgacaagagactggaagtggttgggctggagggtgcaattgagatgggccaaatctataccaagctcaagaatgctggacgtcggctggccaagtgctctgagatcaccttccacaccacaaaaacccttcccatgcaaattgacggagaaccctggatgcagacgccctgtacaatcaagatcacccacaagaaccagatgcccatgctcatgggcccacccccccgctccaccaatttctttggcttcttgagctaagggggacacccttggcctccaagccagccttgaacccacctccctgtccctggactctactcccgaggctctgtacattgctgccacatactcctgccagcttgggggagtgttccttcaccctcacagtatttattatcctgcaccacctcactgttccccatgcgcacacacatacacacaccccaaaacacatacattgaaagtgcctcatctgaataaaatgacttgtgtttcccctttgggatctgctaaaaaaaaaaaaaaaaaaaaaaaaaaaaaaa

SEQ ID NO: 21 - DNA, 2769 bp, Homo sapiens
gcggccgcgtctgcctggcccgtcccctccagcccagctcgggctccagctccagcgccggcgcttcagctgcgaccgcgagccctctcaagcaagatataacttccccaagtcacacagtggtatcagagctaagaatgggacccagatatgactgatctagttctgttccaaaaccgtgctgtattatattaacgcctaccctctgaagaggtccaagcaacggaagtactactacgaagctgcctttctggccatccttgagaaaaatagacagatggccaaggagaggggcctaataagccccagtgattttgcccagctgcaaaaatacatggaatactccaccaaaaaggtcagtgatgtcctaaagctcttcgaggatggcgagatggctaaatatgtccaaggagatgccattgggtacgagggattccagcaattcctgaaaatctatctcgaagtggataatgttcccagacacctaagcctggcactgtttcaatcctttgagactggtcactgcttaaatgagacaaatgtgacaaaagatgtggtgtgtctcaatgatgtttcctgctacttttcccttctggagggtggtcggccagaagacaagttagaattcaccttcaagctgtacgacacggacagaaatgggatcctggacagctcagaagtggacaaaattatcctacagatgatgcgagtggctgaatacctggattgggatgtgtctgagctgaggccgattcttcaggagatgatgaaagagattgactatgatggcagtggctctgtctctcaagctgagtgggtccgggctggggccaccaccgtgccactgctagtgctgctgggtctggagatgactctgaaggacgacggacagcacatgtggaggcccaagaggttccccagaccagtctactgcaatctgtgcgagtcaagcattggtcttggcaaacagggactgagctgtaacctctgtaagtacactgttcacgaccagtgtgccatgaaagccctgccttgtgaagtcagcacctatgccaagtctcggaaggacattggtgtccaatcacatgtgtgggtgcgaggaggctgtgagtccgggcgctgcgaccgctgtcagaaaaagatccggatctaccacagtctgaccgggctgcattgtgtatggtgccacctagagatccacgatgactgcctgcaagcggtgggccatgagtgtgactgtgggctgctccgggatcacatcctgcctccatcttccatctatcccagtgtcctggcctctggaccggatcgtaaaaatagcaaaacaagccagaagaccatggatgatttaaatttgagcacctctgaggctctgcggattgaccctgttcctaacacccacccacttctcgtctttgtcaatcctaagagtggcgggaagcaggggcaaagggtgctctggaagttccagtatatattaaaccctcgacaggtgttcaacctcctaaaggatggtcctgagatagggctccgattattcaaggatgttcctgatagccggattttggtgtgtggtggagacggcacagtaggctggattctagagaccattgacaaagctaacttgccagttttgcctcctgttgctgtgttgcccctgggtactggaaatgatctggctcgatgcctaagatggggaggaggttatgaaggacagaatctggcaaagatcctcaaggatttagagatgagtaaagtggtacatatggatcgatggtctgtggaggtgatacctcaacaaactgaagaaaaaagtgacccagtcccctttcaaatcatcaataactacttctctattggcgtggatgcctctattgctcatcgattccacatcatgcgagagaaatatccggagaagttcaacagcagaatgaagaacaagctatggtacttcgaatttgccacatctgaatccatcttctcaacatgcaaaaagctggaggagtctttgacagttgagatctgtgggaaaccgctggatctgagcaacctgtccctagaaggcatcgcagtgctaaacatccctagcatgcatggtggctccaacctctggggtgataccaggagaccccatggggatatctatgggatcaaccaggccttaggtgctacagctaaagtcatcaccgaccctgatatcctgaaaacctgtgtaccagacctaagtgacaagagactggaagtggttgggctggagggtgcaattgagatgggccaaatctataccaagctcaagaatgctggacgtcggctggccaagtgctctgagatcaccttccacaccacaaaaacccttcccatgcaaattgacggagaaccctggatgcagacgccctgtacaatcaagatcacccacaagaaccagatgcccatgctcatgggcccacccccccgctccaccaatttctttggcttcttgagctaagggggacacccttggcctccaagccagccttgaacccacctccctgtccctggactctactcccgaggctctgtacattgctgccacatactcctgccagcttgggggagtgttccttcaccctcacagtatttattatcctgcaccacctcactgttccccatgcgcacacacatacacacaccccaaaacacatacattgaaagtgcctcatctgaataaaatgacttgtgtttcccctttgggatctgctaaaaaaaaaaaaaaaaaaaaaaaaaaaaaaa

SEQ ID NO: 22 - DNA, 2669 bp, Homo sapiens
gcggccgcgtctgcctggcccgtcccctccagcccagctcgggctccagctccagcgccggcgcttcagctgcgaccgcgagccctctcaagcaaggcctaccctctgaagaggtccaagcaacggaagtactactacgaagctgcctttctggccatccttgagaaaaatagacagatggccaaggagaggggcctaataagccccagtgattttgcccagctgcaaaaatacatggaatactccaccaaaaaggtcagtgatgtcctaaagctcttcgaggatggcgagatggctaaatatgtccaaggagatgccattgggtacgagggattccagcaattcctgaaaatctatctcgaagtggataatgttcccagacacctaagcctggcactgtttcaatcctttgagactggtcactgcttaaatgagacaaatgtgacaaaagatgtggtgtgtctcaatgatgtttcctgctacttttcccttctggagggtggtcggccagaagacaagttagaattcaccttcaagctgtacgacacggacagaaatgggatcctggacagctcagaagtggacaaaattatcctacagatgatgcgagtggctgaatacctggattgggatgtgtctgagctgaggccgattcttcaggagatgatgaaagagattgactatgatggcagtggctctgtctctcaagctgagtgggtccgggctggggccaccaccgtgccactgctagtgctgctgggtctggagatgactctgaaggacgacggacagcacatgtggaggcccaagaggttccccagaccagtctactgcaatctgtgcgagtcaagcattggtcttggcaaacagggactgagctgtaacctctgtaagtacactgttcacgaccagtgtgccatgaaagccctgccttgtgaagtcagcacctatgccaagtctcggaaggacattggtgtccaatcacatgtgtgggtgcgaggaggctgtgagtccgggcgctgcgaccgctgtcagaaaaagatccggatctaccacagtctgaccgggctgcattgtgtatggtgccacctagagatccacgatgactgcctgcaagcggtgggccatgagtgtgactgtgggctgctccgggatcacatcctgcctccatcttccatctatcccagtgtcctggcctctggaccggatcgtaaaaatagcaaaacaagccagaagaccatggatgatttaaatttgagcacctctgaggctctgcggattgaccctgttcctaacacccacccacttctcgtctttgtcaatcctaagagtggcgggaagcaggggcaaagggtgctctggaagttccagtatatattaaaccctcgacaggtgttcaacctcctaaaggatggtcctgagatagggctccgattattcaaggatgttcctgatagccggattttggtgtgtggtggagacggcacagtaggctggattctagagaccattgacaaagctaacttgccagttttgcctcctgttgctgtgttgcccctgggtactggaaatgatctggctcgatgcctaagatggggaggaggttatgaaggacagaatctggcaaagatcctcaaggatttagagatgagtaaagtggtacatatggatcgatggtctgtggaggtgatacctcaacaaactgaagaaaaaagtgacccagtcccctttcaaatcatcaataactacttctctattggcgtggatgcctctattgctcatcgattccacatcatgcgagagaaatatccggagaagttcaacagcagaatgaagaacaagctatggtacttcgaatttgccacatctgaatccatcttctcaacatgcaaaaagctggaggagtctttgacagttgagatctgtgggaaaccgctggatctgagcaacctgtccctagaaggcatcgcagtgctaaacatccctagcatgcatggtggctccaacctctggggtgataccaggagaccccatggggatatctatgggatcaaccaggccttaggtgctacagctaaagtcatcaccgaccctgatatcctgaaaacctgtgtaccagacctaagtgacaagagactggaagtggttgggctggagggtgcaattgagatgggccaaatctataccaagctcaagaatgctggacgtcggctggccaagtgctctgagatcaccttccacaccacaaaaacccttcccatgcaaattgacggagaaccctggatgcagacgccctgtacaatcaagatcacccacaagaaccagatgcccatgctcatgggcccacccccccgctccaccaatttctttggcttcttgagctaagggggacacccttggcctccaagccagccttgaacccacctccctgtccctggactctactcccgaggctctgtacattgctgccacatactcctgccagcttgggggagtgttccttcaccctcacagtatttattatcctgcaccacctcactgttccccatgcgcacacacatacacacaccccaaaacacatacattgaaagtgcctcatctgaataaaatgacttgtgtttcccctttgggatctgctaaaaaaaaaaaaaaaaaaaaaaaaaaaaaaa

SEQ ID NO: 23 - DNA, 1563 bp, Homo sapiens
ctccgccgctgccgccgccgctgctacagccgccgccgccgctgttgccgcggcttgttattcttaaaatggcgccgctagacctggacaagtatgtggaaatagcgcggctgtgcaagtacctgccagagaacgacctgaagcggctatgtgactacgtttgtgacctcctcttagaagagtcaaatgttcagccagtatcaacaccagtaacagtgtgtggagatatccatggacagttttatgacctttgtgaactgttcagaactggaggtcaggttcctgacacaaactacatatttatgggtgattttgtagacagaggttactatagtttggagaccttcacttaccttcttgcattaaaggctaaatggcctgatcgtattacacttttgcgaggaaatcatgagagtagacagataacacaggtctatggattttatgatgagtgccaaaccaaatatggaaatgctaatgcctggagatactgtaccaaagtttttgacatgctcacagtagcagctttaatagatgagcagattttgtgtgtccatggtggtttatctcctgatatcaaaacactggatcaaattcgaaccatcgaacggaatcaggaaattcctcataaaggagcattttgtgatctggtttggtcagatcctgaagatgtggatacctgggctatcagtccccgaggagcaggttggctttttggagcaaaggtcacaaatgagtttgttcatatcaacaacttaaaactcatctgcagagcacatcaactagtgcacgaaggctataaatttatgtttgatgagaagctggtgacagtatggtctgctcctaattactgctatcgttgtggaaatattgcttcgatcatggtcttcaaagatgtaaatacaagagaaccaaagttattccgggcagttccagattcagaacgtgttattcctcccagaacgacaacgccatatttcctttgaggccttcgcccatcctgctgacccatttttctgccctcttcttaccccaattttcttgtattaccctctacaatatactttttattgagcactttgctgctgaaatgctgcctcttgccttttttttttttaaattttaaattatctaaatttattgtttgttgtggtgtctatagcaaagtttttctatcaattttcccccatcccatccccaccctggactcatttgagaagacttgagaaatgtcttaatactcacactgctgcatgtagctcttgcttatttactggtctgggaaacaggatgtgtttccttttttttaaaagccaattgacagattacacctaaatactcctccttttgtatcattcagccttttgttttagtttggtaagttttaagaaatttcagcagcaaagttgttattcagtgggcacgatggactccaaatgcctcaagttatgtatacctgtcccagatgtaaacttcattgtcctttgttggatgatattttaaatggatataaaataaattggtctaaaggacaaaaaaaaaaaaaaaaaaaaaaaaaaaaaa

SEQ ID NO: 24 - DNA, 1739 bp, Homo sapiens
ggggatcactgttggaaggcagctgcttgaggtccaaggcagtcagtgtcccctctcttttgcctcgggacagctggtatttatcagactcctaagaagttttccttgctccctagtagaagagagagattatgcagcgggcttttgattgatccaatgggaattacattgatctggtgtctggccttggttcttatcaagtggatcacctctaagaggcgtggagctatttcctatgacagttctgatcagactgcattatacattcgtatgctaggagatgtacgtgtaaggagccgagcaggatttgaatcagaaagaagaggttctcacccatatattgattttcgtattttccactctcaatctgaaattgaagtgtctgtctctgcaaggaatatcagaaggctactaagtttccagcgatatcttagatcttcacgcttttttcgtggtactgcggtttcaaattccctaaacattttagatgatgattataatggacaagccaagtgtatgctggaaaaagttggaaattggaattttgatatctttctatttgatagactaacaaatggaaatagtctagtaagcttaacctttcatttatttagtcttcatggattaattgagtacttccatttagatatgatgaaacttcgtagatttttagttatgattcaagaagattaccacagtcaaaatccttaccataacgcagtccacgctgcggatgttactcaggccatgcactgttacttaaaggaacctaagcttgccaattctgtaactccttgggatatcttgctgagcttaattgcagctgccactcatgatctggatcatccaggtgttaatcaacctttccttattaaaactaaccattacttggcaactttatacaagaatacctcagtactggaaaatcaccactggagatctgcagtgggcttattgagagaatcaggcttattctcacatctgccattagaaagcaggcaacaaatggagacacagataggtgctctgatactagccacagacatcagtcgccagaatgagtatctgtctttgtttaggtcccatttggatagaggtgatttatgcctagaagacaccagacacagacatttggttttacagatggctttgaaatgtgctgatatttgtaacccatgtcggacgtgggaattaagcaagcagtggagtgaaaaagtaacggaggaattcttccatcaaggagatatagaaaaaaaatatcatttgggtgtgagtccactttgcgatcgtcacactgaatctattgccaacatccagattggttttatgacttacctagtggagcctttatttacagaatgggccaggttttccaatacaaggctatcccagacaatgcttggacacgtggggctgaataaagccagctggaagggactgcagagagaacagtcgagcagtgaggacactgatgctgcatttgagttgaactcacagttattacctcaggaaaatcggttatcataacccccagaaccagtgggacaaactgcctcctggaggtttttagaaatgtgaaatggggtcttgaggtgagagaacttaactcttgactgccaaggtttccaagtgagtgatgccagccagcattatttatttccaagatttcctctgttggatcatttgaacccacttgttaattgcaagacccgaacatacagcaatatgaatttggcttt

SEQ ID NO: 25 - DNA, 2990 bp, Homo sapiens
atggaagtgtgttaccagctgccggtactgcccctggacaggccggtcccccagcacgtcctcagccgccgaggagccatcagcttcagctccagctccgctctcttcggctgccccaatccccggcagctctctcagaggcgtggagctatttcctatgacagttctgatcagactgcattatacattcgtatgctaggagatgtacgtgtaaggagccgagcaggatttgaatcagaaagaagaggttctcacccatatattgattttcgtattttccactctcaatctgaaattgaagtgtctgtctctgcaaggaatatcagaaggctactaagtttccagcgatatcttagatcttcacgcttttttcgtggtactgcggtttcaaattccctaaacattttagatgatgattataatggacaagccaagtgtatgctggaaaaagttggaaattggaattttgatatctttctatttgatagactaacaaatggaaatagtctagtaagcttaacctttcatttatttagtcttcatggattaattgagtacttccatttagatatgatgaaacttcgtagatttttagttatgattcaagaagattaccacagtcaaaatccttaccataacgcagtccacgctgcggatgttactcaggccatgcactgttacttaaaggaacctaagcttgccaattctgtaactccttgggatatcttgctgagcttaattgcagctgccactcatgatctggatcatccaggtgttaatcaacctttccttattaaaactaaccattacttggcaactttatacaagaatacctcagtactggaaaatcaccactggagatctgcagtgggcttattgagagaatcaggcttattctcacatctgccattagaaagcaggcaacaaatggagacacagataggtgctctgatactagccacagacatcagtcgccagaatgagtatctgtctttgtttaggtcccatttggatagaggtgatttatgcctagaagacaccagacacagacatttggttttacagatggctttgaaatgtgctgatatttgtaacccatgtcggacgtgggaattaagcaagcagtggagtgaaaaagtaacggaggaattcttccatcaaggagatatagaaaaaaaatatcatttgggtgtgagtccactttgcgatcgtcacactgaatctattgccaacatccagattggtaactatacatatttagatatagctggttagaaaaatgccactgtttttatcaagaagggaaatatatttgaaatataaaatattaaaattatgctcatttctatttttaaaaataatttaagaaattttacccttgttttcccttgttatggctcttctaattctcatttaattttaggatgtaaaaagtatatttttgcagaacaggcagcagcaataacttgtttctgttcttatgtaaataagaatccattattcgctcatgtggaagcttcttttgcatcatttgggactgccatttaaaaaaggataggtaaacaaagaaatgacaaaaataaaataaataaaataaaaatggataggtggtgacccactgagcctgatcataatacgaagaccagcttctgccactgcctttccagactcttaccactgcctgttgattaaatctaactcttcaacatcctagacaggcccttataatcttgcttcaaatgctgtgcagccatcttgcctcaacttccctctcatttgcctacagcatctcgggacgcttctgtgtttcccaagtatacgctgttctttcgctctttgtgcttcgccagtgctttccatgtgcctcgtagagttatttttcttgaagaggcagctcaaatgtcaccttctccagaagctgctctccacttgctttaggcagagtcagtcacttttcttctagattccaaagtgcctgatccacttggttgtggattcctggagcctagcaccacaccagaagcacgaggcccttgagaactgtgtgttgagtgaactaataactgtattatagaaagcataatgaaaatgtcctgtgactgaagtatgtgtagcttgttgcaggagtcacaggaaagttgactaggattgagtgtgttgggctttgggtataaaggagggggattctacgggggcagtagctcaacaaggaatagagggaggagtgtaattttggtagctggtgttgaatagggcctttgagaatcagactgaacacagtgaaatatgtgcccaaagttcagaaagatgaagtttccagaaactaagaaggtagcacaatatgtggcatcatactcagaaaggaagaccatgccatggggccagaaattcagaaacgtaattcttacattgtgattgcaatggatactcatgaaagaaagtgggtagtggccgatttgccttcagagtgacaggtagagaagggaagagcgtgtagaactgtggccatactttaggagtgtgagggatgctgaatctcccagagagctcacactggccaggaatgctgagagtagcagatgcttttcttttgggaggatagtaaaacaatttagaaccagatatgctttgtcttgattctcaagtagaataatcttcaaatgcaaaagaatacattagaaatggacaaaagtggccaggagcggtagctcatacttgtaacccagcactttgggaagccgaggcgggctgatcgcttgaggtcaggagttcgagaccagcctggccaaaatagtgaaactcacgtttctactaaaaatacaaaaattagctgggtgtgatggccacttgggaggctgagataggagaatcgcttgaacctgggaggcagaggttgcagtgagccaatatcgtgccactgcattccagcctgggtgacagaatgaaactccatcactccatctcaaaaaaaaaaaaaaaaaaaaaaaaaa

SEQ ID NO: 26 - DNA, 4881 bp, Homo sapiens
gggagatggctgcggagccgagcaccgggcagtggctgcggcggcggcggcggcggcgggccgggagcgcggcgggcgggggctccgccttgcgcgtggggcgctgagccgagaggcgcggaggcggcgagggcgcgggggctctgaggaccgctcggcgccgcctcctgccacaccatgggcagcgcagaggacgcagtcaaagagaaactgctgtggaacgtgaagaaggaggtgaagcaaatcatggaggaggctgtcaccaggaagtttgtgcatgaagacagcagccacatcattgctttatgtggtgcagtggaggcttgcctcttgcatcagctgagacgccgtgccgctggcttcatgcgcagtgacaagatggcagccctgttcaccaaggtggggaagacgtgcccagtggcgggggagatttgccacaaggtacaggagctgcagcaacaagcagagggcaggaaaccctcaggggtcagccaggaggccctgcggagacagggctcagccagcgggaaggccccggccctcagccctcaggccttgaaacacgtatgggtacgcacggcgctcatcgagaaagttctggacaaggtcgtgcaatacctggcggaaaactgcagcaagtactacgagaaggaggcactgctggcagaccctgtgttcggcccgatcctggcctctcttctagtgggaccctgtgccttggaatacactaagctcaagacagccgatcactactggactgacccctctgctgatgagctggtccagcggcaccgcatccggggtccacctactcgccaggactcccctgcaaagcgcccagccctggggatccggaaacggcactcaagcggcagcgcgtcggaggacaagctggctgcctgcgccagcgagtgtgtggagtccctgcaccagaactcacggacgcggctgctctatggcaagaaccacgtgctggtgcagccgaaggaggatatggaggcggtccctggctacctctccctgcaccagtctgcagagagcctgactctgaagtggacccccaaccagctcatgaatgggactctgggggactccgagctggaaaagagcgtttactgggactatgccctcgtggtgcccttcagccaggtcgtgtgcatccgctgccaccagcaaaagagcggtggcacgcttgtgctggtgagccaggatggcatccagaggccgccgctgcatttcccacagggaggacacctgctgtcctttctgtcctgtctggagaatgggctgctgcctcagggacagctagagcccccgctgtggacccagcaagggaaggggaaagtgttccccaagctacggaaacgaagcagcattcgctccgtggatatggaggagatgggcacggggcgggccaccgactatgtgttccggatcatctaccccggccacaggcacgagcacatcactattaactaccaccacctagcggccagccgcgcggcctcggtggacgatgatgaggaagaggaggataaactgcacgcgatgctctcaatgatctgctcgcggaacctcacagctcccaatccgatgaaagacgctggtgacatgatcgagatgcagggctttgggcccagcctgccagcctggcacctggagcccctgtgcagtcagggctcctcctgcctctcctgctcctccagcagctccccacatgcaacccccagccactgtagctgcatccccgaccggttgccgctcaggctactgtgtgagagtatgaagaggcagatcgtgtcccgggccttctacggctggctggcacactgccgccacctgtccacggtgcggacccacctgtcggcgctggtgcaccatagcgttatcccacctgaccggcccccgggggcctccgcgggcctcaccaaggacgtgtggagcaagtatcagaaggacaaaaagaactacaaagagctggagctgctgcggcaagtttactacggaggcatagagcacgagatccgcaaggacgtctggccctttctgcttggccactacaagttcggcatgagcaagaaggagatggagcaggtggacgcagtggtggcagcaaggtaccagcaggtgttggcagagtggaaggcctgcgaggtggtggtgaggcagcgggagcgggaggcccacccagccacacgcaccaagttctcctcaggcagcagcatcgacagccacgtgcagcgcctcatccaccgagactccaccatcagcaacgatgtgtttatctcagtggatgatctggaacccccggagccccaggaccctgaagattcaagaccaaaacctgagcaggaagcaggacccgggactccgggcaccgccgtggtggagcagcagcattccgtggagttcgactctccagactcaggactgccctcctctcgcaattactccgtggcctcgggcatccagtcaagcctagatgaggggcagagcgtgggcttcgaagaggaggacggcggtggggaggaaggctccagtgggcccggccctgcagctcacactttgagggagccccaggatcccagccaggagaagcctcaggccggagaactggaggccggagaggagcttgcggctgtgtgtgcggctgcctacactatagaattactggatactgtggccttaaacctgcaccgcatagacaaggatgtgcagaggtgtgaccgcaactactggtacttcacgccccccaacctcgagaggctcagagacgtcatgtgcagctacgtgtgggagcacctggacgtgggctatgtgcagggcatgtgcgatctgctggcgcctctcctggtcaccctcgacaatgatcagctggcctacagctgcttcagccacctcatgaagaggatgagccagaacttccccaacgggggtgccatggacacccactttgccaacatgcgctccctcatccagatcctggactcagagctgtttgagctgatgcatcagaatggagactacacccacttctacttctgttatcgctggttcctgctggattttaagagagaactgctgtatgaggatgtgtttgctgtgtgggaggtgatctgggcagccaggcacatctcatcggagcactttgtcctgttcatcgccctcgccctggtggaggcctaccgagagatcatccgtgacaacaacatggtcttcactgacatcatcaagtttttcaatgaacgtgctgagcatcacgatgcccaggagatcctgcggattgcccgggacctcgtccacaaggtgcagatgctcatagagaacaagtgagctggggccaggaggcagcagccgtgcagagcctgggctccggcagggagaggtgcaggggagtcaccgcccagacctccccagccaccaaccgaccccacctctgttcctaacaaagcggttgtgagcctggatccgactcccggcagtgctgaccctgcagggcaagtcaggggccaggatgccctcggatcagggccgggatgggaggggtcagcctcagggagcagctgccttgggggacacacctactctgctcccctctcacacatctgggagtagccccactgccacctgcagccgcagcctggactgctgcccacgagtgaacctggggccccacaggattaacaggggctatagcggcctgggccatactcagctggggtggcagagggcgagaggctctgtgctgtgtcccttctgagggtcccttgcagtcccagtatattgtgcgtgcaccagccccagctggagcaaccaaaactgcttctggtttaggcacacgtcacgggtgcgggagacccgggcacgggagacccgggccgccttcaggccgctcccacgagattctggggcagtcggaagatgtgggccctgggtgggagcagcccacttcagcagcactgccactgcctttggccacctgaggtgacccccaggcctccccggccttgtacagtgtacctctgtgtatctgtacagcctcgctcctgccaccccacccttgcgttctgcattaggtacttccctgaaaaccacgtgtaagaagtgatgcttttgccagtggatgatctggaatgcgaccggagcacttgctctgaggaatcccagggtgactctgtcggggaagaatccggtcacagcctcccctcagagacaggcctcagttcgagggcagcccattatctgtcgcagacatctgccatgtacctgagactgcgggaggcaggggatgcatgggtgtccccatctgtccgtggtgagaagcaaggctagctctgccttccacatgcttctcaggatgccaagaggcctaggaacccagaaacccccttggaggagctgtgtatgcgggggtgccaggaagggcatagctcctgcccccaggcctaggcatgctgcttgctcggccatccccacttcctcctctaccccaacacatgcaggctaggccttgccctggaacgtggaggccctgcccggggctggggcctagtccagcagccaccaaagtctggcagactttctgcatttgagaaacatgacaaagggccccgcagcccttctgcacccagcacagcctgcccagcccagccctgcccccgggcactgcacagcctgtctgggggccagaccaccccattgtccatccttgttgtccgtgagtccttggcctccaccaagcacgtgtggccattgtgtgcctgccttagtgactccgtggttttgtgaggagcagagtgtgtatgatttttgcctcagaaactatactcttctgtgtaacagacaaataaacaacatttgtcaacaaaaaaaaaaaaaaaa

SEQ ID NO: 27 - DNA, 2344 bp, Homo sapiens
gtctcaggggctgaagtttgtgaggtgtagtattgagtcctgtttgagctattgttctctttttcctgaaaaatggcactgtcaaagagggagctggatgagctgaaaccatggatagagaagacagtgaagagggtcctgggtttctcagagcctacggtggtcacagcagcattgaactgtgtggggaagggcatggacaagaagaaggcagccgatcatctgaaaccttttcttgatgattctactctccgatttgtggacaaactgtttgaggctgtggaggaaggccgaagctctaggcattccaagtctagcagtgacaggagcagaaaacgagagctaaaggaggtgtttggtgatgactctgagatctctaaagaatcatcaggagtaaagaagcgacgaataccccgttttgaggaggtggaagaagagccagaggtgatccctgggcctccatcagagagccctggcatgctgactaagctccagatcaaacagatgatggaggcagcaacacgacaaatcgaggagaggaaaaaacagctgagcttcattagcccccctacacctcagccaaagactccttcttcctcccaaccagaacgacttcctattggcaacactattcagccctcccaggctgccactttcatgaatgatgccattgagaaggcaaggaaagcagctgaactgcaagctcgaatccaagcccagctggcactgaagccaggactcatcggcaatgccaacatggtgggcctggctaatctccatgccatgggcattgctcccccgaaggtggagttaaaagaccaaacgaaacctacaccactgatcctggatgagcaagggcgcactgtagatgcaacaggcaaggagattgagctgacacaccgcatgcctactctgaaagccaatattcgtgctgtgaagagggaacaattcaagcaacaactaaaggaaaagccatcagaagacatggaatccaataccttttttgacccccgagtctccattgccccttcccagcgccagagacgcacttttaaattccatgacaagggcaaatttgagaagattgctcagcgattacggacaaaggctcaactggagaagctacaggcagagatttcacaagcagctcgaaaaacaggcatccatacttcgactaggcttgccctcattgctcctaagaaggagctaaaggaaggagatattcctgaaattgagtggtgggactcttacataatccccaatggctttgatcttacagaggaaaatcccaagagagaagattattttggaatcacaaatcttgttgaacatccagcccagctcaatcctccagttgacaatgacacaccagttactctgggagtatatcttaccaagaaggaacagaaaaaacttcggagacaaacaaggagggaagcacagaaggaactacaagaaaaagtcaggctgggcctgatgcctcctccagaacccaaagtgagaatttctaatttgatgcgagtattaggaacagaagctgttcaagaccccacgaaggtagaagcccacgtcagagctcagatggcaaaaagacagaaagcgcatgaagaggccaacgctgcccgaaaactcacagcagaacagagaaaggtcaagaaaattaaaaagcttaaagaagacatttcacagggggtacacatatctgtatatagagttcgaaatttgagcaacccagccaagaagttcaagattgaagccaatgctgggcaactgtacctgacaggggtggtggtactgcacaaggatgtcaacgtggtagtagtggaagggggccccaaggcccagaagaaatttaagcgtcttatgctgcatcggataaagtgggatgaacagacatctaacacaaagggagatgatgatgaggagtctgatgaggaagctgtgaagaaaaccaacaaatgtgtactagtctgggagggtacagccaaagaccggagctttggagagatgaagtttaaacagtgtcctacagagaacatggctcgtgagcatttcaaaaagcatggggctgaacactactgggaccttgcgctgagtgaatctgtgttagagtccactgattgagactactgcaagcccttgcctctcctcccttgcctttgtctcttcagtcctctcacttattctatttcccaaccccctcccacttgtttgtgtgatctcagaactgtgccaagcagacactgggacaaagggagaatatcttgctcccctcctgagtcagcctggtgttgccctttattccccttatgtgcatatgattaaagagttatttttaaaaaaa

SEQ ID NO: 28 - DNA, 2564 bp, Homo sapiens
aatagcaatagctttatagcagctccggttacctgttttaaacatggaaggagagtcgctcccagatagccctcacgagtggccctggagcagggagtggtggagcagatcttccttgtttgggaggagcctgaggtggacctcgcgtcctgagtctggaaggcacctatggggacctgctggggtgatatctcagaaaatgtgagagtagaagttcccaatacagactgcagcctacctaccaaagtcttctggattgctggaattgtaaaattagcaggttacaatgcccttttaagatatgaaggatttgaaaatgactctggtctggacttctggtgcaatatatgtggttctgatatccatccagttggttggtgtgcagccagcggaaaacctcttgttcctcctagaactattcagcataaatatacaaactggaaagcttttctagtgaaacgacttactggtgccaaaacactgcctcctgatttctcccaaaaggtttcagagagtatgcagtatcctttcaaaccttgcatgagagtagaagtggttgacaagaggcatttgtgtcgaacacgagtagcagtggtggaaagtgtaattggaggaagattaagactagtgtatgaagaaagcgaagatagaacagatgacttctggtgccatatgcacagcccattaatacatcatattggttggtctcgaagcataggtcatcgattcaaaagatctgatattacaaagaaacaggatggacattttgatacaccaccacatttatttgctaaggtaaaagaagtagaccagagtggggaatggttcaaggaaggaatgaaattggaagctatagacccattaaatctttctacaatatgtgtcgcaaccattagaaaggtgctagctgacggattcctgatgattgggatcgatggctcagaagcagcagacggatctgactggttctgttaccatgcaacctctccttctattttccctgtcggtttctgtgaaattaacatgattgaacttactccacccagaggttacacaaaacttccttttaaatggtttgactacctcagggaaactggctccattgcagcaccagtaaaactatttaataaggatgttccaaatcacggatttcgtgtaggaatgaaattagaagcagtagatctcatggagccacgtttaatatgtgtagccacagtaactcgaattattcatcgtctcttgaggatacattttgatggatgggaagaagagtatgatcagtgggtagactgtgagtcacctgacctctatcctgtagggtggtgtcagttaactggatatcaactacagcctccagcatcacagtgtaagttggtatacagaaaaggtgtccttttgtaaaaatcagcaattctccagaggactatctcacataagtcatcttatgagctcacaggacaagaatatacctatgtctgattggttgccaggtaagacattaagactcaacaacaatatcacagaatcagaccatgtgtcccatggcaatgtgaatccaatagtcaattacataatgactatagaaacacaacagtcaccaaattaaactagacttactattttagtgagttaaaaattacatactaaaagtttattggtaggtaataaatgcttttgagtaaatagtggaaaatgtctcatgttgaggctatggttttgtaggaacaagtacccttattttcagagcatcatgtacttaagtataatggtcttggtaaagatagttcatataagttgtatctagacaactgtatcgtctaaattgtaaacaattatctagtaccaattttccctttttatttttcagcatcaagagaaaaccaatcagcttcatcaaaacagaagaaaaaggctaagtcccagcaatacaaaggacataagaaaagtgggtcaccacgtggtgttcacatacattttctaattgttaactaattggagtcacagtattcttggacagaaaatgatatatcttgtgagaactgatgattgtgcattatgtattatgcttaaaggtgcagtatgccataaaaggcaaacccttgcaataatgagaaacactgatattttactaacaggagaaatgattaccacagtatttaaagtatacgtggtaaagaatagagtctgtgaatgattcttgaaataatatgtaaaacctactgaaagttaatcctttttaaaaactttatttaaaaagaaaaattagcagccaggtgcagtggctcacgcctgtaatcccagcactttaggaggccgaggctggcagatcacaaggtcaggagatcgagaccatcctggctaacacggtgaaaccctgtctccaccaaaaatacaaaaaatctgccgggcgtggtggcacacgcctgaagtcccagctactcaggaggctgaggcaagagaatcacttgaacccaggaggcagaggttgcagtgggccaagatcacgccactacattccagctgggcaacacagcaagactctgtctcaaaaaaaaaaaaaaaaa

SEQ ID NO: 29 - DNA, 3096 bp, Homo sapiens
aggcgcggctttcaggccaacatggccgtgctgctgctgctgctccgtgccctccgccggggtccaggcccgggtcctcggccgctgtggggcccaggcccggcctggagtccagggttccccgccaggcccgggagggggcggccgtacatggccagcaggcctccgggggacctcgccgaggctggaggccgagctctgcagagcttacaattgagactgctaacccctacctttgaagggatcaacggattgttgttgaaacaacatttagttcagaatccagtcagactctggcaacttttaggtggtactttctattttaacacctcaaggttgaagcagaagaataaggagaaggataagtcgaaggggaaggcgcctgaagaggacgaagaggagaggagacgccgtgagcgggacgaccagatgtaccgagagcggctgcgcaccttgctggtcatcgcggttgtcatgagcctcctgaatgctctcagcaccagcggaggcagcatttcctggaacgactttgtccacgagatgctggccaagggcgaggtgcagcgcgtccaggtggtgcctgagagcgacgtggtggaagtctacctgcaccctggagccgtggtgtttgggcggcctcggctagccttgatgtaccgaatgcaggttgcaaatattgacaagtttgaagagaagcttcgagcagctgaagatgagctgaatatcgaggccaaggacaggatcccagtttcctacaagcgaacaggattctttggaaatgccctgtactctgtggggatgacggcagtgggcctggccatcctgtggtatgttttccgtctggccgggatgactggaagggaaggtggattcagtgcttttaatcagcttaaaatggctcgtttcaccattgtggatgggaagatggggaaaggagtcagcttcaaagacgtggcaggaatgcacgaagccaaactggaagtccgcgagtttgtggattatctgaagagcccagaacgcttcctccagcttggcgccaaggtcccaaagggcgcactgctgctcggcccccccggctgtgggaagacgctgctggccaaggcggtggccacggaggctcaggtgcccttcctggcgatggccggcccagagttcgtggaggtcattggaggcctcggcgctgcccgtgtgcggagcctctttaaggaagcccgagcccgggccccctgcatcgtctacatcgatgagatcgacgcggtgggcaagaagcgctccaccaccatgtccggcttctccaacacggaggaggagcagacgctcaaccagcttctggtagaaatggatggaatgggtaccacagaccatgtcatcgtcctggcgtccacgaaccgagctgacattttggacggtgctctgatgaggccaggccgactggaccggcacgtcttcattgatctccccacgctgcaggagaggcgggagatttttgagcagcacctgaagagcctgaagctgacccagtccagcaccttttactcccagcgtctggcagagctgacaccaggattcagtggggctgacatcgccaacatctgcaatgaggctgcgctgcacgcggcgcgggagggacacacttccgtgcacactctcaacttcgagtacgccgtggagcgcgtcctcgcagggactgccaaaaagagcaagatcctgtccaaggaagaacagaaagtggttgcgtttcatgagtcgggccacgccttggtgggctggatgctggagcacacggaggccgtgatgaaggtctccataacccctcggacaaacgccgccctgggctttgctcagatgctccccagagaccagcacctcttcaccaaggagcagctgtttgagcggatgtgcatggccctgggaggacgggcctcggaagcactgtccttcaacgaggtcacttctggggcacaggacgacctgaggaaggtcacccgcatcgcctactccatggtgaagcagtttgggatggcacctggcatcgggcccatctccttccctgaggcgcaggagggcctcatgggcatcgggcggcgccccttcagccaaggcctgcagcagatgatggaccatgaagcaagactgctggtggccaaggcctacagacacaccgagaaggtgctgcaggacaacctggacaagttgcaggcgctggcaaacgcccttctggaaaaggaagtgataaactatgaggacattgaggctctcattggcccgccgccccatgggccgaagaaaatgatcgcaccgcagaggtggatcgacgcccagagggagaaacaggacttgggcgaggaggagaccgaagagacccagcagcctccacttggaggcgaagagccgacttggcccaagtagttgggaggtgttggctgcacgtgcgggtggtccgggaagtgagggctcactcagccaccctgagttgcttttcagctgaggtttgcacttcctctcgcggccctcagtagtccctgcacagtgacttctgagatctgttgattgatgacccttttcatgattttaagtttctctgcagaaactactgacggagtcctgtgtttgtgagtcgtttcccctatggggaaggttatcagtgcttcccgagtgagcatggaacacttcgagttcccagggttatagacagtcgttcccagtgtggctgaggccacccagaggcagcagagcattcagactccaaacagacccctgttcatgccgacgcttgcacgaccgccccagttcctgtggctccctcggaatgctaaggggatcggacatgaaaggaccctgtgagccgattgtcctatctccagcggccctgtcatccagctcactcatcaatggggccagtcaggcccaggcactgggctccggaggactcaccactgccccctgctgccatgtggactggtgcaagttgaggacttcttgctggtctagtcacgcatgcagtgttggggatgccttggtttttactgctctgagaattgttgagatactttactaataaactgtgtagttggaaaatctaaaaaaaaaaaaaaa

SEQ ID NO: 30 - DNA, 2319 bp, Homo sapiens
aggcgcggctttcaggccaacatggccgtgctgctgctgctgctccgtgccctccgccggggtccaggcccgggtcctcggccgctgtggggcccaggcccggcctggagtccagggttccccgccaggcccgggagggggcggccgtacatggccagcaggcctccgggggacctcgccgaggctggaggccgagctctgcagagcttacaattgagactgctaacccctacctttgaagggatcaacggattgttgttgaaacaacatttagttcagaatccagtcagactctggcaacttttaggtggtactttctattttaacacctcaaggttgaagcagaagaataaggagaaggataagtcgaaggggaaggcgcctgaagaggacgaagaggagaggagacgccgtgagcgggacgaccagatgtaccgagagcggctgcgcaccttgctggtcatcgcggttgtcatgagcctcctgaatgctctcagcaccagcggaggcagcatttcctggaacgactttgtccacgagatgctggccaagggcgaggtgcagcgcgtccaggtggtgcctgagagcgacgtggtggaagtctacctgcaccctggagccgtggtgtttgggcggcctcggctagccttgatgtaccgaatgcaggttgcaaatattgacaagtttgaagagaagcttcgagcagctgaagatgagctgaatatcgaggccaaggacaggatcccagtttcctacaagcgaacaggattctttggaaatgccctgtactctgtggggatgacggcagtgggcctggccatcctgtggtatgttttccgtctggccgggatgactggaagggaaggtggattcagtgcttttaatcagcttaaaatggctcgtttcaccattgtggatgggaagatggggaaaggagtcagcttcaaagacgtggcaggaatgcacgaagccaaactggaagtccgcgagtttgtggattatctgaagagcccagaacgcttcctccagcttggcgccaaggtcccaaagggcgcactgctgctcggcccccccggctgtgggaagacgctgctggccaaggcggtggccacggaggctcaggtgcccttcctggcgatggccggcccagagttcgtggaggtcattggaggcctcggcgctgcccgtgtgcggagcctctttaaggaagcccgagcccgggccccctgcatcgtctacatcgatgagatcgacgcggtgggcaagaagcgctccaccaccatgtccggcttctccaacacggaggaggagcagacgctcaaccagcttctggtagaaatggatggtgcctctcttgaccagctaccctcccaggggaccatgaggaagctcagaggaaagacccccgcctgctcctgtctcacggagcccacagggtcacggagggcaatggagggtcattcgctctgctggggttgccttttgcactgaagatagagaccacctttttgagtgacttgagcccaaaggcaagcgtatatcaaacgatcttctccacataacctctctgtgccatcataagaatagctgcttccgcccccggatttgctcaggcctgggaatccgctgactgaaggcctcttgttgagtgccagctctaaacaagtccctttatgcagagccacagctgtgcatgctcagccctgccgaggtcccaggccaggctttgttgcttccgttcatggaagcgcacaggatagggccgacgctgtgccggtcgtggggaaatctcactggggaagagaaaagcccaagccttgttggttacgtcagccggtccatggcggtgtcctgcggaccccagagcccccgggaagggcgcaagtcaaagagcactggaggcaccgccggcgatggacgtccaggtcccggctcctgtgctggaaagcgttgatggggagcgtcggcgctgaccacacgcgggagctgcggaagcccagcggttcacacaggcctcccttcaacgtagtcatcccctggtggtggaagcaagacgacggcccctgacgtgcagccacacacagaaaaggctgctgtgaacattttatgcttcgactttttttttcttcagagacagggtgtcgttctgtcgcccaggctggagtgcagtgccaccatcatagctcactgcagcctccacctcctaggctcaagcttcctaagtagttgggactcaaggcttgagtcaccatgccaggctctgttttttcagtctgtgaaaaataaagtcatcagcatgtgaaaaaaaaaaaaaaaaaa

SEQ ID NO: 31 - DNA, 894 bp, Homo sapiens
cgggccctgcgggcgcggggctgaaggcggaaccacgacgggcagagagcacggagccgggaagcccctgggcgcccgtcggagggctatggagcagcggccgcggggctgcgcggcggtggcggcggcgctcctcctggtgctgctgggggcccgggcccagggcggcactcgtagccccaggtgtgactgtgccggtgacttccacaagaagattggtctgttttgttgcagaggctgcccagcggggcactacctgaaggccccttgcacggagccctgcggcaactccacctgccttgtgtgtccccaagacaccttcttggcctgggagaaccaccataattctgaatgtgcccgctgccaggcctgtgatgagcaggcctcccaggtggcgctggagaactgttcagcagtggccgacacccgctgtggctgtaagccaggctggtttgtggagtgccaggtcagccaatgtgtcagcagttcacccttctactgccaaccatgcctagactgcggggccctgcaccgccacacacggctactctgttcccgcagagatactgactgtgggacctgcctgcctggcttctatgaacatggcgatggctgcgtgtcctgccccacgtaattcctagctgtcgtgggatggagggaagggcggctgggagcagagcaggggcctggggtggggcaggtgctgctggttcaggaataggaagaggggatagggaggagggagccttggccctgtgatgggtgggccccacttcaggcaaacttagatggcaaaagagcaatctggatccgccttagccagatacataagggtatttgccttcactttcagccagcattccccccagcgatcctagccagatattacagatg

SEQ ID NO: 32 - DNA, 1638 bp, Homo sapiens
cgggccctgcgggcgcggggctgaaggcggaaccacgacgggcagagagcacggagccgggaagcccctgggcgcccgtcggagggctatggagcagcggccgcggggctgcgcggcggtggcggcggcgctcctcctggtgctgctgggggcccgggcccagggcggcactcgtagccccaggtgtgactgtgccggtgacttccacaagaagattggtctgttttgttgcagaggctgcccagcggggcactacctgaaggccccttgcacggagccctgcggcaactccacctgccttgtgtgtccccaagacaccttcttggcctgggagaaccaccataattctgaatgtgcccgctgccaggcctgtgatgagcaggcctcccaggtggcgctggagaactgttcagcagtggccgacacccgctgtggctgtaagccaggctggtttgtggagtgccaggtcagccaatgtgtcagcagttcacccttctactgccaaccatgcctagactgcggggccctgcaccgccacacacggctactctgttcccgcagagatactgactgtgggacctgcctgcctggcttctatgaacatggcgatggctgcgtgtcctgccccacgagcaccctggggagctgtccagagcgctgtgccgctgtctgtggctggaggcagatgttctgggtccaggtgctcctggctggccttgtggtccccctcctgcttggggccaccctgacctacacataccgccactgctggcctcacaagcccctggttactgcagatgaagctgggatggaggctctgaccccaccaccggccacccatctgtcacccttggacagcgcccacacccttctagcacctcctgacagcagtgagaagatctgcaccgtccagttggtgggtaacagctggacccctggctaccccgagacccaggaggcgctctgcccgcaggtgacatggtcctgggaccagttgcccagcagagctcttggccccgctgctgcgcccacactctcgccagagtccccagccggctcgccagccatgatgctgcagccgggcccgcagctctacgacgtgatggacgcggtcccagcgcggcgctggaaggagttcgtgcgcacgctggggctgcgcgaggcagagatcgaagccgtggaggtggagatcggccgcttccgagaccagcagtacgagatgctcaagcgctggcgccagcagcagcccgcgggcctcggagccgtttacgcggccctggagcgcatggggctggacggctgcgtggaagacttgcgcagccgcctgcagcgcggcccgtgacacggcgcccacttgccacctaggcgctctggtggcccttgcagaagccctaagtacggttacttatgcgtgtagacattttatgtcacttattaagccgctggcacggccctgcgtagcagcaccagccggccccacccctgctcgcccctatcgctccagccaaggcgaagaagcacgaacgaatgtcgagagggggtgaagacatttctcaacttctcggccggagtttggctgagatcgcggtattaaatctgtgaaagaaaacaaaacaaaacaaaaaaaaaaaaaaaaaa

SEQ ID NO: 33 - DNA, 1665 bp, Homo sapiens
cgggccctgcgggcgcggggctgaaggcggaaccacgacgggcagagagcacggagccgggaagcccctgggcgcccgtcggagggctatggagcagcggccgcggggctgcgcggcggtggcggcggcgctcctcctggtgctgctgggggcccgggcccagggcggcactcgtagccccaggtgtgactgtgccggtgacttccacaagaagattggtctgttttgttgcagaggctgcccagcggggcactacctgaaggccccttgcacggagccctgcggcaactccacctgccttgtgtgtccccaagacaccttcttggcctgggagaaccaccataattctgaatgtgcccgctgccaggcctgtgatgagcaggcctcccaggtggcgctggagaactgttcagcagtggccgacacccgctgtggctgtaagccaggctggtttgtggagtgccaggtcagccaatgtgtcagcagttcacccttctactgccaaccatgcctagactgcggggccctgcaccgccacacacggctactctgttcccgcagagatactgactgtgggacctgcctgcctggcttctatgaacatggcgatggctgcgtgtcctgccccacgccacccccgtcccttgcaggagcaccctggggagctgtccagagcgctgtgccgctgtctgtggctggaggcagagtaggtgtgttctgggtccaggtgctcctggctggccttgtggtccccctcctgcttggggccaccctgacctacacataccgccactgctggcctcacaagcccctggttactgcagatgaagctgggatggaggctctgaccccaccaccggccacccatctgtcacccttggacagcgcccacacccttctagcacctcctgacagcagtgagaagatctgcaccgtccagttggtgggtaacagctggacccctggctaccccgagacccaggaggcgctctgcccgcaggtgacatggtcctgggaccagttgcccagcagagctcttggccccgctgctgcgcccacactctcgccagagtccccagccggctcgccagccatgatgctgcagccgggcccgcagctctacgacgtgatggacgcggtcccagcgcggcgctggaaggagttcgtgcgcacgctggggctgcgcgaggcagagatcgaagccgtggaggtggagatcggccgcttccgagaccagcagtacgagatgctcaagcgctggcgccagcagcagcccgcgggcctcggagccgtttacgcggccctggagcgcatggggctggacggctgcgtggaagacttgcgcagccgcctgcagcgcggcccgtgacacggcgcccacttgccacctaggcgctctggtggcccttgcagaagccctaagtacggttacttatgcgtgtagacattttatgtcacttattaagccgctggcacggccctgcgtagcagcaccagccggccccacccctgctcgcccctatcgctccagccaaggcgaagaagcacgaacgaatgtcgagagggggtgaagacatttctcaacttctcggccggagtttggctgagatcgcggtattaaatctgtgaaagaaaacaaaacaaaacaaaaaaaaaaaaaaaaaa

SEQ ID NO: 34 - DNA, 1527 bp, Homo sapiens
cgggccctgcgggcgcggggctgaaggcggaaccacgacgggcagagagcacggagccgggaagcccctgggcgcccgtcggagggctatggagcagcggccgcggggctgcgcggcggtggcggcggcgctcctcctggtgctgctgggggcccgggcccagggcggcactcgtagccccaggtgtgactgtgccggtgacttccacaagaagattggtctgttttgttgcagaggctgcccagcggggcactacctgaaggccccttgcacggagccctgcggcaactccacctgccttgtgtgtccccaagacaccttcttggcctgggagaaccaccataattctgaatgtgcccgctgccaggcctgtgatgagcaggcctcccaggtggcgctggagaactgttcagcagtggccgacacccgctgtggctgtaagccaggctggtttgtggagtgccaggtcagccaatgtgtcagcagttcacccttctactgccaaccatgcctagactgcggggccctgcaccgccacacacggctactctgttcccgcagagatactgactgtgggacctgcctgcctggcttctatgaacatggcgatggctgcgtgtcctgccccacgagcaccctggggagctgtccagagcgctgtgccgctgtctgtggctggaggcagaatgaagctgggatggaggctctgaccccaccaccggccacccatctgtcacccttggacagcgcccacacccttctagcacctcctgacagcagtgagaagatctgcaccgtccagttggtgggtaacagctggacccctggctaccccgagacccaggaggcgctctgcccgcaggtgacatggtcctgggaccagttgcccagcagagctcttggccccgctgctgcgcccacactctcgccagagtccccagccggctcgccagccatgatgctgcagccgggcccgcagctctacgacgtgatggacgcggtcccagcgcggcgctggaaggagttcgtgcgcacgctggggctgcgcgaggcagagatcgaagccgtggaggtggagatcggccgcttccgagaccagcagtacgagatgctcaagcgctggcgccagcagcagcccgcgggcctcggagccgtttacgcggccctggagcgcatggggctggacggctgcgtggaagacttgcgcagccgcctgcagcgcggcccgtgacacggcgcccacttgccacctaggcgctctggtggcccttgcagaagccctaagtacggttacttatgcgtgtagacattttatgtcacttattaagccgctggcacggccctgcgtagcagcaccagccggccccacccctgctcgcccctatcgctccagccaaggcgaagaagcacgaacgaatgtcgagagggggtgaagacatttctcaacttctcggccggagtttggctgagatcgcggtattaaatctgtgaaagaaaacaaaacaaaacaaaaaaaaaaaaaaaaaa

SEQ ID NO: 35 - DNA, 1503 bp, Homo sapiens
cgggccctgcgggcgcggggctgaaggcggaaccacgacgggcagagagcacggagccgggaagcccctgggcgcccgtcggagggctatggagcagcggccgcggggctgcgcggcggtggcggcggcgctcctcctggtgctgctgggggcccgggcccagggcggcactcgtagccccaggtgtgactgtgccggtgacttccacaagaagattggtctgttttgttgcagaggctgcccagcggcctcccaggtggcgctggagaactgttcagcagtggccgacacccgctgtggctgtaagccaggctggtttgtggagtgccaggtcagccaatgtgtcagcagttcacccttctactgccaaccatgcctagactgcggggccctgcaccgccacacacggctactctgttcccgcagagatactgactgtgggacctgcctgcctggcttctatgaacatggcgatggctgcgtgtcctgccccacgagcaccctggggagctgtccagagcgctgtgccgctgtctgtggctggaggcagatgttctgggtccaggtgctcctggctggccttgtggtccccctcctgcttggggccaccctgacctacacataccgccactgctggcctcacaagcccctggttactgcagatgaagctgggatggaggctctgaccccaccaccggccacccatctgtcacccttggacagcgcccacacccttctagcacctcctgacagcagtgagaagatctgcaccgtccagttggtgggtaacagctggacccctggctaccccgagacccaggaggcgctctgcccgcaggtgacatggtcctgggaccagttgcccagcagagctcttggccccgctgctgcgcccacactctcgccagagtccccagccggctcgccagccatgatgctgcagccgggcccgcagctctacgacgtgatggacgcggtcccagcgcggcgctggaaggagttcgtgcgcacgctggggctgcgcgaggcagagatcgaagccgtggaggtggagatcggccgcttccgagaccagcagtacgagatgctcaagcgctggcgccagcagcagcccgcgggcctcggagccgtttacgcggccctggagcgcatggggctggacggctgcgtggaagacttgcgcagccgcctgcagcgcggcccgtgacacggcgcccacttgccacctaggcgctctggtggcccttgcagaagccctaagtacggttacttatgcgtgtagacattttatgtcacttattaagccgctggcacggccctgcgtagcagcaccagccggccccacccctgctcgcccctatcgctccagccaaggcgaagaagcacgaacgaatgtcgagagggggtgaagacatttctcaacttctcggccggagtttggctgagatcgcggtattaaatctgtgaaagaaaacaaaacaaaacaaaaaaaaaaaaaaaaaa

SEQ ID NO: 36 - DNA, 1089 bp, Homo sapiens
cgggccctgcgggcgcggggctgaaggcggaaccacgacgggcagagagcacggagccgggaagcccctgggcgcccgtcggagggctatggagcagcggccgcggggctgcgcggcggtggcggcggcgctcctcctggtgctgctgggggcccgggcccagggcggcactcgtagccccaggtgtgactgtgccggtgacttccacaagaagattggtctgttttgttgcagaggctgcccagcggatgaagctgggatggaggctctgaccccaccaccggccacccatctgtcacccttggacagcgcccacacccttctagcacctcctgacagcagtgagaagatctgcaccgtccagttggtgggtaacagctggacccctggctaccccgagacccaggaggcgctctgcccgcaggtgacatggtcctgggaccagttgcccagcagagctcttggccccgctgctgcgcccacactctcgccagagtccccagccggctcgccagccatgatgctgcagccgggcccgcagctctacgacgtgatggacgcggtcccagcgcggcgctggaaggagttcgtgcgcacgctggggctgcgcgaggcagagatcgaagccgtggaggtggagatcggccgcttccgagaccagcagtacgagatgctcaagcgctggcgccagcagcagcccgcgggcctcggagccgtttacgcggccctggagcgcatggggctggacggctgcgtggaagacttgcgcagccgcctgcagcgcggcccgtgacacggcgcccacttgccacctaggcgctctggtggcccttgcagaagccctaagtacggttacttatgcgtgtagacattttatgtcacttattaagccgctggcacggccctgcgtagcagcaccagccggccccacccctgctcgcccctatcgctccagccaaggcgaagaagcacgaacgaatgtcgagagggggtgaagacatttctcaacttctcggccggagtttggctgagatcgcggtattaaatctgtgaaagaaaacaaaacaaaacaaaaaaaaaaaaaaaaaa

SEQ ID NO: 37 - DNA, 3634 bp, Homo sapiens
actgcatctccgactctctgcccagactcttcactccgcggcaccctcaaaccccagcccaggccggggcgcacgagccagccagcgcacctgcagtcctcgcccggacgcgccgcgccccctcggaaccaggctctgctccgagcagccttcgcccctcaagccagccacagtccccgccaggccgggtgggcgtcaagatgaaggcggcccgcttcgtgctgcgcagcgctggctcgctcaacggcgccggcctggtgccccgagaggtggagcatttctcgcgctacagcccgtccccgctgtccatgaagcagctactggactttggttcagaaaatgcatgtgaaagaacttcttttgcatttttgcgacaagaattgcctgtgagactcgccaacattctgaaggaaattgatatcctcccgacccaattagtaaatacctcttcagtgcaattggttaaaagctggtatatacagagcctgatggatttggtggaattccatgagaaaagcccagatgaccagaaagcattatcagactttgtagatacactcatcaaagttcgaaatagacaccataatgtagtccctacaatggcacaaggaatcatagagtataaagatgcctgtacagttgacccagtcaccaatcaaaatcttcaatatttcttggatcgattttacatgaaccgtatttctactcggatgctgatgaaccagcacattcttatatttagtgactcacagacaggaaacccaagccacattggaagcattgatcctaactgtgatgtggtagcagtggtccaagatgcctttgagtgttcaaggatgctctgtgatcagtattatttatcatctccagaattaaagcttacacaagtgaatggaaaatttccagaccaaccaattcacatcgtgtatgttccttctcacctccatcatatgctctttgaactatttaagaatgcaatgcgggcaacagttgaacaccaggaaaatcagccttcccttacaccaatagaggttattgttgtcttgggaaaagaagaccttaccattaagatttcagacagaggaggtggtgttcccctgagaattattgaccgcctctttagttatacatactccactgcaccaacgcctgtgatggataattcccggaatgctcctttggctggttttggttacggcttgccaatttctcgtctgtatgccaagtactttcaaggagatctgaatctctactctttatcaggatatggaacagatgctatcatctacttaaaggctttgtcttctgagtctatagaaaaacttccagtttttaacaagtcagccttcaaacattatcagatgagctctgaggctgatgactggtgtatcccaagcagggaaccaaagaacctggcaaaagaagtggccatgtgaagagggacactcaggacactttacgggatcaaagtgggtctgcaccagtgctgcttcctgaatgtttgtgtgtgaacccttgtttcctccaaaacaaacgacagcaacgaaaactccttaatcagaacactgatccaatgaggaatggagcttgtttctgtgacccaggagaacttagtgcaagactacaggagttaacagatggccagctccttattttttaatgtagaataactcctgagtttatatcaaatcctgaagaaataagcctcagttttccatctgtttttgatacgaataagaaagggagtgagtgtgaagatggtggttagcagtttcactagactgatattttaggcctcttgttcacatcaaaagatattggtgtcagaataccagcattttcctgccatgcaaaggattaaaacttagtttacactatgtggttacaaatatatgtcaatgtacattttgaacatatttatgtgctatggaaggaaatgctggtgactaaaataaggtttactctgaaagaggaggaattttattcaaagcattcaaacattttattcaagtgtttcaaaattcaaagcattgtattcaaagttgcagtgaaggcatcaacttatgtaaaaactcagaaggaaggctcctctgataaaaacacagctcctttattatgctgcttttcttgttcactttacacactaagtaaacacttattgtcaggtgcctagtcttgagtgaattgttagatgtgcactgaactcgggatgttggggattggagagagagaattgccaaagtaacagcaaaaatatctcttactttgctttgtttataaataaattagtagattggaaaaactagtgttagggaaagaaatcacatgttcagagcctaattcagtaggaagggcttttctctaccctgaaatgaaggtaatccaaaggcatccattttctaggcttaaaagatatatttttgatatatttaattatattctctacactccagcattaatatgtctgtttaaaaattactaattctcaaatggctcaagaacattagaatttaagtaccttttagagtaattattttaagcaaatagcctggacgtaagagattctcatgccagcatgctttcatttgtcagttgttgtgactgagagctaatgaatgacacctgaaatgcatatggtatttttgggagagttaaggtataatttgaagattggcagaccagtcgcgctgattactcttagagaagaagaaatggaaaaatgaaagaaggcaggaaggaaagaaaggatgcaggaaggaaagaaaggatacaggaagagagggaagcagaaggcagtcatttttctattttccccacaaattatttcaaaaaaaatctgtattttctgggatatgtcattggcaagaggaagaactggtgtttcgaaagcagtatggattctttaaatgcctctcactcttacaagatagtaggctttgagataataaacttacccgtgtcaattaacatttaaactggcatatagaaaaaaaggaggatttttctgcattgtaaaataatcagtatggtttatatgttgaatttgacatttgtgtgtaatttcatggtggcctagtgttgtggtgcttctggtaatggtaatagaagctcaactatttttttgtggatttcagtttttatcatcagaagtcctagacagtgacatttcttaatggtgggagtccagctcatgcatttctgatcatacaaaacagtttgcagtaggttatctgtcatttcagttttttactgaaatttgagctaaacatttttacatgtaatacttgtatttaccaaagatttaaatcagttgattaattaattaactcaaatactgtgaactatctttaaaacactagaaaaaagaaatgttagtatctcaattacaccaactgtgcaaatgaactttgataaaatagaaataatctacattggcctttgtgaaatctggggaagagctttaggattttagtagatggatactgaatactcaggcccccttaaattattaatgtatacattgtgtttttgtctttatgctatgtacagagaaatgtgataattttttataataaatattttttatgatgataaaaaaaaaaaaaaaaaaaaaaaaaaaaaaaaaaaaaaaaaa

SEQ ID NO: 38 - DNA, 1619 bp, Homo sapiens
aacattcctgcaaatggtttcaatatatgcagatgtctcgatataggaatgaaattacgtctttggaacaacttaaataagtcaaatatacttggagctttaaaaattaaaaggagagagattcgagcaccttttctgctgccatgacaaccatgcaaggaatggaacaggccatgccaggggctggccctggtgtgccccagctgggaaacatggctgtcatacattcacatctgtggaaaggattgcaagagaagttcttgaagggagaacccaaagtccttggggttgtgcagattctgactgccctgatgagccttagcatgggaataacaatgatgtgtatggcatctaatacttatggaagtaaccctatttccgtgtatatcgggtacacaatttgggggtcagtaatgtttattatttcaggatccttgtcaattgcagcaggaattagaactacaaaaggcctggtccgaggtagtctaggaatgaatatcaccagctctgtactggctgcatcagggatcttaatcaacacatttagcttggcgttttattcattccatcacccttactgtaactactatggcaactcaaataattgtcatgggactatgtccatcttaatgggtctggatggcatggtgctcctcttaagtgtgctggaattctgcattgctgtgtccctctctgcctttggatgtaaagtgctctgttgtacccctggtggggttgtgttaattctgccatcacattctcacatggcagaaacagcatctcccacaccacttaatgaggtttgaggccaccaaaagatcaacagacaaatgctccagaaatctatgctgactgtgacacaagagcctcacatgagaaattaccagtatccaacttcgatactgatagacttgttgatattattattatatgtaatccaattatgaactgtgtgtgtatagagagataataaattcaaaattatgttctcatttttttccctggaactcaataactcatttcactggctctttatcgagagtactagaagttaaattaataaataatgcatttaatgaggcaacagcacttgaaagtttttcattcatcataagaactttatataaaggcattacattggcaaataaggtttggaagcagaagagcaaaaaaaagatattgttaaaatgaggcctccatgcaaaacacatacttccctcccatttatttaactttttttttctcctacctatggggaccaaagtgctttttccttcaggaagtggagatgcatggccatctccccctccctttttccttctcctgcttttctttccccatagaaagtaccttgaagtagcacagtccgtccttgcatgtgcacgagctatcatttgagtaaaagtatacatggagtaaaaatcatattaagcatcagattcaacttatattttctatttcatcttcttcctttcccttctcccaccttctactgggcataattatatcttaatcatatatggaaatgtgcaacatatggtatttgttaaatacgtttgtttttattgcagagcaaaaataaatcaaattagaagcaataaaaaaaaaaaaaaaaaaaa

SEQ ID NO: 39 - DNA, 1543 bp, Homo sapiens
agagccctgcatgcatcagacctacagcagacattgcaggcctgaagaaagcaccttttctgctgccatgacaaccatgcaaggaatggaacaggccatgccaggggctggccctggtgtgccccagctgggaaacatggctgtcatacattcacatctgtggaaaggattgcaagagaagttcttgaagggagaacccaaagtccttggggttgtgcagattctgactgccctgatgagccttagcatgggaataacaatgatgtgtatggcatctaatacttatggaagtaaccctatttccgtgtatatcgggtacacaatttgggggtcagtaatgtttattatttcaggatccttgtcaattgcagcaggaattagaactacaaaaggcctggtccgaggtagtctaggaatgaatatcaccagctctgtactggctgcatcagggatcttaatcaacacatttagcttggcgttttattcattccatcacccttactgtaactactatggcaactcaaataattgtcatgggactatgtccatcttaatgggtctggatggcatggtgctcctcttaagtgtgctggaattctgcattgctgtgtccctctctgcctttggatgtaaagtgctctgttgtacccctggtggggttgtgttaattctgccatcacattctcacatggcagaaacagcatctcccacaccacttaatgaggtttgaggccaccaaaagatcaacagacaaatgctccagaaatctatgctgactgtgacacaagagcctcacatgagaaattaccagtatccaacttcgatactgatagacttgttgatattattattatatgtaatccaattatgaactgtgtgtgtatagagagataataaattcaaaattatgttctcatttttttccctggaactcaataactcatttcactggctctttatcgagagtactagaagttaaattaataaataatgcatttaatgaggcaacagcacttgaaagtttttcattcatcataagaactttatataaaggcattacattggcaaataaggtttggaagcagaagagcaaaaaaaagatattgttaaaatgaggcctccatgcaaaacacatacttccctcccatttatttaactttttttttctcctacctatggggaccaaagtgctttttccttcaggaagtggagatgcatggccatctccccctccctttttccttctcctgcttttctttccccatagaaagtaccttgaagtagcacagtccgtccttgcatgtgcacgagctatcatttgagtaaaagtatacatggagtaaaaatcatattaagcatcagattcaacttatattttctatttcatcttcttcctttcccttctcccaccttctactgggcataattatatcttaatcatatatggaaatgtgcaacatatggtatttgttaaatacgtttgtttttattgcagagcaaaaataaatcaaattagaagcaataaaaaaaaaaaaaaaaaaaa

SEQ ID NO: 40 - DNA, 1766 bp, Homo sapiens
gtgaggtgctgcgggaggccccgggcaccatggcccaggccctgggggaggacctggtgcagcctcccgagctgcaggatgactccagctccttggggtccgactcagagctcagcgggcctggcccatatcgccaggccgaccgctatggattcattgggggcagctcagcagagccagggccgggccacccacctgcagacctcatccgccaacgggagatgaagtgggtggagatgacctcgcactgggagaaaaccatgtcccggcggtacaagaaggtaaagatgcagtgccggaaaggcatcccgtctgccctgcgcgcccgatgctggcccctgttgtgtggggcccatgtgtgccagaagaacagccctggcacctatcaggagctggcagaggcccctggagacccacagtggatggagaccattggcagggacctgcaccgtcaattccctctgcacgagatgtttgtgtcgcctcagggccacgggcagcaggggctcctgcaggtgctcaaggcctacaccctgtatcgaccggagcagggctactgccaggcccaggggcccgtggctgctgtgctgctcatgcacctgcccccagaggaggccttctggtgcctggtgcagatctgtgaggtctacctccctgggtactacgggccccacatggaggctgtgcggctggacgccgaggtgttcatggccctgctgcggcggctgcttccgcacgtgcacaagcacctgcagcaggtgggcgtcggacccctgctgtacctgcccgagtggttcctgtgcctcttcgcccgctccctgcccttccccacagtgctgcgtgtctgggatgccttcctcagtgagggtgccagagtactgttccgtgtggggctgacactggtgcgcctggcgctgggcactgcagagcagcgaggggcctgccctggcctcctggagacactgggagcccttcgagccatcccccccgcgcagctgcaggaggaggccttcatgtcacaggtgcacagcgtggtgctgtcagagcgggacctgcagcgggagatcaaggcccagctggcccagctgcccgattccgcgccgggacccccgccccggccacaggtccgcctcgccggggcccaagccatctttgaggcccagcagctggcaggagtgcgacgaggcgccaagcctgaggtgcctcggattgtggtgcagcccccggaggagcccagaccaccgcggcggaaaccccagacccgcggcaagactttccatgggctcctgactcgggcccggggcccccccatcgaggggccccccaggccccaacgaggctccacctccttcctggacacccgcttctgagaggaccatggacttagtgtcccccagtctcaattgcctgatggctgatgccagcccggcaaataggcaccgcactttactcttgggactcggggacttggcttccttcctggcaaggaccaggcagtggggaaggaggaggtcctccgtggtacatactgggtcaggcactagcatggaggagggtcacagagtggggcacgtgaggacccatggaaccgtcctggtgcccaggccctcacaagtaccaaagccagcaccaaaggagtcagggaaggggttggctgagtcaagggaccccagagggcaccaggaataaaatcttcttgaacagaaaaaaaaaaaaaaaaaaaaaaaaaaaaaaaaaaaaaaaaaaaaaaaaaaaaaaaaaaaaaa

SEQ ID NO: 41 - DNA, 1679 bp, Homo sapiens
gtcgggaggagggcagacacgccgctttttggatgcctcctatgcctggcgggagtcttgtctgagctggcaccaccacacggcccacgacatcttcgcagggaagcctgtggaccctctgccaggctccacaagaggtcaggacagtgcagtgtgttcacaaggccagtttctgatcgtccgccccgaggctgaggaccagtaggcagctcccaagatgggtgaaaggaaaggggtcaacaagtactatcctccagacttcaaccctgagaagcatggctctctcaaccgataccacaacagccacccgcttcgggagcgggctcggaagctgtcacagggcatcctcatcatccgattcgaaatgccatataacatctggtgcgatggctgcaagaaccacatcggcatgggtgttcgttacaatgcagaaaagaagaaggtgggcaattactacacaaccccgatctacaggttccggatgaaatgccacctctgtgtcaactacatcgagatgcagacggaccccgccaactgcgactacgtgatcgtgagtggcgcccagcgcaaggaggagcgctgggacatggcggacaatgagcaggtgctgaccacagagcatgagaagaagcagaagctggagacggacgccatgttccggctggagcatggcgaggccgaccgcagcacactcaagaaggcgctgcccacactgagccacatccaggaggcccagagcgcctggaaggacgacttcgccctcaacagcatgctgcggagaaggttccgggaaaagaaaaaagccatccaggaggaggaggagagagaccaggccttgcaggccaaggcgagcctgaccatcccgctggtgcccgagacggaagatgaccgcaagctggcggctctgctgaagttccacaccctggactcctacgaggacaagcagaaactcaagcggaccgagatcatcagccgctcctggttcccctctgcccccggatccgcctccagcagcaaggtcagcggcgtcctgaagaagctggcacagagccgcagaaccgcgcttgccacctcccccatcaccgtcggggacctgggcatcgtgcggcggaggtctcgggacgtcccggagagcccccagcatgcggccgacacccccaagtctggggaaccgcgggtaccagaggaggctgcccaggaccggcccatgtcccccggagactgtcctccggaaacaactgagacccccaagtgcagcagcccgagggggcaggaagggagccgtcaggacaagcccctgtcgccagcaggctcctcccaggaggcagctgacacccccgacacgcggcacccctgcagtctcggctcctccctcgtggcggactactccgactcggagagtgagtgagcgatccccatcctggagactggacccgctctagaggcccggacacacccaggaggcccctcacagactgcagacccccggctcgcccaccagccctgggagagctcagatgccgcatcctccccagaccgcgccttcctgcaaccgtggagttatttatttggtcctggtgagggtgtttgtgccttgtgagactccgtacattaaagacctgtctcttcttcaaaaaaaaaaaaaaaaaaaaaaaaaaaaaaaaaaaaaaaaaaaaaaa

SEQ ID NO: 42 - DNA, 3597 bp, Homo sapiens
ggagcaggcgtgcgggccgtgagcggcgccagagggtacctggctctgtggaggggccctctggtatgtgtgtccctgtccttctggggcgtggatggtgcctgggacccagctggcaaccagttgaagacgttctccttggaagctcttggccctgaggactttgcctggggcattggccctgccatggcgttccggagggccgagggcacgtctatgatccaggccctggccatgacggtggccgagatccccgtgttcctgtacacgacgtttgggcagtctgcattctcccagctacggttgacgccaggcctgcggaaagtcctctttgccacggccctggggactgtggccctggccctggctgcccaccagctgaagaggcgacggaggaggaagaagcaggttggtcccgagatgggaggggagcagctgggcacggtgcccctccctatcctcttggccaggaaggtcccttcagtgaagaaaggatactccagccggagagtccagagccccagcagcaagagcaacgacaccctgagtggcatctcttccattgagcccagcaagcactcgggctcctcccacagtgtggcctcgatgatggcagtgaactcatccagccccacagccgcgtgctcgggactatgggatgccagagggatggaggagtctctgaccaccagcgacggcaatgcagagagcctgtacatgcaaggcatggagctgtttgaggaagctctgcagaagtgggagcaggcactaagcgtgggccagcggggggacagcggcagcacccccatgcccagggacggcctccggaacccagagactgcatcagagccactgtctgagccagagtcacagcggaaggagtttgcagagaagctggagtccctgctgcaccgtgcctaccacctgcaggaggagttcggctccaccttccccgcagacagcatgctgctagacctcgagaggaccctcatgctgcccctgaccgagggctcgctgcggctgcgggcggacgatgaggacagcctgacttcagaggattccttcttctccgccaccgagctctttgagtccctgcagactggagattacccgatcccactctccagacccgccgctgcctatgaggaggccctgcagctggtgaaggaggggagagtgccttgccggaccctcaggacggagctgctgggctgctacagtgaccaggactttctggccaagctgcactgtgtgcggcaggccttcgaggggcttctggaagacaagagtaaccagcttttcttcgggaaagtgggccgacagatggtgacaggcctgatgaccaaggctgagaagagccccaaaggcttcctggagagctacgaggagatgctgagctatgccctgcggcccgagacctgggccacaacacggctggagctggagggccgaggggtggtatgcatgagcttcttcgacatcgtgctggacttcatcctcatggacgccttcgaggacctggagaaccctccggcctcggtgctcgccgtcctgcggaaccgctggctgtcagacagcttcaaggagacggccttggccactgcttgctggtcggtcctgaaagccaagaggaggctgctgatggtgcctgatggcttcatctcccatttctactccgtatcggagcatgtgagccctgtcctagccttcggcttccttggacccaagcctcagcttgctgaagtctgtgctttcttcaagcaccagattgtgcagtacctgagggacatgttcgacctggacaatgtgcgctacacgtcactgcccgcgctggcagacgacatcctgcagctgtcccggcgccgcagcgagatattgctggggtacctgggggtgcccgcggccagcagcgcaggcgtgaatggggcgctgccccgagagaatgggcccctgggggagctgcagtagaggcggcacgggctggggggtggcagagagaaggctcctcctcccttccctgggttggtatctgacagctgtggtggctgagggccgttgcccctgactttgccccacccccatcatctgggagtccccaaggcccagaggggacatttccatggagaagaacggttcctgggggaagcagaggccaggaccagtggggcctgtgggagagaaaggctgtgagagagggggttgttgtggagaattgggacaggcagagccaggatgccccaggtgggggaccccaaaacctcccatcgctccagggctgctgacaagggtgctgggagggtggaggtgaaggatggggcctagagccctgtggtgaaggtcacagtgtcctgagctagaagccacctgtggctatatggtctcagcatccagctggcctgtcctgatgccctccccacctcaaccgccttctcagagagtttgcaactccagagaaggagagtggggccaccttagtgggcagcaggcctgggccatccagagatggggcagaggtgggcctcccactcctgtgctctcttctgagcaggaactgggcccttgacagtgtcctttgacattccctcgccctaccaaagatcgtcttttctcctcccacctctgtcaccaccaaagacgggcggaggtggggctgggccctcctgcccccgcccatcccccttccatgagcccagacctccctgggtggtgctaggctctgagctgggggctcagaccagggatcgctcaggcccctgtcacctgtgggcccggggaccacttgggggaggtcagaggatgtatgtggccggaccagcttccccaccttcattaggacaagaaactgcccagcactttgccttcagttcaacgcacaaacgctcctggggcctcatgggggcagagcctcccctgggcctgcagagagtcctgttagcagcgacgtccccccgccgcggggtcctgtcagcccggcagtgtcttctcagtgtcttcacctgagcgagtgtctgtggccccaacgcgttctgctgtggctctgccctttccaggttgagaggcctgcaggagaaacacactcccctcctgggtttccacactcaggaggtcagaggactggctcctgtgaccagggcccctctcccctgaatgggaaaggggtctggggatgggagggcgcaccacagagaggagatgatgctgggtgtggcccatcttctgtgggccccttcccagacaccggatccatgggcactaacccgcctcccaggctgatgcccggaggcagcttcctgggcaggagggttccatgggcactaacccacctcccaggctgatgcctggaggcagcctccagggcaggaaggaccctgtgctccccgccccccatcctgacatcctgttcttttgcacttaccctgtgctgtgaatgtaacagtgggccttggccccgcccactctgatttgcattttcatttgtgtttgtttacacatccatgcactgcctgtagcagtcgattgtcacagcttcgacttttggatggtagagtgtgtgcactgactgtgagtcgaataaacaattgagacgaaaaaaaaaaa

SEQ ID NO: 43 - DNA, 3527 bp, Homo sapiens
agtaacaaatgaagtgcgcgctgcgacacctcccagcccaccgaactccgccgccatttcctcgcttggcctaacggttcggccaatcccagcgcgcatcaagaaggactgaggctccgccaatcggaggccgccgatttcgacccttcgcctcggcccggcccaatccaggccccggccccgccgcccccggcccgcccccgcggtgccctctctcctccctctttgtgcgtctcgcgccgccgccgcccgccgcgtgagaggacgggctccgcgcgctccggcagcgcattcgggtcccctccccccgggaggcttgcgaaggagaagccgccgcagaggaaaagcaggtgccggtgcctgtccccgggggcgccatggcgaccggagcgaacgccacgccgttggacttcccaagtaagaagcggaagaggagccgctggaaccaagacacaatggaacagaagacagtgattccaggaatgcctacagttattccccctggacttactcgagaacaagaaagagcttatatagtgcaactgcagatagaagacctgactcgtaaactgcgcacaggagacctgggcatcccccctaaccctgaggacaggtccccttcccctgagcccatctacaatagcgaggggaagcggcttaacacccgagagttccgcacccgcaaaaagctggaagaggagcggcacaacctcatcacagagatggttgcactcaatccggatttcaagccacctgcagattacaaacctccagcaacacgtgtgagtgataaagtcatgattccacaagatgagtacccagaaatcaactttgtggggctgctcatcgggcccagagggaacaccctgaagaacatagagaaggagtgcaatgccaagattatgatccgggggaaagggtctgtgaaagaagggaaggttgggcgcaaagatggccagatgttgccaggagaagatgagccacttcatgccctggttactgccaatacaatggagaacgtcaaaaaggcagtggaacagataagaaacatcctgaagcagggtatcgagactccagaggaccagaatgatctacggaagatgcagcttcgggagttggctcgcttaaatgggacccttcgggaagacgataacaggatcttaagaccctggcagagctcagagacccgcagcattaccaacaccacagtgtgtaccaagtgtggaggggctggccacattgcttcagactgtaaattccaaaggcctggtgatcctcagtcagctcaggataaagcacggatggataaagaatatttgtccctcatggctgaactgggtgaagcacctgtcccagcatctgtgggctccacctctgggcctgccaccacacccctggccagcgcacctcgtcctgctgctcccgccaacaacccacctccaccgtctctcatgtctaccacccagagccgcccaccctggatgaattctggcccttcagagagtcggccctaccacggcatgcatggaggtggtcctggtgggcccggaggtggcccccacagcttcccacacccattacccagcctgacaggtgggcatggtggacatcccatgcagcacaaccccaatggacccccacccccttggatgcagccaccaccaccaccgatgaaccagggcccccaccctcctgggcaccatggccctcctccaatggatcagtacctgggaagtacgcctgtgggctctggggtctatcgcctgcatcaaggaaaaggtatgatgccgccaccacctatgggcatgatgccgccgccgccgccgcctcccagtgggcagcccccaccccctccctctggtcctcttcccccatggcaacaacagcagcagcagcctccgccaccccctccgcccagcagcagtatggcttccagtacccccttgccatggcagcaaaatacgacgactaccaccacgagcgctggcacagggtccatcccgccatggcaacagcagcaggcggctgccgcagcttctccaggagcccctcagatgcaaggcaaccccactatggtgcccctgccccccggggtccagccgcctctgccgcctggggcccctccccctccgccgcctccaccgcctggttccgccggcatgatgtatgccccgccccctcctcctccgcctcccatggacccttctaactttgtcaccatgatgggcatgggggtggcgggcatgccgcccttcgggatgcctccagctcccccaccgcctccaccacagaactagacttgttttttaagaaaatatatattatatatagagagaattggtctcgtttaaacacgccgaacctcaccatatggagccagacattgggacgcacgcatgtgattgtgtgtgcacgcatgtgtgtgtgtgcacgcactgggctgggccaagcgactgaggattcgcttgggaacgggcaggtggtagtaggggcgccagcttgggctctcctggcgccccgtagcatcgagtgtcttctttgtcttctttctctcctcacccaactccctttgcctctccccaaaccgggccgccaggatccctccccgcggcggcgatggcccgagccatgagagtgaggactttccgcgcccattggtgacccttccaggcagacagcctcagcaacgcccctggtggacaggatggttcggcaaagcagcctgagttatttttgtggacggaatcggaacacgctggctccatatcgtgaaatttttattaatttttttctttttcctttgttacttctttatcttttcctttcttcagactccgtccaaggagatgctctccccggtcttctgctgcaatttagattcctttcccttctctccagttctccttcccttaccaaggagaggggagcaaatggttttgggcaagggctttggccattcatgtcaagctggttgtgggtttttcaaggtgccatagccacccccaaagatgtttgtttaaagcgtggggttttttaatctctgccacccttgtcaagggagtcttgtaaagttgccgagggtaggttcatctccaggtttcgggattcccatccgtcctggcgatcctgccagcagtgggtgggcagcctgagctccctcgggctcgcctgccagcctggagttcttcctgtgctccttgatcacctgagctgcctcagattccatttggtcctctccttcctggaaggcttccttttatgttttgttttaatcccaaatgtctgaatgttttgcagtgtgtaggggtttgagccccttgttcattctccttcctttttcctcccgcttccctctccatgaagtgattctgttgacaataatgtatactgcgcgttctcttcactggtttatctgcagaaatttctctgggcttttttcggtgttagattcaacactgcgctaaagcggggatgttccattgaataaaagagcagtgtggttttctgggaaaaaaaaaaaaaaaaaa

SEQ ID NO: 44 - DNA, 3095 bp, Homo sapiens
agtaacaaatgaagtgcgcgctgcgacacctcccagcccaccgaactccgccgccatttcctcgcttggcctaacggttcggccaatcccagcgcgcatcaagaaggactgaggctccgccaatcggaggccgccgatttcgacccttcgcctcggcccggcccaatccaggccccggccccgccgcccccggcccgcccccgcggtgccctctctcctccctctttgtgcgtctcgcgccgccgccgcccgccgcgtgagaggacgggctccgcgcgctccggcagcgcattcgggtcccctccccccgggaggcttgcgaaggagaagccgccgcagaggaaaagcaggtgccggtgcctgtccccgggggcgccatggcgaccggagcgaacgccacgccgttggacttcccaagtaagaagcggaagaggagccgctggaaccaagacacaatggaacagaagacagtgattccaggaatgcctacagttattccccctggacttactcgagaacaagaaagagcttatatagtgcaactgcagatagaagacctgactcgtaaactgcgcacaggagacctgggcatcccccctaaccctgaggacaggtccccttcccctgagcccatctacaatagcgaggggaagcggcttaacacccgagagttccgcacccgcaaaaagctggaagaggagcggcacaacctcatcacagagatggttgcactcaatccggatttcaagccacctgcagattacaaacctccagcaacacgtgtgagtgataaagtcatgattccacaagatgagtacccagaaatcaactttgtggggctgctcatcgggcccagagggaacaccctgaagaacatagagaaggagtgcaatgccaagattatgatccgggggaaagggtctgtgaaagaagggaaggttgggcgcaaagatggccagatgttgccaggagaagatgagccacttcatgccctggttactgccaatacaatggagaacgtcaaaaaggcagtggaacagataagaaacatcctgaagcagggtatcgagactccagaggaccagaatgatctacggaagatgcagcttcgggagttggctcgcttaaatgggacccttcgggaagacgataacaggatcttaagaccctggcagagctcagagacccgcagcattaccaacaccacagtgtgtaccaagtgtggaggggctggccacattgcttcagactgtaaattccaaaggcctggtgatcctcagtcagctcaggataaagcacggatggataaagaatatttgtccctcatggctgaactgggtgaagcacctgtcccagcatctgtgggctccacctctgggcctgccaccacacccctggccagcgcacctcgtcctgctgctcccgccaacaacccacctccaccgtctctcatgtctaccacccagagccgcccaccctggatgaattctggcccttcagagagtcggccctaccacggcatgcatggaggtggtcctggtgggcccggaggtggcccccacagcttcccacacccattacccagcctgacaggtgggcatggtggacatcccatgcagcacaaccccaatggacccccacccccttggatgcagccaccaccaccaccgatgaaccagggcccccaccctcctgggcaccatggccctcctccaatggatcagtacctgggaagtacgcctgtgggctctggggtctatcgcctgcatcaaggaaaaggtatgatgccgccaccacctatgggcatgatgccgccgccgccgccgcctcccagtgggcagcccccaccccctccctctggtcctcttcccccatggcaacaacagcagcagcagcctccgccaccccctccgcccagcagcagtatggcttccagtacccccttgccatggcagcaaaatacgacgactaccaccacgagcgctggcacagggtccatcccgccatggcaacagcagcaggcggctgccgcagcttctccaggagcccctcagatgcaaggcaaccccactatggtgcccctgccccccggggtccagccgcctctgccgcctggggcccctccccctccgccgcctccaccgcctggttccgccggcatgatgatccctccccgcggcggcgatggcccgagccatgagagtgaggactttccgcgcccattggtgacccttccaggcagacagcctcagcaacgcccctggtggacaggatggttcggcaaagcagcctgagttatttttgtggacggaatcggaacacgctggctccatatcgtgaaatttttattaatttttttctttttcctttgttacttctttatcttttcctttcttcagactccgtccaaggagatgctctccccggtcttctgctgcaatttagattcctttcccttctctccagttctccttcccttaccaaggagaggggagcaaatggttttgggcaagggctttggccattcatgtcaagctggttgtgggtttttcaaggtgccatagccacccccaaagatgtttgtttaaagcgtggggttttttaatctctgccacccttgtcaagggagtcttgtaaagttgccgagggtaggttcatctccaggtttcgggattcccatccgtcctggcgatcctgccagcagtgggtgggcagcctgagctccctcgggctcgcctgccagcctggagttcttcctgtgctccttgatcacctgagctgcctcagattccatttggtcctctccttcctggaaggcttccttttatgttttgttttaatcccaaatgtctgaatgttttgcagtgtgtaggggtttgagccccttgttcattctccttcctttttcctcccgcttccctctccatgaagtgattctgttgacaataatgtatactgcgcgttctcttcactggtttatctgcagaaatttctctgggcttttttcggtgttagattcaacactgcgctaaagcggggatgttccattgaataaaagagcagtgtggttttctgggaaaaaaaaaaaaaaaaaa

SEQ ID NO: 45 - DNA, 1001 bp, Homo sapiens
agtaacaaatgaagtgcgcgctgcgacacctcccagcccaccgaactccgccgccatttcctcgcttggcctaacggttcggccaatcccagcgcgcatcaagaaggactgaggctccgccaatcggaggccgccgatttcgacccttcgcctcggcccggcccaatccaggccccggccccgccgcccccggcccgcccccgcggtgccctctctcctccctctttgtgcgtctcgcgccgccgccgcccgccgcgtgagaggacgggctccgcgcgctccggcagcgcattcgggtcccctccccccgggaggcttgcgaaggagaagccgccgcagaggaaaagcaggtgccggtgcctgtccccgggggcgccatggcgaccggagcgaacgccacgccgttggacttcccaagtaagaagcggaagaggagccgctggaaccaagacacaatggaacagaagacagtgattccaggaatgcctacagttattccccctggacttactcgagaacaagaaagagcttatataggtaaatatacgttctgcatccaaatgcactttgagattgttacgatttattctgagcaagatctgcattttttgaaagtttgagattgtagttatcttttttgagatgagatactttcacgactttggtatcatctgtcagtttttgcccagtgagttctgcatttgcagctccttgttttggtctgttcgtaactgcagtgttctccatgagtatcaggaaggtagggtttcacttaggagtaagaacagtccccagtccagcagccacccttttcagctgctgttcattgccagttgatgaggtgagtgtcatctgcctctctggacaggccccagtggagaacaccgcaggtactgtaaaccaagtacttttcacagcgtggcctttcaccataattttatatttctccccctaaaatgtggtcttttactttttataggtactttctgaaaaaaaaaaaa

SEQ ID NO: 46 - DNA, 2890 bp, Homo sapiens
agtaacaaatgaagtgcgcgctgcgacacctcccagcccaccgaactccgccgccatttcctcgcttggcctaacggttcggccaatcccagcgcgcatcaagaaggactgaggctccgccaatcggaggccgccgatttcgacccttcgcctcggcccggcccaatccaggccccggccccgccgcccccggcccgcccccgcggtgccctctctcctccctctttgtgcgtctcgcgccgccgccgcccgccgcgtgagaggacgggctccgcgcgctccggcagcgcattcgggtcccctccccccgggaggcttgcgaaggagaagccgccgcagaggaaaagcaggtgccggtgcctgtccccgggggcgccatggcgaccggagcgaacgccacgccgttggacttcccaagtaagaagcggaagaggagccgctggaaccaagacacaatggaacagaagacagtgattccaggaatgcctacagttattccccctggacttactcgagaacaagaaagagcttatatagtgcaactgcagatagaagacctgactcgtaaactgcgcacaggagacctgggcatcccccctaaccctgaggacaggtccccttcccctgagcccatctacaatagcgaggggaagcggcttaacacccgagagttccgcacccgcaaaaagctggaagaggagcggcacaacctcatcacagagatggttgcactcaatccggatttcaagccacctgcagattacaaacctccagcaacacgtgtgagtgataaagtcatgattccacaagatgagtacccagaaatcaactttgtggggctgctcatcgggcccagagggaacaccctgaagaacatagagaaggagtgcaatgccaagattatgatccgggggaaagggtctgtgaaagaagggaaggttgggcgcaaagatggccagatgttgccaggagaagatgagccacttcatgccctggttactgccaatacaatggagaacgtcaaaaaggcagtggaacagataagaaacatcctgaagcagggtatcgagactccagaggaccagaatgatctacggaagatgcagcttcgggagttggctcgcttaaatgggacccttcgggaagacgataacaggatcttaagaccctggcagagctcagagacccgcagcattaccaacaccacagtgtgtaccaagtgtggaggggctggccacattgcttcagactgtaaattccaaaggcctggtgatcctcagtcagctcaggataaagcacggatggataaagaatatttgtccctcatggctgaactgggtgaagcacctgtcccagcatctgtgggctccacctctgggcctgccaccacacccctggccagcgcacctcgtcctgctgctcccgccaacaacccacctccaccgtctctcatgtctaccacccagagccgcccaccctggatgaattctggcccttcagagagtcggccctaccacggcatgcatggaggtggtcctggtgggcccggaggtggcccccacagcttcccacacccattacccagcctgacaggtgggcatggtggacatcccatgcagcacaaccccaatggacccccacccccttggatgcagccaccaccaccaccgatgaaccagggcccccaccctcctgggcaccatggccctcctccaatggatcagtacctgggaagtacgcctgtgggctctggggtctatcgcctgcatcaaggaaaaggtatgatgccgccaccacctatgggcatgatgccgccgccgccgccgcctcccagtgggcagcccccaccccctccctctggtcctcttcccccatggcaacaacagcagcagcagcctccgccaccccctccgcccagcagcagtatggcttccagtacccccttgccatggcagcaaagatccctccccgcggcggcgatggcccgagccatgagagtgaggactttccgcgcccattggtgacccttccaggcagacagcctcagcaacgcccctggtggacaggatggttcggcaaagcagcctgagttatttttgtggacggaatcggaacacgctggctccatatcgtgaaatttttattaatttttttctttttcctttgttacttctttatcttttcctttcttcagactccgtccaaggagatgctctccccggtcttctgctgcaatttagattcctttcccttctctccagttctccttcccttaccaaggagaggggagcaaatggttttgggcaagggctttggccattcatgtcaagctggttgtgggtttttcaaggtgccatagccacccccaaagatgtttgtttaaagcgtggggttttttaatctctgccacccttgtcaagggagtcttgtaaagttgccgagggtaggttcatctccaggtttcgggattcccatccgtcctggcgatcctgccagcagtgggtgggcagcctgagctccctcgggctcgcctgccagcctggagttcttcctgtgctccttgatcacctgagctgcctcagattccatttggtcctctccttcctggaaggcttccttttatgttttgttttaatcccaaatgtctgaatgttttgcagtgtgtaggggtttgagccccttgttcattctccttcctttttcctcccgcttccctctccatgaagtgattctgttgacaataatgtatactgcgcgttctcttcactggtttatctgcagaaatttctctgggcttttttcggtgttagattcaacactgcgctaaagcggggatgttccattgaataaaagagcagtgtggttttctgggaaaaaaaaaaaaaaaaaa

SEQ ID NO: 47 - DNA, 2662 bp, Homo sapiens
cccggacatggccgccaacatgtacagggtcggagactacgtctactttgagaactcctccagcaacccatacctgatccggagaatcgaggagctcaacaagacggccaatgggaacgtggaggccaaagtggtgtgcttctaccggaggcgggacatctccagcaccctcatcgccctggccgacaagcacgcaaccctgtcagtctgctataaggccggaccgggggcggacaacggcgaggaaggggaaatagaagaggaaatggagaatccggaaatggtggacctgcccgagaaactaaagcaccagctgcggcatcgggagctgttcctctcccggcagctggagtctctgcccgccacgcacatcaggggcaagtgcagcgtcaccctgctcaacgagaccgagtcgctcaagtcctacctggagcgggaggatttcttcttctattctctagtctacgacccacagcagaagaccctgctggcagataaaggagagattcgagtaggaaaccggtaccaggcagacatcaccgacttgttaaaagaaggcgaggaggatggccgagaccagtccaggttggagacccaggtgtgggaggcgcacaacccactcacagacaagcagatcgaccagttcctggtggtggcccgctctgtgggcaccttcgcacgggccctggactgcagcagctccgtccgacagcccagcctgcacatgagcgccgcagctgcctcccgagacatcaccctgttccacgccatggatactctccacaagaacatctacgacatctccaaggccatctcggcgctggtgccgcagggcgggcccgtgctctgcagggacgagatggaggagtggtctgcatcagaggccaaccttttcgaggaagccctggaaaaatatgggaaggatttcacggacattcagcaagattttctcccgtggaagtcgctgaccagcatcattgagtactactacatgtggaagaccaccgacagatacgtgcagcagaaacgcttgaaagcagctgaagctgagagcaagttaaagcaagtttatattcccaactataacaagccaaatccgaaccaaatcagcgtcaacaacgtcaaggccggtgtggtgaacggcacgggggcgccgggccagagccctggggctggccgggcctgcgagagctgttacaccacacagtcttaccagtggtattcttggggtccccctaacatgcagtgtcgtctctgcgcatcttgttggacatattggaagaaatatggtggcttgaaaatgccaacccggttagatggagagaggccaggaccaaaccgcagtaacatgagtccccacggcctcccagcccggagcagcgggagccccaagtttgccatgaagaccaggcaggctttctatctgcacacgacgaagctgacgcggatcgcccggcgcctgtgccgtgagatcctgcgcccgtggcacgctgcgcggaacccctacctgcccatcaacagcgcggccatcaaggccgagtgcacggcgcggctgcccgaagcctcccagagcccgctggtgctgaagcaggcggtacgcaagccgctggaagccgtgcttcggtatcttgagacccacccccgcccccccaagcctgaccccgtgaaaagcgtgtccagcgtgctcagcagcctgacgcccgccaaggtggcccccgtcatcaacaacggctcccccaccatcctgggcaagcgcagctacgagcagcacaacggggtggacggcaacatgaagaagcgcctcttgatgcccagtaggggtctggcaaaccacggacagaccaggcacatgggaccaagccggaacctcctgctcaacgggaagtcctaccccaccaaagtgcgcctgatccgggggggctccctgcccccagtcaagcggcggcggatgaactggatcgacgccccgggtgacgtgttctacatgcccaaagaggagaccaggaagatccgcaagctgctctcatcctcggaaaccaagcgtgctgcccgccggccctacaagcccatcgccctgcgccagagccaggccctgccgccgcggccaccgccacctgcgcccgtcaacgacgagcccatcgtcatcgaggactaggggccgcccccacctgcggccgccccccgcccctcgcccgcccacacggccccttcccagccagcccgccgcccgcccctcagtttggtagtgccccacctcccgccctcacctgaagagaaacgcgctccttggcggacactgggggaggagaggaagaagcgcggctaacttattccgagaatgccgaggagttgtcgtttttagctttgtgtttactttttggctggagcggagatgaggggccaccccgtgcccctgtgctgcggggccttttgcccggaggccgggccctaaggttttgttgtgttctgttgaaggtgccattttaaattttatttttattactttttttgtagatgaacttgagctctgtaacttacacctggaatgttaggatcgtgcggccgcggccggccgagctgcctggcggggttggcccttgtcttttcaagtaattttcatattaaacaaaaacaaagaaaaaaaatcttataaaaaggaaaa

SEQ ID NO: 48 - DNA, 3001 bp, Homo sapiens
actttcctgccccttccccggccaagcccaactccggatctcgctctccaccggatctcacccgccacacccggacaggcggctggaggaggcgggcgtctaaaattctgggaagcagaacctggccggagccactagacagagccgggcctagcccagagacatggagagttgctacaacccaggtctggatggtattattgaatatgatgatttcaaattgaactcctccattgtggaacccaaggagccagccccagaaacagctgatggcccctacctggtgatcgtggaacagcctaagcagagaggcttccgatttcgatatggctgtgaaggcccctcccatggaggactgcccggtgcctccagtgagaagggccgaaagacctatcccactgtcaagatctgtaactacgagggaccagccaagatcgaggtggacctggtaacacacagtgacccacctcgtgctcatgcccacagtctggtgggcaagcaatgctcggagctggggatctgcgccgtttctgtggggcccaaggacatgactgcccaatttaacaacctgggtgtcctgcatgtgactaagaagaacatgatggggactatgatacaaaaacttcagaggcagcggctccgctctaggccccagggccttacggaggccgagcagcgggagctggagcaagaggccaaagaactgaagaaggtgatggatctgagtatagtgcggctgcgcttctctgccttccttagagccagtgatggctccttctccctgcccctgaagccagtcacctcccagcccatccatgatagcaaatctccgggggcatcaaacctgaagatttctcgaatggacaagacagcaggctctgtgcggggtggagatgaagtttatctgctttgtgacaaggtgcagaaagatgacattgaggttcggttctatgaggatgatgagaatggatggcaggcctttggggacttctctcccacagatgtgcataaacagtatgccattgtgttccggacacccccctatcacaagatgaagattgagcggcctgtaacagtgtttctgcaactgaaacgcaagcgaggaggggacgtgtctgattccaaacagttcacctattaccctctggtggaagacaaggaagaggtgcagcggaagcggaggaaggccttgcccaccttctcccagcccttcgggggtggctcccacatgggtggaggctctgggggtgcagccgggggctacggaggagctggaggaggtggcagcctcggtttcttcccctcctccctggcctacagcccctaccagtccggcgcgggccccatgcggtgctacccgggaggcgggggcggggcgcagatggccgccacggtgcccagcagggactccggggaggaagccgcggagccgagcgccccctccaggaccccccagtgcgagccgcaggccccggagatgctgcagcgagctcgagagtacaacgcgcgcctgttcggcctggcgcacgcagccccgagccctactcgactactgcgtcaccgcggacgccgcgcgctgctggcgggacagcgccacctgctgacggcgcaggacgagaacggagacacaccactgcacctagccatcatccacgggcagaccagtgtcattgagcagatagtctatgtcatccaccacgcccaggacctcggcgttgtcaacctcaccaaccacctgcaccagacgcccctgcacctggcggtgatcacggggcagacgagtgtggtgagctttctgctgcgggtaggtgcagacccagctctgctggatcggcatggagactcagccatgcatctggcgctgcgggcaggcgctggtgctcctgagctgctgcgtgcactgcttcagagtggagctcctgctgtgccccagctgttgcatatgcctgactttgagggactgtatccagtacacctggcggtccgagcccgaagccctgagtgcctggatctgctggtggacagtggggctgaagtggaggccacagagcggcaggggggacgaacagccttgcatctagccacagagatggaggagctggggttggtcacccatctggtcaccaagctccgggccaacgtgaacgctcgcacctttgcgggaaacacacccctgcacctggcagctggactggggtacccgaccctcacccgcctccttctgaaggctggtgctgacatccatgctgaaaacgaggagcccctgtgcccactgccttcaccccctacctctgatagcgactcggactctgaagggcctgagaaggacacccgaagcagcttccggggccacacgcctcttgacctcacttgcagcaccttggtgaagaccttgctgctaaatgctgctcagaacaccatggagccacccctgaccccgcccagcccagcagggccgggactgtcacttggtgatacagctctgcagaacctggagcagctgctagacgggccagaagcccagggcagctgggcagagctggcagagcgtctggggctgcgcagcctggtagacacgtaccgacagacaacctcacccagtggcagcctcctgcgcagctacgagctggctggcggggacctggcaggtctactggaggccctgtctgacatgggcctagaggagggagtgaggctgctgaggggtccagaaacccgagacaagctgcccagcacagaggtgaaggaagacagtgcgtacgggagccagtcagtggagcaggaggcagagaagctgggcccaccccctgagccaccaggagggctctcgcacgggcacccccagcctcaggtgactgacctgctgcctgcccccagcccccttcccggaccccctgtacagcgtccccacctatttcaaatcttatttaacaccccacacccacccctcagttgggacaaataaaggattctcatgggaaggggaggaccccgaattcct

SEQ ID NO: 49 - DNA, 2218 bp, Homo sapiens
cccgggacatgaggaaaggaacaagggaaagagccggtgaaggggcagaacaggcaggtgagagtctaagagggctcagtaatctgaagcttggtgggaagaagggattctgggctagaaagggtgcagaagcctgaagtagaaagagacgggattttggtccggggtggagagcgaatgcattgaaaagggccaaggcccaggataaggtagacatttaaaggggtacggatgcccaaggtagagcagacacttgaggagaccagctcagcaaacggaagacacttaaagtggtaggttctcaagagagaagaagtttttaagactagagctaagcaagacatttaaaaggacatgggttgggatttgggaacacgtttattccagaggcaggaacaaaggagtcgcttgtcaaggatctggttagagaagactagggtcttcctcgaaggaagcacgcgcacgcctgctctcccccattgtcttttctggcttctccaggttccctcgacccaggaccccctgttcccaggctatggcccccagtgccctgtagacctggcaggccccccgtgcttgcgacccctatttgggggtctgggtggctactggagggccttgcagaggggcagagaaggcaggaccatgacatctagggcctctgaactttctccggggcgcagcgtgacggctggcatcatcattgttggagatgagatccttaagggacacactcaggacaccaacaccttctttctgtgccggacactgcgctccctaggggtccaggtttgccgagtctcagttgtacctgatgaggtagccaccattgcagctgaggtcacttctttctccaaccgcttcacccatgtcctcacagcagggggcatcggccccactcatgatgatgtgacctttgaggcagtggcacaggcctttggagatgagctgaagccacaccccaagttggaagcagccaccaaagccctaggaggggaaggctgggagaagctatcattggtgccctcctctgcccgcctgcattatggcacagatccttgcactggtcaacctttcagattccctctggtctccgtccgaaacgtctacctcttcccaggcattccagagctgctgcggcgggtgctggaggggatgaagggactattccaaaacccagctgttcagttccactcaaaggagctatatgtggctgctgatgaagcctccatcgcccccattctggctgaggcccaggcccactttggacgtaggcttggcctgggttcctaccctgactggggcagcaactactatcaggtgaagctgactctagactcagaggaagaaggacccctggaggaatgcttggcctacctgactgcccgtttgccccagggatcgctggtcccctacatgcccaacgctgtggagcaggccagtgaggctgtatacaaactcgctgaatcagggtcttctttggggaaaaaggtggcaggtgccctacagaccattgagacctccctggctcagtacagcctcacccagctctgtgtgggcttcaacgggggcaaagactgcactgccctcctgcacctcttccatgcagctgtgcagaggaaattacctgatgttccaaaccccctccagatcctgtatatccgcagcatctcccctttccctgagctggaacagtttctacaggacactatcaagaggtataatctgcagatgttggaagctgagggcagcatgaagcaggccctgggtgaactgcaggcacggcacccccagctggaggctgtccttatgggcacccgccggactgacccctactcctgtagcctctgccctttcagccccactgacccaggctggcccgcattcatgcgcatcaacccactgctggactggacctacagagacatctgggattttctgcgtcagctgtttgtcccatactgtatcctgtatgaccgaggatacacatcactggggagtcgggagaataccgtgcggaacccggccctgaagtgcctgagcccaggaggacaccccacataccgtccagcctatctactggagaacgaagaagaggagcggaactcccgcacatgacctcccaccctaggagggagggaaggacaccgtcctagggtataacctggcaataaaccgtgcctctcactgtgaaaaaaaaaaaaaaaaaaaaaaaaaa

SEQ ID NO: 50 - DNA, 1774 bp, Homo sapiens
cccgggacatgaggaaaggaacaagggaaagagccggtgaaggggcagaacaggcaggttccctcgacccaggaccccctgttcccaggctatggcccccagtgccctgtagacctggcaggccccccgtgcttgcgacccctatttgggggtctgggtggctactggagggccttgcagaggggcagagaaggcaggaccatgacatctagggcctctgaactttctccggggcgcagcgtgacggctggcatcatcattgttggagatgagatccttaagggacacactcaggacaccaacaccttctttctgtgccggacactgcgctccctaggggtccaggtttgccgagtctcagttgtacctgatgaggtagccaccattgcagctgaggtcacttctttctccaaccgcttcacccatgtcctcacagcagggggcatcggccccactcatgatgatgtgacctttgaggcagtggcacaggcctttggagatgagctgaagccacaccccaagttggaagcagccaccaaagccctaggaggggaaggctgggagaagctatcattggtgccctcctctgcccgcctgcattatggcacagatccttgcactggtcaacctttcagattccctctggtctccgtccgaaacgtctacctcttcccaggcattccagagctgctgcggcgggtgctggaggggatgaagggactattccaaaacccagctgttcagttccactcaaaggagctatatgtggctgctgatgaagcctccatcgcccccattctggctgaggcccaggcccactttggacgtaggcttggcctgggttcctaccctgactggggcagcaactactatcaggtgaagctgactctagactcagaggaagaaggacccctggaggaatgcttggcctacctgactgcccgtttgccccagggatcgctggtcccctacatgcccaacgctgtggagcaggccagtgaggctgtatacaaactcgctgaatcagggtcttctttggggaaaaaggtggcaggtgccctacagaccattgagacctccctggctcagtacagcctcacccagctctgtgtgggcttcaacgggggcaaagactgcactgccctcctgcacctcttccatgcagctgtgcagaggaaattacctgatgttccaaaccccctccagatcctgtatatccgcagcatctcccctttccctgagctggaacagtttctacaggacactatcaagaggtataatctgcagatgttggaagctgagggcagcatgaagcaggccctgggtgaactgcaggcacggcacccccagctggaggctgtccttatgggcacccgccggactgacccctactcctgtagcctctgccctttcagccccactgacccaggctggcccgcattcatgcgcatcaacccactgctggactggacctacagagacatctgggattttctgcgtcagctgtttgtcccatactgtatcctgtatgaccgaggatacacatcactggggagtcgggagaataccgtgcggaacccggccctgaagtgcctgagcccaggaggacaccccacataccgtccagcctatctactggagaacgaagaagaggagcggaactcccgcacatgacctcccaccctaggagggagggaaggacaccgtcctagggtataacctggcaataaaccgtgcctctcactgtgaaaaaaaaaaaaaaaaaaaaaaaaaa

SEQ ID NO: 51 - DNA, 1977 bp, Homo sapiens
ggggtgatcatggacgcttgacaacctgcgggcaggcgccgggaggccgagccagcgactaagaggaccgagaggtggcgtggacagatttcaaggccagagaatggcaggggaacagaaaccctcaagtaatctcctggagcagtttattttactagccaaaggtaccagtggctcagccctcactgctctcataagccaggtcttagaggctcccggagtgtatgtctttggagaacttctggagctggccaacgtgcaggagcttgcggaaggagctaatgctgcttatttgcagttgttgaacctgtttgcctatgggacatacccagattacatagccaacaaggagagcctgccagaactgagcacagctcagcagaacaagctgaagcatcttaccatcgtgagcttggcatcaagaatgaagtgtatcccctactccgtgttgctgaaagacctggagatgcggaatctccgggaactagaagaccttatcattgaggctgtctacactgacatcatccagggcaagctggaccagcgaaaccagctgctggaagtggatttctgcattggccgtgacatccgaaagaaggatatcaataatattgtcaagaccctgcatgaatggtgtgatggctgtgaagcagttctactgggcatcgagcagcaagttctgagagccaaccagtacaaagagaaccacaaccgaactcagcagcaggtagaagcagaggttaccaacatcaagaagacactcaaagccaccgcatcctcctcggctcaggagatggagcagcagctggctgaacgggagtgtccccctcacgctgagcagaggcagcccaccaagaagatgtccaaagtgaaaggtctggtctccagccgccactagggccggctggggcagctggcactcaccaggcctgggtcaggtggggaggggacaccaagggcccatttcctcccctctctacctgcagtgagttccagacctgcccgtcccctcaccagcgcctccccaccctgttggtactgttccagaaaaactgttactccccctcacccactccctccttccccagttgttcccttcagactcaggggctccaccaatgccatcccaaaacagggtcagacactgctcagcttccctccaggaggttcttgtctctgtgtaagggcttgtctccctcccagtttttcttttgctccacgtcattttgtcaggctggttataagccggaggcagctttaaccagcccccagggatgattgtgaaggaggcccctccccttgtgaggagggggcactcctctccagcccctggtaccacagtcctcacgatggtgcagtgatttctagccaggcgtcaagatgcgctgctttccctctcctgcctcattccttgttggcagctccagttcaggccgtggagggacgtgatgctgggctgtgtttactaaacccacgggttttcagcctcttaagcccagctccgatctccaattagttgagagcgctgggttgactaacctctggtatctgagcacagacagagggtgctgtgggtctgctgggtggcagaaatggttccttccggcttggcgttctctcctggccactcttcctgctgcctctgactactcagccttgttttcggtgtgtaggccccagctgcccactggaactgccggctaatgcttgctctcccaagatctttaactcctcctggctgcacctgggtagggatggtggcatcgatgcccctctgtctgctgaaggacctgttgctgcttctgtcttttcacccctccttggctgatgacccagagccctctgatgatggcattctcctggcaagagaaaaagacttaactagacttctgaacttgaacagtttcaggttatattttaatttttttttttttgtacaggttctgattctaatacatttcaacatgcttttgtccc

SEQ ID NO: 52 - DNA, 838 bp, Homo sapiens
tgctgtttgtggaaaataaagcattctataggcggagctagtgaacgcctcttttaaaacacgagtctccacacttccctgttcactttggttccagcatcctgtccagcaaagaagcaatcagccaaaatgatacctggaggcttatctgaggccaaacccgccactccagaaatccaggagattgttgataaggttaaaccacagcttgaagaaaaaacaaatgagacttacggaaaattggaagctgtgcagtataaaactcaagttgttgctggaacaaattactacattaaggtacgagcaggtgataataaatatatgcacttgaaagtattcaaaagtcttcccggacaaaatgaggacttggtacttactggataccaggttgacaaaaacaaggatgacgagctgacgggcttttagcagcatgtacccaaagtgttctgattccttcaactggctactgagtcatgatccttgctgataaatataaccatcaataaagaagcattcttttccaaagaaattatttcttcaattatttctcatttattgtattaagcagaaattaccttttctttctcaaaatcagtgttattgctttagagtataaactccatataaattgatggcaattggaaatcttataaaaactagtcaagcctaatgcaactggctaaaggatagtaccaccctcacccccaccataggcaggctggatcgtggactatcaattcaccagcctccttgttccctgtggctgctgataacccaacattccatctctaccctcatacttcaaaattaaatcaagtattttacaaaaaaaaaaaaa

SEQ ID NO: 53 - DNA, 3122 bp, Homo sapiens
agaacgccgcgcccgtgacccggaagagcattctccttagcaactgcgggactgcggcggcgccggcctccggggagaaacgcgaatgacaacagagctgctcaaggcgggaactctgagctaagcagtggaggtttctctggatctggagagaagagtgaccttggagccaataatgagccatcctgactacagaatgaacctccggtccctggggacccacagaggtgtgtctgctgtggctggtccacatgacattggtgcttcgccaggtgacaaaaagtcaaagaacaggtccacacgagggaagaaaaagagcatatttgaaacttacatgtccaaggaggatgtttcagaaggcttgaagagaggaacactcatccagggtgtattgagaattaatccaaagaagtttcatgaagccttcattccttccccggatggtgatcgagacatttttattgatggggttgttgctcgtaatagagccttaaatggggatctggtggtcgtgaaactgcttcccgaggagcattggaaggtagttaaaccagagagcaatgacaaagaaacagaagctgcgtatgaatcagatatccccgaggagctctgtggacaccatctcccgcaacagtccctgaaaagctataatgacagtcctgatgtcattgtagaggctcagtttgatggcagcgactcagaagatggacatggcatcacacaaaatgtgctggttgatggtgttaagaaactctcagtttgtgtttctgagaaaggaagagaggatggtgatgcaccggttacaaaagatgagaccacctgcatttcacaagacacaagagctttatcggagaaatccctgcaaagatcagcaaaggtggtttacatcttggagaaaaaacattctcgagcagcaaccggcttcctcaaactcttggctgataagaacagcgaactgtttaggaaatacgccctgttttctccctcagaccaccgagtgcctagaatttatgtgcctctcaaggactgtccccaggactttgtggcacggcctaaagattatgccaacacactgttcatctgccgcattgtggactggaaggaggactgcaattttgccctggggcagctggctaagagtcttgggcaggctggtgaaattgagcctgaaacagaaggaatactaacagagtatggcgtggatttctctgatttctcttcagaagttctagaatgtcttcctcaaggcctgccatggacaattccaccagaggagttcagcaagagaagggatttaagaaaagactgtatcttcaccattgacccatcaaccgcccgagacctcgatgatgccctctcctgcaagccactcgctgacggcaacttcaaagtgggagttcacattgctgacgtgagttactttgttccggagggatctgatctggataaagtggctgccgagagggctacaagcgtctacttggttcaaaaggtggtccccatgcttcccaggctgctgtgtgaggagctgtgcagcctcaaccccatgtccgacaagctgaccttctctgtgatctggacactgactccagagggcaagatccttgatgaatggtttggccggaccatcatccgctcctgcaccaaacttagctacgagcatgcacagagcatgattgaaagcccaactgagaaaatccctgcgaaagagctgccccccatttccccagagcatagcagcgaggaggtacaccaggccgtcttgaatctccacggaattgccaagcagttacgccagcagcgctttgtggacggcgcacttcgtttggatcagctaaagcttgctttcactctggaccacgagaccggattgcctcaaggatgtcatatctatgagtaccgcgagagcaacaagccctgctgcgccggcaccccccgccccaaacaaggatgctcagtgacctggtggaattctgcgaccagatggggctgcccgtggacttcagctccgcaggagccctcaataaaagcctgacccaaacatttggagatgacaagtactcactggcccgcaaggaggtgctcaccaacatgtgctcccggcccatgcagatggcactgtacttctgctcggggctgctgcaggacccagcgcagttccggcactacgcgctcaatgtgcccctgtacacacacttcacctcgcccatccgccgctttgccgacgtcctggtgcacagcctcctggctgccgcgttaggctatagggagcgactagacatggcgcctgataccctgcagaaacaggcggaccactgtaacgaccgccgcatggcgtccaagcgcgtgcaggagctcagtaccagtctcttctttgctgttctggtcaaggagagtggccccctggagtcagaagccatggtgatgggcatcctgaagcaagccttcgacgtgctggtgctgcgctacggcgtgcagaagcgcatctactgcaacgcactggccctgcggtcccaccacttccagaaggtgggcaagaagccggaactcacgctggtctgggagcctgaggacatggagcaggagccagcacagcaggtcatcaccatcttcagcctggtggaggtggtcctgcaggcagagtccacagccctcaagtacagcgccatcctgaagcggccaggcacccagggccacctgggccctgagaaggaggaggaggagtctgacggtgagcccgaggactcaagcaccagctgagctccaccagccgcctgccccgcctgccccgcctgcctgtcccgccacactggctttaggacctgttgacacggaggggggtttttaatttggtttttaacagctcaggggtttgtttttatttttatttaatttttgcagctcaacttttaaacaaactgcaggggagagggtggggctggaaggaaggctgaggcctggtcagcagtgaccccagcagagcaggccccagtcctcctgggaggctggccccccttttttctgggccctactgccctcctctgcccaggaaatgggggggtttcagcaactcagtgtcacagaataaaatcaagtgtggagtgccaaaaaaaaaaaaaaaa

SEQ ID NO: 54 - DNA, 2539 bp, Homo sapiens
ggaagttcgccgacgacgcgcccgccctgggccaccggcgccggcccaagttcgccgggggggcccggaggaagcttgggggacgcgacgggggaacgcggaaaccccggggatctgcaggcgcgcccgggccgtgtgccttctctccgcgtgtccaaaccgtgtccccagccgcgcgccatgcgctctgggggcgtgcgcagcttcgcgctggagctggcgcggggcccgggcggcgcctaccgcggcggggagcggctgtgcggccgggtgctgctggaggcggcggcgccgctgcgggtgcgagcgctcgaggtgaaggcgcgcggcggggcggccacccactggttggagggtcgcagcgtgggcgtcaacgccgtatccagcgactacgcggccgcggagacctacctgcggcgtcggcagctgctgctccgagataccggggagaccacgacgctgcctcctgggcgccatgagttcctgttcagcttccagctgcccccgaccctggtgacatccttcgagggcaaacacggtagtgtccgctactgtatcaaggccaccctgcaccggccctgggtcccagcacgccgggcaaggaaggtgttcactgtcatcgagcctgtggacatcaacacgccagccctgctggcacctcaagcgggggctcgggaaaaggttgcccgatcctggtactgtaaccgtggcctagtctccctttcggccaagatcgaccgcaagggctacaccccaggagaggtcatccctgtctttgccgagatcgacaacggctccacacgtcctgtgctgcctcgggcagccgtggtgcagacacagacgttcatggcccgaggcgcccgaaagcagaaacgggcagtggtggccagcctcgcgggcgagccggtgggccccgggcagcgggcgctgtggcagggccgggcactgcggatccccccagtgggtccttccatcctgcactgccgcgttctacacgtggactacgcactcaaggtctgtgtggatatcccaggaacgtccaagctgctgctggagctgccactggtgatcggcaccattcccttgcacccttttggcagccgttcctccagcgtgggcagccacgccagcttcctgctggactggaggctgggggccttgccggagcggcctgaggctcctcctgagtactcggaggtggtagccgacactgaggaggcagccttggggcagagccccttcccgcttccgcaggaccccgacatgagccttgaaggcccgttcttcgcctacatccaagagttccgctaccgcccgccacccctgtactctgaggaggatccaaacccactcttgggggacatgaggccgcgctgcatgacttgctgaacggcacagggacccctcgaggaacaaggttgcacaccagctttcagccaccatgactgtggggagtggctggaccaagggctgacctccccgactgcatcaaagttggggaaccaagtctcagagtgaggcgggggcctttcggatatcacatgggacagaggaagagcccggctggaatctgacttacctggaccgctgtccttgtgaggcattgaatgcccagtgcagtatccgagagactgtttaataacctgtcttcccagccaattggtggtgctggaatcccctaggagccttcagtctgggagaaacagagccagacatagacagttccagcatcacagaaccagaagaagagacctgcaactgtgagagtccagacaggaagcagagaaggcgtccttgcggaaagggcattttagctgaggctttggagtacgaataggagctcagcaggcagacgaatgaggaataaaggtcagagaaggtcagagctgagtgacgtttggaatccaccccgtttattgtagaactgggggttcagagggcaggtgcctcagagttgaggccacacagtgaggtctggtgggtgaaaggacccaggaacgaggcgttcaggaaagcaggttgtcagagctatgtggagtctgtgggtggcaggggcagccgctccagcctttgaagactttgaaagccagagattcctggcgcaggcttggacttcctgggagctcctccaagtacccaggggcatcagagctgcctgggtgttacatggcccagggaacccaggttcagggtaggacaggcaagaccagatacccaatgtgcaaagtgaaaacactgggctccctgttaaacgatgaagaattcaagacagtgacagcattacgtcacccctggggacagaggtcagcctaaggtgacacacggggactactgtgcttccggaggctccctgtgtcctggaggagaaaagcattagagggggcagctggacaagctcccaactgcagagtcccagccctggctggggcagggccccggcctgggactcagcatttctgatatgccttaagaattcattctgttttgtacaattattttttaaaagtaaacgtgtggagaaagaaaaaaaaaaaaaaaa

SEQ ID NO: 55 - DNA, 2518 bp, Homo sapiens
gggattttctgctccggttggtgagcgcgcctgcgcgttgacggcgattttgcgttctgaggctgcagcgtcggcatcttgagctgccggttcgcgagttcgaggccaggttccgcctgtcgtgggttcgcaccccggacgcgatgctattcgacaaggtgaaagcgttctcggtgcagttggacggcgcgaccgcgggcgtcgagcccgtgtttagcggcggccaggccgtggcgggccgggtgctgctggagctgtcaagcgccgcgcgtgtgggtgccctgaggctgcgcgcgcggggccgcgcccacgtgcactggaccgagtcgcgcagcgcgggctcgagcacggcttacacgcagagctacagtgaacgcgtggaggtcgtgagccaccgcgccacgctcctggcgccagataccggggagaccacgacgctgcctcctgggcgccatgagttcctgttcagcttccagctgcccccgaccctggtgacatccttcgagggcaaacacggtagtgtccgctactgtatcaaggccaccctgcaccggccctgggtcccagcacgccgggcaaggaaggtgttcactgtcatcgagcctgtggacatcaacacgccagccctgctggcacctcaagcgggggctcgggaaaaggttgcccgatcctggtactgtaaccgtggcctagtctccctttcggccaagatcgaccgcaagggctacaccccaggagaggtcatccctgtctttgccgagatcgacaacggctccacacgtcctgtgctgcctcgggcagccgtggtgcagacacagacgttcatggcccgaggcgcccgaaagcagaaacgggcagtggtggccagcctcgcgggcgagccggtgggccccgggcagcgggcgctgtggcagggccgggcactgcggatccccccagtgggtccttccatcctgcactgccgcgttctacacgtggactacgcactcaaggtctgtgtggatatcccaggaacgtccaagctgctgctggagctgccactggtgatcggcaccattcccttgcacccttttggcagccgttcctccagcgtgggcagccacgccagcttcctgctggactggaggctgggggccttgccggagcggcctgaggctcctcctgagtactcggaggtggtagccgacactgaggaggcagccttggggcagagccccttcccgcttccgcaggaccccgacatgagccttgaaggcccgttcttcgcctacatccaagagttccgctaccgcccgccacccctgtactctgaggaggatccaaacccactcttgggggacatgaggccgcgctgcatgacttgctgaacggcacagggacccctcgaggaacaaggttgcacaccagctttcagccaccatgactgtggggagtggctggaccaagggctgacctccccgactgcatcaaagttggggaaccaagtctcagagtgaggcgggggcctttcggatatcacatgggacagaggaagagcccggctggaatctgacttacctggaccgctgtccttgtgaggcattgaatgcccagtgcagtatccgagagactgtttaataacctgtcttcccagccaattggtggtgctggaatcccctaggagccttcagtctgggagaaacagagccagacatagacagttccagcatcacagaaccagaagaagagacctgcaactgtgagagtccagacaggaagcagagaaggcgtccttgcggaaagggcattttagctgaggctttggagtacgaataggagctcagcaggcagacgaatgaggaataaaggtcagagaaggtcagagctgagtgacgtttggaatccaccccgtttattgtagaactgggggttcagagggcaggtgcctcagagttgaggccacacagtgaggtctggtgggtgaaaggacccaggaacgaggcgttcaggaaagcaggttgtcagagctatgtggagtctgtgggtggcaggggcagccgctccagcctttgaagactttgaaagccagagattcctggcgcaggcttggacttcctgggagctcctccaagtacccaggggcatcagagctgcctgggtgttacatggcccagggaacccaggttcagggtaggacaggcaagaccagatacccaatgtgcaaagtgaaaacactgggctccctgttaaacgatgaagaattcaagacagtgacagcattacgtcacccctggggacagaggtcagcctaaggtgacacacggggactactgtgcttccggaggctccctgtgtcctggaggagaaaagcattagagggggcagctggacaagctcccaactgcagagtcccagccctggctggggcagggccccggcctgggactcagcatttctgatatgccttaagaattcattctgttttgtacaattattttttaaaagtaaacgtgtggagaaagaaaaaaaaaaaaaaaaa

SEQ ID NO: 56 - DNA, 2748 bp, Homo sapiens
agtaagttccagcgcagctagaccgcggggtagtcggcgcgaggcggagcttggcagttccgtccacttcagccgcagcgtccctcgccgggtgtctcgccgcagcctccggagaggaacagaccctcactctctctgtcagaaaaatgtctgctccagctcagccacctgctgaagggacagaagggactgccccaggtgggggtccccctggccctcctcctaacatgaccagtaacagacgactacagcaaacccaggcacaagtggaggaggtggtggacatcatacgtgtgaacgtggacaaggtcctggagagggaccagaagctgtcagagctggatgaccgagctgatgccttgcaggcaggagcatcacaatttgagagcagtgctgccaagctaaagaggaagtattggtggaaaaactgcaagatgatgatcatgctgggagccatctgtgccatcatcgtggtagttattgtaatctacttttttacttgagaatgtaccaccccttccctgttgtccattgccatccacattcatgtcctctgccctctgtttgctctctcaacacacttccccacccaccgtcctccattccagcccaggcttctccatcacccattcctcctttttcgttgcgttcatttgcactctgtccctcaacactagaaatgctgctcgtggcacaatctaagtcattacccgaagagcaacagctggcgcctcctccctgcctgctttttctgtactctcaagttcccccaaagccccaaagagttggaggccaagggaaggggcagggaggggagtggctgaggcgaagtacccatgaagctgcccagacttgggaggagaagagtatcggtgcccatggtgacttctagaaaacctggccactggtaggagctagggaggggctgggaagatggcagctcactcagtactgcctggtcatgtggagctttccttcctggaccaggcctggagagggtcctgggggtggaccaaagtccaacttggtttcagtgcagtacccttttcgaaagtaaaaacttgttttttgtagttatttctaatctgttcgtccaggattttccgtgtctttggggatcttacaactttactttgttctccagaggcctggagaacacttagggattgtgaaaatagcaggacttgtttccatcctagaagcagtcccatgtgcttctagctggaaggagctttctcttctttacattttctacagcattctgtatgagggcaccaaataaatccatctagctggtagttttatctagccaaataatttaacctagctcccagttaattgttggcataaagagagagattgcctgttagttatagagaaacagtgagtcaagtgcttaatttgaaagtaacaagctcagaggaagccactccttgccctcgttaaagagggtcctgttcctctcttcctgttgatgaaggagcgtgagggtgttagcagtgtgagatctttggacacccatggaatcctttcctccacaccacccgtgcacttgccaaagacagggatgaggcaagtggttcttcctggggcccggccgatcctcaggatgcagagaagtcatgtagacccaccagccccaccttggggggaggcgtgccagcctgtgtcaggtgtgcttgtgtattgctgtgctgtcatggggccctctccttgagagccgcctctctgttcttcctgtagtatattcccctttgaaccaccctttcctgtctgaattctactttgcctcctttctcttcctcctctttgcatggtttgtgtgtatagacagtggaacctgaggatgggatctgctcagcctatcttcggggcaattgctgagcttcaggatgggctattaatgtgggataagcccaggtgcaaggggaggagggcaggctgggaacagagcggagaatgcccatggccctttattccttcttccctcggtccacgaacaggaagaggctgaggccatgctgggcagggtctggatgcccactttccatgcagcagcatttcattgctcaaaaccatccttcctttcctttcgcccttgtttcccacattcccttcgtcctgcccaagggcgggactgaagagctggaagaaagcagtcagtaccctcccaacggcccccctcgaaggtctccactctcctctgggctcctccttgcctaatgcagggggtcaccgctggagaagaaccaccactgtcctcgatgtgtcccaagcctggagcgaatccgtcctcttggctctcccagccctatcacaggaatcattcctgggtttctgtccctctgaggctcaccaggtgtagttggccttgttctttgggggtattagcccttctactttctttctcacccaccctgtaccctcttctgtgtgtctctgctatccccctttcctcccaccacccatgtgcatgagcaaatgtgcaacaaaaccctgggactttgcagtcaaatgaagctgagcttcccacatcccgttcttcggtttgccatgagacgatgtggggtttccactgtgtgtctgtcatcacctctttgtctttttttcctaaccctgatctcatacttgtatagagtaataacaacagttgtacttccaccaaaggcatgtggcatatttaccaatgtcatgtattctgaacaaaggcaaaaaatacaaattcctaccattaaaaaaaaaaaaaaa

SEQ ID NO: 57 - DNA, 1104 bp, Homo sapiens
agtaagttccagcgcagctagaccgcggggtagtcggcgcgaggcggagcttggcagttccgtccacttcagccgcagcgtccctcgccgggtgtctcgccgcagcctccggagaggaacagaccctcactctctctgtcagaaaaatgtctgctccagctcagccacctgctgaagggacagaagggactgccccaggtgggggtccccctggccctcctcctaacatgaccagtaacagacgactacagcaaacccaggcacaagtggaggaggtggtggacatcatacgtgtgaacgtggacaaggtcctggagagggaccagaagctgtcagagctggatgaccgagctgatgccttgcaggcaggagcatcacaatttgagagcagtgctgccaagctaaagaggaagtattggtggaaaaactgcaagatgatgatcatgctgggagccatctgtgccatcatcgtggtagttattgtaaggcgggactgaagagctggaagaaagcagtcagtaccctcccaacggcccccctcgaaggtctccactctcctctgggctcctccttgcctaatgcagggggtcaccgctggagaagaaccaccactgtcctcgatgtgtcccaagcctggagcgaatccgtcctcttggctctcccagccctatcacaggaatcattcctgggtttctgtccctctgaggctcaccaggtgtagttggccttgttctttgggggtattagcccttctactttctttctcacccaccctgtaccctcttctgtgtgtctctgctatccccctttcctcccaccacccatgtgcatgagcaaatgtgcaacaaaaccctgggactttgcagtcaaatgaagctgagcttcccacatcccgttcttcggtttgccatgagacgatgtggggtttccactgtgtgtctgtcatcacctctttgtctttttttcctaaccctgatctcatacttgtatagagtaataacaacagttgtacttccaccaaaggcatgtggcatatttaccaatgtcatgtattctgaacaaaggcaaaaaatacaaattcctaccattaaaaaaaaaaaaaaa

SEQ ID NO: 58 - DNA, 3151 bp, Homo sapiens
agtaagttccagcgcagctagaccgcggggtagtcggcgcgaggcggagcttggcagttccgtccacttcagccgcagcgtccctcgccgggtgtctcgccgcagcctccggagaggaacagaccctcactctctctgtcagaaaaatgtctgctccagctcagccacctgctgaagggacagaagggactgccccaggtgggggtccccctggccctcctcctaacatgaccagtaacagacgactacagcaaacccaggcacaagtggaggaggtggtggacatcatacgtgtgaacgtggacaaggtcctggagagggaccagaagctgtcagagctggatgaccgagctgatgccttgcaggcaggagcatcacaatttgagagcagtgctgccaagctaaagaggaagtattggtggaaaaactgcaagatgatgatcatgctgggagccatctgtgccatcatcgtggtagttattgtaagtaagtatcgctgaagttgctggtggggtgaagaggtgggaaggtcctggagtcttctccctgcctgcctgcctgcctggggagtggggctgctctgactgaggtatggagaccgctgctatgggatcgtcacctggttcgggacgggggaagggcagagacaagggatttctttgatggacaagccttccccctgcaacgcattgcagggagatggcgcctcctgttctgaggaagtggggctatgctgtgtgtcactggcttgggttggagggagaccatggggatggggcacttaacaatggagagacctgaatgtctggtaacttggtgtaattcaccctcttgttttctcctgtctctttctcttttccgtctgggacttcctgattcctgtgtccagtctacttttttacttgagaatgtaccaccccttccctgttgtccattgccatccacattcatgtcctctgccctctgtttgctctctcaacacacttccccacccaccgtcctccattccagcccaggcttctccatcacccattcctcctttttcgttgcgttcatttgcactctgtccctcaacactagaaatgctgctcgtggcacaatctaagtcattacccgaagagcaacagctggcgcctcctccctgcctgctttttctgtactctcaagttcccccaaagccccaaagagttggaggccaagggaaggggcagggaggggagtggctgaggcgaagtacccatgaagctgcccagacttgggaggagaagagtatcggtgcccatggtgacttctagaaaacctggccactggtaggagctagggaggggctgggaagatggcagctcactcagtactgcctggtcatgtggagctttccttcctggaccaggcctggagagggtcctgggggtggaccaaagtccaacttggtttcagtgcagtacccttttcgaaagtaaaaacttgttttttgtagttatttctaatctgttcgtccaggattttccgtgtctttggggatcttacaactttactttgttctccagaggcctggagaacacttagggattgtgaaaatagcaggacttgtttccatcctagaagcagtcccatgtgcttctagctggaaggagctttctcttctttacattttctacagcattctgtatgagggcaccaaataaatccatctagctggtagttttatctagccaaataatttaacctagctcccagttaattgttggcataaagagagagattgcctgttagttatagagaaacagtgagtcaagtgcttaatttgaaagtaacaagctcagaggaagccactccttgccctcgttaaagagggtcctgttcctctcttcctgttgatgaaggagcgtgagggtgttagcagtgtgagatctttggacacccatggaatcctttcctccacaccacccgtgcacttgccaaagacagggatgaggcaagtggttcttcctggggcccggccgatcctcaggatgcagagaagtcatgtagacccaccagccccaccttggggggaggcgtgccagcctgtgtcaggtgtgcttgtgtattgctgtgctgtcatggggccctctccttgagagccgcctctctgttcttcctgtagtatattcccctttgaaccaccctttcctgtctgaattctactttgcctcctttctcttcctcctctttgcatggtttgtgtgtatagacagtggaacctgaggatgggatctgctcagcctatcttcggggcaattgctgagcttcaggatgggctattaatgtgggataagcccaggtgcaaggggaggagggcaggctgggaacagagcggagaatgcccatggccctttattccttcttccctcggtccacgaacaggaagaggctgaggccatgctgggcagggtctggatgcccactttccatgcagcagcatttcattgctcaaaaccatccttcctttcctttcgcccttgtttcccacattcccttcgtcctgcccaagggcgggactgaagagctggaagaaagcagtcagtaccctcccaacggcccccctcgaaggtctccactctcctctgggctcctccttgcctaatgcagggggtcaccgctggagaagaaccaccactgtcctcgatgtgtcccaagcctggagcgaatccgtcctcttggctctcccagccctatcacaggaatcattcctgggtttctgtccctctgaggctcaccaggtgtagttggccttgttctttgggggtattagcccttctactttctttctcacccaccctgtaccctcttctgtgtgtctctgctatccccctttcctcccaccacccatgtgcatgagcaaatgtgcaacaaaaccctgggactttgcagtcaaatgaagctgagcttcccacatcccgttcttcggtttgccatgagacgatgtggggtttccactgtgtgtctgtcatcacctctttgtctttttttcctaaccctgatctcatacttgtatagagtaataacaacagttgtacttccaccaaaggcatgtggcatatttaccaatgtcatgtattctgaacaaaggcaaaaaatacaaattcctaccattaaaaaaaaaaaaaaa

SEQ ID NO: 59 - DNA, 2760 bp, Homo sapiens
caaaagctcggcatggctgacgacgcgggtttggagaccccgctgtgttccgagcagttcggctccggggaggcacggggctgccgcgccgccgcggacgggagcctgcagtgggaggtcgggggctggcgctggtgggggctctccagggccttcacggtcaaacctgaaggacgagatgcgggcgaagtgggggcttccggggccccctcaccgcccctctccgggctccaggccgtgttcctgcctcagggcttccctgatagcgtcagcccggactacttgccctaccagctgtgggattccgtgcaggcgtttgcttccagcctctccggctccctagccacccaggcagtcttgctgggcataggggtggggaacgcaaaagccactgtttcagctgccacggccacctggctcgtgaaagattcaactggcatgctgggccgcatcgtctttgcctggtggaaagggagcaaactggactgcaatgccaagcagtggaggctttttgcggacatcctcaatgacgtagccatgttccttgagattatggctcctgtatacccaatctgtttcaccatgaccgtctccaccagcaacctagccaagtgcatcgtgagtgttgctggtggggccactcgggctgccctgaccgtgcaccaggctcggaggaacaacatggctgacgtgtcagccaaggacagcagccaggagacgctggtgaacctggcggggctcttggtcagcctcctgatgctccctctggtgtcaggttgccctggcttcagccttggatgtttcttcttcctcactgccctccacatctacgccaactaccgcgcggtccgagccctggtcatggagaccttgaacgaaggccggctccggctggtcctgaagcactaccttcagaggggagaggtactcgacccaactgcagccaatcgcatggagccgctgtggacaggtttctggccagctccgtctctatccctgggggtccccttacaccgcttggtctccagtgtctttgagctgcagcagctggttgaggggcaccaagaatcctacctcctctgctgggaccagtcacaaaaccaggtacaggtagttctgaaccagaaggcaggccccaagaccatcctaagggccgccacacatgggctgatgcttggggccctgcagggagatggaccccttccagcagagctggaggagctgaggaaccgggtgcgggcaggtcctaagaaagagagctgggtcgtcgtcaaggagacacacgaagtgttggacatgctgttcccaaagttcttgaaaggactgcaggatgccggctggaagaccgagaagcaccagctagaggtgggtgagtggagggccacatggcttctgtctcccgaaaagaaggtcttgtgagcagcccagacggaggcccaagcccagggcaggaacctggagcaaggacactttggccacagcaggacaggggaaaggcagctttatttttccttagggcaactgcagcgggtgggccaggccctcatgggaagtgactgccaatcagatgcagtgggccccaggcagaggaaggccgggagaaggggagccaggaccttctcaccccactgccccttccccttttctggggagcaccgcaggctcctcacccccacttcctgtgaggctgtggcttatggtgtccaacgcagttggtcttaggcatagaagccccagaggaacacggccactgccatcatgagcagggcattgaggttgaccacacgggcccagctcgggtcctcgctgatgtcctccagccgcctggctgctgccgctgcctcctcctgggtaaggggcggaggactgcccaccccacctctgctcattccacaaaaccagagcaggcactggcggaagaggcttggtgccggggcctggggctctgagggaaattgaggccctgcagttagtttgcgggaactcagctcctccagccccacctcccagcatggtgccctaccattcatctccatggcactctctgggcacccattctgtacagggagtgaggagccttgctgctcatcagcatccaggtcctcccgttcctccttgctatgccggagactgaagaccaggcggtggagctggggagggtgggagcacgaacgaggtgggagttctgtccccccatgcctggccctaaagtctcttgcacaccagctcgtcactgcctgccctacccacctctgtccagtctacacacccagcccaggcttaactcatgccaactccaccctacatggctgccctgtgccctcgggataaaccccaagcccctgagcttgtgtttaaagccgttggccttgctcccccagctttgtcagctcaggtctgtctacacccagatggtagcgcttgtgacactggcctggcagtcctgctcacagtgttctgtgcctgtgtgctcccaccctttcctcctgctgctgcagaaacccggccatccttccacacccagatctcttgtcctgtcctcaccccaccctgccaccatcagccctgcctggagccacctgccctttggcaacaaaaccaaacctttttgtgggcgttcaagatggtattgtgcccaccagtcagatcctgtgttttgagtcccaaaggccatgccaaggattggctttgggaggctttaatcaccaacccatcaacatcaagcctcccccaggccggttcaaataaatgtatttaaat

SEQ ID NO: 60 - DNA, 1701 bp, Homo sapiens
actggttgcggagtgagctgggcgcgcggcgcgcaggcgccctggggacccggtagcggcggtggcggtggcggcggtggcggtggctgcggcgacggcagaggcgaagggagccggatcgccgacctgagcgggaggcggcggtggcggccatggcggcagatggagagcgttccccgctgctgtctgagcccatcgacggtggcgcgggcggcaacggtttagtggggcccggcgggagtggggctgggcccgggggaggcctgaccccctccgcaccaccgtacggagccgcatttcccccgtttcccgaggggcatccagccgtgttgcctggggaggacccacccccctattcacccttaactagcccggacagtgggagtgcccctatgatcacctgccgagtctgccaatctctcatcaacgtggaaggcaagatgcatcagcatgtagtcaaatgtggtgtctgcaatgaagccaccccaatcaagaatgcacccccagggaaaaaatatgttcgatgcccctgtaactgtctccttatctgcaaagtgacatcccaacggattgcatgccctcggccctactgcaaaagaatcatcaacctggggcctgtgcatcccggacctctgagtccagaaccccaacccatgggtgtcagggttatctgtggacattgcaagaatacttttctgtggacagagttcacagaccgcactttggcacgttgtcctcactgcaggaaagtgtcatctattgggcgcagatacacacgtaagagatgtatctgctgcttcttgcttggcttgcttttggcagtcactgccactggccttgcctttggcacatggaagcatgcacggcgatatggaggcatctatgcagcctgggcatttgtcatcctgttggctgtgctgtgtttgggccgggctctttattgggcctgtatgaaggtcagccaccctgtccagaacttctcctgagcctgatgacccacagactgtgcctggcccctccctggtggggacagtgacactacgaagggagctggggtagttaaaggctcccggggcttctagaaggaagccaagcagctgccttccttttccctggggagaggtaggaaggaaccaggccctcacttaggtttggaggggcagataagagcactgctgaccatctgctttcctccaagggttctgtgtctagggtgaagtaggcaaaacgttgcccttaaaactgggccctgaagacggttccagccttgtccttcctgtgtgctccctgagagccattcctgtcccttacacattccagggcagggtgggggtgggtagccctgggggttcccctccctcttgtgcaccattaggactttgctgctgctattgcacttcaccagaggttggctctggcctcagtaccctcagtctcctctccccacattgtgtcctgtgggggtggggtcagccgctgctctgtacagaaccacaggaactgatgtgtatataactatttaatgtgggatatgttcccctattcctgtatttcccttaattcctcctcccgaccttttttacccccccagttgcagtatttaactgggctgggtagggttgctcagtctttgggggaggttagggacttatcctgtgcttgtaaataaataaggtcatgactctaaaaaaaaaaaaaaaa

SEQ ID NO: 61 - DNA, 1943 bp, Homo sapiens
gggaacgtggctggttggaggaggtagatcaccctttctgcgggggacgatttcgtcggtggtaggctgctaccatgaggttgaatcagaacaccttgctgctggggaagaaggtggtccttgtaccctacacctcggagcatgtgcccagcaggtaccacgagtggatgaaatcagaggagctgcagcgtttgacagcctcggagccgctgaccctggagcaggagtatgccatgcagtgcagctggcaggaagatgcagacaagtgtaccttcattgtgctggatgccgagaagtggcaggcccagccaggcgccaccgaagagagctgcatggtgggagatgtgaacctcttcctcacagatctagaagacctcaccttgggggagatcgaggtcatgattgcagagcccagctgcaggggtaagggccttggcactgaggccgttctcgcgatgctgtcttacggagtgaccacgctaggtctgaccaagtttgaggctaaaattgggcaaggaaatgaaccaagcatccggatgttccagaaacttcactttgagcaggtggctacgagcagtgtttttcaggaggtgaccctcagactgacagtgagtgagtccgagcatcagtggcttctggagcagaccagccacgtggaagagaagccttacagagatgggtcggcagagccctgctgatggctgggccttgtgggcagccactctgtgtgagcagggtgttgggcccatacacttcaaagaccagagccctgcactgggagagtgctcctggcccaggctgggaatcacctttcgaggcccttcagactctggcggggcttgctgtggcctccctccagctagtggtgtggctgagcagactccagggccagggccagttcccttctcccctcccggccaaacccagacccagactctaggaagctggaatggagggcagggatccatgggagatgtcgggatgaaggtgggagctggaggtgcagggggacctggaacatggatgggagtggacaggcctttctccttagaggccagaggtgctgccctggctgggagtgaagctccaggcactaccagctttcctgattttcccgtttggtccatgtgaagagctaccacgagccccagcctcacagtgtccactcaagggcagcttggtcctcttgtcctgcagaggcaggctggtgtgaccctgggaacttgacccgggaacaacaggtggtccagagtgagtgtggcctggcccctcaacctagtgtccgtcctcctctctcctggagccagtcttgagtttaaaggcattagtgttagatacagctccttgtggctggaaaacacccctctgctgataaagctcagggggcactgaggaagcagaggccccttgggggtgccctcctgaagagagcgtcaggccatcagctctgtccctctggtgctcccacgtctgttcctcaccctccatctctgggagcagctgcacctgactggccacgcgggggcagtggaggcacaggctcagggtggccgggctacctggcaccctatggcttacaaagtagagttggcccagtttccttccacctgaggggagcactctgactcctaacagtcttccttgccctgccatcatctggggtggctggctgtcaagaaaggccgggcatgctttctaaacacagccacaggaggcttgtagggcatcttccaggtggggaaacagtcttagataagtaaggtgacttgcctaaggcctcccagcacccttgatcttggagtctcacagcagactgcatgtgaacaactggaaccgaaaacatgcctcagtataaaacaaacattataaaacgaaaaaaaaaaaaaaaaaaaaaaaaaaaaaaaaaaaaaaaaaaaaaaaaaaaaaaaaaaaaaaaaaaaaaa

SEQ ID NO: 62 - DNA, 5067 bp, Homo sapiens
gcccggacacctgtctgcagcatggataagtatgacgacctgggcctggaggccagtaaattcatcgaggacctgaacatgtatgaggcctctaaggatgggctcttccgagtggacaagggtgcaggcaacaaccccgagtttgaggaaactcgcagggtgttcgccaccaagatggccaaaatccacctccagcagcagcagcagcagctcctgcaggaggagactctgcccagggggagtagaggccctgtcaatggagggggccgcctgggcccacaggcccgttgggaagttgtgggcagcaagctgactgtggatggtgctgccaagcctcctcttgctgcctcgacaggggcacctggggcagtcaccaccctcgctgctgggcagcccccgtacccaccgcaggagcagagatccaggccatacctgcatggcacgaggcatggcagccaggactgtggttccagggagagcctggcgacttctgagatgtctgctttccaccagccaggcccctgtgaggatccttcctgcctcactcatggagactattatgacaacctctccttggcaagcccaaagtggggtgacaaaccaggagtgtcccccagcatcggcctgagtgtagggagtgggtggcctagctccccggggagtgacccaccactgcccaaaccctgcggggaccatcccctaaatcaccgacagctctccctgagctccagcaggtcttctgagggtagcctcggtggtcagaatagtggcattggtggccgcagcagcgagaagccaacaggcctttggtccactgcctcctcccagcgggtgagccctggcctgccttccccaaacttggagaacggagcaccagctgtggggcctgttcagcccaggactccttctgtgtcagcacccttggccctgagctgccccaggcaaggaggtcttccaagatcaaactcggggctggggggtgaggtttcaggtgtgatgtccaaacccaatgtggacccccaaccctggttccaggatgggcccaaatcttacctttccagttctgccccgtcatcctcgccagctggcctggacggttcacagcagggtgcggtccctgggctggggccgaagcctggctgcacagaccttggcactggtcccaagctcagccccaccagtcttgtccatccagtgatgtccaccctgcctgagttatcttgtaaagagggtcccctgggctggtcttctgatggtagcctgggatctgtgctcctggacagccccagctcccctagggtaaggctgccctgccagcccctcgtcccaggtcctgagctgagaccctctgctgctgagttgaaattagaagccctcacccaacgtctggagcgagagatggatgctcacccgaaggctgattactttggagcctgtgtgaaatgcagcaaaggggtgtttggggctggccaggcctgtcaggccatggggaacctctaccatgacacatgcttcacctgtgcagcttgcagccggaagctgagaggaaaagccttttattttgtcaacggcaaagtgttttgtgaagaagacttcctgtactctggtttccagcagtcggctgacaggtgttttctttgtggacatctgatcatggacatgatcctgcaagccctggggaagtcctaccaccccggctgtttccgctgtgtcatctgtaatgagtgtttggatggggtgcccttcaccgtggactcagagaacaagatctactgtgtccgagattaccacaaggtgctggcccccaagtgtgcagcctgtgggcttcccatccttccacctgagggctcagatgagaccatccgtgtcgtgtccatggacagagactaccacgtggagtgttaccactgcgaggactgtggtctggagctcaatgatgaagatggccaccgctgttatccgctggaggaccacctgttctgtcactcctgccacgtgaagaggctggagaagagaccctcatctacagcccttcaccagcaccacttctagccagagccacttgcagacatcacggcaggggatgaggagccggggttgctgctgctgcttccggtggcccctggggtggaagtggggtaggggaagaggaggggcaggagggagagttcctgtgagcatgtggggggtgcctttcctttaaccagggaggtgaacactacctgcctcctgcgtgtattttccaagtgcttttctctgttgccacattttcctcaggttactcaggaaaatgctccagcatgtgcgagcacatgacctgaggttgcatcatagcaccaaaggaatcctcctgtcccctctgggaacatttcatgcttcagagggagaggtttttattgagcttgtttcacaatatccccttgaagggacagctcagctgccaatacattcaaccctttctcttccttcaggaaaatacctatacccaaatgttccctcccccgacatatatcatggcatgacttaaggcttcttttcacctgagagcttcagttcttctgcagaatggctgcaaatttaattgcattaaggcaagaaggaagctctaatgtgtgctttgtatcctaagataaatttgcttagaaaaccagagtcaagatttgaaataggtgaggcagggtttcctccttagacactgacagcattctccgtaccccttcaaatccttactctcctaaaggcagctgagtccgcgacagaaatttgccctatgggagtaaaacatactttgggagaagaacttggtgcaggcaccaggatttttttttttgcccacgtgtttgcgctgtttttctctggagttctcaagagttggtgacttggaaggccgcttctgcaaggcaagtctcaggaacccatgcaggtacatcgcttgcacctgtttttagcttatttaatgacgggcttttgggaagagctgcccgcatactgagagacagcttcttataaacaaggagagtttttgtgtgtgcgagatctctaagccagcgtgggagggagcgcctcaggataagttattatattcatttcgttggtttctctcctgcccaattcttggcacaggcattatgtttgaagaaaccaggataaggtacactgcttttgtctgtttaatttttttagttgtttcccttcactttcagtcttccacacacaaaaaatacctcacagagcttcaccaaatcacagattcaggaggaatttggctttcacactggactcagataccttcttcagtgtgttggaaatcactggcttcacacaggcccaactccaactggtcagggcagagtgatcgtaactaaaggtcagtggggaatagatccgattcagtgcttttgccttatgcatttcagcatcctggctccccagggtggcaggagctgaggaagggccacacactggcaagatttcaagaccactctctgcactgaagaggtaaaatttgcactgcaagtcacatccctgaggccagaggtcagtaccctttggtatttcgattagaagaagctgcaaaagaaaggcagcccattttaccattgccagccaggccggggacacaggagccggtgtgtgcactctgcctcctaacattgcacccagagcaagaggactgggtgctgggctgcagaggccggtcagtggagcccctagcacgtgtgaactcaggcttttcattgggcccggctccacttctaggccatgttttgactcatttggtaaccattgcctgtaagcagcacagaattggtgccatggattatcttttccatgttgatggaattcattctgttggaatcctttggccagatgtcacttcagccagggtgtgcatcatcattggttctttttcacaggctgagcctcctgaaaacccatgaacgctggggctggggaagtgaaccctgaggtggggaccctctcttcccatcaaatcatccagctcagtgtggggcgtggcaggggggtaaatgaagccagccaatgtgttaacctgtctctgtcaacctaagaatgttggccttactgacacacctttgctccatgttcaagaccagaagtagctgggatttgtttgcaaattgggtaattagtttaaaaatctgtgattacatttttaaatgaaattttcaaagtggcctagattgaggtgattcagataggtttgcgaatataccattttatattgttgagaaagaacaaaaagggaatttccagatgtcctagaaatcctagcaacagatttctctggttgtcagtttccctggagaaggcgccagataggaatctccaatcagttgtttttctcttcgcttcaggcccttacacaaaagccatgaagagatgttcacctacccggtattttaaatgttctgtaaattattagccaaatagaactgtaatggggttgtatttatgggcgcctagaaagaaaacacaaggacttggtaggccaggaagaaaagattttaaaatttagaatgaatagcccttctgggttttctttttgacaattcttggacttgaggtaaaacaaggaggattgtggccggatttcagatcccaaagccagcctccatcttaggcctttgcctcattgtgccttttaggttttcttacccaccgtctcctgttttgtcttttttttcttttctcctacccctatcttgggacattcagaaactgcctgggtggtttgagaagagacaacccagtttgatctgcaatacaaggatccattcgtaatctctctctcactgatgttattcccccatctgccgtcttggttcatctcaccacagaagggcatttagtcctacccagccatcggctgcggtatgacagcaggatggcacttcccatttctctgtggttagtgctcgagtgaaaacctctttcagctgagtcctctgaggttctgctgttgagtcctgggtggctgatggaatgattgaggaggtctggtcaccctcaagcgccgtcatcgccttgtttccatgggcttct

SEQ ID NO: 63 - DNA, 1723 bp, Homo sapiens
actccgaatgcgaagttctgtcttgtcatagccaagcacgctgcttcttggattgacctggcaggatggcgccaccaccagctagagtacatctaggtgcgttcctggcagtgactccgaatcccgggagcgcagcgagtgggacagaggcagccgcggccacacccagcaaagtgtggggctcttccgcggggaggattgaaccacgaggcgggggccgaggagcgctccctacctccatgggacagcacggacccagtgcccgggcccgggcagggcgcgccccaggacccaggccggcgcgggaagccagccctcggctccgggtccacaagaccttcaagtttgtcgtcgtcggggtcctgctgcaggtcgtacctagctcagctgcaaccatcaaacttcatgatcaatcaattggcacacagcaatgggaacatagccctttgggagagttgtgtccaccaggatctcatagatcagaacatcctggagcctgtaaccggtgcacagagggtgtgggttacaccaatgcttccaacaatttgtttgcttgcctcccatgtacagcttgtaaatcagatgaagaagagagaagtccctgcaccacgaccaggaacacagcatgtcagtgcaaaccaggaactttccggaatgacaattctgctgagatgtgccggaagtgcagcagagggtgccccagagggatggtcaaggtcaaggattgtacgccctggagtgacatcgagtgtgtccacaaagaatcaggcaatggacataatatatgggtgattttggttgtgactttggttgttccgttgctgttggtggctgtgctgattgtctgttgttgcatcggctcaggttgtggaggggaccccaagtgcatggacagggtgtgtttctggcgcttgggtctcctacgagggcctggggctgaggacaatgctcacaacgagattctgagcaacgcagactcgctgtccactttcgtctctgagcagcaaatggaaagccaggagccggcagatttgacaggtgtcactgtacagtccccaggggaggcacagtgtctgctgggaccggcagaagctgaagggtctcagaggaggaggctgctggttccagcaaatggtgctgaccccactgagactctgatgctgttctttgacaagtttgcaaacatcgtgccctttgactcctgggaccagctcatgaggcagctggacctcacgaaaaatgagatcgatgtggtcagagctggtacagcaggcccaggggatgccttgtatgcaatgctgatgaaatgggtcaacaaaactggacggaacgcctcgatccacaccctgctggatgccttggagaggatggaagagagacatgcaaaagagaagattcaggacctcttggtggactctggaaagttcatctacttagaagatggcacaggctctgccgtgtccttggagtgaaagactctttttaccagaggtttcctcttaggtgttaggagttaatacatattaggttttttttttttttaacatgtatacaaagtaaattcttagccaggtgtagtggctcatgcctgtaatcccagcactttgggaggctgaggcgggtggatcacttgaggtcagaagttcaagaccagcctgaccaacatcgtgaaatgccgtctttacaaaaaaatacaaaaattaactggaaaaaaaaaaaaaaa

SEQ ID NO: 64 - DNA, 2179 bp, Homo sapiens
agacagtatggctgctgcatttcggccctcgaatcgagttctcctgcaggcgctgcagattttggtgtatcctggggtgggaggctccggctctgtcagctgccgctgccctctcggagctaaaagatacctacttacagataatgtggtgaaattaaaagaatttcaacaaaagaaagtggctgttgcatgtaatctttctggcactaaagaaacgtattttagaaacttgaaaaagaaactgacccagaacaagctcatcttgaagggggagttgataaccttactacatttgtgtgagtctcgggaccatgtggaactggctaaaaatgtcatttacaggtaccatgcagagaacaaaaatttcactttgggggagtataaatttggaccgctttttgtgaggttgtgttacgagttggatctcgaggaatctgcagtggagctcatgaaagaccagcatttacgaggtttcttctcagactccacatcattcaatattttgatggatatgttatttatcaaaggcaaatataaaagtgctttgcaagtattgatagagatgaaaaaccaagatgtgaagttcaccaaagatacctatgttcttgcttttgcaatttgctacaaactgaatagccctgagtctttcaaaatctgtactacattaagagaagaagctctactcaaaggagaaattctctccaggagagcatcctgtttcgctgtggcattagctctgaatcagaatgagatggcaaaagctgtgtccattttttctcaaatcatgaatccagaaagcatagcctgcattaatttaaatattataatccatatccagtcaaatatgttggaaaacctgataaagactctaaaaaatgctgcagaaggaaatttatcaaaatttgtgaaaagacatgtgttctcggaggaagtgctggccaaagtgagggaaaaagtgaaggatgtgcctgcccttgtggccaaatttgatgagatctatgggacactgcacatcactggccaggtcaccactgattctttggatgctgtgctctgccacacccccagggacaggaaatctcacacgttgctattaaacaagaggatggtcagccgtcgcaccttccagccactcagccagtccctgttggctgagtaaccctggtttcagtccacctatggatctgaggggcctgcttctagtgagttattacctttcctaagaagccaggtatcgcacttcagcagacagtgtgctgacacttggtcttctcctgaaattcccaaattcactgaatggtaccatgccgatctctgagaagttatgttgcaccactgtgaaggtctagatgcaagcttggctccctcagaaaggcgcttcccttttgcatggctgaggatccttgaaggaacctggtcagtctccggttcagcttccgacaccagagtggaacccagtaagcaccatcaggaatgaatttcactacaagtgtggataactctgattttcaaaggagtagttacttgcaaattacatccttgctgaattcaggaggttaaggaaacgatccatgcaagagaggcccaatctcaactgtagactgtgtcccagtaagagagtcacagcttcaggtgtttgctgaatccaggtctgagatcacaatcccacctgaggacaggatccgcatatgagagtcgcacattggtataattgatttgtggtagagctgagattagaatccagattcctagtctagtatccttcccactgtaccacattatctcttttcagaggggaaaaaggagcagctcttaagaaacagaatactaagggcccccattactgtgtggccctgggcatcctcagtttcctcatttggtaaatggggataatggtaccgacctcttaggcttggtgtgaggatgaaatgagatagggaatataaagcaagcagatagtggctggcacatagtacatgcaatatgtttgaaactagttaaggaattataaaaacaaatgagttcttccttctgctcaaaaatattgaatttcttgtccttgtgctctgtgaaacattgaacagccccatttagagaaacaaattctctgccctcatagaatcctaattgtttctgtatgtgtctggtgttttgcacatgcaaaaaaaaaaaaaaaaaa

SEQ ID NO: 65 - DNA, 3520 bp, Homo sapiens
ccgcgggtcctgcgccgcgtccagcccgcccgcccgaccccggcccgaccccggccggccctgcccgcccggccccggggagggatgcggcggcgcggcgcccaggatgccccgcagccccgggacgcgcctcaaacccgccaagtacatcccggtggccacggccgccgcgctgctggtcggctccagcaccctcttcttcgtgttcacgtgcccgtggttgacacgagctgtgtccccagctgttcccgtctacaatggcatcatcttcctctttgtcctggccaacttcagcatggccactttcatggaccctggtgttttcccccgagcggatgaggatgaggacaaggaggacgacttccgggctccgctgtacaagaacgtggatgtgcgaggtatccaggtccgcatgaagtggtgtgccacgtgccacttctaccgcccgccgcgctgctcccactgcagcgtctgtgacaactgtgtagaggactttgaccaccactgcccctgggtcaacaactgcatcgggcgtcgaaactatcgctacttcttcctgttcctgctgtcactcagtgcacacatggtgggcgtcgtggccttcggcctggtctacgtgctgaaccacgctgaggggctgggagccgcgcacaccaccatcaccatggctgtcatgtgtgtggccggcctcttcttcatccctgtcattggcctcactggcttccatgtggtgctggtcactcgggggcgcaccaccaacgagcaggtgactgggaagttccgcgggggtgtgaaccctttcacccgaggctgctgtgggaatgtggagcacgtgctgtgtagccccctggcgccccggtacgtggtggagccaccccggctgccgctcgcggtgagtttgaagccgcctttccttaggcctgaactcctggaccgagctgcaccgctcaaggtcaagcttagtgacaacgggctgaaggctggcctgggccgtagcaagtccaagggcagcctggaccggctggatgagaagccactggacttggggccaccactgccccccaagatagaggctggcacgttcagcagtgacctgcagaccccgcgcccaggcagtgctgagagtgccctgtcggtgcagaggaccagccccccgacacctgccatgtacaagtttaggccggctttccccacgggtcccaaggtgcccttctgtggaccaggcgagcaggttccaggccctgattccctgaccctgggggacgacagcatccgtagcctggactttgtgtccgagccgagcctggacctccctgactatgggccagggggcctgcatgcagcctacccgccatccccaccgctcagcgcctctgatgccttctcgggcgctttgcgctccctgagcctcaaggcctcgagccggcggggcggggatcatgtggccctgcagcccctgcgctctgagggggggccccccacgccccaccgtagcatttttgccccccatgcactgcccaaccgcaacggcagcctgtcctatgacagcctgctcaatcctggctcgcctggtggccacgcctgccctgcccacccagcagttggcgtggccggataccactcaccctacctgcatcctggggcaacgggcgacccgccacggcccctaccccgcagcttcagccccgtgctgggcccccgcccccgggagccctcgcctgtgcgctacgacaacctgtccaggaccatcatggcatccatccaggagcgcaaggacagggaggagcgtgagcgcctgctgcgctcccaggccgactcactcttcggcgactcaggcgtctatgacgctcccagctcctacagcctgcagcaggccagtgtgctgtccgagggcccccgaggtcccgcgctgcgctatggctccagagacgaccttgtggctgggcccggcttcggtggcgcccgcaaccctgccctgcagacgtcactgtcctcgctgtccagctccgtgagccgtgcaccgcggacgtcgtcctcctccctgcaggctgatcaggccagcagcaacgccccggggccccggcccagcagtggctcacacaggtcacctgcacgccagggcctgccctccccgcccggcactccccactcaccatcctacgcgggccccaaagctgtcgccttcatccacacggacctcccagagccaccgccctcgctgaccgtgcagagggaccaccctcagctgaagactcccccaagtaagcttaatgggcagtccccgggcctggcccggctgggacctgccaccggccccccagggccctctgccagccctacacggcacacgctggttaagaaggtgtccggcgtgggtgggaccacctacgagatctcggtgtgaggactgactgccacacatccgccatggtgccacggggaccaggaccccacagcgcaccccccctccccaccaacttctctgccccagggacccgaggccaccccagcctggtgtggacccatcggcgggagagagtgccacgcctccacagcttgccccaagcgctctgcctgcccgtccactcatctgcccatggggaagtcggctcactgggacaagggccactgggctggtctgtgtctgggcctgtcccatggctggggcagtgagggggcccagtcagcctctttggggcaccctctctcagccaggcttggcccactgccatcacccagcaccccagatcaccgccaggccagcccccaatggtccccttacggacaggtcccagagatggacagaggcacccagggcccccaccgtccttctgacacagcctgtgggctcccggaccgagtgtcccccgccaggctactcctaactaacgcgttgcctttcacggaccccgctggaagcttgtagcttggcaaggctgatgcttctgccctggcctgctctgggtggtggtggataggtggacagacggccagccagccagctgtggccgggggcccggctccatgtgtcccgtgtctgtgtgctgtgctgccgcgccgtgtctgatgtgtcagtgctccggccgccgctgtccctttcatcaaagccttaacctttgctttatgctcttgtgggaggcgacgggggggcaggcgggagcaggcacgggggtgatgctgccacagggggctggtgacacccagagccccctccccagccctcaggccctccctgccaaactggagaaccccaccccaaggcatgccacgtccgcagccccggcctggctgcggtgctcgcgccgtgggaaagcacactggggaggggtcagtgcttcccttggtgtcagggacctgagagtaagcacatgacagcgtctgcttgcgttgtgtctgttttatgtttttatatctacatctatatatctataattttattaaaaaaaagaaaaagaaaaaaaaaaaaaaaaaaaaaaaaaaaaaaaaaaaaaaaaaaaaaaaaaaaaaaaaaaaaaaaaaa

SEQ ID NO: 66 - DNA, 2881 bp, Homo sapiens
gtcgacccacgcgtccggagcggtgtagagcgagcaggtctcagctcctcgtcatgtcatacggtcccttagacatgtaccggaacccggggccctcggggccccagctccgggacttcagcagcatcatccagacgtgcagcggcaacatccagcggatcagccaagccactgctcagataaagaatttgatgagccagctaggaactaagcaggactcaagcaagctacaggaaaatctgcaacagttacaacactccacaaatcagctcgccaaggaaacaaatgaattgctgaaagaattagggtccttgccccttcccttatctacttcagaacagcgccagcagagacttcagaaggaacgcctcatgaatgacttctctgcagccttaaacaatttccaggctgtgcagagaagggtatctgaaaaggaaaaggagagtattgccagagcaagagctggatctcgtctttctgcagaagagaggcaaagagaggagcagctggtctcatttgacagccatgaggagtggaaccagatgcagagccaggaggatgaggtggccatcactgagcaggatttggaacttattaaagaaagagaaacggcaattcggcagctggaggctgacattttggatgtcaatcagatatttaaagatttggccatgatgatccatgaccagggtgatctgattgatagcatagaagccaatgtggaaagctcagaggtgcacgtcgaaagagccactgaacagttacagcgagctgcttactatcagaaaaaatctcgcaagaagatgtgtatcctggtgcttgtcctgtcagtgattattctaatcttgggacttattatctggctagtttataaaacgaagtgattgcctccgatcgttctcccgctgagctgttttcaagggcaagtgcttgttgaagtcttgccagaacaaactgatcacaagaagacagcatatatcagaacgtcctgtaatcatttagttagaaactaactactaactagtctttggaattcgtgacctatggagacagtaattatcaatttattgattctattgatttctcaaattaggaattaacttatgtggattttgcttcctcttgtattctgattgcccttcatcccaagtgtttactgaaaattccattctagatattcttgttttgacaaatgacactacagtctcgtaatattgtcttttatgtatatacaaaatttacctttttactagcatctgagatagagttactttctggtacccagtatattggagtctgtcagaaactctataataggccaccagtttttattatttaacatttttatttgaatttctaagaagcctattctctatctattttgaaagattttggcactatatttaattggaaggtaaaatattgtacatgtgatccagagtaaatgagaagtctctatctgagctggtcagttactggagtacatgttactaatctgggtttaaagtttacttcattatctgctagtgtcatccacagcagttcatcctcatccacactaagccatcctgttagcttttaaaggaagttaatttaattaacattaatatactctatgggctccctctcccacctgtctgcatagaaaggcagaattagacatagcatgctttggaaaagcaaataggaattgttgggaatgatttaatcttgttgttgttgttgttgttgttcacttgtggttctacattcctggtgaatgatgaatgttgctgtcaaagggctgccccctaccttataagggttgctgggcatttgaaggcaggaagatttttaaagatagattgaggttggtttaaaattattcctgtaaaccaacaataaagcaaagaagaggttcatttttgtaaataacactggtttcaaatagtgatgttagacttaacctaatttataaacaagagattaatatctccatgcatagttttagacaaaaaaagatgtttcaataaaattactgtcttgtaatataaatgttgtccacttcccttttccacaggcctagaacagttaaagggaacataatttgtttaggctcccacataaatgtgaatctggccaacaactttggttcatcctttagtgaattagaggatttggctaccctgagtatatttatattcatttcttctgttctccttctgttattatacttaatcttctaaactaaactaatgtgaacagtagggaagcaagggcccaaatgcataagtttctttgcactgttgcacttacttaatacaaataaatgttttttaaagcttttgtagtatgtttttatgagttaacatcctaatgtggtaggtattaggtaatgtgctgtcatgagaaaaattgagacttccaagaaaactggacaccaggtgagggttggtttggagacggaataggtgtagctgcctttccttgaaaaacagtgtgtagagatggctgagtgcaatggctcacacttgtaatcccaacactttggaaggctgaggcgggaggatcagtatatcggtacgtctgagcccaagagttcaagatcagcctgggcagtatagcaagaccccatctccattttttttttaatgattttttaattaaaaaaaagaacaacaggatagagctgttggggtggcacagtggcccaaagagcagcttcagagataattccttggttctatgatccctgtttaactccaaattacagtcggacttggatacatcatttgtaacattgtaggaaagaaaaaagtcttggttgtgaaaaacgatttgcatttgggtaaaataaagtgaccatgcttttgttctgtaaaaaaaaaaaaaaaaaaaaaaa

SEQ ID NO: 67 - DNA, 2892 bp, Homo sapiens
caaagatggctgccacattggcgctgtcattttggtactgagcagagcgacgggcttaattcgacccaatccaggccagagtctttctctcaggggcttcctcgtgctcagctaatcctccgatcaatccttgggaatccctgggacctcttcggtatccctactctcagccagggatcatgtcttgggccgctcgcccgcccttcctccctcagcggcatgccgcagggcagtgtgggccggtgggggtgcgaaaagaaatgcattgtggggtcgcgtcccggtggcggcggcgacggccctggctggatcccgcagcggcggcggcggcggcggtggcaggcggagaacaacaaaccccggagccggagccaggggaggctggacgggacgggatgggcgacagcgggcgggactcccgaagcccagacagctcctccccaaatccccttccccagggagtccctcccccttctcctcctgggccacccctacccccttcaacagctccatcccttggaggctctggggccccacccccacccccgatgccaccacccccactgggctctccctttccagtcatcagttcttccatggggtcccctggtctgccccctccagctcccccaggattctccgggcctgtcagcagcccccagattaactcaacagtgtcactccctgggggtgggtctggcccccctgaagatgtgaagccaccagtcttaggggtccggggcctgcactgtccaccccctccaggtggccctggggctggcaaacggctatgtgcaatctgcggggacagaagctcaggcaaacactacggggtttacagctgtgagggttgcaagggcttcttcaaacgcaccatccgcaaagaccttacatactcttgccgggacaacaaagactgcacagtggacaagcgccagcggaaccgctgtcagtactgccgctatcagaagtgcctggccactggcatgaagagggaggcggtacaggaggagcgtcagcggggaaaggacaaggatggggatggggagggggctgggggagcccccgaggagatgcctgtggacaggatcctggaggcagagcttgctgtggaacagaagagtgaccagggcgttgagggtcctgggggaaccgggggtagcggcagcagcccaaatgaccctgtgactaacatctgtcaggcagctgacaaacagctattcacgcttgttgagtgggcgaagaggatcccacacttttcctccttgcctctggatgatcaggtcatattgctgcgggcaggctggaatgaactcctcattgcctccttctcacaccgatccattgatgttcgagatggcatcctccttgccacaggtcttcacgtgcaccgcaactcagcccattcagcaggagtaggagccatctttgatcgggtgctgacagagctagtgtccaaaatgcgtgacatgaggatggacaagacagagcttggctgcctgagggcaatcattctgtttaatccagatgccaagggcctctccaaccctagtgaggtggaggtcctgcgggagaaagtgtatgcatcactggagacctactgcaaacagaagtaccctgagcagcagggacggtttgccaagctgctgctacgtcttcctgccctccggtccattggccttaagtgtctagagcatctgtttttcttcaagctcattggtgacacccccatcgacaccttcctcatggagatgcttgaggctccccatcaactggcctgagctcagacccagacgtggtgcttctcacactggaggagcacacatccaagagggactccaagccctggggcagggtggggggccatgttcccagaaccttgatggggtgagaagtacagggcagaaccaagaacataaaccctccaagggatctgcttgatatcccaagttggaagggaccccagatacctgtgaggactggttgtctctcttcggtggccttgagtctctgaatttgtcgggttctcccatgatttggggtgatttctcaccctctgtccttcccccagcacaaagcactggccttgcctccaggaccttgcttccttctcatcttgcctcattttgcttcccatctgaagagtggaaatggggaactcccccagaggtggatactggggggcaggcctcccaagctgatggacatgagagtagggccctgacaggccttcctcctctcaaacctggcagatgggggcctctctggaagagggaggggccctgtcactgtccagagtctctttttacacttcacctccttctgcagtcagactgaaatataaaaaaggtggtggtggtggtgaaggggctggtggagatgtaggaaccgatctgctatttttaatttcctgtgaggatagagacttgcagttagactcaaagaagtactgtactttcccaggttgactaagaaatgccagtggtggaggtgggtgtttgggaaaggcagggccctgaaatggcctgtccctagggctctccaagcactagccttcccagcttcccgccgccccccctatctcttcctgtctaacttggggaaggggcctgggctgtgaggacagggcccccacaggggatggtttcacgagtgtagtcccggaggccttccctttacagctctcctccagccctgggcacatagcataggctggggacacaggatcctggcctgagaattgaggggaggtggccagcccgcagaggtggggtgctggggctgcatgatttttgccctgcgtcccttctctttggggctcctttcccctctcatacataaaatcgctttcaaattaaaatcgctgttttctggaaaaaaaaaaaaaaaaaa

SEQ ID NO: 68 - DNA, 14982 bp, Homo sapiens
ctgcttcacttcacggggcgaacatggcgcacagctgtcggtggcgcttccccgcccgacccgggaccaccgggggcggcggcggcggggggcgccggggcctagggggcgccccgcggcaacgcgtcccggccctgctgcttccccccgggcccccggtcggcggtggcggccccggggcgcccccctcccccccggctgtggcggccgcggcggcggcggcgggaagcagcggggctggggttccagggggagcggccgccgcctcagcagcctcctcgtcgtccgcctcgtcttcgtcttcgtcatcgtcctcagcctcttcagggccggccctgctccgggtgggcccgggcttcgacgcggcgctgcaggtctcggccgccatcggcaccaacctgcgccggttccgggccgtgtttggggagagcggcgggggaggcggcagcggagaggatgagcaattcttaggttttggctcagatgaagaagtcagagtgcgaagtcccacaaggtctccttcagttaaaactagtcctcgaaaacctcgtgggagacctagaagtggctctgaccgaaattcagctatcctctcagatccatctgtgttttcccctctaaataaatcagagaccaaatctggagataagatcaagaagaaagattctaaaagtatagaaaagaagagaggaagacctcccaccttccctggagtaaaaatcaaaataacacatggaaaggacatttcagagttaccaaagggaaacaaagaagatagcctgaaaaaaattaaaaggacaccttctgctacgtttcagcaagccacaaagattaaaaaattaagagcaggtaaactctctcctctcaagtctaagtttaagacagggaagcttcaaataggaaggaagggggtacaaattgtacgacggagaggaaggcctccatcaacagaaaggataaagaccccttcgggtctcctcattaattctgaactggaaaagccccagaaagtccggaaagacaaggaaggaacacctccacttacaaaagaagataagacagttgtcagacaaagccctcgaaggattaagccagttaggattattccttcttcaaaaaggacagatgcaaccattgctaagcaactcttacagagggcaaaaaagggggctcaaaagaaaattgaaaaagaagcagctcagctgcagggaagaaaggtgaagacacaggtcaaaaatattcgacagttcatcatgcctgttgtcagtgctatctcctcgcggatcattaagacccctcggcggtttatagaggatgaggattatgaccctccaattaaaattgcccgattagagtctacaccgaatagtagattcagtgccccgtcctgtggatcttctgaaaaatcaagtgcagcttctcagcactcctctcaaatgtcttcagactcctctcgatctagtagccccagtgttgatacctccacagactctcaggcttctgaggagattcaggtacttcctgaggagcggagcgatacccctgaagttcatcctccactgcccatttcccagtccccagaaaatgagagtaatgataggagaagcagaaggtattcagtgtcggagagaagttttggatctagaacgacgaaaaaattatcaactctacaaagtgccccccagcagcagacctcctcgtctccacctccacctctgctgactccaccgccaccactgcagccagcctccagtatctctgaccacacaccttggcttatgcctccaacaatccccttagcatcaccatttttgcctgcttccactgctcctatgcaagggaagcgaaaatctattttgcgagaaccgacatttaggtggacttctttaaagcattctaggtcagagccacaatacttttcctcagcaaagtatgccaaagaaggtcttattcgcaaaccaatatttgataatttccgaccccctccactaactcccgaggacgttggctttgcatctggtttttctgcatctggtaccgctgcttcagcccgattgttttcgccactccattctggaacaaggtttgatatgcacaaaaggagccctcttctgagagctccaagatttactccaagtgaggctcactctagaatatttgagtctgtaaccttgcctagtaatcgaacttctgctggaacatcttcttcaggagtatccaatagaaaaaggaaaagaaaagtgtttagtcctattcgatctgaaccaagatctccttctcactccatgaggacaagaagtggaaggcttagtagttctgagctctcacctctcacccccccgtcttctgtctcttcctcgttaagcatttctgttagtcctcttgccactagtgccttaaacccaacttttacttttccttctcattccctgactcagtctggggaatctgcagagaaaaatcagagaccaaggaagcagactagtgctccggcagagccattttcatcaagtagtcctactcctctcttcccttggtttaccccaggctctcagactgaaagagggagaaataaagacaaggcccccgaggagctgtccaaagatcgagatgctgacaagagcgtggagaaggacaagagtagagagagagaccgggagagagaaaaggagaataagcgggagtcaaggaaagagaaaaggaaaaagggatcagaaattcagagtagttctgctttgtatcctgtgggtagggtttccaaagagaaggttgttggtgaagatgttgccacttcatcttctgccaaaaaagcaacagggcggaagaagtcttcatcacatgattctgggactgatattacttctgtgactcttggggatacaacagctgtcaaaaccaaaatacttataaagaaagggagaggaaatctggaaaaaaccaacttggacctcggcccaactgccccatccctggagaaggagaaaaccctctgcctttccactccttcatctagcactgttaaacattccacttcctccataggctccatgttggctcaggcagacaagcttccaatgactgacaagagggttgccagcctcctaaaaaaggccaaagctcagctctgcaagattgagaagagtaagagtcttaaacaaaccgaccagcccaaagcacagggtcaagaaagtgactcatcagagacctctgtgcgaggaccccggattaaacatgtctgcagaagagcagctgttgcccttggccgaaaacgagctgtgtttcctgatgacatgcccaccctgagtgccttaccatgggaagaacgagaaaagattttgtcttccatggggaatgatgacaagtcatcaattgctggctcagaagatgctgaacctcttgctccacccatcaaaccaattaaacctgtcactagaaacaaggcaccccaggaacctccagtaaagaaaggacgtcgatcgaggcggtgtgggcagtgtcccggctgccaggtgcctgaggactgtggtgtttgtactaattgcttagataagcccaagtttggtggtcgcaatataaagaagcagtgctgcaagatgagaaaatgtcagaatctacaatggatgccttccaaagcctacctgcagaagcaagctaaagctgtgaaaaagaaagagaaaaagtctaagaccagtgaaaagaaagacagcaaagagagcagtgttgtgaagaacgtggtggactctagtcagaaacctaccccatcagcaagagaggatcctgccccaaagaaaagcagtagtgagcctcctccacgaaagcccgtcgaggaaaagagtgaagaagggaatgtctcggcccctgggcctgaatccaaacaggccaccactccagcttccaggaagtcaagcaagcaggtctcccagccagcactggtcatcccgcctcagccacctactacaggaccgccaagaaaagaagttcccaaaaccactcctagtgagcccaagaaaaagcagcctccaccaccagaatcaggtccagagcagagcaaacagaaaaaagtggctccccgcccaagtatccctgtaaaacaaaaaccaaaagaaaaggaaaaaccacctccggtcaataagcaggagaatgcaggcactttgaacatcctcagcactctctccaatggcaatagttctaagcaaaaaattccagcagatggagtccacaggatcagagtggactttaaggaggattgtgaagcagaaaatgtgtgggagatgggaggcttaggaatcttgacttctgttcctataacacccagggtggtttgctttctctgtgccagtagtgggcatgtagagtttgtgtattgccaagtctgttgtgagcccttccacaagttttgtttagaggagaacgagcgccctctggaggaccagctggaaaattggtgttgtcgtcgttgcaaattctgtcacgtttgtggaaggcaacatcaggctacaaagcagctgctggagtgtaataagtgccgaaacagctatcaccctgagtgcctgggaccaaactaccccaccaaacccacaaagaagaagaaagtctggatctgtaccaagtgtgttcgctgtaagagctgtggatccacaactccaggcaaagggtgggatgcacagtggtctcatgatttctcactgtgtcatgattgcgccaagctctttgctaaaggaaacttctgccctctctgtgacaaatgttatgatgatgatgactatgagagtaagatgatgcaatgtggaaagtgtgatcgctgggtccattccaaatgtgagaatctttcagatgagatgtatgagattctatctaatctgccagaaagtgtggcctacacttgtgtgaactgtactgagcggcaccctgcagagtggcgactggcccttgaaaaagagctgcagatttctctgaagcaagttctgacagctttgttgaattctcggactaccagccatttgctacgctaccggcaggctgccaagcctccagacttaaatcccgagacagaggagagtataccttcccgcagctcccccgaaggacctgatccaccagttcttactgaggtcagcaaacaggatgatcagcagcctttagatctagaaggagtcaagaggaagatggaccaagggaattacacatctgtgttggagttcagtgatgatattgtgaagatcattcaagcagccattaattcagatggaggacagccagaaattaaaaaagccaacagcatggtcaagtccttcttcattcggcaaatggaacgtgtttttccatggttcagtgtcaaaaagtccaggttttgggagccaaataaagtatcaagcaacagtgggatgttaccaaacgcagtgcttccaccttcacttgaccataattatgctcagtggcaggagcgagaggaaaacagccacactgagcagcctcctttaatgaagaaaatcattccagctcccaaacccaaaggtcctggagaaccagactcaccaactcctctgcatcctcctacaccaccaattttgagtactgataggagtcgagaagacagtccagagctgaacccacccccaggcatagaagacaatagacagtgtgcgttatgtttgacttatggtgatgacagtgctaatgatgctggtcgtttactatatattggccaaaatgagtggacacatgtaaattgtgctttgtggtcagcggaagtgtttgaagatgatgacggatcactaaagaatgtgcatatggctgtgatcaggggcaagcagctgagatgtgaattctgccaaaagccaggagccaccgtgggttgctgtctcacatcctgcaccagcaactatcacttcatgtgttcccgagccaagaactgtgtctttctggatgataaaaaagtatattgccaacgacatcgggatttgatcaaaggcgaagtggttcctgagaatggatttgaagttttcagaagagtgtttgtggactttgaaggaatcagcttgagaaggaagtttctcaatggcttggaaccagaaaatatccacatgatgattgggtctatgacaatcgactgcttaggaattctaaatgatctctccgactgtgaagataagctctttcctattggatatcagtgttccagggtatactggagcaccacagatgctcgcaagcgctgtgtatatacatgcaagatagtggagtgccgtcctccagtcgtagagccggatatcaacagcactgttgaacatgatgaaaacaggaccattgcccatagtccaacatcttttacagaaagttcatcaaaagagagtcaaaacacagctgaaattataagtcctccatcaccagaccgacctcctcattcacaaacctctggctcctgttattatcatgtcatctcaaaggtccccaggattcgaacacccagttattctccaacacagagatcccctggctgtcgaccgttgccttctgcaggaagtcctaccccaaccactcatgaaatagtcacagtaggtgatcctttactctcctctggacttcgaagcattggctccaggcgtcacagtacctcttccttatcaccccagcggtccaaactccggataatgtctccaatgagaactgggaatacttactctaggaataatgtttcctcagtctccaccaccgggaccgctactgatcttgaatcaagtgccaaagtagttgatcatgtcttagggccactgaattcaagtactagtttagggcaaaacacttccacctcttcaaatttgcaaaggacagtggttactgtaggcaataaaaacagtcacttggatggatcttcatcttcagaaatgaagcagtccagtgcttcagacttggtgtccaagagctcctctttaaagggagagaagaccaaagtgctgagttccaagagctcagagggatctgcacataatgtggcttaccctggaattcctaaactggccccacaggttcataacacaacatctagagaactgaatgttagtaaaatcggctcctttgctgaaccctcttcagtgtcgttttcttctaaagaggccctctccttcccacacctccatttgagagggcaaaggaatgatcgagaccaacacacagattctacccaatcagcaaactcctctccagatgaagatactgaagtcaaaaccttgaagctatctggaatgagcaacagatcatccattatcaacgaacatatgggatctagttccagagataggagacagaaagggaaaaaatcctgtaaagaaactttcaaagaaaagcattccagtaaatcttttttggaacctggtcaggtgacaactggtgaggaaggaaacttgaagccagagtttatggatgaggttttgactcctgagtatatgggccaacgaccatgtaacaatgtttcttctgataagattggtgataaaggcctttctatgccaggagtccccaaagctccacccatgcaagtagaaggatctgccaaggaattacaggcaccacggaaacgcacagtcaaagtgacactgacacctctaaaaatggaaaatgagagtcaatccaaaaatgccctgaaagaaagtagtcctgcttcccctttgcaaatagagtcaacatctcccacagaaccaatttcagcctctgaaaatccaggagatggtccagtggcccaaccaagccccaataatacctcatgccaggattctcaaagtaacaactatcagaatcttccagtacaggacagaaacctaatgcttccagatggccccaaacctcaggaggatggctcttttaaaaggaggtatccccgtcgcagtgcccgtgcacgttctaacatgttttttgggcttaccccactctatggagtaagatcctatggtgaagaagacattccattctacagcagctcaactgggaagaagcgaggcaagagatcagctgaaggacaggtggatggggccgatgacttaagcacttcagatgaagacgacttatactattacaacttcactagaacagtgatttcttcaggtggagaggaacgactggcatcccataatttatttcgggaggaggaacagtgtgatcttccaaaaatctcacagttggatggtgttgatgatgggacagagagtgatactagtgtcacagccacaacaaggaaaagcagccagattccaaaaagaaatggtaaagaaaatggaacagagaacttaaagattgatagacctgaagatgctggggagaaagaacatgtcactaagagttctgttggccacaaaaatgagccaaagatggataactgccattctgtaagcagagttaaaacacagggacaagattccttggaagctcagctcagctcattggagtcaagccgcagagtccacacaagtaccccctccgacaaaaatttactggacacctataatactgagctcctgaaatcagattcagacaataacaacagtgatgactgtgggaatatcctgccttcagacattatggactttgtactaaagaatactccatccatgcaggctttgggtgagagcccagagtcatcttcatcagaactcctgaatcttggtgaaggattgggtcttgacagtaatcgtgaaaaagacatgggtctttttgaagtattttctcagcagctgcctacaacagaacctgtggatagtagtgtctcttcctctatctcagcagaggaacagtttgagttgcctctagagctaccatctgatctgtctgtcttgaccacccggagtcccactgtccccagccagaatcccagtagactagctgttatctcagactcaggggagaagagagtaaccatcacagaaaaatctgtagcctcctctgaaagtgacccagcactgctgagcccaggagtagatccaactcctgaaggccacatgactcctgatcattttatccaaggacacatggatgcagaccacatctctagccctccttgtggttcagtagagcaaggtcatggcaacaatcaggatttaactaggaacagtagcacccctggccttcaggtacctgtttccccaactgttcccatccagaaccagaagtatgtgcccaattctactgatagtcctggcccgtctcagatttccaatgcagctgtccagaccactccaccccacctgaagccagccactgagaaactcatagttgttaaccagaacatgcagccactttatgttctccaaactcttccaaatggagtgacccaaaaaatccaattgacctcttctgttagttctacacccagtgtgatggagacaaatacttcagtattgggacccatgggaggtggtctcacccttaccacaggactaaatccaagcttgccaacttctcaatctttgttcccttctgctagcaaaggattgctacccatgtctcatcaccagcacttacattccttccctgcagctactcaaagtagtttcccaccaaacatcagcaatcctccttcaggcctgcttattggggttcagcctcctccggatccccaacttttggtttcagaatccagccagaggacagacctcagtaccacagtagccactccatcctctggactcaagaaaagacccatatctcgtctacagacccgaaagaataaaaaacttgctccctctagtaccccttcaaacattgccccttctgatgtggtttctaatatgacattgattaacttcacaccctcccagcttcctaatcatccaagtctgttagatttggggtcacttaatacttcatctcaccgaactgtccccaacatcataaaaagatctaaatctagcatcatgtattttgaaccggcacccctgttaccacagagtgtgggaggaactgctgccacagcggcaggcacatcaacaataagccaggatactagccacctcacatcagggtctgtgtctggcttggcatccagttcctctgtcttgaatgttgtatccatgcaaactaccacaacccctacaagtagtgcgtcagttccaggacacgtcaccttaaccaacccaaggttgcttggtaccccagatattggctcaataagcaatcttttaatcaaagctagccagcagagcctggggattcaggaccagcctgtggctttaccgccaagttcaggaatgtttccacaactggggacatcacagaccccctctactgctgcaataacagcggcatctagcatctgtgtgctcccctccactcagactacgggcataacagccgcttcaccttctggggaagcagacgaacactatcagcttcagcatgtgaaccagctccttgccagcaaaactgggattcattcttcccagcgtgatcttgattctgcttcagggccccaggtatccaactttacccagacggtagacgctcctaatagcatgggactggagcagaacaaggctttatcctcagctgtgcaagccagccccacctctcctgggggttctccatcctctccatcttctggacagcggtcagcaagcccttcagtgccgggtcccactaaacccaaaccaaaaaccaaacggtttcagctgcctctagacaaagggaatggcaagaagcacaaagtttcccatttgcggaccagttcttctgaagcacacattccagaccaagaaacgacatccctgacctcaggcacagggactccaggagcagaggctgagcagcaggatacagctagcgtggagcagtcctcccagaaggagtgtgggcaacctgcagggcaagtcgctgttcttccggaagttcaggtgacccaaaatccagcaaatgaacaagaaagtgcagaacctaaaacagtggaagaagaggaaagtaatttcagctccccactgatgctttggcttcagcaagaacaaaagcggaaggaaagcattactgagaaaaaacccaagaaaggacttgtttttgaaatttccagtgatgatggctttcagatctgtgcagaaagtattgaagatgcctggaagtcattgacagataaagtccaggaagctcgatcaaatgcccgcctaaagcagctctcatttgcaggtgttaacggtttgaggatgctggggattctccatgatgcagttgtgttcctcattgagcagctgtctggtgccaagcactgtcgaaattacaaattccgtttccacaagccagaggaggccaatgaaccccccttgaaccctcacggctcagccagggctgaagtccacctcaggaagtcagcatttgacatgtttaacttcctggcttctaaacatcgtcagcctcctgaatacaaccccaatgatgaagaagaggaggaggtacagctgaagtcagctcggagggcaactagcatggatctgccaatgcccatgcgcttccggcacttaaaaaagacttctaaggaggcagttggtgtctacaggtctcccatccatggccggggtcttttctgtaagagaaacattgatgcaggtgagatggtgattgagtatgccggcaacgtcatccgctccatccagactgacaagcgggaaaagtattacgacagcaagggcattggttgctatatgttccgaattgatgactcagaggtagtggatgccaccatgcatggaaatgctgcacgcttcatcaatcactcgtgtgagcctaactgctattctcgggtcatcaatattgatgggcagaagcacattgtcatctttgccatgcgtaagatctaccgaggagaggaactcacttacgactataagttccccattgaggatgccagcaacaagctgccctgcaactgtggcgccaagaaatgccggaagttcctaaactaaagctgctcttctcccccagtgttggagtgcaaggaggcggggccatccaaagcaacgctgaaggccttttccagcagctgggagctcccggattgcgtggcacagctgaggggcctctgtgatggctgagctctcttatgtcctatactcacatcagacatgtgatcatagtcccagagacagagttgaggtctcgaagaaaagatccatgatcggctttctcctggggcccctccaattgtttactgttagaaagtgggaatggggtccctagcagacttgcctggaaggagcctattatagagggttggttatgttgggagattgggcctgaatttctccacagaaataagttgccatcctcaggttggccctttcccaagcactgtaagtgagtgggtcaggcaaagccccaaatggagggttggttagattcctgacagtttgccagccaggccccacctacagcgtctgtcgaacaaacagaggtctggtggttttccctactatcctcccactcgagagttcacttctggttgggagacaggattcctagcacctccggtgtcaaaaggctgtcatggggttgtgccaattaattaccaaacattgagcctgcaggctttgagtgggagtgttgcccccaggagccttatctcagccaattacctttcttgacagtaggagcggcttccctctcccattccctcttcactcccttttcttcctttcccctgtcttcatgccactgctttcccatgcttctttcgggttgtaggggagactgactgcctgctcaaggacactccctgctgggcataggatgtgcctgcaaaaagttccctgagcctgtaagcactccaggtggggaagtggacaggagccattggtcataaccagacagaatttggaaacattttcataaagctccatggagagttttaaagaaacatatgtagcatgattttgtaggagaggaaaaagattatttaaataggatttaaatcatgcaacaacgagagtatcacagccaggatgacccttgggtcccattcctaagacatggttactttattttccccttgttaagacataggaagacttaatttttaaacggtcagtgtccagttgaaggcagaacactaatcagatttcaaggcccacaacttggggactagaccaccttatgttgagggaactctgccacctgcgtgcaacccacagctaaagtaaattcaatgacactactgccctgattactccttaggatgtggtcaaaacagcatcaaatgtttcttctcttcctttccccaagacagagtcctgaacctgttaaattaagtcattggattttactctgttctgtttacagtttactatttaaggttttataaatgtaaatatattttgtatatttttctatgagaagcacttcatagggagaagcacttatgacaaggctattttttaaaccgcggtattatcctaatttaaaagaagatcggtttttaataattttttattttcataggatgaagttagagaaaatattcagctgtacacacaaagtctggtttttcctgcccaacttccccctggaaggtgtactttttgttgtttaatgtgtagcttgtttgtgccctgttgacataaatgtttcctgggtttgctctttgacaataaatggagaaggaaggtcacccaactccattgggccactcccctccttcccctattgaagctcctcaaaaggctacagtaatatcttgatacaacagattctcttctttcccgcctctctcctttccggcgcaacttccagagtggtgggagacggcaatctttacatttccctcatctttcttacttcagagttagcaaacaacaagttgaatggcaacttgacatttttgcatcaccatctgcctcataggccactctttcctttccctctgcccaccaagtcctcatatctgcagagaacccattgatcaccttgtgccctcttttggggcagcctgttgaaactgaagcacagtctgaccactcacgataaagcagatttttctctgcctctgccacaaggtttcagagtagtgtagtccaagtagagggtggggcacccttttctcgccgcaagaagcccattcctatggaagtctagcaaagcaatacgactcagcccagcactctctgccccaggactcatggctctgctgtgccttccatcctgggctcccttctctcctgtgaccttaagaactttgtctggtggctttgctggaacattgtcactgttttcactgtcatgcagggagcccagcactgtggccaggatggcagagacttccttgtcatcatggagaagtgccagcaggggactgggaaaagcactctacccagacctcacctcccttcctccttttgcccatgaacaagatgcagtggccctaggggttccactagtgtctgctttcctttattattgcactgtgtgaggtttttttgtaaatccttgtattcctattttttttaaagaaaaaaaaaaaaccttaagctgcatttgttactgaaatgattaatgcactgatgggtcctgaattcaccttgagaaagacccaaaggccagtcagggggtggggggaactcagctaaatagacctagttactgccctgctaggccatgctgtactgtgagcccctcctcactctctaccaaccctaaaccctgaggacaggggaggaacccacagcttccttctcctgccagctgcagatggtttgccttgcctttccaccccctaattgtcaaccacaaaaatgagaaattcctcttctagctcagccttgagtccattgccaaattttcagcacacctgccagcaacttgggggaataagcgaaggtttccctacaagagggaaagaaggcaaaaacggcacagctatctccaaacacatctgagttcatttcaaaagtgaccaagggaatctccgcacaaaagtgcagattgaggaattgtgatgggtcattcccaagaatcccccaa

SEQ ID NO: 69 - DNA, 4053 bp, Homo sapiens
ggggagcgactacaactcccagagggtatggcggccgcagcagtgggcagttgagtttccggggcgacccaggtcctccggcggaagcgggagcctctgtcggccgcggaagcctggagtgggcggtacgcagacgcgcgcggtgagacccgctgtctgctcagcggactctgcccgcccccacctccccctgcgtcgggccgacatgaaggactcgctggtgctgctgggccgtgtcccggcgcacccggactcccgctgctggttcctggcctggaaccccgcggggaccctgctggcctcgtgcggcggcgaccggagaatccgcatctggggcacggagggtgacagctggatctgcaagtctgtcctttctgaaggccaccagcgcaccgtgcggaaggtagcctggtccccctgcggtaattacctggcctctgccagctttgatgctaccacttgcatttggaagaagaaccaggatgactttgagtgtgtaaccactctcgagggccatgaaaatgaggtcaagtcagtggcttgggccccatctggcaacctcctggccacttgcagccgagataagagcgtttgggtctgggaagttgatgaagaggatgagtatgaatgtgtcagtgttctcaactcccacacacaggatgtcaagcatgtggtttggcacccaagtcaggagctcttagcttctgccagctatgatgacacagtgaagctgtaccgggaggaagaggatgactgggtatgctgtgccacccttgagggccatgaatccactgtgtggagcttggcctttgacccgagtggccagcgcctggcgtcttgtagtgatgaccgtactgtgcgtatctggcgtcagtatctaccaggcaatgaacaaggggtggcatgcagcggctctgaccccagttggaaatgtatctgtactttgtccggcttccactcaaggaccatttatgacattgcttggtgtcagctgacaggggctctggccacagcttgtggggatgacgcgatccgcgtgtttcaggaggatcccaactcggatccacagcagcccaccttctccctgacagcccacttgcatcaggcccattcccaggatgtcaactgtgtggcctggaaccccaaggagccagggctactggcctcctgcagtgatgatggggaggtggccttctggaagtatcagcggcctgaaggcctctgagctacctcgactttggacagagtaatgactccccagaaaacgtcatataagactttaccagcccctgagaggaccaggaggagcatccttgaccttcatttaacttggctcacttctcttcagacttgggtagaagtgcagagccacagaattgctttccttccccgcctttgacatgaggccttcagtaaagagctacagaacatgagtacattgttataccacagatttttcttgcattagggcacagtgttaaattttttggaggtaaatatactatttataatcactatatatagtaggagggggtatgtgtctcaggcttttctgaagttgcaagacttaaagaaataatccatctgcatcccaagtcctattttataaggatattcataaaaattccatggtgaatccttgtctgaaataggtcctcccttcccagtttctgtgtaagtctttgcatttaagacatccaatcaataatgaaggaaatttttttctgaatgtaggtttgagtgaggggcacctctgctttcccttagcaaccctcatatacctccctgcaccgttacgctgtgatggcaactggggatagaaaaaaaatggggaaagacaggaatcctaaaagggagagttattactggccacaagccctgtattctcaacagggatgcaaattggttcttcagtaaggataaaaaaaaatcacaagcagttgtttgtggccctcctaaggcccacagcacatatagtgtgtctgtgatattccattttcatggcagggagtgatcaggaagaaggcttcctaggggactggcgatttaaaccagttgagaaacactgccatcagcaggcagtttcagactcactcaagttgtctcttgacagtcacttctaaatgggttctaatgtgacaatggcctccaaaactacagccttccctgaagtttaagctgtgaccttagattttagaaggacagtggggctgtacctagaatagtggttctcgaagaatgcggcctgcagatcctgggagtcccaagaccctttcagggaggatctgtgaggtcaactgttggcactgtggcatgaatcaaggtggtggcagcaaacttctagtagttttgatatgtccttgatagaacaaatagcaatggttaactattaaatgttgacctagccagcgcagtggctcatgcctgtaatcccagcactttgggaggctgaggcgggcggatcacctgaggtcgggagttcgaggccagcctgaccaacatggagaaaccccgtctcttctaaaaatacaaaattagctgggcatggtggtgcatgcctgtaattccagctactcgggaggctgaggcaagagaatcgcttgaatccggtaggtggaggttgcagtgagccgagatcataccattgcactccagcccaggcaacaagagtgaaaccctgtctcaaaaagaaaaaaaaagttgaccttgagaatttataatattctgagaaaactggaagcatgcataaagcccctctgctgtgcactgaagtatgggtgccttgaggaaaagcagttacacagttgagttgcaagctgaattggctgtgttcaaggcatgccctttagaattgaaagaactagcagattacggtatttagacttgaatatttggctgatattttctggaaattaatggaatgagcctctcacctcaagggaaacaactgatagtgttgccagtgataaagctttcaagcaaaaattggaatttccgaaaatctgtactccaccatgagctttattgttggggatattaacaaatgtgatttgtataatgaaatgcatttcatttggaagaattcaatgaaccatttttccaagtgaccagtacgtgatgttacaaaatcatgcatggctcaaagattgattcaaaagtgtaagacaggccagtggattttaatgtattaacaatataagagtgcattaagttttcggagtctacattgcctttaagaaactatgacttgtagtaagccgggcgcggtggctcacgcctgtaatcccaacactttgggaggccaaggtgggtggatcacaaggtcaggagttcaagaccagcctggccaatatggtgaaagtccgtctctactaaaattacaaaaattagccgggcgtggtggcagatcccttgtagtcccagctactcgggaggctgaggcaggagaatagcttgaacccgggaggtggaggttgcagtgagtcgagatcgtgccactggactccagcctgggtgacagagcgagactccatttcaaaaaaaaaaaaaaaaaaaaaaaatcacttgtagtcttggtgtggtatcaaagaatagccacaattagctgaaaaggctattttaaaaacttttccaactgcgtatctgtgtgaagtcaacttacttcaacaaaaaagtttggatgtagaagcagctgtaagaattcaactgtttattataacaagatactaaagagactgtaaaatgccacccttctccttggattgttttggaagttattcttcataaaaaatgttaacgtgggctgggcatggtggctcatgcctgtaatcccagcactctgggaggctgaggtgggcggatcacttgagctcaggaattcaaggtcagcctgggcaacatggctaaactctgtctctattaagaaaaaaaatgttaacattatgatttaaaagtgcattaaccttaatctagataataaaagctttttggggcaacctccagaactgtgaaaaataaatttgttatttaaaaagaaaaaaaaaaaaacaaaaa

SEQ ID NO: 70 - DNA, 2697 bp, Homo sapiens
atataaaggcgccgccgtccttgcccccaggactcggccccatggggacgccgccggccgccgctggcgcatggcgggtaggagctgtggcgcggggccttccaggagtctgagctatgagtggcccctgtggagagaagcctgtcctggaagccagccccaccatgagtctgtgggaatttgaggacagccacagccgtcagggcaccccaaggccgggtcaagagctggccgctgaggaggcctcggccctggaactgcagatgaaggtggacttcttccggaagctgggctattcatccacggagatccacagcgtcctgcagaagctgggcgtccaggcagacaccaacacggtgctgggtgagctggtgaaacacgggacagccaccgagcgggagcgccagacctcaccggacccctgccctcagctccctctagtcccgcggggtggtggcacccctaaggctcccaacctggagcctccactcccagaagaggaaaaggagggcagcgacctgagaccagtggtcatcgatgggagcaacgtggccatgagccatgggaacaaggaggtcttctcctgccggggcatcctgctggcagtgaactggtttctggagcggggccacacagacatcacagtgtttgtgccatcctggaggaaggagcagcctcggcccgacgtgcccatcacagaccagcacatcctgcgggaactggagaagaagaagatcctggtgttcacaccatcacgacgcgtgggtggcaagcgggtggtgtgctatgacgacagattcattgtgaagctggcctacgagtctgacgggatcgtggtttccaacgacacataccgtgacctccaaggcgagcggcaggagtggaagcgcttcatcgaggagcggctgctcatgtactccttcgtcaatgacaagtttatgccccctgatgacccactgggccggcacgggcccagcctggacaacttcctgcgtaagaagccactcactttggagcacaggaagcagccgtgtccctatggaaggaaatgcacctatgggatcaagtgccgattcttccacccagagcggccaagctgcccccagcgctctgtggcagatgagctccgtgccaatgctctcctctcaccccccagagccccaagcaaggacaaaaatggccggcggccttcaccttcatcccagtccagctctctgctaacagagagtgagcagtgcagcctggatgggaagaagctgggggcccaggcatccccagggtcccgccaagagggtctaacacagacctatgccccatcaggcaggagcctcgcacctagcgggggcagtggcagcagctttgggcccacagactggctcccacagacgctggactcactcccgtacgtctcccaggattgcctggactcgggcattggctccctggagagccagatgtcggaactttggggggttcgaggaggaggccctggtgagccgggcccaccccgagccccttacacgggctacagtccctatggatctgagctcccagccaccgcagccttctctgcctttggccgggccatgggtgctggccacttcagtgtccctgccgactacccacccgcgccccctgcctttccacctcgagagtactggtctgaaccatacccactgcccccacccacatcagtccttcaggagcccccagtgcagagcccaggggctggcaggagcccgtggggcagggcagacagcctggccaaggagcaggccagcgtgtatactaagctgtgtggtgtgtttcccccgcacctggtggaggctgtgatggggcgcttcccacagctcctggacccccagcagctggctgccgagatcctctcctacaagtcccagcaccccagtgagtaagctgcctgtggctggcaagggcagcacccccagcctccaagggccgtcaggctgggctttgggccattgagcagcccattcccagccctgaggcccaccccagaggctggacagagggaggattcaagtcgggaaggaaacccacaaaccaaagatactgtaggattggttctggcccatgcagcacctctagctgtctgcctcagtgggtcagaagcgatcaccctgttgatacacattgtatctctgtagtttaaggagacgctgccggtaacggcgtcggtccgtggctgaggcccaaaccgtcttttctctcagagggtggggagggaggtgggggcagcagaggcctgggctgggtgccctgtgcacgccaccccacttccgccctacccctgggacgttggccttggctggctagttgggcaccgtgtgcctgccctccaagggcctcctctacgccaatgaggcctcatctgtgctctcgctgggcacgtggcttcatgtcagtaagcaagatgcttcttaataacccaccttctgccccactctattccttatcctgctgcccctgtaggggtcaagggccctccgtctacaccctcttcttctcctccatcctttattcagagtcatctcgcccttccccatgggtgggggaacctgtgtttgtttgtgtgcacatgtaaattttaaatattttaagcagaaagtccttacctcctgtaacacatcaataaagtacaatcattgtgagccctttcaaaaaaaaaaaaaaaaa

SEQ ID NO: 71 - DNA, 2068 bp, Homo sapiens
aaactgccgcgccgccctgctccgggtttgtcttcctccctccgtttctccttccgctgtatctagcatttcggttcctggaaaggttaccggagctgcgattggggctgggaccaaagttgagtcctggaaagggagcctggagagcggcggtgctgggaggcccggccagctcgatcgcaggcttccacctggcggccaatgcttgtttgctactgatgggtgtgagcaagttagatattctataccggagacttctcctaacaaaactttttatcagaggatggggaaggccagaagatctcaaaagactctttgaattcagaaagatgattggaaatcgggaaagatgccagaatctggtttcaagcgattatccagtacacattgataagattgaagagcaatcagattgtaagatcctagatggacactttgtttcccccatggctcactatgtgcctgatatcatgccaattgaatctgttattgcaaggttccaatttattgtgcctaaagaatggaacagcaaatatagacctgtatgcattcatcttgctggaacaggagatcatcattactggaggcgacgaacactaatggcccgtcctatgattaaagaagcccgaatggcttctttattgttagaaaacccttattatggctgcaggaaacccaaggaccaagtatggcttccttagcggtatccaactggcctaagcccatgccattgattccatgcctgtcttggtccacagcatctggggtcttcactacgggtgtgttgagtaaaccaattaattggagggagctggaaaagcaatattatacccagacagtttatgaagaagaaattattcacatgcttgaatactgtggaacagattctttcaaaatgggacaagagtttgtgaaacacttcactagcagtgcagacaagctaactaaccttaatctggtttccagaactttaaatttagatatatcaaaccaagttgtatcccaaaaacctgctgactgccataattctagcaaaacatctgtcagtgcgacatcagaaggactcttattgcaagatacctctaagatgaagcgcttcaatcaaacactttcaaccaacaaaagtggttatacaagtcgcaaccctcagtcataccacctacttagtaaagaacaaagcagaaacagtcttcggaaagagtctttaatatttatgaaaggagtcatggatgaatgtactcatgtagcaaatttctcagtcccagttgatccaagcctcattatagtggttcaagccaaagaagatgcctatattccacgaacaggagttcgaagtttacaagaaatttggcctggttgtgaaatccgatacttagaagggggtcatattagtgcttatctttttaaacaaggactcttcaggtaagacggctggtctaaacatgtattcgttcatttgttgtttgttttctggattttttgcttcaacaaatgtaaaagatcacatatttttatagtctgtttcaatctttgaattccctcctcacctcccacaaatctcacagagttacttttccctctttcctagaatttgatcttcttattttcttctagagaactaagcatgatgcatattataggcatgctttatcgtgtggctttcccctcttcaaatattaatggccaggtattttaggatgtgagaaggaagatcatggcttgttaaagttgctttggtgcatcaagagttttttcactctattctgatgttttttcagaatggcctgaacatctgtggaataatttagcaatgtttttcagttagcaagtgaatattgaaccttaaataagaagtgcttttaatgtgaacaaccttatatgactccactattttagttagaacttataaaaacttttatgctggctgggcgcggtggcttacgcctgtaatcccagcactttgggaggcggaggcgggtgtatcacgaggtcaggagatcaaggccatcctggctaacacggtgaaaccccgtctctagtaaaaatacaaaaaaaaaaaaaaaaaaaa

SEQ ID NO: 72 - DNA, 1879 bp, Homo sapiens
gcttggctgtgtttatctcgttggggactaaggcgtcggttggcgcgcaacgggttctaggctgcaggcagctcgaggacccgcggccccgccccggctcggcctggcagatagcagaggcagcaggccgtgccgggggggcatgttgctgtaaccagtggcccaggggatgttacggtggacagtgcacctggagggcgggccccgcagggtgaaccatgctgcagtggctgtcgggcatcgggtatactccttcgggggttactgctctggtgaagactatgagacactgcgtcagatagatgtgcacattttcaatgcagtgtccttgcgttggacaaagctgcccccggtgaagtctgccatccgtgggcaagctcctgtggtaccctacatgcgctatggacactcaaccgtcctcatcgacgacacagtcctcctttggggcgggcggaatgacaccgaaggggcctgcaatgtgctctatgcctttgacgtcaatacgcacaagtggttcacaccccgagtgtcagggacagttcctggggcccgggatggacattcagcctgtgtcctaggcaagatcatgtacatttttgggggctacgagcagcaggcggactgtttttccaatgacattcacaagctagataccagcaccatgacatggactcttatctgtacaaagggcagccctgcacgctggagggacttccactcagccacaatgctgggaagtcacatgtatgtctttgggggccgtgccgaccgctttgggccattccattccaacaatgagatttactgcaaccgcattcgagtctttgacaccagaactgaggcttggctggactgtcccccgactccagtgctgcctgaggggcgccggagccactcggcctttggctacaatggggagctgtacatctttggtggttataatgcaaggctgaaccggcacttccatgacctctggaagtttaatcctgtgtcctttacctggaaaaagattgaaccgaaggggaaggggccatgtccccgccggcgccagtgctgctgtattgttggtgacaagattgtcctctttgggggtaccagtccatctcctgaggaaggcctgggagatgaatttgaccttatagatcattctgacttacacattttggactttagccctagtctgaagactctgtgcaaactggccgtgattcagtataacctagaccagtcctgtttgcctcatgatatcaggtgggagctgaatgccatgaccaccaacagcaatatcagtcgccccatcgtctcctcccatgggtaggaggaagtttctgccacctcccctcctgagcctgctgtcatcttcactgcccctgcccatctgtcacccacctgctcctttgacccctggacttggtatacctccatgtggagttgttgggcgagaggtgttctctgtgctgtgaattcagtggggagctgtagcggggtgggggctaggttcctccccccttgggccgagggccccttccccttggtgctctgtccccatccacctcctttcagctgctcctgggcctcagctctgcccagggccagccaggttctgctgggaagggaagggaatggggagaagggagaagcaagcagtgtctgagcctcaggagcttccccctccccctttgcctatcccctcccctctgcttgagccttgagccttgactgggagctgaaaggagttgcagctgttggcatgagacctccttctccccgtcttggggaggtggggaccagcagataaatcccacccttccttgagctgtcgctgtactctgaagttcagccagctcagattttataaaaattaattaaaatctccaaa

SEQ ID NO: 73 - DNA, 2837 bp, Homo sapiens
taggccctgaggacccagcatggcggactcgggactgctgctaaagcggggttcctgccgttccacttggctgcgggtccgcaaggcccggccccagctcatcctcagccgccggccccgccgccggctcgggagcctgcgctggtgcggtcggcggcgcctacggcggcggttactgcaagcccaggcggccggcgtggactggagggagggagcccgccaggtgtcgcgcgcggcggcggcccggagacccaacaccgcgacccccagcccgatccctagcccgaccccggcctccgaacccgagtccgaacccgaactcgaatccgcctcgagttgccaccggcctctcctcatcccaccggtgcggcccgtgggccccggccgcgcgttgctgctgctgccggtcgagcagggttttacttttagtgggatctgtcgtgtgacttgcctctatggccaggtgcaggtatttggttttaccatcagccaaggccagcctgcccaagacatcttctctgtgtatacccactcttgcttgagtatccatgcacttcactactcacagcctgagaaaagcaagaaggaactgaaaagggaagcccggaatttgctcaaatctcatcttaaccttgatgacaggcgttggtcgatgcagaatttttctcctcagtgttccattgtgttgctagaacatctgaaaactgccactgtaaacttcataaccagctatccgggttcatcctacatttttgtgcaagagagtccaactccccagattaaacctgaatatttagccttgaggtctgttggcatcagaagagagaaaaaaaggaaaggccttcagttaactgagagtaccctttcagccctggaagagttagtcaatgtttcctgtgaagaagtagatggctgccctgtcattctagtttgtggatcccaggatgttggaaagtcaacatttaatagatacctgattaaccatttgttaaatagtcttccctgcgttgactatttggaatgtgatctgggacagacagaatttacccctcctggttgcatttctttgcttaatattacagaaccagttctgggaccacctttcactcacctgaggactccacagaagatggtatattatgggaaaccttcttgtaaaaacaactatgagaattatattgacatagtgaaatatgtgttcagcgcttacaagagagagtcccctctcatcgtcaacactatgggatgggtttcagaccaggggctcctgcttctcattgatctgatccgattgctgtctcccagccacgtggttcagttccgctctgaccacagtaaatatatgccagaccttaccccgcagtatgtagatgacatggatggcttgtacacaaaaagcaagaccaagatgagaaatcgacgtttcagactcgcagcatttgcagatgctttggaatttgctgatgaagaaaaagagagtccagttgagttcactggacataaactgataggtgtttatacagactttgcattcagaataactccaagaaatagagagtcacataacaaaattcttcgagatctgtccatcttgagttaccttagccagctgcagcccccgatgcccaaaccactttctcctttacatagcctgacaccctatcaggtccctttcaatgcagtcgcactccggattacccactctgatgtcgcccctacccatatactatatgctgtaaacgccagctgggttggtctttgcaagatccaggatgacgtcagaggatacacgaatgggcccatcctgcttgcccagactccaatctgtgactgcttgggctttggcatctgtagaggcattgacatggagaagcggctgtaccacatcctcacccctgtgcccccggaagagctaaggaccgtgaattgtctgctcgttggagctattgccattccacattgtgtccttaagtgccagcgtgggatcgaagggacagtaccttatgtcacaacggattacaattttaaacttcctggagcatcagagaaaattggagcaagagaacctgaggaggcacataaagagaaaccataccgaagacctaagttctgtcgaaaaatgaagtgatgctcgcgtttttaataagggaagaaactttcctaccagaaagctttgtctcaagcctgaccacaagagacatgatggagtttcatggccatgaatggtgcccttattagcaacagtgttttttgtgtaattcgtgaatgtcatatagtagtcttaagtttctcttttaaagctgcatgagctagaatttgttctagtcttctgtgtgatactcatacttgctgtccagagggagtaaaacagcagagaacagtttgtgtgccattaaaacagagattcctcagaaagttcttcagggacctggttattagaatcaggataaaaataaggaaactggggccattacaatgtaccgagaaggaaggaagaaggccgacctgcaggatctcaagcataatggatacaagggctcgccacgggccttgcctgagccatgtgcagagctggggtccagcggtctgcttccttggagccagtgtggatggttacagcccatccatttggtgcagttgtacttggtctgttatattcaatcaaggtttaatagatagggctgggcatggtggctcatgcacacctgtaatcctagcactttgggaggctgaggcgggaggattgcttgagcctcggagttccaggctggagtacaccaactactccagcctgagcgacagagtaagaccttatcttttaaaaaagaaaagaaaaa

SEQ ID NO: 74 - DNA, 1830 bp, Homo sapiens
gttgccatggatcctggggacgactggctggtggaatccttgcgcttgtaccaggatttctatgcattcgacctgtcaggagccactcgagtccttgaatggattgatgacaaaggagtctttgttgctggctatgaaagcctgaaaaagaatgaaattcttcatctgaaattacctctcagactttctgtaaaggaaaacaagggcttattcccagaaagagatttcaaagtgcgccatggaggattttcagacaggtctatctttgatctaaagcatgtgccacataccagattgctggttaccagtggccttccaggttgttatctgcaggtgtggcaggttgcagaggacagtgatgtcattaaagctgtcagcaccattgctgtgcatgagaaagaggagagtctctggcctagggtggccgtcttctccacattggcacccggagtcctccatggggcgaggctccgaagtctgcaggtcgttgatctggagtcccggaagaccacgtacacctcagatgtcagtgacagtgaggagctgagtagcctgcaggtcctagatgcagacacctttgccttctgctgtgcttcgggccggctggggcttgttgacacccggcagaagtgggcaccgttggagaatcgcagccctggccctgggtctggtggaaagagatggtgtgctgaagttgggagctggggccagggccctgggcccagcattgccagccttggctcagatgggcgtctttgtcttcttgacccccgggatctctgccatcctgtgagctcagtccagtgcccagtatccgtacctagccctgacccagagctgctgcgagtgacttgggccccaggcctgaagaattgcttggccatctcaggttttgatggtacagtccaggtctatgatgccacatcttgggatggaacacggagccaagatggaacacggagccaagtagaacctctcttcactcacagaggtcacatcttcctagatggaaatgggatggaccctgctcctttggtcaccacccacacctggcatccctgcagaccaaggactttgttatcagcaacaaatgatgcctctctgcatgtgtgggactgggtggacctttgtgccccccgctgacaccagcatctttccatctaggcctctagaaaggggaggagctgctgtagtagcaagggtgctcatgtaggactcaagtgactaccagtccctgttaccagctgtgtggccttgggcaagtctgccagcgtcacttagcctcagtttccttatctgtaaaatgaggatagtaagaactacctcgtagtgatattgcgaaggttagaagaaacgcatggcataattacttggtagctattgttagatctgggagtgtgaaatggtagcgttttgtccctgtcttcacactatcatagggagaatcaaaagagctaacaaatataaacatgctttgtgaatttttttaaagaaaaaaatgtagaggggccaataaacatgaaaaaatcccagccctagtagcaattaaggaaatagcaaaacaggatttctgctcctcttgagtgggtctcatgggaacacaggtgcactttcccacacttgtccccccaggtgactaggttcaagagacatttgcttttggtggccccacaaacatttccttttgagggcccatagtgaatattaaagtgtgctggacatggtggctcatgcctgtaatcccagcactttcagaggctggggtgggcagattgcttgagctgaggagtttgagaccagcctgggcaacatagcaagatcccttccctt

SEQ ID NO: 75 - DNA, 2446 bp, Homo sapiens
gggatttgcacggcagcagagtcaccgtggagaggccagggtatcacaaacttatggattttgacaagaaaggagggaaaggggagacggaggagggccggagaatgtccaaggccggcgggggccggagcagccacggcatccggagctcggggaccagctcgggggtcctgatggtgggccccaacttccgcgtcggcaagaagatcggctgcggcaacttcggggagctccgcctaggaaagaatctctatacaaatgaatacgtggctatcaaattggagccgatcaagtcccgggccccgcagctgcacctggagtaccggttctacaagcagctcagcgccacagagggcgtccctcaggtctactacttcggtccgtgcgggaattacaacgccatggtgctggagctgctggggcccagcctggaggacctgttcgacctgtgcgaccggaccttcacgctcaagacggtgctgatgatcgccatccagctgatcacgcgcatggagtatgtgcacaccaagagcctaatctaccgggacgtgaagcccgagaacttcctggtgggccgcccggggaccaagcggcagcatgccatccacatcatcgacttcgggctggccaaggagtacatcgaccccgagaccaagaagcacatcccgtaccgcgagcacaagagcctgacgggcacggcgcgctacatgagcatcaacacgcacctgggcaaggagcagagccgccgcgacgacctggaggcgctgggccacatgttcatgtacttcctgcgcggcagcctcccctggcaggggctcaaggccgacacgctcaaggagcggtaccagaagatcggggacaccaaacgcgccacgcccatcgaggtgctctgcgagaacttcccagaggagatggccacgtacctgcgctatgtgcggcgcctggacttcttcgagaagcccgactatgactacctgcggaagctcttcaccgacctcttcgaccgcagtggcttcgtgttcgactatgagtacgactgggccgggaagcccctgccgacccccatcggcaccgtccacaccgacctgccctcccagcctcagctccgggacaaaacccagccgcacagcaaaaaccaggcgttgaactccaccaacggggagctgaatgcggacgaccccacggccggccactccaacgccccgatcacagcgcctgcagaggtggaggtggccgatgaaaccaaatgctgctgtttcttcaagaggagaaagagaaaatcgctgcagcgacacaagtgaccctgggcgcgtgcagccccctgaatcttctccgtgcagccccttggggcgcgaccttgtgcgaggccctcggggcccacccacagcggcccagggccagaccctggctggaagccagaacgcagactgcaggggccgcgcctggctcaggcggccccacccccgggacgtggggtcacttccttcatgtaagactttggccgaaatttctacacctgtgtctagtcctcccctccaagagcattaactatttaaaacaaggaaaagaggaaaaaaaaaacagaggcccgccctaccccactcctgcccctccgtttctttgctgaagtgagtagtgtgatcctggaggccccccggcctggccccgccccgccagccgcccccgttagcgtcataaagtccagcttgtctccctcgatccaaaggccgttttctcgaggggagggcaggcccggcctggaggggtgctgtggagctgtcttgcccaggccctcctgggagggggacaggcattgttgccaggggtgaggccgtgccccaggcctccccgaaaccaaaggggaaggcaggggtggggccgtggctgaagccggctccccaaccaaaatgctgcaccaaagctcgggcgccgcgggcacggctgctgcagtctcttcccagcctggccctggcaaggggcgggtgggcgctgccaggcgggtgcttctcgacgcacttgctcccggaggctgcgccccggcgcctggaacccgaggtgggaggaccggttggtgtcaccctgctcggccctcagccctgccgcgtggggcgcgtgggcacggagcttcctgcctctgctccgacacccggcaagcagccggagacaaaacgccttaaagcccccggcccagccctgcaggtatattgcaggggcctgggggcggccctggactggcgggcggttccccagtggggtgccctggaggctgccgggcagagtggagcagcttggggccgtgcccagggcggtggctgtgagtctagtttttgctttaccaagtgtacagaaatggcatttacgtttctctgatgctcccttgaagccatagaatttaggggcttttttaaaaaaataaaagaaaaatgaaaccaaaaaaaaaaaaaaa

SEQ ID NO: 76 - DNA, 2539 bp, Homo sapiens
atgggggcggccatgccccttggtggagatgaatgggagtggagctgggctggctgggcaggcaggggcttgcctcttgctgactaaggcagccctggaggggcccgaccatggggcaggaacccagttgccatcctcagagcgaggatcattggccgggctcggggatcagggcctctgtggtcccggcacgcctggcccgtgagactgtactctgcacgactcctccaggtggccagggtcaccggaactggctcgctctcctctgccagttgccggaggtctgggcaccaggccaattctcaccttcccgccagggttaaacattagtgggaggttatcagcgtgggccaggggagggagaggggggaattcaactctgtctcctctgctggagccaccagttcccgcaagcccagacaatgccggtggaggaatttgtggctggctggatctctggcgctctgggcttggtcctgggacacccgtttgacactgtaaagctcctgggcttcttcaagggaatgagcttccccattgccagcatagctgtggtcaactctgtcctgtttggggtctatagcaacaccctgctggtgctcacggccacctcccaccaggagcggcgggcccagccgcccagctacatgcacatcttcctagcgggctgcaccggggggttcctgcaggcctactgtctggctccttttgacctcatcaaagtccggctacaaaaccagacagagccaagggcccagccagggagccccccaccccggtaccaggggcccgtgcactgtgcagcctccatcttccgggaggaggggccccgggggctgttccgaggagcctgggccctgacgctgagggacacccccacggtggggatctacttcatcacctatgaagggctctgtcgccagtacacaccagaaggccagaatcccagctcagccacggtgctggtggcaggggggctttgcaggcattgcttcctgggtggcagccacgcccttagacgtgatcaagtcccggatgcagatggatggactgagacgcagagtgtaccaggggatgctggactgcatggtgagcagcatccggcaggaaggactgggagtcttcttccggggggtcaccatcaacagtgcccgcgcctttcccgtcaatgctgtcaccttcctcagctacgaatatctcctccgctggtggggatgagccctgcggcaatgccagcagctccccatcaggcccacggcctggaggccagtttgagattggaggccaggttgaaagcttgcaaatcagtgcaagaggctcagcccttcctaaccaaggtgcctcccacccgcgcagatctgggctgggcagacacctgtgggagccggaagccgggggcctgtgcagcctccctgtgtagctggccttgactcctttgcctcccacatctgtgaaacagggagcatgaggcacaagtgagctggcaagtggtgctggtgacatcccagctcctgtcctgtgccttcacctctttttttttttttttttttttttgggatggagtctttctctgtcacccaggctggagtgcagtggcgtgatctcggctcactgcaacctccgcctttccaccttccgggttcgggcaactctcctgcctcagcctcccaagtggctgggactataggcgcccgccaccacgcccggctaaatttttgtatttttagtagagacagggtttcaccgtgtcagccagggtggtcttgatctcctgactttgtgatccgcccgcgtcggcctctcaaggtgctgggattacaggcgtgagccaccgcgcccggctgccttcacctcttaaggagctctgagactccacttctgagagtccctgcggcctcccacctccctgcctttcaaagctctctcccccatgacccaggataaccctatgtctcctcccccagaatccttcagtggctctcatcaccttcaggaaaagcccaaactccttccaccctccaggttcctccctccccacgaggctttgttctcctggggttgcttcctggaccctgaacaagttgtgctctcattggccgggcctggccagcagtgcacagtgcctggcaggttgactctaccatccccggggctggccccgctctcctccgagacccaggctgagcccagtcccctcacccttccttgacttacctccccacctgaggctgactttggggttcccagacaccctacccacacacatgccttgatcatagcacttgcctgcgcttcttcagagtcattaatttgcttctcggcttccccactggactgtgagctgcctgaggtcagggattgcgctttggatggtttccagcctgagcctggtgcttgaacagacgtgtgcaataaatgctcgttaaatgatgaaaaaaaaaaaaaaaaaaaaaaaaaaaaaaaaaaaaaaaaaaaaaaaaaaaaaaaaaaaaaaaaaaaaaaaaaaaaaaaaaaaaaaaaaaaaaaaaaaaaaaaaaaa

SEQ ID NO: 77 - DNA, 1350 bp, Homo sapiens
actcccctgggagcgcgagcggtggacccaggcggccatgtcccgccctcgcatgcgcctggtggtcaccgcggacgactttggttactgcccgcgacgcgatgagggtatcgtggaggcctttctggccggggctgtgaccagcgtgtccctgctggtcaacggtgcggccacggagagcgcggcggagctggcccgcaggcacagcatccccacgggcctccacgccaacctgtccgagggccgccccgtgggtccggcccgccgtggcgcctcatcgctgctcggcccggaaggcttcttccttggcaagatgggattccgggaggcggtggcggccggagacgtggatttgcctcaggtgcgggaggagctcgaggcccaactaagctgcttccgggagctgctgggcagggcccccacgcacgcggacgggcaccagcacgtgcacgtgctcccaggcgtgtgccaggtgttcgccgaggcgctgcaggcctatggggtgcgctttacgcgactgccgctggagcgcggtgtgggtggctgcacttggctggaggcccccgcgcgtgccttcgcctgcgccgtggagcgcgacgcccgggccgccgtgggccccttctcccgccacggcctgcggtggacagacgccttcgtgggcctgagcacttgcggccggcacatgtccgctcaccgcgtgtccggggccctggcgcgggtcctggaaggtaccctagcgggccacaccctgacagccgagctgatggcgcaccccggctaccccagtgtgcctcccaccggcggctgcggtgaaggccccgacgctttctcttgctcttgggagcggctgcatgagctgcgcgtcctcaccgcgcccacgctgcgggcccagcttgcccaggatggcgtgcagctttgcgccctcgacgacctggactccaagaggccaggggaggaggtcccctgtgagcccactctggaacccttcctggaaccctccctactctgaccccctacagacaaccaagcactaatccccttagtaccaagaaaggggagccaggatttagtcctggcccagcccagagctgggacctggagcacgatctgttgacttccctgggtaggacactgccacctctgggctcaggtcctcatgcctccaaatggcatctagagtttgagcagccttcttggctgcaggcaggcctagcctgtggcagcgggctagggcccgcagagcatttggtgcccctccatgttgcaatgcaaacaccttcaccactggggcagtggggagagatggctatattaataaaataacgtgtgtctttcaaaaaaaaaaaaaaa

SEQ ID NO: 78 - DNA, 1409 bp, Homo sapiens
actcccctgggagcgcgagcggtggacccaggcggccatgtcccgccctcgcatgcgcctggtggtcaccgcggacgactttggttactgcccgcgacgcgatgagggtatcgtggaggcctttctggccggggctgtgaccagcgtgtccctgctggtcaacggtgcggccacggagagcgcggcggagctggcccgcaggcacagcatccccacgggcctccacgccaacctgtccgagggccgccccgtgggtccggcccgccgtggcgcctcatcgctgctcggcccggaaggcttcttccttggcaagatgggattccgggaggcggtggcggccggagacgtggatttgcctcaggtgcggagccgcagctacaggaggatgctcgcgaggacccccagagctccgcccggagggtgcgggaggagctcgaggcccaactaagctgcttccgggagctgctgggcagggcccccacgcacgcggacgggcaccagcacgtgcacgtgctcccaggcgtgtgccaggtgttcgccgaggcgctgcaggcctatggggtgcgctttacgcgactgccgctggagcgcggtgtgggtggctgcacttggctggaggcccccgcgcgtgccttcgcctgcgccgtggagcgcgacgcccgggccgccgtgggccccttctcccgccacggcctgcggtggacagacgccttcgtgggcctgagcacttgcggccggcacatgtccgctcaccgcgtgtccggggccctggcgcgggtcctggaaggtaccctagcgggccacaccctgacagccgagctgatggcgcaccccggctaccccagtgtgcctcccaccggcggctgcggtgaaggccccgacgctttctcttgctcttgggagcggctgcatgagctgcgcgtcctcaccgcgcccacgctgcgggcccagcttgcccaggatggcgtgcagctttgcgccctcgacgacctggactccaagaggccaggggaggaggtcccctgtgagcccactctggaacccttcctggaaccctccctactctgaccccctacagacaaccaagcactaatccccttagtaccaagaaaggggagccaggatttagtcctggcccagcccagagctgggacctggagcacgatctgttgacttccctgggtaggacactgccacctctgggctcaggtcctcatgcctccaaatggcatctagagtttgagcagccttcttggctgcaggcaggcctagcctgtggcagcgggctagggcccgcagagcatttggtgcccctccatgttgcaatgcaaacaccttcaccactggggcagtggggagagatggctatattaataaaataacgtgtgtctttcaaaaaaaaaaaaaaa

SEQ ID NO: 79 - DNA, 3653 bp, Homo sapiens
attgcaacacatgcagctgcctggagagagggagccggtgtcctacgtcagagccgccgccgccgcgagccgccgccggggaggagcagccgctgccgcccaggactgggcccttagggaggaggaggcgagaagatggcggacgaccccagtgctgccgacaggaacgtggagatctggaagatcaagaagctcattaagagcttggaggcggcccgcggcaatggcaccagcatgatatcattgatcattcctcccaaagaccagatttcacgagtggcaaaaatgttagcggatgagtttggaactgcatctaacattaagtcacgagtaaaccgcctttcagtcctgggagccattacatctgtacaacaaagactcaaactttataacaaagtacctccaaatggtctggttgtatactgtggaacaattgtaacagaagaaggaaaggaaaagaaagtcaacattgactttgaacctttcaaaccaattaatacgtcattgtatttgtgtgacaacaaattccatacagaggctcttacagcactactttcagatgatagcaagtttggattcattgtaatagatggtagtggtgcactttttggcacactccaaggaaacacaagagaagtcctgcacaaattcactgtggatctcccaaagaaacacggtagaggaggtcagtcagccttgcgttttgcccgtttaagaatggaaaagcgacataactatgttcggaaagtagcagagactgctgtgcagctgtttatttctggggacaaagtgaatgtggctggtctagttttagctggatccgctgactttaaaactgaactaagtcaatctgatatgtttgatcagaggttacaatcaaaagttttaaaattagttgatatatcctatggtggtgaaaatggattcaaccaagctattgagttatctactgaagtcctctccaacgtgaaattcattcaagagaagaaattaataggacgatactttgatgaaatcagccaggacacgggcaagtactgttttggcgttgaagatacactaaaggctttggaaatgggagctgtagaaattctaatagtctatgaaaatctggatataatgagatatgttcttcattgccaaggcacagaagaggagaaaattctctatctaactccagagcaagaaaaggataaatctcatttcacagacaaagagaccggacaggaacatgagcttatcgagagcatgcccctgttggaatggtttgctaacaactataaaaaatttggagctacgttggaaattgtcacagataaatcacaagaagggtctcagtttgtgaaaggatttggtggaattggaggtatcttgcggtaccgagtagatttccagggaatggaataccaaggaggagacgatgaattttttgaccttgatgactactaggtagtcgacatgggtccggcaaaacgtgcctcaccctccagcatccaacccaaggagcatacccatggtggaatccaaacagatccctgccttacaattggaacatttccagaacttaatccatgagcattggatattgaaaagaaaaccgaaacaaaaccagacccagccctacactttggtttgtcatggtgtcagcgcagcagcctacaactaagttcctaaacgccactttggactaatttaaaaaagaatcccagtttttacttttactggatggtgaaattggttgctcttgtattttatgaaaaaaaatgatttttttaaccttcatacatagaagcaaaaatactttaactgctgtaaaccttcaaaagttaatagaagtgagatcatactggtttgtttcttattttgattggagaaaaattaaattgctgcatttcgcagtgacccatttacatggcattctcagcttagactgcgtaagaagaaatatatgtggtgaaatgttggaaccatttctctcttggtctctgtttaatgttgaaagggtgagctaataggaggcactttcaacttcactccctcacgctaccccgtccccctccagactggcagtttcaaggatgcaaattgcattgcaaaatcaaactgactcatgaagcatttgggccagtgcactgtttacttccatctgtttgcagacacatttgtgcccggcgtttgggagccctttgtatcaatgttctgacaagggtccctataaccttaacctactcgaaaccggtttgggatggatatgatggggcttctgtgctattgctgggattgggagaaataaaacatgcaatttaagtggaagcgaagaaatttaaagaggattttattttgcttgggtcaatccttgttaaaagggaggtggatgtgtttccttgtgttggatggcatgagattatgtgaatgttttgatttattaaaatgaactgcaaggtttttcacaggaacgacagacatgtatgactgcatgtaattataaactcctgacctcctggtggggttggagcatctgtttcaaatgtgggacttacaagcacttctcacatgagaaattaggggcgggtgggaagggatgggacacagcttctggcaccatggatttaagaccatgttggatccaaaagttggcctgaaaccctgaagctgatgcttcacagctgggctgtaagtcagacttgaacccagctgatatgcaaggtcatggcgtgccagggtggtgacagttgaacaaagtgtatagtacgtgcccagtggtagcgatggaaaaaagtataccaaatggactttgaaggaccaaaggttttaaaagtcaattggtatcacctccacactgactagggtagtggggtgcatttggttttcaaattgggtacttttaacactttagtgcctgactgctgttctttactgacttgattcagtcactcgtagctttattggtctgaaccagctccttgttcccaggttacagacctgcctatcgttccaataatcctgtttcacttgaatgaagggagtatgtcttaaatgtaaagtttctggttctcacactgtactctgaggtccaaatactgtctgtcaatgtgtaacctgatgtctcaaccccctgtgagaagagtccattatttggtgttcaccaacgtgggagacttcaccggaacaggcttttttgctttgggctctgctatttgtttgcagaacacccaagagcgagcaaacacgctctcttcacagcagtaccttagggttttgccattgtaaatgggtctgatgtgatatgacaagaccagagaaattggatgtaaatttacatttttgaatatgcttgttgtttcacatgatacatttagggtatgcagctccttttgtagtttttatttttactatttaagtttggaaatgatgccaaatttttgtatttctttaatcaatgtgttctcttcggtgatatatattgcattatatattgatgtgtgtatcaatatatattgatatgtattacacttacacatacaaacacatataagagggggtgaaaaccgtagcctttgcattctctatagcctctgcagagagatactaagcagcaaaatcttggtgttgtgatgtacagaaatggagaagagtattaaaccatatttaag

SEQ ID NO: 80 - DNA, 3136 bp, Homo sapiens
gcgctgggaagagactgtgcccctgcagctcccctgtcaccggctccaaggagcgtcgggctccccccgcccagccctgcagcacccatccggcaacgccagactcggcgcaacgggggcagctgcgactttaaatctctcagatccgcggcctgagggctgccgccaccgagaaatggaggcacagagctgtgaacaagagaccacggctcgccgaaatggcggtgccaggagcctgaaagggaatgcagccggcggggttgtcaaggacaacatttgttttggcgcaaccagcggtgccgtcaccaagaaaccgtcgactctgagaaaaaaagagaagttcggctaccgagaaactccgtgcagcaagtgctgtgacagcaaaaccgccggcttcgcgccgctggcgaaagagccaacggaaacgccgggtgctgcgaccgcgaagccggcactagagggcctcggatggagaaagccccgcaccgagacgaggaaactgtgcacagcacgactagcagttgacacaaacagaaaagtgtctcgtctgctctctgggagaaagcgtggatcaaaaccagcaactcagtggagagaaccccgcagccactgaagaagttgcccacgtggcggtggggccagagaaacaccgcgatttcgacgacagccgtagggataccacagagaaacatgcgcggccacagaagtacatccagctccgcgcaatcagtggttctgcgatccagaaaccgccagctgggctagactagaaacttctaaaaaactgtcgtcccatagcagctttcctaaccacgacagacagtcgcctttagagagcacctaacggtgctgagaccggcctgggccagcaaaagcgcagagcggtgccagtgccaagaaacgcccgacttggtgaaaccaaccttgtgaccaccgattccactggcttcgcaggacgcaacgggcgaaggcgcggcggagaaaccgcaggctcccttcaccgattatgctgcgggctggggatggtggggggcacccgcgaaattgtgaaaccagcggcgctgggacccagcgatcagctgcccgtagcaaatgtctgtgcagttgcaaaagataatttttggccgtgagaaggttgccgccagagagcgtccgataacgctgacaaaggcgtggcgttgccagtgagaaacagccggcgctgggaaaggaacggtgcagcgaccgaccaactgcgcgctcggtgccaccaaagtgctactggctctacccactctgtcccccacgggcttagggaagtctgatgtctttttcttttcttttttcctctgtcgcctaggctggtgcagtggtgtcatcttggctcagtgcagcctcgacttcctgggatccagcgatcctcccgcttcagcctctagagtagccgagaccacaggtgagtgctaccacccccgtctaatttatatatatttatatatataaatatatatattaaaatatatattttatatttatatataatataaataaatatataaatataaatatatatttttatatattatataaaatatataaatatatatttatttatatattatatataatatatatattatataatatatatattatataatatatatataatatataatatatatattatatataaaatatattatatataatatatataatatattatatattatatattatatataatatatataatatattatatataatatataatatataatatattatatataatatataaaatatataaaatatagtatataatatataaaatatattatatataatatataatatataagatatataatatattatatataatatattatatataatatattttatatagtatataaaatataaaatatatattatatataaaatatatattatatataaaatatatattatatataaaatatatattatatatgaaatatatatatataaatatatatatattagtgacggcggtctcgctatgttgcccaggctggtctcgaactcctgagctcaagcgattcgcccgcctgggcctcccaaagtgctgggatcacaggcgtgggccaccgaggcccgcaggaagtctgtattgttcttgcattccacccagtgcattacgcagggggagagtagtgggcttatgcgccgagaaccaagcagatcctgttggtcccaggaacaaagtataaaccattctggtcgccaacagcttcctacgcaggaaacagccatccaccctctgtgactgggcttttccaggtcacccctcgctgccaggctctcttcccggtccagagcccacaggatcctacaggaggggccaacaactgcttgcctttgaaacttgaaactctcggtctaaggttccttaggagcgtaaaaggcacagcgttttctgatcgcagcttcaggtctcccgcccctgtcccggtacctctcctgcaggacggaactctgtgggaacgctcgttgattctgatggttaactgtcagatatccttgatattggacataggatttggaagagggcaggagagaaaaatgaactgcaagactccagcacaagaggtgggattgctggcagatgtctgctccctctccaaacctaatgaacatctcaaagtgccatccactttcctatacccttgatctgtgaaatggatcactgacgctttctctgtctttccggaaatgcaaaacaggtgaattttcaagcgcttgaattgtctctcacacttttcagtcaagagtggggctataaactccttcctcataggaaataaggaactgccactgcttggaagtaaaacgtatttttcccataagctttcacatttcccaaaaaaaattatacatccagatgtaatccccctaagaggcttacagaccctaccaggagcgttcccacgcgaacgcatcatctcccaatcggatcctgaaaacaccatgcaaccaattccatccttttctggatcaacctgggcagaggacaggtgcagaggagcccagagaagggccttgacaagtcaggagacccaatttggggtcgcaattgtcactcactccccaggcgtttgctttgatc

SEQ ID NO: 81 - DNA, 2284 bp, Homo sapiens
gccgggtggatggtactgctgcatccgggtgtctggaggctgtggccgttttgttttcttggctaaaatcgggggagtgaggcgggccggcgcggcgcgacaccgggctccggaaccactgcacgacggggctggactgacctgaaaaaaatgtctggatttctagagggcttgagatgctcagaatgcattgactggggggaaaagcgcaatactattgcttccattgctgctggtgtactattttttacaggctggtggattatcatagatgcagctgttatttatcccaccatgaaagatttcaaccactcataccatgcctgtggtgttatagcaaccatagccttcctaatgattaatgcagtatcgaatggacaagtccgaggtgatagttacagtgaaggttgtctgggtcaaacaggtgctcgcatttggcttttcgttggtttcatgttggcctttggatctctgattgcatctatgtggattctttttggaggttatgttgctaaagaaaaagacatagtataccctggaattgctgtatttttccagaatgccttcatcttttttggagggctggtttttaagtttggccgcactgaagacttatggcagtgaacacatctgatttcccacagcacaacagccctgcatgggtttgtttgtttttttactgctcactcccaaccttttgtaatgccattttctaaacttatttctgagtgtagtctcagcttaaagttgtgtaatactaaaatcacgagaacacctaaacaacaaccaaaaatctattgtggtatgcacttgattaacttataaaatgttagaggaaactttcacatgaataatttttgtcaaattttatcatggtataatttgtaaaaataaaaagaaattacaaaagaaattatggatttgtcaatgtaagtatttgtcatatctgaggtccaaaaccacaatgaaagtgctctgaagatttaatgtgtttattcaaatgtggtctcttctgtgtcaaatgttaaatgaaatataaacattttttagtttttaaaatattccgtggtcaaaattcttcctcactataattggtatttacttttaccaaaaattctgtgaacatgtaatgtaactggcttttgagggtctcccaaggggtgagtggacgtgttggaagagagaagcaccatggtccagccaccaggctccctgtgtcccttccatgggaaggtcttccgctgtgcctctcattccaagggcaggaagatgtgactcagccatgacacgtggttctggtgggatgcacagtcactccacatccaccattgaaggaaaggaaaaaagggcagagacttgacactccagtcttagacaggggacaatttctttgtagttgttctgataataaactgggttccatgttgcatttcatctgtgtactgaaccactagcctaatagaccagcacggtcaactagaatgacaaacattagctactgggaactcttgttgtctcttcctcttcagaactcttgtccccccaggctccccacctctgcaagatgggatacactcttcaggaccacagtttgaaatgtctttcataaaatgtgctacaattagccttcggaatatttgctgggtgatttaaatgtgtgggtctcatttccatgctagccatggtcatctgacagtctctacgctgtgaatattgcctggtgatcaagactctcctcaaagaaatgacttgctgtcatcccacatgaactcctgatgttttttctacaaaagtccataaaatgtgaaaactggagaagatcttagaggttgaagcccaccttctcttttcacataggagggaacagaccatggaaatttaaacgacttcctcacggtcacagaactagttttttaatcctcaggcagtgcatccccccaccctacaactgagcacaacctctttccccacagtgcaattcagaatatgctcagggaatgccagccaccttgtaaaactgctgggagaaaagcatgattcccacaaggactaagtatcagtgatttgtaattttcctgttttgtattatctgctttgctgatgtagacaagagttaactgagtagcatgctttattaagcatgagaaagaatcttaagaattgtcaataaaattaacccaaaactttaataatgtgtctgtaaccaagaaaatattgatagcatcatcctaatgaaactaaacatttattttaaacttattaaattgactcttaaactaaaaaa

SEQ ID NO: 82 - DNA, 14755 bp, Homo sapiens
gaggccatgtcgggtgaggacgctgaggtccgggcagtctctgaagatgtctccaatggaagcagtggctcgcccagccctggggacacactgccctggaaccttgggaaaacgcagcggagccggcgcagcgggggtggcgctgggagcaacgggagtgtcctggacccagctgagcgggcggtcattcgcatcgcagatgagcgggatcgtgtgcagaagaaaaccttcaccaagtgggtcaacaagcacctcatcaaggcccagaggcacatcagtgacctgtatgaagacctccgcgatggccacaacctcatctccctgctggaggtcctctcgggggacagcctgccccgggagaaggggaggatgcgtttccacaagctgcagaatgtccagattgccctggactacctccggcaccgccaggtgaagctggtgaacatcaggaatgatgacatcgctgacggcaaccccaagctgacccttggcctcatctggacaatcattctgcacttccagatctcagatatccaggtgagtgggcagtcggaggacatgacggccaaggagaagctgctgctgtggtcgcagcgaatggtggaggggtaccagggcctgcgatgcgacaacttcacctccagctggagagacggccgcctcttcaatgccatcatccaccggcacaagcccctgctcatcgacatgaacaaggtgtaccggcagaccaacctggagaacctggaccaggccttctctgtggcggagcgggacctgggagtgacgcggctcctggaccctgaggacgtggatgtccctcagcccgacgagaagtccatcatcacctacgtctcgtcgctgtatgacgccatgccccgcgtgccggacgtgcaggatggggtgagggccaacgagctgcagctgcgctggcaggagtaccgggagctggtgctgctgctgcttcagtggatgcgacaccacacggccgcctttgaggaacgcaggttcccctccagcttcgaggagattgagatcctgtggtctcagttcctgaagtttaaggagatggagctaccagccaaggaggccgacaagaacaggtccaagggcatctaccaatccctggagggagcggtgcaagcaggccagctcaaggtgccccctggctaccacccgctggatgtggagaaggagtggggcaagctgcacgtggccatcctggagcgggagaagcagctccgcagcgagtttgagaggctggagtgtcttcagcgcatcgtgaccaagctgcagatggaggcggggctgtgtgaggagcagctgaaccaggccgacgccctgctgcagtcggatgtccggctgctggctgcaggcaaagtgccacagcgggcgggggaggtggaacgggacttggacaaggcggatagcatgatccggctgctcttcaacgacgtgcagaccctcaaggatggacggcacccgcagggcgagcagatgtaccgcagggtgtaccgtctgcacgagcgcctggtagccatccgcaccgagtacaacctacggctgaaggcaggcgtggcggcccctgcaacccaggtggcccaggtgactctgcagagtgtgcagaggcgccccgagctggaggactccactctgcgctacctgcaggacctgctggcctgggtggaggagaaccagcaccgtgtggatggcgctgagtggggtgtggacctgcccagcgtggaggcgcagctgggcagccaccgaggcctgcaccagtccatcgaagaattccgggccaagatcgagcgggcacggagtgacgagggccagctctcccccgccacccggggtgcctaccgtgactgcctgggtcggctggacctgcagtacgccaagctgctgaactcctccaaggcccgcctcaggtccctggagagcttgcacagctttgtggcagccgccactaaggagctaatgtggctgaatgagaaggaggaggaggaggtgggcttcgactggagcgaccgcaacaccaacatgaccgccaagaaggagagctactcggcgctgatgcgggagctggagctgaaggagaagaagatcaaggagctccaaaatgctggggaccggctgctgcgggaggaccacccggcccggcccacggtggagtccttccaggcggccctgcagacgcagtggagctggatgctacagctgtgctgctgtatcgaggcacacctgaaggagaacgctgcctactttcagttcttctcagatgtgcgggaggccgaggggcagttgcagaagctgcaggaggcactgcgtaggaaatacagttgtgatcgctccgccaccgtcacccggctggaggacctgctgcaggatgcccaggacgagaaggaacagctgaacgagtacaagggccacctctcaggcctggccaagcgggccaaggccgtcgtgcagctgaagccccgccacccagcccaccccatgcggggccgcctgcccctgctggccgtgtgcgactataagcaggtggaggtgactgtgcacaagggtgacgagtgccagctggtgggccctgcacagccgtcccactggaaggtgctcagcagctccggcagcgaggccgccgtgccctccgtgtgcttcctggtgcccccgcccaaccaggaggcccaggaggccgtcaccaggctggaggcccagcaccaggccctggtcacgctgtggcaccagttgcacgtggacatgaagagccttctggcctggcagagccttcgccgcgacgtgcagctcatccgctcctggtccctggccacgttccgcaccctgaagccagaggagcagcgccaagccctgcacagcctggagctgcactaccaggccttcctgcgggacagccaggacgcgggcggcttcggacccgaggaccggctgatggctgagcgcgagtacggctcctgcagccaccactaccagcagctgctgcagagcctggaacagggtgcacaggaagagtctcgctgccagcgctgcatctccgagctcaaagacatccggctgcagctggaggcctgtgagacgcgcaccgtgcaccgcctgcggctgccgctggacaaagagccggcacgggagtgtgcccagcgcatcgccgagcagcagaaggcacaggcagaggtggaggggctgggcaagggggtcgcccggctctctgccgaggccgagaaggtcttggccctaccagagccatcgcctgcggcccccacgctgcgctcggagctggagctgacgctgggcaagctggagcaggtccgcagcctgtctgccatctacctggagaagctcaagaccatcagcctggtgatccgcggcacgcagggggccgaggaggtgctcagggcccacgaggagcagctcaaggaggcccaggccgtgccggccaccctcccggagctcgaggccaccaaggcctctctgaagaagctgcgggcccaggccgaggcacagcagcccacgttcgacgccctgcgggatgagctgcggggggcacaggaggtgggggagcgactgcagcagcggcacggggagcgggacgtggaggtggagcgctggcgggagcgggtcgcccagttgcttgagcgctggcaggctgtgctggcccagaccgacgtgcggcagcgcgagctcgagcaactgggccgccagctgcgttactaccgcgagagtgcagaccccttgggcgcctggctgcaggacgccaggcggcggcaggagcagatccaggccatgccgctggccgacagccaggctgtgcgggagcagctgcggcaggagcaggccctgctggaggagatcgagcgccacggcgagaaggtcgaggagtgccagaggtttgcgaaacagtacatcaacgccatcaaggactatgaactccagctggtgacgtacaaggcgcagcttgagccggtggcctccccggccaagaagcccaaggtccagtcgggatcagagagtgtcatccaggagtacgtggacctgcgtacgcactacagcgagctgaccacactgacgagccagtacatcaagttcatcagcgagactctgcggcgcatggaggaggaggagaggctggctgagcagcagcgggcagaggagcgcgagcggctggccgaggtggaggccgcgctggagaagcagcggcagctggccgaggcgcacgcccaggcaaaggcacaggcggagcgggaggcgaaggagctgcagcagcgcatgcaggaggaggtggtgcggcgggaggaggcggcggtggacgcgcagcagcagaagcgcagcattcaggaggagctgcagcagctgcggcagagctcggaggcggagatccaggccaaggcccggcaggcagaggcggctgagcgcagccggctgcgcatcgaggaggagatccgcgtggtgcgcctgcagttggaggccaccgagcgccagcgtggcggggctgagggggagctgcaggcactgcgtgcacgggcggaggaggctgaggcacaaaagcgacaggcgcaggaggaggccgagcgcttgcggaggcaggtgcaggacgagagccagcgtaagcggcaggcggaggtggagctggcctcgcgcgtgaaggccgaggccgaggcggcgcgcgagaagcagcgggccctgcaggccctggaggagctgcggctgcaggcggaggaggcggagcggcgcctgcggcaggccgaggtggagcgagcgcggcaggtacaggtggccctggagacggcgcagcgcagtgcagaggcggagctgcagagcaaacgcgcctccttcgccgagaagacggcacagctggagcgctccctgcaggaggaacacgtggctgtggcacagctgcgggaggaggctgagcggcgggcacagcagcaggccgaggccgagcgggcgcgcgaggaggcagagcgggagctggagcgctggcagctcaaggccaacgaggcgctacggctgcggctgcaggcggaggaggtggcgcagcagaagagcctggcgcaggccgaggctgagaagcagaaggaggaggcggagcgcgaggcgcggcggcgcggcaaggcggaggagcaggccgtccggcagcgggagctggctgaacaagagctggagaagcagcggcagctggcggaaggcaccgcgcagcagcgcctggccgcggagcaggagttgatccggctgcgggccgagacggagcagggggagcagcagcggcagctgctggaggaggagctggcccggctgcagcgtgaggcggctgcagccacgcagaaacggcaggagctggaagccgagctggccaaggtgcgggccgagatggaggtgctgctggccagcaaggcgagggctgaggaggagtcgcgctccaccagcgagaagtccaagcagaggctggaggccgaggccggccggttccgcgagctggccgaggaggccgcccgcctgcgtgccctggcggaagaggccaagcggcagcggcagctggccgaggaagacgcggcgcggcagcgggccgaggcggagcgggtgcttgcggagaagctggccgccatcggcgaggccacgcggctcaagacggaggcggagatcgcgctcaaggagaaggaggcggagaacgagcgcctgcggcggctggcggaggacgaggccttccagcggcggcggctggaggagcaggccgcgcaacacaaggctgacatcgaggagcgcctggcccagctgcgcaaggcatcggacagcgagctggagcggcagaaggggctggtggaggacacgctgaggcagcggcggcaggtggaggaggagatcctggcgctgaaggcgagcttcgagaaggcggccgctggcaaggcggagctggagctggagctgggacgcatccgcagcaacgcggaggacacgctgcgcagcaaggagcaggccgagctggaggctgcgaggcagcggcagctggcggcggaggaggagcggcggcgccgtgaggctgaggagcgcgtgcagaagagcctggcggccgaggaggaggccgcacggcagcggaaggcggcgctggaggaagtcgagcggctgaaagccaaggtggaggaggcgcggcgcctgcgggagcgagcggagcaggagtcggcgcggcagctgcagctggcccaggaggccgcccagaagcggctgcaggcggaagagaaggcacacgccttcgcggtgcagcagaaggagcaggagctacagcagacgctgcagcaggagcagagcgtgctggaccagctgcgcggcgaggcggaggcggcccggcgggcggctgaggaggcggaggaggcccgggtgcaggcggagcgtgaggcggcgcagtcccggcggcaggtggaagaggccgagcggctgaagcagtcggcagaggagcaggcacaggcccgggctcaggcacaggcggctgcagagaagctgcgcaaggaggccgagcaagaggcggcgcggcgggcacaggcggagcaggcggccctgcggcagaagcaggcagctgacgcggagatggagaagcataagaaattcgccgagcagacgctgcggcagaaggcgcaggtggagcaggagctgacaacactgcggctgcagctggaggagaccgaccaccagaagaacctgctggacgaggagctgcagcggctgaaggcggaggccacggaggccgcacgccagcgcagccaggtggaggaggagctcttctcggtgcgcgtgcagatggaggagctgagcaagctcaaggcacgcatcgaggctgagaaccgcgcactcatcttgcgtgacaaggacaatacgcagcgcttcctgcaggaggaggctgagaagatgaagcaggtggcggaggaggccgcgcggctgagtgtggcggcccaagaggctgcgcgactgcggcagctggcagaggaggacctggcacagcagcgggccttggcagagaagatgctcaaggagaagatgcaggcggtgcaggaggccacgcgactcaaggctgaggcggaactgctgcagcagcagaaggagcttgcgcaggagcaggcgcggcggctgcaggaggacaaggagcagatggcgcagcagctggcggaggagacgcagggcttccagcggacgctggaggccgagcggcagcggcagctggagatgagcgctgaggctgagcgcctcaagctgcgtgtggccgagatgagccgagcccaggcccgcgctgaggaggacgcccagcgcttccggaagcaggcggaggagatcggtgagaagctgcaccgcacggagctcgccacccaggagaaggtgaccctggtgcagacactggagatccagcgacagcagagtgaccatgatgccgagcgcctgcgggaggccatcgctgagctggagcgtgagaaggagaagctccaacaggaggccaaactgctgcagctcaagtctgaggagatgcagacggtgcagcaggagcagctgctgcaggagacgcaggccctgcagcaaagcttcctctctgaaaaggacagcctgctacagcgggagcgcttcatcgagcaggagaaggccaagctggagcagctcttccaggacgaggtggccaaggcacagcagctgcgtgaggagcagcagcggcagcagcagcagatggagcaggaacggcagcggctggtggccagcatggaggaggcgcggcggcggcagcatgaggccgaggagggcgtgcggcgcaagcaggaggagctgcagcagctggagcagcagcggcggcagcaggaggagctgctggctgaggagaaccagaggctgcgtgagcagctgcagctcctggaggagcagcaccgggccgcgctggcgcactcagaggaggtcactgcctcgcaggtggctgccacaaagaccctgcccaatggccgggatgcacttgatggccccgcggcagaggcagagccggagcacagcttcgatggcctgcggcggaaggtgtcagctcagaggctgcaggaggccggcatcctgagtgcggaggagctgcagcggttggcgcagggccacaccacggtggacgagctcgcacggcgggaagacgtgcgccactacctgcagggccgcagcagtatcgcagggctgttgctgaaggccaccaatgagaagctgagtgtttacgccgccctgcagaggcagctgctgagtcccggcacggccctcatcctgctggaggcgcaggcggcctcaggcttcctgctggaccctgtgcggaaccggcggctgaccgtcaacgaggctgtgaaggagggtgtggtgggccccgagctgcaccacaagctgctgtcggccgagcgcgccgtcactggctacaaggacccctacactggccagcagatctctctcttccaagccatgcagaagggcctcatcgtccgggagcacggcatccgcctgctggaggcccagatcgccacgggcggcgttatcgaccccgtgcacagccaccgcgtgcccgtggacgtggcctaccggcgcggctacttcgacgaggagatgaaccgcgtcctggcggaccccagcgacgacaccaagggcttctttgaccccaacacgcacgagaacctcacgtacctgcagctactggagcgctgcgtggaggaccccgagacgggcctgtgccttctgccactcacggataaggctgccaagggcggggagctggtctacactgactccgaggcccgggacgtctttgagaaggccaccgtgtctgcgccgttcggcaagttccagggcaagacggtgaccatttgggagatcatcaactcggaatacttcacggcagagcagcggcgggacctgctgcggcagttccgcacgggccggatcacagtggagaagatcatcaagatcatcatcacggtggtggaggagcaggagcagaagggccggctttgctttgagggcctgcgcagcctggtgccagccgccgagctgctggagagcagggtcatcgaccgcgagctctaccagcagctgcagcgaggtgagcgctctgtgcgagacgtagccgaggtggacactgtgcggcgggctctccggggtgccaacgtcatcgcgggtgtatggctggaggaggcggggcagaagctgagtatctacaatgccctgaagaaagacctgctgccatccgacatggccgtggccctgttggaagcccaggccggcaccgggcacatcatcgaccccgccaccagcgcccggctgaccgtggacgaggcagtgcgtgctggcctggtgggccccgagtttcatgagaagctgctatcagccgagaaggctgtgacagggtacagggacccctacacagggcagagcgtctccctgttccaggccctgaagaagggcctcattccccgggagcagggcctgcgcctgttggacgcccagctgtccacgggcggcatcgtggaccccagcaagagccaccgcgtgcccctggatgtcgcctgcgcccgaggctgcctggatgaggagaccagcagggccctgtcggcaccaagggccgacgccaaggcctacagtgaccccagcacaggggagccggccacctacggcgagctccagcagcggtgccggcccgaccagctgaccgggctgagcctgctgccgctctcagaaaaggctgctcgggcccggcaggaggagctctactcagagctgcaggcccgtgagacctttgaaaagaccccggttgaggtccccgtgggtggcttcaagggcaggacggtgacggtgtgggagctcatcagctctgagtacttcactgcggagcagcggcaggagctgttgcgtcagttccgcacgggcaaggtcaccgtggagaaggtcatcaagattctcattaccatcgtggaggaggtggagaccctgcggcaggagaggctgtccttcagcggcctccgtgcccctgtgccagccagcgagctcctggcttccggggtcctcagcagagcccagtttgagcagctcaaggacggcaagacgacggtcaaggacctttcggagctgggctccgtgcggacgctgctgcagggcagtggctgcctcgccggcatctacctggaggacaccaaggagaaggtgtccatctacgaggccatgcgccggggcctgctgagagccacaacggctgcgctcctgctggaggcgcaggcggccactggcttcctggtggaccccgtgcggaaccagcgcctgtatgtccacgaggccgtgaaggcgggcgtggtgggccccgagcttcacgagcagctgctgtctgccgagaaggccgtcaccggctacagagacccctactcgggcagcaccatctccctcttccaggccatgcagaagggcctggttctccggcagcacggcatccgcctgctggaggcccagatcgccacgggcggcatcatcgaccccgtgcacagccaccgcgtgcctgtggacgtggcctaccagcgcggctacttcagtgaggagatgaaccgcgtcctggcggaccccagcgacgacaccaagggcttctttgaccccaacacgcatgagaacctcacgtacaggcagctgctggagcggtgcgtggaggaccccgagacgggcttgcgccttctgccactgaaaggggcggagaaggctgaggtggtggagaccacgcaggtgtacactgaggaggagacaagaagggcatttgaagagacacagatcgacattcccggcggcggcagccacggcggctccaccatgtccctgtgggaggtgatgcagtcggacctgatccccgaggagcagcgggcccagctgatggctgacttccaggccggccgggtgaccaaggaacgcatgatcatcatcatcatcgagatcattgagaagacagagatcatccgccagcagggtctggcctcctacgactacgtgcgccgccgcctcacggctgaggacctgttcgaggctcggatcatctctctcgagacctacaacctgctccgggagggcaccaggagcctccgtgaggctctcgaggcggagtccgcctggtgctacctctatggcacgggctccgtggctggtgtctacctgcccggttccaggcagacactgagcatctaccaggctctcaagaaagggctgctgagtgccgaggtggcccgcctgctgctggaggcacaggcagccacaggcttcctgctggacccggtgaagggggagcggctgactgtggatgaggctgtgcggaagggcctcgtggggcccgagctgcacgaccgcctgctctcggctgagcgggcggtcaccggctaccgtgacccctacaccgagcagaccatctcgctcttccaggccatgaagaaggagctgatccctactgaggaggccctgcggctgctggatgcccagctggccaccggcggcatcgtggacccccgcctgggcttccaccttcccctggaggtggcttaccagcgtggctacctcaacaaggacacgcacgaccagctgtcagagcccagcgaggtgcgcagctacgtggacccgtccaccgacgagcgcctcagctacacgcagctgctcaggcggtgccgtcgtgacgacggcaccggccagctgctcctgccactgtcggacgcccgcaagctgaccttccgtggcctgcggaagcagatcaccatggaggagctggtgcgctcgcaggtcatggacgaggccacggcgctgcagctgcgggagggcctgacctccatcgaggaggtcaccaagaacttgcagaagttcctggaaggcaccagctgcatcgctggtgtcttcgtggacgccaccaaggaacggctctcggtgtaccaggccatgaagaagggcatcatccgccccggcacagcctttgagctcctggaggcgcaggcggccaccggttacgtcatcgaccccatcaagggactgaagctgacggtggaggaggctgtgcgtatgggcattgtgggccccgagttcaaggacaagctgctgtcggccgagcgcgccgtcactgggtacaaggacccctactctgggaagctcatctccctcttccaggccatgaagaagggcctgatcctgaaggaccatggcatccgcctgctggaggcccagatcgccacgggcggcatcatcgaccctgaggagagccaccggctgcccgtggaggtggcctacaagcgcggcctcttcgatgaggagatgaacgagatcctgaccgacccctcggacgacaccaagggcttctttgaccctaacacggaggagaacctcacctacctgcagctgatggagcgttgtatcactgacccccagacgggcctgtgtctcttgccgctgaaggagaagaagcgggagcggaagacgtcctccaagtcctccgtgcgcaagcgccgagtggtcatcgtggaccccgagacgggcaaggagatgtcagtgtacgaggcctaccgcaagggcctgattgaccaccagacgtacctggagctgtccgagcaggagtgcgagtgggaggagatcaccatctcctcctcggacggcgtggtcaagtccatgatcatcgaccgccgctccgggcgccagtacgacatcgatgatgccatcgccaagaacctcatcgaccgctcggcactggaccagtaccgcgccggcacgctctccatcaccgagttcgccgacatgctctcgggcaacgccggtggtttccgctcccgttcctcctcggtgggatcctcctcctcctaccccatcagccccgccgtctccaggacccagctggcctcctggtcagaccccactgaggagacgggccccgtggctggcatcctggacacggagacgctggagaaggtgtccatcaccgaggccatgcaccggaacctggtggataacatcacggggcagcggctgctggaggcgcaggcctgcaccgggggcatcatcgaccccagcaccggtgagcgcttccctgtcaccgacgccgtcaacaagggcctggtggacaagatcatggtggaccgcatcaacctggcccagaaggccttctgcggcttcgaggacccacgcaccaagaccaagatgtcggccgcccaggccctgaagaagggctggctctactacgaggccggccagcgcttcctggaggtgcagtacctgaccggcggcttgatcgagcccgacacgccgggccgcgtgcccctggacgaggccctgcagcgcggcacggtggacgcccgcaccgcacagaagctgcgtgacgtgggcgcctactccaagtacctcacctgccctaagaccaagctcaagatctcctataaggacgcgctggaccgcagcatggtggaggagggcacggggctgcggctgctggaggctgccgcgcagtccaccaagggctactacagcccctacagcgtcagcggctccggctctaccgctggctcccgcaccggctcgcgcaccggctcccgggccggctcccgccgcggcagctttgacgccaccggctccggcttctccatgaccttctcttcatcctcctactcctcctcgggctacggccgccgctacgcctcggggtcctcggcctccctggggggccctgagtctgccgtggcctgaggctgcctgcgcccaccccgctctgcatgcggcccagcccggctcccaccgaggcgcgggggccgttttcaacgcttaaaggtgtcttcctcccaagtggtgcctaaagtttaaccaaaaagaccagactaatatattaatatatatctgctgtccagacagcctgtatcttgggggacagggctggcccagccctgctggccgcctcaccccctcgggtctcctcactcccttctacctgccactcacacagccaggtgccttggagggtcccaagctgggccccagcccaccctcctgtcttcccagggtagcccgcctgccagtcctagctgcacagggcagctgggcccaaccctgtctgtagagggccctggtgtttctagcactggcctgcacggtgggccttgctggggacggggggccccagtcagcctctctcccagtctacccagagaagccccttccccatgggaagacgaggccctcgggcccagcccccacagtgctgtctgatctgtgctttccagctcaccccccacactcactcctgagacccctggcctccggcgtcagcctccagcctctgttcccctagtaagtgccttccatgtcggcctctaaccccaggccccgaggacccagacccagtggggaggcggacgttccagccggcatggctgggaactgcagacctgtcctcctggtgggtccaggggcccctccagcttgtggagccccacactggggtgccgcctgcccgtctctctcccatggagccccagccccctttgggcccagggacaccagccaggctctgtgctgaccctcctgttgcacccagccctggtctcagcagcgaccacccctgcctccaccctctgagctttgcatgttccactaaccccgggcgggtggcaggtggaggtgtcaggctgctggcgcctctgcaagggcagaacactaacctgaccgtgggcggggccttgcggtatccgcccccaataaaagcaattccaacctt

SEQ ID NO: 83 - DNA, 14626 bp, Homo sapiens
atggccggcccgctgcccgacgagcaggacttcatccaggcctacgaggaggtgcgcgagaagtacaaagatgagcgggatcgtgtgcagaagaaaaccttcaccaagtgggtcaacaagcacctcatcaaggcccagaggcacatcagtgacctgtatgaagacctccgcgatggccacaacctcatctccctgctggaggtcctctcgggggacagcctgccccgggagaaggggaggatgcgtttccacaagctgcagaatgtccagattgccctggactacctccggcaccgccaggtgaagctggtgaacatcaggaatgatgacatcgctgacggcaaccccaagctgacccttggcctcatctggacaatcattctgcacttccagatctcagatatccaggtgagtgggcagtcggaggacatgacggccaaggagaagctgctgctgtggtcgcagcgaatggtggaggggtaccagggcctgcgatgcgacaacttcacctccagctggagagacggccgcctcttcaatgccatcatccaccggcacaagcccctgctcatcgacatgaacaaggtgtaccggcagaccaacctggagaacctggaccaggccttctctgtggcggagcgggacctgggagtgacgcggctcctggaccctgaggacgtggatgtccctcagcccgacgagaagtccatcatcacctacgtctcgtcgctgtatgacgccatgccccgcgtgccggacgtgcaggatggggtgagggccaacgagctgcagctgcgctggcaggagtaccgggagctggtgctgctgctgcttcagtggatgcgacaccacacggccgcctttgaggaacgcaggttcccctccagcttcgaggagattgagatcctgtggtctcagttcctgaagtttaaggagatggagctaccagccaaggaggccgacaagaacaggtccaagggcatctaccaatccctggagggagcggtgcaagcaggccagctcaaggtgccccctggctaccacccgctggatgtggagaaggagtggggcaagctgcacgtggccatcctggagcgggagaagcagctccgcagcgagtttgagaggctggagtgtcttcagcgcatcgtgaccaagctgcagatggaggcggggctgtgtgaggagcagctgaaccaggccgacgccctgctgcagtcggatgtccggctgctggctgcaggcaaagtgccacagcgggcgggggaggtggaacgggacttggacaaggcggatagcatgatccggctgctcttcaacgacgtgcagaccctcaaggatggacggcacccgcagggcgagcagatgtaccgcagggtgtaccgtctgcacgagcgcctggtagccatccgcaccgagtacaacctacggctgaaggcaggcgtggcggcccctgcaacccaggtggcccaggtgactctgcagagtgtgcagaggcgccccgagctggaggactccactctgcgctacctgcaggacctgctggcctgggtggaggagaaccagcaccgtgtggatggcgctgagtggggtgtggacctgcccagcgtggaggcgcagctgggcagccaccgaggcctgcaccagtccatcgaagaattccgggccaagatcgagcgggcacggagtgacgagggccagctctcccccgccacccggggtgcctaccgtgactgcctgggtcggctggacctgcagtacgccaagctgctgaactcctccaaggcccgcctcaggtccctggagagcttgcacagctttgtggcagccgccactaaggagctaatgtggctgaatgagaaggaggaggaggaggtgggcttcgactggagcgaccgcaacaccaacatgaccgccaagaaggagagctactcggcgctgatgcgggagctggagctgaaggagaagaagatcaaggagctccaaaatgctggggaccggctgctgcgggaggaccacccggcccggcccacggtggagtccttccaggcggccctgcagacgcagtggagctggatgctacagctgtgctgctgtatcgaggcacacctgaaggagaacgctgcctactttcagttcttctcagatgtgcgggaggccgaggggcagttgcagaagctgcaggaggcactgcgtaggaaatacagttgtgatcgctccgccaccgtcacccggctggaggacctgctgcaggatgcccaggacgagaaggaacagctgaacgagtacaagggccacctctcaggcctggccaagcgggccaaggccgtcgtgcagctgaagccccgccacccagcccaccccatgcggggccgcctgcccctgctggccgtgtgcgactataagcaggtggaggtgactgtgcacaagggtgacgagtgccagctggtgggccctgcacagccgtcccactggaaggtgctcagcagctccggcagcgaggccgccgtgccctccgtgtgcttcctggtgcccccgcccaaccaggaggcccaggaggccgtcaccaggctggaggcccagcaccaggccctggtcacgctgtggcaccagttgcacgtggacatgaagagccttctggcctggcagagccttcgccgcgacgtgcagctcatccgctcctggtccctggccacgttccgcaccctgaagccagaggagcagcgccaagccctgcacagcctggagctgcactaccaggccttcctgcgggacagccaggacgcgggcggcttcggacccgaggaccggctgatggctgagcgcgagtacggctcctgcagccaccactaccagcagctgctgcagagcctggaacagggtgcacaggaagagtctcgctgccagcgctgcatctccgagctcaaagacatccggctgcagctggaggcctgtgagacgcgcaccgtgcaccgcctgcggctgccgctggacaaagagccggcacgggagtgtgcccagcgcatcgccgagcagcagaaggcacaggcagaggtggaggggctgggcaagggggtcgcccggctctctgccgaggccgagaaggtcttggccctaccagagccatcgcctgcggcccccacgctgcgctcggagctggagctgacgctgggcaagctggagcaggtccgcagcctgtctgccatctacctggagaagctcaagaccatcagcctggtgatccgcggcacgcagggggccgaggaggtgctcagggcccacgaggagcagctcaaggaggcccaggccgtgccggccaccctcccggagctcgaggccaccaaggcctctctgaagaagctgcgggcccaggccgaggcacagcagcccacgttcgacgccctgcgggatgagctgcggggggcacaggaggtgggggagcgactgcagcagcggcacggggagcgggacgtggaggtggagcgctggcgggagcgggtcgcccagttgcttgagcgctggcaggctgtgctggcccagaccgacgtgcggcagcgcgagctcgagcaactgggccgccagctgcgttactaccgcgagagtgcagaccccttgggcgcctggctgcaggacgccaggcggcggcaggagcagatccaggccatgccgctggccgacagccaggctgtgcgggagcagctgcggcaggagcaggccctgctggaggagatcgagcgccacggcgagaaggtcgaggagtgccagaggtttgcgaaacagtacatcaacgccatcaaggactatgaactccagctggtgacgtacaaggcgcagcttgagccggtggcctccccggccaagaagcccaaggtccagtcgggatcagagagtgtcatccaggagtacgtggacctgcgtacgcactacagcgagctgaccacactgacgagccagtacatcaagttcatcagcgagactctgcggcgcatggaggaggaggagaggctggctgagcagcagcgggcagaggagcgcgagcggctggccgaggtggaggccgcgctggagaagcagcggcagctggccgaggcgcacgcccaggcaaaggcacaggcggagcgggaggcgaaggagctgcagcagcgcatgcaggaggaggtggtgcggcgggaggaggcggcggtggacgcgcagcagcagaagcgcagcattcaggaggagctgcagcagctgcggcagagctcggaggcggagatccaggccaaggcccggcaggcagaggcggctgagcgcagccggctgcgcatcgaggaggagatccgcgtggtgcgcctgcagttggaggccaccgagcgccagcgtggcggggctgagggggagctgcaggcactgcgtgcacgggcggaggaggctgaggcacaaaagcgacaggcgcaggaggaggccgagcgcttgcggaggcaggtgcaggacgagagccagcgtaagcggcaggcggaggtggagctggcctcgcgcgtgaaggccgaggccgaggcggcgcgcgagaagcagcgggccctgcaggccctggaggagctgcggctgcaggcggaggaggcggagcggcgcctgcggcaggccgaggtggagcgagcgcggcaggtacaggtggccctggagacggcgcagcgcagtgcagaggcggagctgcagagcaaacgcgcctccttcgccgagaagacggcacagctggagcgctccctgcaggaggaacacgtggctgtggcacagctgcgggaggaggctgagcggcgggcacagcagcaggccgaggccgagcgggcgcgcgaggaggcagagcgggagctggagcgctggcagctcaaggccaacgaggcgctacggctgcggctgcaggcggaggaggtggcgcagcagaagagcctggcgcaggccgaggctgagaagcagaaggaggaggcggagcgcgaggcgcggcggcgcggcaaggcggaggagcaggccgtccggcagcgggagctggctgaacaagagctggagaagcagcggcagctggcggaaggcaccgcgcagcagcgcctggccgcggagcaggagttgatccggctgcgggccgagacggagcagggggagcagcagcggcagctgctggaggaggagctggcccggctgcagcgtgaggcggctgcagccacgcagaaacggcaggagctggaagccgagctggccaaggtgcgggccgagatggaggtgctgctggccagcaaggcgagggctgaggaggagtcgcgctccaccagcgagaagtccaagcagaggctggaggccgaggccggccggttccgcgagctggccgaggaggccgcccgcctgcgtgccctggcggaagaggccaagcggcagcggcagctggccgaggaagacgcggcgcggcagcgggccgaggcggagcgggtgcttgcggagaagctggccgccatcggcgaggccacgcggctcaagacggaggcggagatcgcgctcaaggagaaggaggcggagaacgagcgcctgcggcggctggcggaggacgaggccttccagcggcggcggctggaggagcaggccgcgcaacacaaggctgacatcgaggagcgcctggcccagctgcgcaaggcatcggacagcgagctggagcggcagaaggggctggtggaggacacgctgaggcagcggcggcaggtggaggaggagatcctggcgctgaaggcgagcttcgagaaggcggccgctggcaaggcggagctggagctggagctgggacgcatccgcagcaacgcggaggacacgctgcgcagcaaggagcaggccgagctggaggctgcgaggcagcggcagctggcggcggaggaggagcggcggcgccgtgaggctgaggagcgcgtgcagaagagcctggcggccgaggaggaggccgcacggcagcggaaggcggcgctggaggaagtcgagcggctgaaagccaaggtggaggaggcgcggcgcctgcgggagcgagcggagcaggagtcggcgcggcagctgcagctggcccaggaggccgcccagaagcggctgcaggcggaagagaaggcacacgccttcgcggtgcagcagaaggagcaggagctacagcagacgctgcagcaggagcagagcgtgctggaccagctgcgcggcgaggcggaggcggcccggcgggcggctgaggaggcggaggaggcccgggtgcaggcggagcgtgaggcggcgcagtcccggcggcaggtggaagaggccgagcggctgaagcagtcggcagaggagcaggcacaggcccgggctcaggcacaggcggctgcagagaagctgcgcaaggaggccgagcaagaggcggcgcggcgggcacaggcggagcaggcggccctgcggcagaagcaggcagctgacgcggagatggagaagcataagaaattcgccgagcagacgctgcggcagaaggcgcaggtggagcaggagctgacaacactgcggctgcagctggaggagaccgaccaccagaagaacctgctggacgaggagctgcagcggctgaaggcggaggccacggaggccgcacgccagcgcagccaggtggaggaggagctcttctcggtgcgcgtgcagatggaggagctgagcaagctcaaggcacgcatcgaggctgagaaccgcgcactcatcttgcgtgacaaggacaatacgcagcgcttcctgcaggaggaggctgagaagatgaagcaggtggcggaggaggccgcgcggctgagtgtggcggcccaagaggctgcgcgactgcggcagctggcagaggaggacctggcacagcagcgggccttggcagagaagatgctcaaggagaagatgcaggcggtgcaggaggccacgcgactcaaggctgaggcggaactgctgcagcagcagaaggagcttgcgcaggagcaggcgcggcggctgcaggaggacaaggagcagatggcgcagcagctggcggaggagacgcagggcttccagcggacgctggaggccgagcggcagcggcagctggagatgagcgctgaggctgagcgcctcaagctgcgtgtggccgagatgagccgagcccaggcccgcgctgaggaggacgcccagcgcttccggaagcaggcggaggagatcggtgagaagctgcaccgcacggagctcgccacccaggagaaggtgaccctggtgcagacactggagatccagcgacagcagagtgaccatgatgccgagcgcctgcgggaggccatcgctgagctggagcgtgagaaggagaagctccaacaggaggccaaactgctgcagctcaagtctgaggagatgcagacggtgcagcaggagcagctgctgcaggagacgcaggccctgcagcaaagcttcctctctgaaaaggacagcctgctacagcgggagcgcttcatcgagcaggagaaggccaagctggagcagctcttccaggacgaggtggccaaggcacagcagctgcgtgaggagcagcagcggcagcagcagcagatggagcaggaacggcagcggctggtggccagcatggaggaggcgcggcggcggcagcatgaggccgaggagggcgtgcggcgcaagcaggaggagctgcagcagctggagcagcagcggcggcagcaggaggagctgctggctgaggagaaccagaggctgcgtgagcagctgcagctcctggaggagcagcaccgggccgcgctggcgcactcagaggaggtcactgcctcgcaggtggctgccacaaagaccctgcccaatggccgggatgcacttgatggccccgcggcagaggcagagccggagcacagcttcgatggcctgcggcggaaggtgtcagctcagaggctgcaggaggccggcatcctgagtgcggaggagctgcagcggttggcgcagggccacaccacggtggacgagctcgcacggcgggaagacgtgcgccactacctgcagggccgcagcagtatcgcagggctgttgctgaaggccaccaatgagaagctgagtgtttacgccgccctgcagaggcagctgctgagtcccggcacggccctcatcctgctggaggcgcaggcggcctcaggcttcctgctggaccctgtgcggaaccggcggctgaccgtcaacgaggctgtgaaggagggtgtggtgggccccgagctgcaccacaagctgctgtcggccgagcgcgccgtcactggctacaaggacccctacactggccagcagatctctctcttccaagccatgcagaagggcctcatcgtccgggagcacggcatccgcctgctggaggcccagatcgccacgggcggcgttatcgaccccgtgcacagccaccgcgtgcccgtggacgtggcctaccggcgcggctacttcgacgaggagatgaaccgcgtcctggcggaccccagcgacgacaccaagggcttctttgaccccaacacgcacgagaacctcacgtacctgcagctactggagcgctgcgtggaggaccccgagacgggcctgtgccttctgccactcacggataaggctgccaagggcggggagctggtctacactgactccgaggcccgggacgtctttgagaaggccaccgtgtctgcgccgttcggcaagttccagggcaagacggtgaccatttgggagatcatcaactcggaatacttcacggcagagcagcggcgggacctgctgcggcagttccgcacgggccggatcacagtggagaagatcatcaagatcatcatcacggtggtggaggagcaggagcagaagggccggctttgctttgagggcctgcgcagcctggtgccagccgccgagctgctggagagcagggtcatcgaccgcgagctctaccagcagctgcagcgaggtgagcgctctgtgcgagacgtagccgaggtggacactgtgcggcgggctctccggggtgccaacgtcatcgcgggtgtatggctggaggaggcggggcagaagctgagtatctacaatgccctgaagaaagacctgctgccatccgacatggccgtggccctgttggaagcccaggccggcaccgggcacatcatcgaccccgccaccagcgcccggctgaccgtggacgaggcagtgcgtgctggcctggtgggccccgagtttcatgagaagctgctatcagccgagaaggctgtgacagggtacagggacccctacacagggcagagcgtctccctgttccaggccctgaagaagggcctcattccccgggagcagggcctgcgcctgttggacgcccagctgtccacgggcggcatcgtggaccccagcaagagccaccgcgtgcccctggatgtcgcctgcgcccgaggctgcctggatgaggagaccagcagggccctgtcggcaccaagggccgacgccaaggcctacagtgaccccagcacaggggagccggccacctacggcgagctccagcagcggtgccggcccgaccagctgaccgggctgagcctgctgccgctctcagaaaaggctgctcgggcccggcaggaggagctctactcagagctgcaggcccgtgagacctttgaaaagaccccggttgaggtccccgtgggtggcttcaagggcaggacggtgacggtgtgggagctcatcagctctgagtacttcactgcggagcagcggcaggagctgttgcgtcagttccgcacgggcaaggtcaccgtggagaaggtcatcaagattctcattaccatcgtggaggaggtggagaccctgcggcaggagaggctgtccttcagcggcctccgtgcccctgtgccagccagcgagctcctggcttccggggtcctcagcagagcccagtttgagcagctcaaggacggcaagacgacggtcaaggacctttcggagctgggctccgtgcggacgctgctgcagggcagtggctgcctcgccggcatctacctggaggacaccaaggagaaggtgtccatctacgaggccatgcgccggggcctgctgagagccacaacggctgcgctcctgctggaggcgcaggcggccactggcttcctggtggaccccgtgcggaaccagcgcctgtatgtccacgaggccgtgaaggcgggcgtggtgggccccgagcttcacgagcagctgctgtctgccgagaaggccgtcaccggctacagagacccctactcgggcagcaccatctccctcttccaggccatgcagaagggcctggttctccggcagcacggcatccgcctgctggaggcccagatcgccacgggcggcatcatcgaccccgtgcacagccaccgcgtgcctgtggacgtggcctaccagcgcggctacttcagtgaggagatgaaccgcgtcctggcggaccccagcgacgacaccaagggcttctttgaccccaacacgcatgagaacctcacgtacaggcagctgctggagcggtgcgtggaggaccccgagacgggcttgcgccttctgccactgaaaggggcggagaaggctgaggtggtggagaccacgcaggtgtacactgaggaggagacaagaagggcatttgaagagacacagatcgacattcccggcggcggcagccacggcggctccaccatgtccctgtgggaggtgatgcagtcggacctgatccccgaggagcagcgggcccagctgatggctgacttccaggccggccgggtgaccaaggaacgcatgatcatcatcatcatcgagatcattgagaagacagagatcatccgccagcagggtctggcctcctacgactacgtgcgccgccgcctcacggctgaggacctgttcgaggctcggatcatctctctcgagacctacaacctgctccgggagggcaccaggagcctccgtgaggctctcgaggcggagtccgcctggtgctacctctatggcacgggctccgtggctggtgtctacctgcccggttccaggcagacactgagcatctaccaggctctcaagaaagggctgctgagtgccgaggtggcccgcctgctgctggaggcacaggcagccacaggcttcctgctggacccggtgaagggggagcggctgactgtggatgaggctgtgcggaagggcctcgtggggcccgagctgcacgaccgcctgctctcggctgagcgggcggtcaccggctaccgtgacccctacaccgagcagaccatctcgctcttccaggccatgaagaaggagctgatccctactgaggaggccctgcggctgctggatgcccagctggccaccggcggcatcgtggacccccgcctgggcttccaccttcccctggaggtggcttaccagcgtggctacctcaacaaggacacgcacgaccagctgtcagagcccagcgaggtgcgcagctacgtggacccgtccaccgacgagcgcctcagctacacgcagctgctcaggcggtgccgtcgtgacgacggcaccggccagctgctcctgccactgtcggacgcccgcaagctgaccttccgtggcctgcggaagcagatcaccatggaggagctggtgcgctcgcaggtcatggacgaggccacggcgctgcagctgcgggagggcctgacctccatcgaggaggtcaccaagaacttgcagaagttcctggaaggcaccagctgcatcgctggtgtcttcgtggacgccaccaaggaacggctctcggtgtaccaggccatgaagaagggcatcatccgccccggcacagcctttgagctcctggaggcgcaggcggccaccggttacgtcatcgaccccatcaagggactgaagctgacggtggaggaggctgtgcgtatgggcattgtgggccccgagttcaaggacaagctgctgtcggccgagcgcgccgtcactgggtacaaggacccctactctgggaagctcatctccctcttccaggccatgaagaagggcctgatcctgaaggaccatggcatccgcctgctggaggcccagatcgccacgggcggcatcatcgaccctgaggagagccaccggctgcccgtggaggtggcctacaagcgcggcctcttcgatgaggagatgaacgagatcctgaccgacccctcggacgacaccaagggcttctttgaccctaacacggaggagaacctcacctacctgcagctgatggagcgttgtatcactgacccccagacgggcctgtgtctcttgccgctgaaggagaagaagcgggagcggaagacgtcctccaagtcctccgtgcgcaagcgccgagtggtcatcgtggaccccgagacgggcaaggagatgtcagtgtacgaggcctaccgcaagggcctgattgaccaccagacgtacctggagctgtccgagcaggagtgcgagtgggaggagatcaccatctcctcctcggacggcgtggtcaagtccatgatcatcgaccgccgctccgggcgccagtacgacatcgatgatgccatcgccaagaacctcatcgaccgctcggcactggaccagtaccgcgccggcacgctctccatcaccgagttcgccgacatgctctcgggcaacgccggtggtttccgctcccgttcctcctcggtgggatcctcctcctcctaccccatcagccccgccgtctccaggacccagctggcctcctggtcagaccccactgaggagacgggccccgtggctggcatcctggacacggagacgctggagaaggtgtccatcaccgaggccatgcaccggaacctggtggataacatcacggggcagcggctgctggaggcgcaggcctgcaccgggggcatcatcgaccccagcaccggtgagcgcttccctgtcaccgacgccgtcaacaagggcctggtggacaagatcatggtggaccgcatcaacctggcccagaaggccttctgcggcttcgaggacccacgcaccaagaccaagatgtcggccgcccaggccctgaagaagggctggctctactacgaggccggccagcgcttcctggaggtgcagtacctgaccggcggcttgatcgagcccgacacgccgggccgcgtgcccctggacgaggccctgcagcgcggcacggtggacgcccgcaccgcacagaagctgcgtgacgtgggcgcctactccaagtacctcacctgccctaagaccaagctcaagatctcctataaggacgcgctggaccgcagcatggtggaggagggcacggggctgcggctgctggaggctgccgcgcagtccaccaagggctactacagcccctacagcgtcagcggctccggctctaccgctggctcccgcaccggctcgcgcaccggctcccgggccggctcccgccgcggcagctttgacgccaccggctccggcttctccatgaccttctcttcatcctcctactcctcctcgggctacggccgccgctacgcctcggggtcctcggcctccctggggggccctgagtctgccgtggcctgaggctgcctgcgcccaccccgctctgcatgcggcccagcccggctcccaccgaggcgcgggggccgttttcaacgcttaaaggtgtcttcctcccaagtggtgcctaaagtttaaccaaaaagaccagactaatatattaatatatatctgctgtccagacagcctgtatcttgggggacagggctggcccagccctgctggccgcctcaccccctcgggtctcctcactcccttctacctgccactcacacagccaggtgccttggagggtcccaagctgggccccagcccaccctcctgtcttcccagggtagcccgcctgccagtcctagctgcacagggcagctgggcccaaccctgtctgtagagggccctggtgtttctagcactggcctgcacggtgggccttgctggggacggggggccccagtcagcctctctcccagtctacccagagaagccccttccccatgggaagacgaggccctcgggcccagcccccacagtgctgtctgatctgtgctttccagctcaccccccacactcactcctgagacccctggcctccggcgtcagcctccagcctctgttcccctagtaagtgccttccatgtcggcctctaaccccaggccccgaggacccagacccagtggggaggcggacgttccagccggcatggctgggaactgcagacctgtcctcctggtgggtccaggggcccctccagcttgtggagccccacactggggtgccgcctgcccgtctctctcccatggagccccagccccctttgggcccagggacaccagccaggctctgtgctgaccctcctgttgcacccagccctggtctcagcagcgaccacccctgcctccaccctctgagctttgcatgttccactaaccccgggcgggtggcaggtggaggtgtcaggctgctggcgcctctgcaagggcagaacactaacctgaccgtgggcggggccttgcggtatccgcccccaataaaagcaattccaacctt

SEQ ID NO: 84 - DNA, 14751 bp, Homo sapiens
attgatcagctgaagccccgcccctggccggcaagccctgccccggacctccgggctcctcccccggctgcggcgctggcctgggcagtgcggtgcggggctggactctgcctggtggtggcacagccgccctcagccccggcgcagacatggacccctcgcgagccatccagaacgagatcagctccctcaaagatgagcgggatcgtgtgcagaagaaaaccttcaccaagtgggtcaacaagcacctcatcaaggcccagaggcacatcagtgacctgtatgaagacctccgcgatggccacaacctcatctccctgctggaggtcctctcgggggacagcctgccccgggagaaggggaggatgcgtttccacaagctgcagaatgtccagattgccctggactacctccggcaccgccaggtgaagctggtgaacatcaggaatgatgacatcgctgacggcaaccccaagctgacccttggcctcatctggacaatcattctgcacttccagatctcagatatccaggtgagtgggcagtcggaggacatgacggccaaggagaagctgctgctgtggtcgcagcgaatggtggaggggtaccagggcctgcgatgcgacaacttcacctccagctggagagacggccgcctcttcaatgccatcatccaccggcacaagcccctgctcatcgacatgaacaaggtgtaccggcagaccaacctggagaacctggaccaggccttctctgtggcggagcgggacctgggagtgacgcggctcctggaccctgaggacgtggatgtccctcagcccgacgagaagtccatcatcacctacgtctcgtcgctgtatgacgccatgccccgcgtgccggacgtgcaggatggggtgagggccaacgagctgcagctgcgctggcaggagtaccgggagctggtgctgctgctgcttcagtggatgcgacaccacacggccgcctttgaggaacgcaggttcccctccagcttcgaggagattgagatcctgtggtctcagttcctgaagtttaaggagatggagctaccagccaaggaggccgacaagaacaggtccaagggcatctaccaatccctggagggagcggtgcaagcaggccagctcaaggtgccccctggctaccacccgctggatgtggagaaggagtggggcaagctgcacgtggccatcctggagcgggagaagcagctccgcagcgagtttgagaggctggagtgtcttcagcgcatcgtgaccaagctgcagatggaggcggggctgtgtgaggagcagctgaaccaggccgacgccctgctgcagtcggatgtccggctgctggctgcaggcaaagtgccacagcgggcgggggaggtggaacgggacttggacaaggcggatagcatgatccggctgctcttcaacgacgtgcagaccctcaaggatggacggcacccgcagggcgagcagatgtaccgcagggtgtaccgtctgcacgagcgcctggtagccatccgcaccgagtacaacctacggctgaaggcaggcgtggcggcccctgcaacccaggtggcccaggtgactctgcagagtgtgcagaggcgccccgagctggaggactccactctgcgctacctgcaggacctgctggcctgggtggaggagaaccagcaccgtgtggatggcgctgagtggggtgtggacctgcccagcgtggaggcgcagctgggcagccaccgaggcctgcaccagtccatcgaagaattccgggccaagatcgagcgggcacggagtgacgagggccagctctcccccgccacccggggtgcctaccgtgactgcctgggtcggctggacctgcagtacgccaagctgctgaactcctccaaggcccgcctcaggtccctggagagcttgcacagctttgtggcagccgccactaaggagctaatgtggctgaatgagaaggaggaggaggaggtgggcttcgactggagcgaccgcaacaccaacatgaccgccaagaaggagagctactcggcgctgatgcgggagctggagctgaaggagaagaagatcaaggagctccaaaatgctggggaccggctgctgcgggaggaccacccggcccggcccacggtggagtccttccaggcggccctgcagacgcagtggagctggatgctacagctgtgctgctgtatcgaggcacacctgaaggagaacgctgcctactttcagttcttctcagatgtgcgggaggccgaggggcagttgcagaagctgcaggaggcactgcgtaggaaatacagttgtgatcgctccgccaccgtcacccggctggaggacctgctgcaggatgcccaggacgagaaggaacagctgaacgagtacaagggccacctctcaggcctggccaagcgggccaaggccgtcgtgcagctgaagccccgccacccagcccaccccatgcggggccgcctgcccctgctggccgtgtgcgactataagcaggtggaggtgactgtgcacaagggtgacgagtgccagctggtgggccctgcacagccgtcccactggaaggtgctcagcagctccggcagcgaggccgccgtgccctccgtgtgcttcctggtgcccccgcccaaccaggaggcccaggaggccgtcaccaggctggaggcccagcaccaggccctggtcacgctgtggcaccagttgcacgtggacatgaagagccttctggcctggcagagccttcgccgcgacgtgcagctcatccgctcctggtccctggccacgttccgcaccctgaagccagaggagcagcgccaagccctgcacagcctggagctgcactaccaggccttcctgcgggacagccaggacgcgggcggcttcggacccgaggaccggctgatggctgagcgcgagtacggctcctgcagccaccactaccagcagctgctgcagagcctggaacagggtgcacaggaagagtctcgctgccagcgctgcatctccgagctcaaagacatccggctgcagctggaggcctgtgagacgcgcaccgtgcaccgcctgcggctgccgctggacaaagagccggcacgggagtgtgcccagcgcatcgccgagcagcagaaggcacaggcagaggtggaggggctgggcaagggggtcgcccggctctctgccgaggccgagaaggtcttggccctaccagagccatcgcctgcggcccccacgctgcgctcggagctggagctgacgctgggcaagctggagcaggtccgcagcctgtctgccatctacctggagaagctcaagaccatcagcctggtgatccgcggcacgcagggggccgaggaggtgctcagggcccacgaggagcagctcaaggaggcccaggccgtgccggccaccctcccggagctcgaggccaccaaggcctctctgaagaagctgcgggcccaggccgaggcacagcagcccacgttcgacgccctgcgggatgagctgcggggggcacaggaggtgggggagcgactgcagcagcggcacggggagcgggacgtggaggtggagcgctggcgggagcgggtcgcccagttgcttgagcgctggcaggctgtgctggcccagaccgacgtgcggcagcgcgagctcgagcaactgggccgccagctgcgttactaccgcgagagtgcagaccccttgggcgcctggctgcaggacgccaggcggcggcaggagcagatccaggccatgccgctggccgacagccaggctgtgcgggagcagctgcggcaggagcaggccctgctggaggagatcgagcgccacggcgagaaggtcgaggagtgccagaggtttgcgaaacagtacatcaacgccatcaaggactatgaactccagctggtgacgtacaaggcgcagcttgagccggtggcctccccggccaagaagcccaaggtccagtcgggatcagagagtgtcatccaggagtacgtggacctgcgtacgcactacagcgagctgaccacactgacgagccagtacatcaagttcatcagcgagactctgcggcgcatggaggaggaggagaggctggctgagcagcagcgggcagaggagcgcgagcggctggccgaggtggaggccgcgctggagaagcagcggcagctggccgaggcgcacgcccaggcaaaggcacaggcggagcgggaggcgaaggagctgcagcagcgcatgcaggaggaggtggtgcggcgggaggaggcggcggtggacgcgcagcagcagaagcgcagcattcaggaggagctgcagcagctgcggcagagctcggaggcggagatccaggccaaggcccggcaggcagaggcggctgagcgcagccggctgcgcatcgaggaggagatccgcgtggtgcgcctgcagttggaggccaccgagcgccagcgtggcggggctgagggggagctgcaggcactgcgtgcacgggcggaggaggctgaggcacaaaagcgacaggcgcaggaggaggccgagcgcttgcggaggcaggtgcaggacgagagccagcgtaagcggcaggcggaggtggagctggcctcgcgcgtgaaggccgaggccgaggcggcgcgcgagaagcagcgggccctgcaggccctggaggagctgcggctgcaggcggaggaggcggagcggcgcctgcggcaggccgaggtggagcgagcgcggcaggtacaggtggccctggagacggcgcagcgcagtgcagaggcggagctgcagagcaaacgcgcctccttcgccgagaagacggcacagctggagcgctccctgcaggaggaacacgtggctgtggcacagctgcgggaggaggctgagcggcgggcacagcagcaggccgaggccgagcgggcgcgcgaggaggcagagcgggagctggagcgctggcagctcaaggccaacgaggcgctacggctgcggctgcaggcggaggaggtggcgcagcagaagagcctggcgcaggccgaggctgagaagcagaaggaggaggcggagcgcgaggcgcggcggcgcggcaaggcggaggagcaggccgtccggcagcgggagctggctgaacaagagctggagaagcagcggcagctggcggaaggcaccgcgcagcagcgcctggccgcggagcaggagttgatccggctgcgggccgagacggagcagggggagcagcagcggcagctgctggaggaggagctggcccggctgcagcgtgaggcggctgcagccacgcagaaacggcaggagctggaagccgagctggccaaggtgcgggccgagatggaggtgctgctggccagcaaggcgagggctgaggaggagtcgcgctccaccagcgagaagtccaagcagaggctggaggccgaggccggccggttccgcgagctggccgaggaggccgcccgcctgcgtgccctggcggaagaggccaagcggcagcggcagctggccgaggaagacgcggcgcggcagcgggccgaggcggagcgggtgcttgcggagaagctggccgccatcggcgaggccacgcggctcaagacggaggcggagatcgcgctcaaggagaaggaggcggagaacgagcgcctgcggcggctggcggaggacgaggccttccagcggcggcggctggaggagcaggccgcgcaacacaaggctgacatcgaggagcgcctggcccagctgcgcaaggcatcggacagcgagctggagcggcagaaggggctggtggaggacacgctgaggcagcggcggcaggtggaggaggagatcctggcgctgaaggcgagcttcgagaaggcggccgctggcaaggcggagctggagctggagctgggacgcatccgcagcaacgcggaggacacgctgcgcagcaaggagcaggccgagctggaggctgcgaggcagcggcagctggcggcggaggaggagcggcggcgccgtgaggctgaggagcgcgtgcagaagagcctggcggccgaggaggaggccgcacggcagcggaaggcggcgctggaggaagtcgagcggctgaaagccaaggtggaggaggcgcggcgcctgcgggagcgagcggagcaggagtcggcgcggcagctgcagctggcccaggaggccgcccagaagcggctgcaggcggaagagaaggcacacgccttcgcggtgcagcagaaggagcaggagctacagcagacgctgcagcaggagcagagcgtgctggaccagctgcgcggcgaggcggaggcggcccggcgggcggctgaggaggcggaggaggcccgggtgcaggcggagcgtgaggcggcgcagtcccggcggcaggtggaagaggccgagcggctgaagcagtcggcagaggagcaggcacaggcccgggctcaggcacaggcggctgcagagaagctgcgcaaggaggccgagcaagaggcggcgcggcgggcacaggcggagcaggcggccctgcggcagaagcaggcagctgacgcggagatggagaagcataagaaattcgccgagcagacgctgcggcagaaggcgcaggtggagcaggagctgacaacactgcggctgcagctggaggagaccgaccaccagaagaacctgctggacgaggagctgcagcggctgaaggcggaggccacggaggccgcacgccagcgcagccaggtggaggaggagctcttctcggtgcgcgtgcagatggaggagctgagcaagctcaaggcacgcatcgaggctgagaaccgcgcactcatcttgcgtgacaaggacaatacgcagcgcttcctgcaggaggaggctgagaagatgaagcaggtggcggaggaggccgcgcggctgagtgtggcggcccaagaggctgcgcgactgcggcagctggcagaggaggacctggcacagcagcgggccttggcagagaagatgctcaaggagaagatgcaggcggtgcaggaggccacgcgactcaaggctgaggcggaactgctgcagcagcagaaggagcttgcgcaggagcaggcgcggcggctgcaggaggacaaggagcagatggcgcagcagctggcggaggagacgcagggcttccagcggacgctggaggccgagcggcagcggcagctggagatgagcgctgaggctgagcgcctcaagctgcgtgtggccgagatgagccgagcccaggcccgcgctgaggaggacgcccagcgcttccggaagcaggcggaggagatcggtgagaagctgcaccgcacggagctcgccacccaggagaaggtgaccctggtgcagacactggagatccagcgacagcagagtgaccatgatgccgagcgcctgcgggaggccatcgctgagctggagcgtgagaaggagaagctccaacaggaggccaaactgctgcagctcaagtctgaggagatgcagacggtgcagcaggagcagctgctgcaggagacgcaggccctgcagcaaagcttcctctctgaaaaggacagcctgctacagcgggagcgcttcatcgagcaggagaaggccaagctggagcagctcttccaggacgaggtggccaaggcacagcagctgcgtgaggagcagcagcggcagcagcagcagatggagcaggaacggcagcggctggtggccagcatggaggaggcgcggcggcggcagcatgaggccgaggagggcgtgcggcgcaagcaggaggagctgcagcagctggagcagcagcggcggcagcaggaggagctgctggctgaggagaaccagaggctgcgtgagcagctgcagctcctggaggagcagcaccgggccgcgctggcgcactcagaggaggtcactgcctcgcaggtggctgccacaaagaccctgcccaatggccgggatgcacttgatggccccgcggcagaggcagagccggagcacagcttcgatggcctgcggcggaaggtgtcagctcagaggctgcaggaggccggcatcctgagtgcggaggagctgcagcggttggcgcagggccacaccacggtggacgagctcgcacggcgggaagacgtgcgccactacctgcagggccgcagcagtatcgcagggctgttgctgaaggccaccaatgagaagctgagtgtttacgccgccctgcagaggcagctgctgagtcccggcacggccctcatcctgctggaggcgcaggcggcctcaggcttcctgctggaccctgtgcggaaccggcggctgaccgtcaacgaggctgtgaaggagggtgtggtgggccccgagctgcaccacaagctgctgtcggccgagcgcgccgtcactggctacaaggacccctacactggccagcagatctctctcttccaagccatgcagaagggcctcatcgtccgggagcacggcatccgcctgctggaggcccagatcgccacgggcggcgttatcgaccccgtgcacagccaccgcgtgcccgtggacgtggcctaccggcgcggctacttcgacgaggagatgaaccgcgtcctggcggaccccagcgacgacaccaagggcttctttgaccccaacacgcacgagaacctcacgtacctgcagctactggagcgctgcgtggaggaccccgagacgggcctgtgccttctgccactcacggataaggctgccaagggcggggagctggtctacactgactccgaggcccgggacgtctttgagaaggccaccgtgtctgcgccgttcggcaagttccagggcaagacggtgaccatttgggagatcatcaactcggaatacttcacggcagagcagcggcgggacctgctgcggcagttccgcacgggccggatcacagtggagaagatcatcaagatcatcatcacggtggtggaggagcaggagcagaagggccggctttgctttgagggcctgcgcagcctggtgccagccgccgagctgctggagagcagggtcatcgaccgcgagctctaccagcagctgcagcgaggtgagcgctctgtgcgagacgtagccgaggtggacactgtgcggcgggctctccggggtgccaacgtcatcgcgggtgtatggctggaggaggcggggcagaagctgagtatctacaatgccctgaagaaagacctgctgccatccgacatggccgtggccctgttggaagcccaggccggcaccgggcacatcatcgaccccgccaccagcgcccggctgaccgtggacgaggcagtgcgtgctggcctggtgggccccgagtttcatgagaagctgctatcagccgagaaggctgtgacagggtacagggacccctacacagggcagagcgtctccctgttccaggccctgaagaagggcctcattccccgggagcagggcctgcgcctgttggacgcccagctgtccacgggcggcatcgtggaccccagcaagagccaccgcgtgcccctggatgtcgcctgcgcccgaggctgcctggatgaggagaccagcagggccctgtcggcaccaagggccgacgccaaggcctacagtgaccccagcacaggggagccggccacctacggcgagctccagcagcggtgccggcccgaccagctgaccgggctgagcctgctgccgctctcagaaaaggctgctcgggcccggcaggaggagctctactcagagctgcaggcccgtgagacctttgaaaagaccccggttgaggtccccgtgggtggcttcaagggcaggacggtgacggtgtgggagctcatcagctctgagtacttcactgcggagcagcggcaggagctgttgcgtcagttccgcacgggcaaggtcaccgtggagaaggtcatcaagattctcattaccatcgtggaggaggtggagaccctgcggcaggagaggctgtccttcagcggcctccgtgcccctgtgccagccagcgagctcctggcttccggggtcctcagcagagcccagtttgagcagctcaaggacggcaagacgacggtcaaggacctttcggagctgggctccgtgcggacgctgctgcagggcagtggctgcctcgccggcatctacctggaggacaccaaggagaaggtgtccatctacgaggccatgcgccggggcctgctgagagccacaacggctgcgctcctgctggaggcgcaggcggccactggcttcctggtggaccccgtgcggaaccagcgcctgtatgtccacgaggccgtgaaggcgggcgtggtgggccccgagcttcacgagcagctgctgtctgccgagaaggccgtcaccggctacagagacccctactcgggcagcaccatctccctcttccaggccatgcagaagggcctggttctccggcagcacggcatccgcctgctggaggcccagatcgccacgggcggcatcatcgaccccgtgcacagccaccgcgtgcctgtggacgtggcctaccagcgcggctacttcagtgaggagatgaaccgcgtcctggcggaccccagcgacgacaccaagggcttctttgaccccaacacgcatgagaacctcacgtacaggcagctgctggagcggtgcgtggaggaccccgagacgggcttgcgccttctgccactgaaaggggcggagaaggctgaggtggtggagaccacgcaggtgtacactgaggaggagacaagaagggcatttgaagagacacagatcgacattcccggcggcggcagccacggcggctccaccatgtccctgtgggaggtgatgcagtcggacctgatccccgaggagcagcgggcccagctgatggctgacttccaggccggccgggtgaccaaggaacgcatgatcatcatcatcatcgagatcattgagaagacagagatcatccgccagcagggtctggcctcctacgactacgtgcgccgccgcctcacggctgaggacctgttcgaggctcggatcatctctctcgagacctacaacctgctccgggagggcaccaggagcctccgtgaggctctcgaggcggagtccgcctggtgctacctctatggcacgggctccgtggctggtgtctacctgcccggttccaggcagacactgagcatctaccaggctctcaagaaagggctgctgagtgccgaggtggcccgcctgctgctggaggcacaggcagccacaggcttcctgctggacccggtgaagggggagcggctgactgtggatgaggctgtgcggaagggcctcgtggggcccgagctgcacgaccgcctgctctcggctgagcgggcggtcaccggctaccgtgacccctacaccgagcagaccatctcgctcttccaggccatgaagaaggagctgatccctactgaggaggccctgcggctgctggatgcccagctggccaccggcggcatcgtggacccccgcctgggcttccaccttcccctggaggtggcttaccagcgtggctacctcaacaaggacacgcacgaccagctgtcagagcccagcgaggtgcgcagctacgtggacccgtccaccgacgagcgcctcagctacacgcagctgctcaggcggtgccgtcgtgacgacggcaccggccagctgctcctgccactgtcggacgcccgcaagctgaccttccgtggcctgcggaagcagatcaccatggaggagctggtgcgctcgcaggtcatggacgaggccacggcgctgcagctgcgggagggcctgacctccatcgaggaggtcaccaagaacttgcagaagttcctggaaggcaccagctgcatcgctggtgtcttcgtggacgccaccaaggaacggctctcggtgtaccaggccatgaagaagggcatcatccgccccggcacagcctttgagctcctggaggcgcaggcggccaccggttacgtcatcgaccccatcaagggactgaagctgacggtggaggaggctgtgcgtatgggcattgtgggccccgagttcaaggacaagctgctgtcggccgagcgcgccgtcactgggtacaaggacccctactctgggaagctcatctccctcttccaggccatgaagaagggcctgatcctgaaggaccatggcatccgcctgctggaggcccagatcgccacgggcggcatcatcgaccctgaggagagccaccggctgcccgtggaggtggcctacaagcgcggcctcttcgatgaggagatgaacgagatcctgaccgacccctcggacgacaccaagggcttctttgaccctaacacggaggagaacctcacctacctgcagctgatggagcgttgtatcactgacccccagacgggcctgtgtctcttgccgctgaaggagaagaagcgggagcggaagacgtcctccaagtcctccgtgcgcaagcgccgagtggtcatcgtggaccccgagacgggcaaggagatgtcagtgtacgaggcctaccgcaagggcctgattgaccaccagacgtacctggagctgtccgagcaggagtgcgagtgggaggagatcaccatctcctcctcggacggcgtggtcaagtccatgatcatcgaccgccgctccgggcgccagtacgacatcgatgatgccatcgccaagaacctcatcgaccgctcggcactggaccagtaccgcgccggcacgctctccatcaccgagttcgccgacatgctctcgggcaacgccggtggtttccgctcccgttcctcctcggtgggatcctcctcctcctaccccatcagccccgccgtctccaggacccagctggcctcctggtcagaccccactgaggagacgggccccgtggctggcatcctggacacggagacgctggagaaggtgtccatcaccgaggccatgcaccggaacctggtggataacatcacggggcagcggctgctggaggcgcaggcctgcaccgggggcatcatcgaccccagcaccggtgagcgcttccctgtcaccgacgccgtcaacaagggcctggtggacaagatcatggtggaccgcatcaacctggcccagaaggccttctgcggcttcgaggacccacgcaccaagaccaagatgtcggccgcccaggccctgaagaagggctggctctactacgaggccggccagcgcttcctggaggtgcagtacctgaccggcggcttgatcgagcccgacacgccgggccgcgtgcccctggacgaggccctgcagcgcggcacggtggacgcccgcaccgcacagaagctgcgtgacgtgggcgcctactccaagtacctcacctgccctaagaccaagctcaagatctcctataaggacgcgctggaccgcagcatggtggaggagggcacggggctgcggctgctggaggctgccgcgcagtccaccaagggctactacagcccctacagcgtcagcggctccggctctaccgctggctcccgcaccggctcgcgcaccggctcccgggccggctcccgccgcggcagctttgacgccaccggctccggcttctccatgaccttctcttcatcctcctactcctcctcgggctacggccgccgctacgcctcggggtcctcggcctccctggggggccctgagtctgccgtggcctgaggctgcctgcgcccaccccgctctgcatgcggcccagcccggctcccaccgaggcgcgggggccgttttcaacgcttaaaggtgtcttcctcccaagtggtgcctaaagtttaaccaaaaagaccagactaatatattaatatatatctgctgtccagacagcctgtatcttgggggacagggctggcccagccctgctggccgcctcaccccctcgggtctcctcactcccttctacctgccactcacacagccaggtgccttggagggtcccaagctgggccccagcccaccctcctgtcttcccagggtagcccgcctgccagtcctagctgcacagggcagctgggcccaaccctgtctgtagagggccctggtgtttctagcactggcctgcacggtgggccttgctggggacggggggccccagtcagcctctctcccagtctacccagagaagccccttccccatgggaagacgaggccctcgggcccagcccccacagtgctgtctgatctgtgctttccagctcaccccccacactcactcctgagacccctggcctccggcgtcagcctccagcctctgttcccctagtaagtgccttccatgtcggcctctaaccccaggccccgaggacccagacccagtggggaggcggacgttccagccggcatggctgggaactgcagacctgtcctcctggtgggtccaggggcccctccagcttgtggagccccacactggggtgccgcctgcccgtctctctcccatggagccccagccccctttgggcccagggacaccagccaggctctgtgctgaccctcctgttgcacccagccctggtctcagcagcgaccacccctgcctccaccctctgagctttgcatgttccactaaccccgggcgggtggcaggtggaggtgtcaggctgctggcgcctctgcaagggcagaacactaacctgaccgtgggcggggccttgcggtatccgcccccaataaaagcaattccaacctt

SEQ ID NO: 85 - DNA, 15249 bp, Homo sapiens
gagcccgcgccctcacgctcagcaccccagcctgcctgcccgcccgcctgccctgccgctgcccgctgtcacaccctgtagcgcgggagcttctcgcagcgccccgggccttctcgtggtaccctgcctgctgcctttgcccccgcactgactgcccggctccagcagccatggtggccggcatgctcatgccacgggaccagctgcgggccatctatgaggtgctcttccgcgagggcgtgatggtggccaagaaggaccggcggccccgcagcttgcacccccatgtgcccggcgtcaccaacctgcaggtcatgcgtgccatggcgtccctgcgggcacggggcctggtccgcgagacctttgcctggtgccacttttactggtacctcaccaatgaaggcatcgcccacctccgccagtacctgcacctgccgccagagatcgtgcccgcctctctgcagcgcgtgcgccgccccgtcgccatggtgatgcccgcacgccgcaccccccacgtgcaggctgtgcagggtcccctgggctccccacccaagcgggggccgctgccgacggaggagcagcgggtctaccgtcggaaggagcttgaggaggtgtcacctgagacccctgtggtgcctgctaccacccagcggaccctggccaggccaggcccggagcctgccccagccacagatgagcgggatcgtgtgcagaagaaaaccttcaccaagtgggtcaacaagcacctcatcaaggcccagaggcacatcagtgacctgtatgaagacctccgcgatggccacaacctcatctccctgctggaggtcctctcgggggacagcctgccccgggagaaggggaggatgcgtttccacaagctgcagaatgtccagattgccctggactacctccggcaccgccaggtgaagctggtgaacatcaggaatgatgacatcgctgacggcaaccccaagctgacccttggcctcatctggacaatcattctgcacttccagatctcagatatccaggtgagtgggcagtcggaggacatgacggccaaggagaagctgctgctgtggtcgcagcgaatggtggaggggtaccagggcctgcgatgcgacaacttcacctccagctggagagacggccgcctcttcaatgccatcatccaccggcacaagcccctgctcatcgacatgaacaaggtgtaccggcagaccaacctggagaacctggaccaggccttctctgtggcggagcgggacctgggagtgacgcggctcctggaccctgaggacgtggatgtccctcagcccgacgagaagtccatcatcacctacgtctcgtcgctgtatgacgccatgccccgcgtgccggacgtgcaggatggggtgagggccaacgagctgcagctgcgctggcaggagtaccgggagctggtgctgctgctgcttcagtggatgcgacaccacacggccgcctttgaggaacgcaggttcccctccagcttcgaggagattgagatcctgtggtctcagttcctgaagtttaaggagatggagctaccagccaaggaggccgacaagaacaggtccaagggcatctaccaatccctggagggagcggtgcaagcaggccagctcaaggtgccccctggctaccacccgctggatgtggagaaggagtggggcaagctgcacgtggccatcctggagcgggagaagcagctccgcagcgagtttgagaggctggagtgtcttcagcgcatcgtgaccaagctgcagatggaggcggggctgtgtgaggagcagctgaaccaggccgacgccctgctgcagtcggatgtccggctgctggctgcaggcaaagtgccacagcgggcgggggaggtggaacgggacttggacaaggcggatagcatgatccggctgctcttcaacgacgtgcagaccctcaaggatggacggcacccgcagggcgagcagatgtaccgcagggtgtaccgtctgcacgagcgcctggtagccatccgcaccgagtacaacctacggctgaaggcaggcgtggcggcccctgcaacccaggtggcccaggtgactctgcagagtgtgcagaggcgccccgagctggaggactccactctgcgctacctgcaggacctgctggcctgggtggaggagaaccagcaccgtgtggatggcgctgagtggggtgtggacctgcccagcgtggaggcgcagctgggcagccaccgaggcctgcaccagtccatcgaagaattccgggccaagatcgagcgggcacggagtgacgagggccagctctcccccgccacccggggtgcctaccgtgactgcctgggtcggctggacctgcagtacgccaagctgctgaactcctccaaggcccgcctcaggtccctggagagcttgcacagctttgtggcagccgccactaaggagctaatgtggctgaatgagaaggaggaggaggaggtgggcttcgactggagcgaccgcaacaccaacatgaccgccaagaaggagagctactcggcgctgatgcgggagctggagctgaaggagaagaagatcaaggagctccaaaatgctggggaccggctgctgcgggaggaccacccggcccggcccacggtggagtccttccaggcggccctgcagacgcagtggagctggatgctacagctgtgctgctgtatcgaggcacacctgaaggagaacgctgcctactttcagttcttctcagatgtgcgggaggccgaggggcagttgcagaagctgcaggaggcactgcgtaggaaatacagttgtgatcgctccgccaccgtcacccggctggaggacctgctgcaggatgcccaggacgagaaggaacagctgaacgagtacaagggccacctctcaggcctggccaagcgggccaaggccgtcgtgcagctgaagccccgccacccagcccaccccatgcggggccgcctgcccctgctggccgtgtgcgactataagcaggtggaggtgactgtgcacaagggtgacgagtgccagctggtgggccctgcacagccgtcccactggaaggtgctcagcagctccggcagcgaggccgccgtgccctccgtgtgcttcctggtgcccccgcccaaccaggaggcccaggaggccgtcaccaggctggaggcccagcaccaggccctggtcacgctgtggcaccagttgcacgtggacatgaagagccttctggcctggcagagccttcgccgcgacgtgcagctcatccgctcctggtccctggccacgttccgcaccctgaagccagaggagcagcgccaagccctgcacagcctggagctgcactaccaggccttcctgcgggacagccaggacgcgggcggcttcggacccgaggaccggctgatggctgagcgcgagtacggctcctgcagccaccactaccagcagctgctgcagagcctggaacagggtgcacaggaagagtctcgctgccagcgctgcatctccgagctcaaagacatccggctgcagctggaggcctgtgagacgcgcaccgtgcaccgcctgcggctgccgctggacaaagagccggcacgggagtgtgcccagcgcatcgccgagcagcagaaggcacaggcagaggtggaggggctgggcaagggggtcgcccggctctctgccgaggccgagaaggtcttggccctaccagagccatcgcctgcggcccccacgctgcgctcggagctggagctgacgctgggcaagctggagcaggtccgcagcctgtctgccatctacctggagaagctcaagaccatcagcctggtgatccgcggcacgcagggggccgaggaggtgctcagggcccacgaggagcagctcaaggaggcccaggccgtgccggccaccctcccggagctcgaggccaccaaggcctctctgaagaagctgcgggcccaggccgaggcacagcagcccacgttcgacgccctgcgggatgagctgcggggggcacaggaggtgggggagcgactgcagcagcggcacggggagcgggacgtggaggtggagcgctggcgggagcgggtcgcccagttgcttgagcgctggcaggctgtgctggcccagaccgacgtgcggcagcgcgagctcgagcaactgggccgccagctgcgttactaccgcgagagtgcagaccccttgggcgcctggctgcaggacgccaggcggcggcaggagcagatccaggccatgccgctggccgacagccaggctgtgcgggagcagctgcggcaggagcaggccctgctggaggagatcgagcgccacggcgagaaggtcgaggagtgccagaggtttgcgaaacagtacatcaacgccatcaaggactatgaactccagctggtgacgtacaaggcgcagcttgagccggtggcctccccggccaagaagcccaaggtccagtcgggatcagagagtgtcatccaggagtacgtggacctgcgtacgcactacagcgagctgaccacactgacgagccagtacatcaagttcatcagcgagactctgcggcgcatggaggaggaggagaggctggctgagcagcagcgggcagaggagcgcgagcggctggccgaggtggaggccgcgctggagaagcagcggcagctggccgaggcgcacgcccaggcaaaggcacaggcggagcgggaggcgaaggagctgcagcagcgcatgcaggaggaggtggtgcggcgggaggaggcggcggtggacgcgcagcagcagaagcgcagcattcaggaggagctgcagcagctgcggcagagctcggaggcggagatccaggccaaggcccggcaggcagaggcggctgagcgcagccggctgcgcatcgaggaggagatccgcgtggtgcgcctgcagttggaggccaccgagcgccagcgtggcggggctgagggggagctgcaggcactgcgtgcacgggcggaggaggctgaggcacaaaagcgacaggcgcaggaggaggccgagcgcttgcggaggcaggtgcaggacgagagccagcgtaagcggcaggcggaggtggagctggcctcgcgcgtgaaggccgaggccgaggcggcgcgcgagaagcagcgggccctgcaggccctggaggagctgcggctgcaggcggaggaggcggagcggcgcctgcggcaggccgaggtggagcgagcgcggcaggtacaggtggccctggagacggcgcagcgcagtgcagaggcggagctgcagagcaaacgcgcctccttcgccgagaagacggcacagctggagcgctccctgcaggaggaacacgtggctgtggcacagctgcgggaggaggctgagcggcgggcacagcagcaggccgaggccgagcgggcgcgcgaggaggcagagcgggagctggagcgctggcagctcaaggccaacgaggcgctacggctgcggctgcaggcggaggaggtggcgcagcagaagagcctggcgcaggccgaggctgagaagcagaaggaggaggcggagcgcgaggcgcggcggcgcggcaaggcggaggagcaggccgtccggcagcgggagctggctgaacaagagctggagaagcagcggcagctggcggaaggcaccgcgcagcagcgcctggccgcggagcaggagttgatccggctgcgggccgagacggagcagggggagcagcagcggcagctgctggaggaggagctggcccggctgcagcgtgaggcggctgcagccacgcagaaacggcaggagctggaagccgagctggccaaggtgcgggccgagatggaggtgctgctggccagcaaggcgagggctgaggaggagtcgcgctccaccagcgagaagtccaagcagaggctggaggccgaggccggccggttccgcgagctggccgaggaggccgcccgcctgcgtgccctggcggaagaggccaagcggcagcggcagctggccgaggaagacgcggcgcggcagcgggccgaggcggagcgggtgcttgcggagaagctggccgccatcggcgaggccacgcggctcaagacggaggcggagatcgcgctcaaggagaaggaggcggagaacgagcgcctgcggcggctggcggaggacgaggccttccagcggcggcggctggaggagcaggccgcgcaacacaaggctgacatcgaggagcgcctggcccagctgcgcaaggcatcggacagcgagctggagcggcagaaggggctggtggaggacacgctgaggcagcggcggcaggtggaggaggagatcctggcgctgaaggcgagcttcgagaaggcggccgctggcaaggcggagctggagctggagctgggacgcatccgcagcaacgcggaggacacgctgcgcagcaaggagcaggccgagctggaggctgcgaggcagcggcagctggcggcggaggaggagcggcggcgccgtgaggctgaggagcgcgtgcagaagagcctggcggccgaggaggaggccgcacggcagcggaaggcggcgctggaggaagtcgagcggctgaaagccaaggtggaggaggcgcggcgcctgcgggagcgagcggagcaggagtcggcgcggcagctgcagctggcccaggaggccgcccagaagcggctgcaggcggaagagaaggcacacgccttcgcggtgcagcagaaggagcaggagctacagcagacgctgcagcaggagcagagcgtgctggaccagctgcgcggcgaggcggaggcggcccggcgggcggctgaggaggcggaggaggcccgggtgcaggcggagcgtgaggcggcgcagtcccggcggcaggtggaagaggccgagcggctgaagcagtcggcagaggagcaggcacaggcccgggctcaggcacaggcggctgcagagaagctgcgcaaggaggccgagcaagaggcggcgcggcgggcacaggcggagcaggcggccctgcggcagaagcaggcagctgacgcggagatggagaagcataagaaattcgccgagcagacgctgcggcagaaggcgcaggtggagcaggagctgacaacactgcggctgcagctggaggagaccgaccaccagaagaacctgctggacgaggagctgcagcggctgaaggcggaggccacggaggccgcacgccagcgcagccaggtggaggaggagctcttctcggtgcgcgtgcagatggaggagctgagcaagctcaaggcacgcatcgaggctgagaaccgcgcactcatcttgcgtgacaaggacaatacgcagcgcttcctgcaggaggaggctgagaagatgaagcaggtggcggaggaggccgcgcggctgagtgtggcggcccaagaggctgcgcgactgcggcagctggcagaggaggacctggcacagcagcgggccttggcagagaagatgctcaaggagaagatgcaggcggtgcaggaggccacgcgactcaaggctgaggcggaactgctgcagcagcagaaggagcttgcgcaggagcaggcgcggcggctgcaggaggacaaggagcagatggcgcagcagctggcggaggagacgcagggcttccagcggacgctggaggccgagcggcagcggcagctggagatgagcgctgaggctgagcgcctcaagctgcgtgtggccgagatgagccgagcccaggcccgcgctgaggaggacgcccagcgcttccggaagcaggcggaggagatcggtgagaagctgcaccgcacggagctcgccacccaggagaaggtgaccctggtgcagacactggagatccagcgacagcagagtgaccatgatgccgagcgcctgcgggaggccatcgctgagctggagcgtgagaaggagaagctccaacaggaggccaaactgctgcagctcaagtctgaggagatgcagacggtgcagcaggagcagctgctgcaggagacgcaggccctgcagcaaagcttcctctctgaaaaggacagcctgctacagcgggagcgcttcatcgagcaggagaaggccaagctggagcagctcttccaggacgaggtggccaaggcacagcagctgcgtgaggagcagcagcggcagcagcagcagatggagcaggaacggcagcggctggtggccagcatggaggaggcgcggcggcggcagcatgaggccgaggagggcgtgcggcgcaagcaggaggagctgcagcagctggagcagcagcggcggcagcaggaggagctgctggctgaggagaaccagaggctgcgtgagcagctgcagctcctggaggagcagcaccgggccgcgctggcgcactcagaggaggtcactgcctcgcaggtggctgccacaaagaccctgcccaatggccgggatgcacttgatggccccgcggcagaggcagagccggagcacagcttcgatggcctgcggcggaaggtgtcagctcagaggctgcaggaggccggcatcctgagtgcggaggagctgcagcggttggcgcagggccacaccacggtggacgagctcgcacggcgggaagacgtgcgccactacctgcagggccgcagcagtatcgcagggctgttgctgaaggccaccaatgagaagctgagtgtttacgccgccctgcagaggcagctgctgagtcccggcacggccctcatcctgctggaggcgcaggcggcctcaggcttcctgctggaccctgtgcggaaccggcggctgaccgtcaacgaggctgtgaaggagggtgtggtgggccccgagctgcaccacaagctgctgtcggccgagcgcgccgtcactggctacaaggacccctacactggccagcagatctctctcttccaagccatgcagaagggcctcatcgtccgggagcacggcatccgcctgctggaggcccagatcgccacgggcggcgttatcgaccccgtgcacagccaccgcgtgcccgtggacgtggcctaccggcgcggctacttcgacgaggagatgaaccgcgtcctggcggaccccagcgacgacaccaagggcttctttgaccccaacacgcacgagaacctcacgtacctgcagctactggagcgctgcgtggaggaccccgagacgggcctgtgccttctgccactcacggataaggctgccaagggcggggagctggtctacactgactccgaggcccgggacgtctttgagaaggccaccgtgtctgcgccgttcggcaagttccagggcaagacggtgaccatttgggagatcatcaactcggaatacttcacggcagagcagcggcgggacctgctgcggcagttccgcacgggccggatcacagtggagaagatcatcaagatcatcatcacggtggtggaggagcaggagcagaagggccggctttgctttgagggcctgcgcagcctggtgccagccgccgagctgctggagagcagggtcatcgaccgcgagctctaccagcagctgcagcgaggtgagcgctctgtgcgagacgtagccgaggtggacactgtgcggcgggctctccggggtgccaacgtcatcgcgggtgtatggctggaggaggcggggcagaagctgagtatctacaatgccctgaagaaagacctgctgccatccgacatggccgtggccctgttggaagcccaggccggcaccgggcacatcatcgaccccgccaccagcgcccggctgaccgtggacgaggcagtgcgtgctggcctggtgggccccgagtttcatgagaagctgctatcagccgagaaggctgtgacagggtacagggacccctacacagggcagagcgtctccctgttccaggccctgaagaagggcctcattccccgggagcagggcctgcgcctgttggacgcccagctgtccacgggcggcatcgtggaccccagcaagagccaccgcgtgcccctggatgtcgcctgcgcccgaggctgcctggatgaggagaccagcagggccctgtcggcaccaagggccgacgccaaggcctacagtgaccccagcacaggggagccggccacctacggcgagctccagcagcggtgccggcccgaccagctgaccgggctgagcctgctgccgctctcagaaaaggctgctcgggcccggcaggaggagctctactcagagctgcaggcccgtgagacctttgaaaagaccccggttgaggtccccgtgggtggcttcaagggcaggacggtgacggtgtgggagctcatcagctctgagtacttcactgcggagcagcggcaggagctgttgcgtcagttccgcacgggcaaggtcaccgtggagaaggtcatcaagattctcattaccatcgtggaggaggtggagaccctgcggcaggagaggctgtccttcagcggcctccgtgcccctgtgccagccagcgagctcctggcttccggggtcctcagcagagcccagtttgagcagctcaaggacggcaagacgacggtcaaggacctttcggagctgggctccgtgcggacgctgctgcagggcagtggctgcctcgccggcatctacctggaggacaccaaggagaaggtgtccatctacgaggccatgcgccggggcctgctgagagccacaacggctgcgctcctgctggaggcgcaggcggccactggcttcctggtggaccccgtgcggaaccagcgcctgtatgtccacgaggccgtgaaggcgggcgtggtgggccccgagcttcacgagcagctgctgtctgccgagaaggccgtcaccggctacagagacccctactcgggcagcaccatctccctcttccaggccatgcagaagggcctggttctccggcagcacggcatccgcctgctggaggcccagatcgccacgggcggcatcatcgaccccgtgcacagccaccgcgtgcctgtggacgtggcctaccagcgcggctacttcagtgaggagatgaaccgcgtcctggcggaccccagcgacgacaccaagggcttctttgaccccaacacgcatgagaacctcacgtacaggcagctgctggagcggtgcgtggaggaccccgagacgggcttgcgccttctgccactgaaaggggcggagaaggctgaggtggtggagaccacgcaggtgtacactgaggaggagacaagaagggcatttgaagagacacagatcgacattcccggcggcggcagccacggcggctccaccatgtccctgtgggaggtgatgcagtcggacctgatccccgaggagcagcgggcccagctgatggctgacttccaggccggccgggtgaccaaggaacgcatgatcatcatcatcatcgagatcattgagaagacagagatcatccgccagcagggtctggcctcctacgactacgtgcgccgccgcctcacggctgaggacctgttcgaggctcggatcatctctctcgagacctacaacctgctccgggagggcaccaggagcctccgtgaggctctcgaggcggagtccgcctggtgctacctctatggcacgggctccgtggctggtgtctacctgcccggttccaggcagacactgagcatctaccaggctctcaagaaagggctgctgagtgccgaggtggcccgcctgctgctggaggcacaggcagccacaggcttcctgctggacccggtgaagggggagcggctgactgtggatgaggctgtgcggaagggcctcgtggggcccgagctgcacgaccgcctgctctcggctgagcgggcggtcaccggctaccgtgacccctacaccgagcagaccatctcgctcttccaggccatgaagaaggagctgatccctactgaggaggccctgcggctgctggatgcccagctggccaccggcggcatcgtggacccccgcctgggcttccaccttcccctggaggtggcttaccagcgtggctacctcaacaaggacacgcacgaccagctgtcagagcccagcgaggtgcgcagctacgtggacccgtccaccgacgagcgcctcagctacacgcagctgctcaggcggtgccgtcgtgacgacggcaccggccagctgctcctgccactgtcggacgcccgcaagctgaccttccgtggcctgcggaagcagatcaccatggaggagctggtgcgctcgcaggtcatggacgaggccacggcgctgcagctgcgggagggcctgacctccatcgaggaggtcaccaagaacttgcagaagttcctggaaggcaccagctgcatcgctggtgtcttcgtggacgccaccaaggaacggctctcggtgtaccaggccatgaagaagggcatcatccgccccggcacagcctttgagctcctggaggcgcaggcggccaccggttacgtcatcgaccccatcaagggactgaagctgacggtggaggaggctgtgcgtatgggcattgtgggccccgagttcaaggacaagctgctgtcggccgagcgcgccgtcactgggtacaaggacccctactctgggaagctcatctccctcttccaggccatgaagaagggcctgatcctgaaggaccatggcatccgcctgctggaggcccagatcgccacgggcggcatcatcgaccctgaggagagccaccggctgcccgtggaggtggcctacaagcgcggcctcttcgatgaggagatgaacgagatcctgaccgacccctcggacgacaccaagggcttctttgaccctaacacggaggagaacctcacctacctgcagctgatggagcgttgtatcactgacccccagacgggcctgtgtctcttgccgctgaaggagaagaagcgggagcggaagacgtcctccaagtcctccgtgcgcaagcgccgagtggtcatcgtggaccccgagacgggcaaggagatgtcagtgtacgaggcctaccgcaagggcctgattgaccaccagacgtacctggagctgtccgagcaggagtgcgagtgggaggagatcaccatctcctcctcggacggcgtggtcaagtccatgatcatcgaccgccgctccgggcgccagtacgacatcgatgatgccatcgccaagaacctcatcgaccgctcggcactggaccagtaccgcgccggcacgctctccatcaccgagttcgccgacatgctctcgggcaacgccggtggtttccgctcccgttcctcctcggtgggatcctcctcctcctaccccatcagccccgccgtctccaggacccagctggcctcctggtcagaccccactgaggagacgggccccgtggctggcatcctggacacggagacgctggagaaggtgtccatcaccgaggccatgcaccggaacctggtggataacatcacggggcagcggctgctggaggcgcaggcctgcaccgggggcatcatcgaccccagcaccggtgagcgcttccctgtcaccgacgccgtcaacaagggcctggtggacaagatcatggtggaccgcatcaacctggcccagaaggccttctgcggcttcgaggacccacgcaccaagaccaagatgtcggccgcccaggccctgaagaagggctggctctactacgaggccggccagcgcttcctggaggtgcagtacctgaccggcggcttgatcgagcccgacacgccgggccgcgtgcccctggacgaggccctgcagcgcggcacggtggacgcccgcaccgcacagaagctgcgtgacgtgggcgcctactccaagtacctcacctgccctaagaccaagctcaagatctcctataaggacgcgctggaccgcagcatggtggaggagggcacggggctgcggctgctggaggctgccgcgcagtccaccaagggctactacagcccctacagcgtcagcggctccggctctaccgctggctcccgcaccggctcgcgcaccggctcccgggccggctcccgccgcggcagctttgacgccaccggctccggcttctccatgaccttctcttcatcctcctactcctcctcgggctacggccgccgctacgcctcggggtcctcggcctccctggggggccctgagtctgccgtggcctgaggctgcctgcgcccaccccgctctgcatgcggcccagcccggctcccaccgaggcgcgggggccgttttcaacgcttaaaggtgtcttcctcccaagtggtgcctaaagtttaaccaaaaagaccagactaatatattaatatatatctgctgtccagacagcctgtatcttgggggacagggctggcccagccctgctggccgcctcaccccctcgggtctcctcactcccttctacctgccactcacacagccaggtgccttggagggtcccaagctgggccccagcccaccctcctgtcttcccagggtagcccgcctgccagtcctagctgcacagggcagctgggcccaaccctgtctgtagagggccctggtgtttctagcactggcctgcacggtgggccttgctggggacggggggccccagtcagcctctctcccagtctacccagagaagccccttccccatgggaagacgaggccctcgggcccagcccccacagtgctgtctgatctgtgctttccagctcaccccccacactcactcctgagacccctggcctccggcgtcagcctccagcctctgttcccctagtaagtgccttccatgtcggcctctaaccccaggccccgaggacccagacccagtggggaggcggacgttccagccggcatggctgggaactgcagacctgtcctcctggtgggtccaggggcccctccagcttgtggagccccacactggggtgccgcctgcccgtctctctcccatggagccccagccccctttgggcccagggacaccagccaggctctgtgctgaccctcctgttgcacccagccctggtctcagcagcgaccacccctgcctccaccctctgagctttgcatgttccactaaccccgggcgggtggcaggtggaggtgtcaggctgctggcgcctctgcaagggcagaacactaacctgaccgtgggcggggccttgcggtatccgcccccaataaaagcaattccaacctt

SEQ ID NO: 86 - DNA, 14646 bp, Homo sapiens
cctccgaggggcctgtgacctcccacacccctggcccgctccgtctgccccgtgggctcctgccaccgtccccgatgaagatcgtgcccgatgagcgggatcgtgtgcagaagaaaaccttcaccaagtgggtcaacaagcacctcatcaaggcccagaggcacatcagtgacctgtatgaagacctccgcgatggccacaacctcatctccctgctggaggtcctctcgggggacagcctgccccgggagaaggggaggatgcgtttccacaagctgcagaatgtccagattgccctggactacctccggcaccgccaggtgaagctggtgaacatcaggaatgatgacatcgctgacggcaaccccaagctgacccttggcctcatctggacaatcattctgcacttccagatctcagatatccaggtgagtgggcagtcggaggacatgacggccaaggagaagctgctgctgtggtcgcagcgaatggtggaggggtaccagggcctgcgatgcgacaacttcacctccagctggagagacggccgcctcttcaatgccatcatccaccggcacaagcccctgctcatcgacatgaacaaggtgtaccggcagaccaacctggagaacctggaccaggccttctctgtggcggagcgggacctgggagtgacgcggctcctggaccctgaggacgtggatgtccctcagcccgacgagaagtccatcatcacctacgtctcgtcgctgtatgacgccatgccccgcgtgccggacgtgcaggatggggtgagggccaacgagctgcagctgcgctggcaggagtaccgggagctggtgctgctgctgcttcagtggatgcgacaccacacggccgcctttgaggaacgcaggttcccctccagcttcgaggagattgagatcctgtggtctcagttcctgaagtttaaggagatggagctaccagccaaggaggccgacaagaacaggtccaagggcatctaccaatccctggagggagcggtgcaagcaggccagctcaaggtgccccctggctaccacccgctggatgtggagaaggagtggggcaagctgcacgtggccatcctggagcgggagaagcagctccgcagcgagtttgagaggctggagtgtcttcagcgcatcgtgaccaagctgcagatggaggcggggctgtgtgaggagcagctgaaccaggccgacgccctgctgcagtcggatgtccggctgctggctgcaggcaaagtgccacagcgggcgggggaggtggaacgggacttggacaaggcggatagcatgatccggctgctcttcaacgacgtgcagaccctcaaggatggacggcacccgcagggcgagcagatgtaccgcagggtgtaccgtctgcacgagcgcctggtagccatccgcaccgagtacaacctacggctgaaggcaggcgtggcggcccctgcaacccaggtggcccaggtgactctgcagagtgtgcagaggcgccccgagctggaggactccactctgcgctacctgcaggacctgctggcctgggtggaggagaaccagcaccgtgtggatggcgctgagtggggtgtggacctgcccagcgtggaggcgcagctgggcagccaccgaggcctgcaccagtccatcgaagaattccgggccaagatcgagcgggcacggagtgacgagggccagctctcccccgccacccggggtgcctaccgtgactgcctgggtcggctggacctgcagtacgccaagctgctgaactcctccaaggcccgcctcaggtccctggagagcttgcacagctttgtggcagccgccactaaggagctaatgtggctgaatgagaaggaggaggaggaggtgggcttcgactggagcgaccgcaacaccaacatgaccgccaagaaggagagctactcggcgctgatgcgggagctggagctgaaggagaagaagatcaaggagctccaaaatgctggggaccggctgctgcgggaggaccacccggcccggcccacggtggagtccttccaggcggccctgcagacgcagtggagctggatgctacagctgtgctgctgtatcgaggcacacctgaaggagaacgctgcctactttcagttcttctcagatgtgcgggaggccgaggggcagttgcagaagctgcaggaggcactgcgtaggaaatacagttgtgatcgctccgccaccgtcacccggctggaggacctgctgcaggatgcccaggacgagaaggaacagctgaacgagtacaagggccacctctcaggcctggccaagcgggccaaggccgtcgtgcagctgaagccccgccacccagcccaccccatgcggggccgcctgcccctgctggccgtgtgcgactataagcaggtggaggtgactgtgcacaagggtgacgagtgccagctggtgggccctgcacagccgtcccactggaaggtgctcagcagctccggcagcgaggccgccgtgccctccgtgtgcttcctggtgcccccgcccaaccaggaggcccaggaggccgtcaccaggctggaggcccagcaccaggccctggtcacgctgtggcaccagttgcacgtggacatgaagagccttctggcctggcagagccttcgccgcgacgtgcagctcatccgctcctggtccctggccacgttccgcaccctgaagccagaggagcagcgccaagccctgcacagcctggagctgcactaccaggccttcctgcgggacagccaggacgcgggcggcttcggacccgaggaccggctgatggctgagcgcgagtacggctcctgcagccaccactaccagcagctgctgcagagcctggaacagggtgcacaggaagagtctcgctgccagcgctgcatctccgagctcaaagacatccggctgcagctggaggcctgtgagacgcgcaccgtgcaccgcctgcggctgccgctggacaaagagccggcacgggagtgtgcccagcgcatcgccgagcagcagaaggcacaggcagaggtggaggggctgggcaagggggtcgcccggctctctgccgaggccgagaaggtcttggccctaccagagccatcgcctgcggcccccacgctgcgctcggagctggagctgacgctgggcaagctggagcaggtccgcagcctgtctgccatctacctggagaagctcaagaccatcagcctggtgatccgcggcacgcagggggccgaggaggtgctcagggcccacgaggagcagctcaaggaggcccaggccgtgccggccaccctcccggagctcgaggccaccaaggcctctctgaagaagctgcgggcccaggccgaggcacagcagcccacgttcgacgccctgcgggatgagctgcggggggcacaggaggtgggggagcgactgcagcagcggcacggggagcgggacgtggaggtggagcgctggcgggagcgggtcgcccagttgcttgagcgctggcaggctgtgctggcccagaccgacgtgcggcagcgcgagctcgagcaactgggccgccagctgcgttactaccgcgagagtgcagaccccttgggcgcctggctgcaggacgccaggcggcggcaggagcagatccaggccatgccgctggccgacagccaggctgtgcgggagcagctgcggcaggagcaggccctgctggaggagatcgagcgccacggcgagaaggtcgaggagtgccagaggtttgcgaaacagtacatcaacgccatcaaggactatgaactccagctggtgacgtacaaggcgcagcttgagccggtggcctccccggccaagaagcccaaggtccagtcgggatcagagagtgtcatccaggagtacgtggacctgcgtacgcactacagcgagctgaccacactgacgagccagtacatcaagttcatcagcgagactctgcggcgcatggaggaggaggagaggctggctgagcagcagcgggcagaggagcgcgagcggctggccgaggtggaggccgcgctggagaagcagcggcagctggccgaggcgcacgcccaggcaaaggcacaggcggagcgggaggcgaaggagctgcagcagcgcatgcaggaggaggtggtgcggcgggaggaggcggcggtggacgcgcagcagcagaagcgcagcattcaggaggagctgcagcagctgcggcagagctcggaggcggagatccaggccaaggcccggcaggcagaggcggctgagcgcagccggctgcgcatcgaggaggagatccgcgtggtgcgcctgcagttggaggccaccgagcgccagcgtggcggggctgagggggagctgcaggcactgcgtgcacgggcggaggaggctgaggcacaaaagcgacaggcgcaggaggaggccgagcgcttgcggaggcaggtgcaggacgagagccagcgtaagcggcaggcggaggtggagctggcctcgcgcgtgaaggccgaggccgaggcggcgcgcgagaagcagcgggccctgcaggccctggaggagctgcggctgcaggcggaggaggcggagcggcgcctgcggcaggccgaggtggagcgagcgcggcaggtacaggtggccctggagacggcgcagcgcagtgcagaggcggagctgcagagcaaacgcgcctccttcgccgagaagacggcacagctggagcgctccctgcaggaggaacacgtggctgtggcacagctgcgggaggaggctgagcggcgggcacagcagcaggccgaggccgagcgggcgcgcgaggaggcagagcgggagctggagcgctggcagctcaaggccaacgaggcgctacggctgcggctgcaggcggaggaggtggcgcagcagaagagcctggcgcaggccgaggctgagaagcagaaggaggaggcggagcgcgaggcgcggcggcgcggcaaggcggaggagcaggccgtccggcagcgggagctggctgaacaagagctggagaagcagcggcagctggcggaaggcaccgcgcagcagcgcctggccgcggagcaggagttgatccggctgcgggccgagacggagcagggggagcagcagcggcagctgctggaggaggagctggcccggctgcagcgtgaggcggctgcagccacgcagaaacggcaggagctggaagccgagctggccaaggtgcgggccgagatggaggtgctgctggccagcaaggcgagggctgaggaggagtcgcgctccaccagcgagaagtccaagcagaggctggaggccgaggccggccggttccgcgagctggccgaggaggccgcccgcctgcgtgccctggcggaagaggccaagcggcagcggcagctggccgaggaagacgcggcgcggcagcgggccgaggcggagcgggtgcttgcggagaagctggccgccatcggcgaggccacgcggctcaagacggaggcggagatcgcgctcaaggagaaggaggcggagaacgagcgcctgcggcggctggcggaggacgaggccttccagcggcggcggctggaggagcaggccgcgcaacacaaggctgacatcgaggagcgcctggcccagctgcgcaaggcatcggacagcgagctggagcggcagaaggggctggtggaggacacgctgaggcagcggcggcaggtggaggaggagatcctggcgctgaaggcgagcttcgagaaggcggccgctggcaaggcggagctggagctggagctgggacgcatccgcagcaacgcggaggacacgctgcgcagcaaggagcaggccgagctggaggctgcgaggcagcggcagctggcggcggaggaggagcggcggcgccgtgaggctgaggagcgcgtgcagaagagcctggcggccgaggaggaggccgcacggcagcggaaggcggcgctggaggaagtcgagcggctgaaagccaaggtggaggaggcgcggcgcctgcgggagcgagcggagcaggagtcggcgcggcagctgcagctggcccaggaggccgcccagaagcggctgcaggcggaagagaaggcacacgccttcgcggtgcagcagaaggagcaggagctacagcagacgctgcagcaggagcagagcgtgctggaccagctgcgcggcgaggcggaggcggcccggcgggcggctgaggaggcggaggaggcccgggtgcaggcggagcgtgaggcggcgcagtcccggcggcaggtggaagaggccgagcggctgaagcagtcggcagaggagcaggcacaggcccgggctcaggcacaggcggctgcagagaagctgcgcaaggaggccgagcaagaggcggcgcggcgggcacaggcggagcaggcggccctgcggcagaagcaggcagctgacgcggagatggagaagcataagaaattcgccgagcagacgctgcggcagaaggcgcaggtggagcaggagctgacaacactgcggctgcagctggaggagaccgaccaccagaagaacctgctggacgaggagctgcagcggctgaaggcggaggccacggaggccgcacgccagcgcagccaggtggaggaggagctcttctcggtgcgcgtgcagatggaggagctgagcaagctcaaggcacgcatcgaggctgagaaccgcgcactcatcttgcgtgacaaggacaatacgcagcgcttcctgcaggaggaggctgagaagatgaagcaggtggcggaggaggccgcgcggctgagtgtggcggcccaagaggctgcgcgactgcggcagctggcagaggaggacctggcacagcagcgggccttggcagagaagatgctcaaggagaagatgcaggcggtgcaggaggccacgcgactcaaggctgaggcggaactgctgcagcagcagaaggagcttgcgcaggagcaggcgcggcggctgcaggaggacaaggagcagatggcgcagcagctggcggaggagacgcagggcttccagcggacgctggaggccgagcggcagcggcagctggagatgagcgctgaggctgagcgcctcaagctgcgtgtggccgagatgagccgagcccaggcccgcgctgaggaggacgcccagcgcttccggaagcaggcggaggagatcggtgagaagctgcaccgcacggagctcgccacccaggagaaggtgaccctggtgcagacactggagatccagcgacagcagagtgaccatgatgccgagcgcctgcgggaggccatcgctgagctggagcgtgagaaggagaagctccaacaggaggccaaactgctgcagctcaagtctgaggagatgcagacggtgcagcaggagcagctgctgcaggagacgcaggccctgcagcaaagcttcctctctgaaaaggacagcctgctacagcgggagcgcttcatcgagcaggagaaggccaagctggagcagctcttccaggacgaggtggccaaggcacagcagctgcgtgaggagcagcagcggcagcagcagcagatggagcaggaacggcagcggctggtggccagcatggaggaggcgcggcggcggcagcatgaggccgaggagggcgtgcggcgcaagcaggaggagctgcagcagctggagcagcagcggcggcagcaggaggagctgctggctgaggagaaccagaggctgcgtgagcagctgcagctcctggaggagcagcaccgggccgcgctggcgcactcagaggaggtcactgcctcgcaggtggctgccacaaagaccctgcccaatggccgggatgcacttgatggccccgcggcagaggcagagccggagcacagcttcgatggcctgcggcggaaggtgtcagctcagaggctgcaggaggccggcatcctgagtgcggaggagctgcagcggttggcgcagggccacaccacggtggacgagctcgcacggcgggaagacgtgcgccactacctgcagggccgcagcagtatcgcagggctgttgctgaaggccaccaatgagaagctgagtgtttacgccgccctgcagaggcagctgctgagtcccggcacggccctcatcctgctggaggcgcaggcggcctcaggcttcctgctggaccctgtgcggaaccggcggctgaccgtcaacgaggctgtgaaggagggtgtggtgggccccgagctgcaccacaagctgctgtcggccgagcgcgccgtcactggctacaaggacccctacactggccagcagatctctctcttccaagccatgcagaagggcctcatcgtccgggagcacggcatccgcctgctggaggcccagatcgccacgggcggcgttatcgaccccgtgcacagccaccgcgtgcccgtggacgtggcctaccggcgcggctacttcgacgaggagatgaaccgcgtcctggcggaccccagcgacgacaccaagggcttctttgaccccaacacgcacgagaacctcacgtacctgcagctactggagcgctgcgtggaggaccccgagacgggcctgtgccttctgccactcacggataaggctgccaagggcggggagctggtctacactgactccgaggcccgggacgtctttgagaaggccaccgtgtctgcgccgttcggcaagttccagggcaagacggtgaccatttgggagatcatcaactcggaatacttcacggcagagcagcggcgggacctgctgcggcagttccgcacgggccggatcacagtggagaagatcatcaagatcatcatcacggtggtggaggagcaggagcagaagggccggctttgctttgagggcctgcgcagcctggtgccagccgccgagctgctggagagcagggtcatcgaccgcgagctctaccagcagctgcagcgaggtgagcgctctgtgcgagacgtagccgaggtggacactgtgcggcgggctctccggggtgccaacgtcatcgcgggtgtatggctggaggaggcggggcagaagctgagtatctacaatgccctgaagaaagacctgctgccatccgacatggccgtggccctgttggaagcccaggccggcaccgggcacatcatcgaccccgccaccagcgcccggctgaccgtggacgaggcagtgcgtgctggcctggtgggccccgagtttcatgagaagctgctatcagccgagaaggctgtgacagggtacagggacccctacacagggcagagcgtctccctgttccaggccctgaagaagggcctcattccccgggagcagggcctgcgcctgttggacgcccagctgtccacgggcggcatcgtggaccccagcaagagccaccgcgtgcccctggatgtcgcctgcgcccgaggctgcctggatgaggagaccagcagggccctgtcggcaccaagggccgacgccaaggcctacagtgaccccagcacaggggagccggccacctacggcgagctccagcagcggtgccggcccgaccagctgaccgggctgagcctgctgccgctctcagaaaaggctgctcgggcccggcaggaggagctctactcagagctgcaggcccgtgagacctttgaaaagaccccggttgaggtccccgtgggtggcttcaagggcaggacggtgacggtgtgggagctcatcagctctgagtacttcactgcggagcagcggcaggagctgttgcgtcagttccgcacgggcaaggtcaccgtggagaaggtcatcaagattctcattaccatcgtggaggaggtggagaccctgcggcaggagaggctgtccttcagcggcctccgtgcccctgtgccagccagcgagctcctggcttccggggtcctcagcagagcccagtttgagcagctcaaggacggcaagacgacggtcaaggacctttcggagctgggctccgtgcggacgctgctgcagggcagtggctgcctcgccggcatctacctggaggacaccaaggagaaggtgtccatctacgaggccatgcgccggggcctgctgagagccacaacggctgcgctcctgctggaggcgcaggcggccactggcttcctggtggaccccgtgcggaaccagcgcctgtatgtccacgaggccgtgaaggcgggcgtggtgggccccgagcttcacgagcagctgctgtctgccgagaaggccgtcaccggctacagagacccctactcgggcagcaccatctccctcttccaggccatgcagaagggcctggttctccggcagcacggcatccgcctgctggaggcccagatcgccacgggcggcatcatcgaccccgtgcacagccaccgcgtgcctgtggacgtggcctaccagcgcggctacttcagtgaggagatgaaccgcgtcctggcggaccccagcgacgacaccaagggcttctttgaccccaacacgcatgagaacctcacgtacaggcagctgctggagcggtgcgtggaggaccccgagacgggcttgcgccttctgccactgaaaggggcggagaaggctgaggtggtggagaccacgcaggtgtacactgaggaggagacaagaagggcatttgaagagacacagatcgacattcccggcggcggcagccacggcggctccaccatgtccctgtgggaggtgatgcagtcggacctgatccccgaggagcagcgggcccagctgatggctgacttccaggccggccgggtgaccaaggaacgcatgatcatcatcatcatcgagatcattgagaagacagagatcatccgccagcagggtctggcctcctacgactacgtgcgccgccgcctcacggctgaggacctgttcgaggctcggatcatctctctcgagacctacaacctgctccgggagggcaccaggagcctccgtgaggctctcgaggcggagtccgcctggtgctacctctatggcacgggctccgtggctggtgtctacctgcccggttccaggcagacactgagcatctaccaggctctcaagaaagggctgctgagtgccgaggtggcccgcctgctgctggaggcacaggcagccacaggcttcctgctggacccggtgaagggggagcggctgactgtggatgaggctgtgcggaagggcctcgtggggcccgagctgcacgaccgcctgctctcggctgagcgggcggtcaccggctaccgtgacccctacaccgagcagaccatctcgctcttccaggccatgaagaaggagctgatccctactgaggaggccctgcggctgctggatgcccagctggccaccggcggcatcgtggacccccgcctgggcttccaccttcccctggaggtggcttaccagcgtggctacctcaacaaggacacgcacgaccagctgtcagagcccagcgaggtgcgcagctacgtggacccgtccaccgacgagcgcctcagctacacgcagctgctcaggcggtgccgtcgtgacgacggcaccggccagctgctcctgccactgtcggacgcccgcaagctgaccttccgtggcctgcggaagcagatcaccatggaggagctggtgcgctcgcaggtcatggacgaggccacggcgctgcagctgcgggagggcctgacctccatcgaggaggtcaccaagaacttgcagaagttcctggaaggcaccagctgcatcgctggtgtcttcgtggacgccaccaaggaacggctctcggtgtaccaggccatgaagaagggcatcatccgccccggcacagcctttgagctcctggaggcgcaggcggccaccggttacgtcatcgaccccatcaagggactgaagctgacggtggaggaggctgtgcgtatgggcattgtgggccccgagttcaaggacaagctgctgtcggccgagcgcgccgtcactgggtacaaggacccctactctgggaagctcatctccctcttccaggccatgaagaagggcctgatcctgaaggaccatggcatccgcctgctggaggcccagatcgccacgggcggcatcatcgaccctgaggagagccaccggctgcccgtggaggtggcctacaagcgcggcctcttcgatgaggagatgaacgagatcctgaccgacccctcggacgacaccaagggcttctttgaccctaacacggaggagaacctcacctacctgcagctgatggagcgttgtatcactgacccccagacgggcctgtgtctcttgccgctgaaggagaagaagcgggagcggaagacgtcctccaagtcctccgtgcgcaagcgccgagtggtcatcgtggaccccgagacgggcaaggagatgtcagtgtacgaggcctaccgcaagggcctgattgaccaccagacgtacctggagctgtccgagcaggagtgcgagtgggaggagatcaccatctcctcctcggacggcgtggtcaagtccatgatcatcgaccgccgctccgggcgccagtacgacatcgatgatgccatcgccaagaacctcatcgaccgctcggcactggaccagtaccgcgccggcacgctctccatcaccgagttcgccgacatgctctcgggcaacgccggtggtttccgctcccgttcctcctcggtgggatcctcctcctcctaccccatcagccccgccgtctccaggacccagctggcctcctggtcagaccccactgaggagacgggccccgtggctggcatcctggacacggagacgctggagaaggtgtccatcaccgaggccatgcaccggaacctggtggataacatcacggggcagcggctgctggaggcgcaggcctgcaccgggggcatcatcgaccccagcaccggtgagcgcttccctgtcaccgacgccgtcaacaagggcctggtggacaagatcatggtggaccgcatcaacctggcccagaaggccttctgcggcttcgaggacccacgcaccaagaccaagatgtcggccgcccaggccctgaagaagggctggctctactacgaggccggccagcgcttcctggaggtgcagtacctgaccggcggcttgatcgagcccgacacgccgggccgcgtgcccctggacgaggccctgcagcgcggcacggtggacgcccgcaccgcacagaagctgcgtgacgtgggcgcctactccaagtacctcacctgccctaagaccaagctcaagatctcctataaggacgcgctggaccgcagcatggtggaggagggcacggggctgcggctgctggaggctgccgcgcagtccaccaagggctactacagcccctacagcgtcagcggctccggctctaccgctggctcccgcaccggctcgcgcaccggctcccgggccggctcccgccgcggcagctttgacgccaccggctccggcttctccatgaccttctcttcatcctcctactcctcctcgggctacggccgccgctacgcctcggggtcctcggcctccctggggggccctgagtctgccgtggcctgaggctgcctgcgcccaccccgctctgcatgcggcccagcccggctcccaccgaggcgcgggggccgttttcaacgcttaaaggtgtcttcctcccaagtggtgcctaaagtttaaccaaaaagaccagactaatatattaatatatatctgctgtccagacagcctgtatcttgggggacagggctggcccagccctgctggccgcctcaccccctcgggtctcctcactcccttctacctgccactcacacagccaggtgccttggagggtcccaagctgggccccagcccaccctcctgtcttcccagggtagcccgcctgccagtcctagctgcacagggcagctgggcccaaccctgtctgtagagggccctggtgtttctagcactggcctgcacggtgggccttgctggggacggggggccccagtcagcctctctcccagtctacccagagaagccccttccccatgggaagacgaggccctcgggcccagcccccacagtgctgtctgatctgtgctttccagctcaccccccacactcactcctgagacccctggcctccggcgtcagcctccagcctctgttcccctagtaagtgccttccatgtcggcctctaaccccaggccccgaggacccagacccagtggggaggcggacgttccagccggcatggctgggaactgcagacctgtcctcctggtgggtccaggggcccctccagcttgtggagccccacactggggtgccgcctgcccgtctctctcccatggagccccagccccctttgggcccagggacaccagccaggctctgtgctgaccctcctgttgcacccagccctggtctcagcagcgaccacccctgcctccaccctctgagctttgcatgttccactaaccccgggcgggtggcaggtggaggtgtcaggctgctggcgcctctgcaagggcagaacactaacctgaccgtgggcggggccttgcggtatccgcccccaataaaagcaattccaacctt

SEQ ID NO: 87 - DNA, 14675 bp, Homo sapiens
ggcggctatggagccctcgggcagcctgtttccctccctggtggttgtgggtcacgttgtcaccctggccgctgtgtggcactggcgcaggggacgtcggtgggcgcaggacgagcaagatgagcgggatcgtgtgcagaagaaaaccttcaccaagtgggtcaacaagcacctcatcaaggcccagaggcacatcagtgacctgtatgaagacctccgcgatggccacaacctcatctccctgctggaggtcctctcgggggacagcctgccccgggagaaggggaggatgcgtttccacaagctgcagaatgtccagattgccctggactacctccggcaccgccaggtgaagctggtgaacatcaggaatgatgacatcgctgacggcaaccccaagctgacccttggcctcatctggacaatcattctgcacttccagatctcagatatccaggtgagtgggcagtcggaggacatgacggccaaggagaagctgctgctgtggtcgcagcgaatggtggaggggtaccagggcctgcgatgcgacaacttcacctccagctggagagacggccgcctcttcaatgccatcatccaccggcacaagcccctgctcatcgacatgaacaaggtgtaccggcagaccaacctggagaacctggaccaggccttctctgtggcggagcgggacctgggagtgacgcggctcctggaccctgaggacgtggatgtccctcagcccgacgagaagtccatcatcacctacgtctcgtcgctgtatgacgccatgccccgcgtgccggacgtgcaggatggggtgagggccaacgagctgcagctgcgctggcaggagtaccgggagctggtgctgctgctgcttcagtggatgcgacaccacacggccgcctttgaggaacgcaggttcccctccagcttcgaggagattgagatcctgtggtctcagttcctgaagtttaaggagatggagctaccagccaaggaggccgacaagaacaggtccaagggcatctaccaatccctggagggagcggtgcaagcaggccagctcaaggtgccccctggctaccacccgctggatgtggagaaggagtggggcaagctgcacgtggccatcctggagcgggagaagcagctccgcagcgagtttgagaggctggagtgtcttcagcgcatcgtgaccaagctgcagatggaggcggggctgtgtgaggagcagctgaaccaggccgacgccctgctgcagtcggatgtccggctgctggctgcaggcaaagtgccacagcgggcgggggaggtggaacgggacttggacaaggcggatagcatgatccggctgctcttcaacgacgtgcagaccctcaaggatggacggcacccgcagggcgagcagatgtaccgcagggtgtaccgtctgcacgagcgcctggtagccatccgcaccgagtacaacctacggctgaaggcaggcgtggcggcccctgcaacccaggtggcccaggtgactctgcagagtgtgcagaggcgccccgagctggaggactccactctgcgctacctgcaggacctgctggcctgggtggaggagaaccagcaccgtgtggatggcgctgagtggggtgtggacctgcccagcgtggaggcgcagctgggcagccaccgaggcctgcaccagtccatcgaagaattccgggccaagatcgagcgggcacggagtgacgagggccagctctcccccgccacccggggtgcctaccgtgactgcctgggtcggctggacctgcagtacgccaagctgctgaactcctccaaggcccgcctcaggtccctggagagcttgcacagctttgtggcagccgccactaaggagctaatgtggctgaatgagaaggaggaggaggaggtgggcttcgactggagcgaccgcaacaccaacatgaccgccaagaaggagagctactcggcgctgatgcgggagctggagctgaaggagaagaagatcaaggagctccaaaatgctggggaccggctgctgcgggaggaccacccggcccggcccacggtggagtccttccaggcggccctgcagacgcagtggagctggatgctacagctgtgctgctgtatcgaggcacacctgaaggagaacgctgcctactttcagttcttctcagatgtgcgggaggccgaggggcagttgcagaagctgcaggaggcactgcgtaggaaatacagttgtgatcgctccgccaccgtcacccggctggaggacctgctgcaggatgcccaggacgagaaggaacagctgaacgagtacaagggccacctctcaggcctggccaagcgggccaaggccgtcgtgcagctgaagccccgccacccagcccaccccatgcggggccgcctgcccctgctggccgtgtgcgactataagcaggtggaggtgactgtgcacaagggtgacgagtgccagctggtgggccctgcacagccgtcccactggaaggtgctcagcagctccggcagcgaggccgccgtgccctccgtgtgcttcctggtgcccccgcccaaccaggaggcccaggaggccgtcaccaggctggaggcccagcaccaggccctggtcacgctgtggcaccagttgcacgtggacatgaagagccttctggcctggcagagccttcgccgcgacgtgcagctcatccgctcctggtccctggccacgttccgcaccctgaagccagaggagcagcgccaagccctgcacagcctggagctgcactaccaggccttcctgcgggacagccaggacgcgggcggcttcggacccgaggaccggctgatggctgagcgcgagtacggctcctgcagccaccactaccagcagctgctgcagagcctggaacagggtgcacaggaagagtctcgctgccagcgctgcatctccgagctcaaagacatccggctgcagctggaggcctgtgagacgcgcaccgtgcaccgcctgcggctgccgctggacaaagagccggcacgggagtgtgcccagcgcatcgccgagcagcagaaggcacaggcagaggtggaggggctgggcaagggggtcgcccggctctctgccgaggccgagaaggtcttggccctaccagagccatcgcctgcggcccccacgctgcgctcggagctggagctgacgctgggcaagctggagcaggtccgcagcctgtctgccatctacctggagaagctcaagaccatcagcctggtgatccgcggcacgcagggggccgaggaggtgctcagggcccacgaggagcagctcaaggaggcccaggccgtgccggccaccctcccggagctcgaggccaccaaggcctctctgaagaagctgcgggcccaggccgaggcacagcagcccacgttcgacgccctgcgggatgagctgcggggggcacaggaggtgggggagcgactgcagcagcggcacggggagcgggacgtggaggtggagcgctggcgggagcgggtcgcccagttgcttgagcgctggcaggctgtgctggcccagaccgacgtgcggcagcgcgagctcgagcaactgggccgccagctgcgttactaccgcgagagtgcagaccccttgggcgcctggctgcaggacgccaggcggcggcaggagcagatccaggccatgccgctggccgacagccaggctgtgcgggagcagctgcggcaggagcaggccctgctggaggagatcgagcgccacggcgagaaggtcgaggagtgccagaggtttgcgaaacagtacatcaacgccatcaaggactatgaactccagctggtgacgtacaaggcgcagcttgagccggtggcctccccggccaagaagcccaaggtccagtcgggatcagagagtgtcatccaggagtacgtggacctgcgtacgcactacagcgagctgaccacactgacgagccagtacatcaagttcatcagcgagactctgcggcgcatggaggaggaggagaggctggctgagcagcagcgggcagaggagcgcgagcggctggccgaggtggaggccgcgctggagaagcagcggcagctggccgaggcgcacgcccaggcaaaggcacaggcggagcgggaggcgaaggagctgcagcagcgcatgcaggaggaggtggtgcggcgggaggaggcggcggtggacgcgcagcagcagaagcgcagcattcaggaggagctgcagcagctgcggcagagctcggaggcggagatccaggccaaggcccggcaggcagaggcggctgagcgcagccggctgcgcatcgaggaggagatccgcgtggtgcgcctgcagttggaggccaccgagcgccagcgtggcggggctgagggggagctgcaggcactgcgtgcacgggcggaggaggctgaggcacaaaagcgacaggcgcaggaggaggccgagcgcttgcggaggcaggtgcaggacgagagccagcgtaagcggcaggcggaggtggagctggcctcgcgcgtgaaggccgaggccgaggcggcgcgcgagaagcagcgggccctgcaggccctggaggagctgcggctgcaggcggaggaggcggagcggcgcctgcggcaggccgaggtggagcgagcgcggcaggtacaggtggccctggagacggcgcagcgcagtgcagaggcggagctgcagagcaaacgcgcctccttcgccgagaagacggcacagctggagcgctccctgcaggaggaacacgtggctgtggcacagctgcgggaggaggctgagcggcgggcacagcagcaggccgaggccgagcgggcgcgcgaggaggcagagcgggagctggagcgctggcagctcaaggccaacgaggcgctacggctgcggctgcaggcggaggaggtggcgcagcagaagagcctggcgcaggccgaggctgagaagcagaaggaggaggcggagcgcgaggcgcggcggcgcggcaaggcggaggagcaggccgtccggcagcgggagctggctgaacaagagctggagaagcagcggcagctggcggaaggcaccgcgcagcagcgcctggccgcggagcaggagttgatccggctgcgggccgagacggagcagggggagcagcagcggcagctgctggaggaggagctggcccggctgcagcgtgaggcggctgcagccacgcagaaacggcaggagctggaagccgagctggccaaggtgcgggccgagatggaggtgctgctggccagcaaggcgagggctgaggaggagtcgcgctccaccagcgagaagtccaagcagaggctggaggccgaggccggccggttccgcgagctggccgaggaggccgcccgcctgcgtgccctggcggaagaggccaagcggcagcggcagctggccgaggaagacgcggcgcggcagcgggccgaggcggagcgggtgcttgcggagaagctggccgccatcggcgaggccacgcggctcaagacggaggcggagatcgcgctcaaggagaaggaggcggagaacgagcgcctgcggcggctggcggaggacgaggccttccagcggcggcggctggaggagcaggccgcgcaacacaaggctgacatcgaggagcgcctggcccagctgcgcaaggcatcggacagcgagctggagcggcagaaggggctggtggaggacacgctgaggcagcggcggcaggtggaggaggagatcctggcgctgaaggcgagcttcgagaaggcggccgctggcaaggcggagctggagctggagctgggacgcatccgcagcaacgcggaggacacgctgcgcagcaaggagcaggccgagctggaggctgcgaggcagcggcagctggcggcggaggaggagcggcggcgccgtgaggctgaggagcgcgtgcagaagagcctggcggccgaggaggaggccgcacggcagcggaaggcggcgctggaggaagtcgagcggctgaaagccaaggtggaggaggcgcggcgcctgcgggagcgagcggagcaggagtcggcgcggcagctgcagctggcccaggaggccgcccagaagcggctgcaggcggaagagaaggcacacgccttcgcggtgcagcagaaggagcaggagctacagcagacgctgcagcaggagcagagcgtgctggaccagctgcgcggcgaggcggaggcggcccggcgggcggctgaggaggcggaggaggcccgggtgcaggcggagcgtgaggcggcgcagtcccggcggcaggtggaagaggccgagcggctgaagcagtcggcagaggagcaggcacaggcccgggctcaggcacaggcggctgcagagaagctgcgcaaggaggccgagcaagaggcggcgcggcgggcacaggcggagcaggcggccctgcggcagaagcaggcagctgacgcggagatggagaagcataagaaattcgccgagcagacgctgcggcagaaggcgcaggtggagcaggagctgacaacactgcggctgcagctggaggagaccgaccaccagaagaacctgctggacgaggagctgcagcggctgaaggcggaggccacggaggccgcacgccagcgcagccaggtggaggaggagctcttctcggtgcgcgtgcagatggaggagctgagcaagctcaaggcacgcatcgaggctgagaaccgcgcactcatcttgcgtgacaaggacaatacgcagcgcttcctgcaggaggaggctgagaagatgaagcaggtggcggaggaggccgcgcggctgagtgtggcggcccaagaggctgcgcgactgcggcagctggcagaggaggacctggcacagcagcgggccttggcagagaagatgctcaaggagaagatgcaggcggtgcaggaggccacgcgactcaaggctgaggcggaactgctgcagcagcagaaggagcttgcgcaggagcaggcgcggcggctgcaggaggacaaggagcagatggcgcagcagctggcggaggagacgcagggcttccagcggacgctggaggccgagcggcagcggcagctggagatgagcgctgaggctgagcgcctcaagctgcgtgtggccgagatgagccgagcccaggcccgcgctgaggaggacgcccagcgcttccggaagcaggcggaggagatcggtgagaagctgcaccgcacggagctcgccacccaggagaaggtgaccctggtgcagacactggagatccagcgacagcagagtgaccatgatgccgagcgcctgcgggaggccatcgctgagctggagcgtgagaaggagaagctccaacaggaggccaaactgctgcagctcaagtctgaggagatgcagacggtgcagcaggagcagctgctgcaggagacgcaggccctgcagcaaagcttcctctctgaaaaggacagcctgctacagcgggagcgcttcatcgagcaggagaaggccaagctggagcagctcttccaggacgaggtggccaaggcacagcagctgcgtgaggagcagcagcggcagcagcagcagatggagcaggaacggcagcggctggtggccagcatggaggaggcgcggcggcggcagcatgaggccgaggagggcgtgcggcgcaagcaggaggagctgcagcagctggagcagcagcggcggcagcaggaggagctgctggctgaggagaaccagaggctgcgtgagcagctgcagctcctggaggagcagcaccgggccgcgctggcgcactcagaggaggtcactgcctcgcaggtggctgccacaaagaccctgcccaatggccgggatgcacttgatggccccgcggcagaggcagagccggagcacagcttcgatggcctgcggcggaaggtgtcagctcagaggctgcaggaggccggcatcctgagtgcggaggagctgcagcggttggcgcagggccacaccacggtggacgagctcgcacggcgggaagacgtgcgccactacctgcagggccgcagcagtatcgcagggctgttgctgaaggccaccaatgagaagctgagtgtttacgccgccctgcagaggcagctgctgagtcccggcacggccctcatcctgctggaggcgcaggcggcctcaggcttcctgctggaccctgtgcggaaccggcggctgaccgtcaacgaggctgtgaaggagggtgtggtgggccccgagctgcaccacaagctgctgtcggccgagcgcgccgtcactggctacaaggacccctacactggccagcagatctctctcttccaagccatgcagaagggcctcatcgtccgggagcacggcatccgcctgctggaggcccagatcgccacgggcggcgttatcgaccccgtgcacagccaccgcgtgcccgtggacgtggcctaccggcgcggctacttcgacgaggagatgaaccgcgtcctggcggaccccagcgacgacaccaagggcttctttgaccccaacacgcacgagaacctcacgtacctgcagctactggagcgctgcgtggaggaccccgagacgggcctgtgccttctgccactcacggataaggctgccaagggcggggagctggtctacactgactccgaggcccgggacgtctttgagaaggccaccgtgtctgcgccgttcggcaagttccagggcaagacggtgaccatttgggagatcatcaactcggaatacttcacggcagagcagcggcgggacctgctgcggcagttccgcacgggccggatcacagtggagaagatcatcaagatcatcatcacggtggtggaggagcaggagcagaagggccggctttgctttgagggcctgcgcagcctggtgccagccgccgagctgctggagagcagggtcatcgaccgcgagctctaccagcagctgcagcgaggtgagcgctctgtgcgagacgtagccgaggtggacactgtgcggcgggctctccggggtgccaacgtcatcgcgggtgtatggctggaggaggcggggcagaagctgagtatctacaatgccctgaagaaagacctgctgccatccgacatggccgtggccctgttggaagcccaggccggcaccgggcacatcatcgaccccgccaccagcgcccggctgaccgtggacgaggcagtgcgtgctggcctggtgggccccgagtttcatgagaagctgctatcagccgagaaggctgtgacagggtacagggacccctacacagggcagagcgtctccctgttccaggccctgaagaagggcctcattccccgggagcagggcctgcgcctgttggacgcccagctgtccacgggcggcatcgtggaccccagcaagagccaccgcgtgcccctggatgtcgcctgcgcccgaggctgcctggatgaggagaccagcagggccctgtcggcaccaagggccgacgccaaggcctacagtgaccccagcacaggggagccggccacctacggcgagctccagcagcggtgccggcccgaccagctgaccgggctgagcctgctgccgctctcagaaaaggctgctcgggcccggcaggaggagctctactcagagctgcaggcccgtgagacctttgaaaagaccccggttgaggtccccgtgggtggcttcaagggcaggacggtgacggtgtgggagctcatcagctctgagtacttcactgcggagcagcggcaggagctgttgcgtcagttccgcacgggcaaggtcaccgtggagaaggtcatcaagattctcattaccatcgtggaggaggtggagaccctgcggcaggagaggctgtccttcagcggcctccgtgcccctgtgccagccagcgagctcctggcttccggggtcctcagcagagcccagtttgagcagctcaaggacggcaagacgacggtcaaggacctttcggagctgggctccgtgcggacgctgctgcagggcagtggctgcctcgccggcatctacctggaggacaccaaggagaaggtgtccatctacgaggccatgcgccggggcctgctgagagccacaacggctgcgctcctgctggaggcgcaggcggccactggcttcctggtggaccccgtgcggaaccagcgcctgtatgtccacgaggccgtgaaggcgggcgtggtgggccccgagcttcacgagcagctgctgtctgccgagaaggccgtcaccggctacagagacccctactcgggcagcaccatctccctcttccaggccatgcagaagggcctggttctccggcagcacggcatccgcctgctggaggcccagatcgccacgggcggcatcatcgaccccgtgcacagccaccgcgtgcctgtggacgtggcctaccagcgcggctacttcagtgaggagatgaaccgcgtcctggcggaccccagcgacgacaccaagggcttctttgaccccaacacgcatgagaacctcacgtacaggcagctgctggagcggtgcgtggaggaccccgagacgggcttgcgccttctgccactgaaaggggcggagaaggctgaggtggtggagaccacgcaggtgtacactgaggaggagacaagaagggcatttgaagagacacagatcgacattcccggcggcggcagccacggcggctccaccatgtccctgtgggaggtgatgcagtcggacctgatccccgaggagcagcgggcccagctgatggctgacttccaggccggccgggtgaccaaggaacgcatgatcatcatcatcatcgagatcattgagaagacagagatcatccgccagcagggtctggcctcctacgactacgtgcgccgccgcctcacggctgaggacctgttcgaggctcggatcatctctctcgagacctacaacctgctccgggagggcaccaggagcctccgtgaggctctcgaggcggagtccgcctggtgctacctctatggcacgggctccgtggctggtgtctacctgcccggttccaggcagacactgagcatctaccaggctctcaagaaagggctgctgagtgccgaggtggcccgcctgctgctggaggcacaggcagccacaggcttcctgctggacccggtgaagggggagcggctgactgtggatgaggctgtgcggaagggcctcgtggggcccgagctgcacgaccgcctgctctcggctgagcgggcggtcaccggctaccgtgacccctacaccgagcagaccatctcgctcttccaggccatgaagaaggagctgatccctactgaggaggccctgcggctgctggatgcccagctggccaccggcggcatcgtggacccccgcctgggcttccaccttcccctggaggtggcttaccagcgtggctacctcaacaaggacacgcacgaccagctgtcagagcccagcgaggtgcgcagctacgtggacccgtccaccgacgagcgcctcagctacacgcagctgctcaggcggtgccgtcgtgacgacggcaccggccagctgctcctgccactgtcggacgcccgcaagctgaccttccgtggcctgcggaagcagatcaccatggaggagctggtgcgctcgcaggtcatggacgaggccacggcgctgcagctgcgggagggcctgacctccatcgaggaggtcaccaagaacttgcagaagttcctggaaggcaccagctgcatcgctggtgtcttcgtggacgccaccaaggaacggctctcggtgtaccaggccatgaagaagggcatcatccgccccggcacagcctttgagctcctggaggcgcaggcggccaccggttacgtcatcgaccccatcaagggactgaagctgacggtggaggaggctgtgcgtatgggcattgtgggccccgagttcaaggacaagctgctgtcggccgagcgcgccgtcactgggtacaaggacccctactctgggaagctcatctccctcttccaggccatgaagaagggcctgatcctgaaggaccatggcatccgcctgctggaggcccagatcgccacgggcggcatcatcgaccctgaggagagccaccggctgcccgtggaggtggcctacaagcgcggcctcttcgatgaggagatgaacgagatcctgaccgacccctcggacgacaccaagggcttctttgaccctaacacggaggagaacctcacctacctgcagctgatggagcgttgtatcactgacccccagacgggcctgtgtctcttgccgctgaaggagaagaagcgggagcggaagacgtcctccaagtcctccgtgcgcaagcgccgagtggtcatcgtggaccccgagacgggcaaggagatgtcagtgtacgaggcctaccgcaagggcctgattgaccaccagacgtacctggagctgtccgagcaggagtgcgagtgggaggagatcaccatctcctcctcggacggcgtggtcaagtccatgatcatcgaccgccgctccgggcgccagtacgacatcgatgatgccatcgccaagaacctcatcgaccgctcggcactggaccagtaccgcgccggcacgctctccatcaccgagttcgccgacatgctctcgggcaacgccggtggtttccgctcccgttcctcctcggtgggatcctcctcctcctaccccatcagccccgccgtctccaggacccagctggcctcctggtcagaccccactgaggagacgggccccgtggctggcatcctggacacggagacgctggagaaggtgtccatcaccgaggccatgcaccggaacctggtggataacatcacggggcagcggctgctggaggcgcaggcctgcaccgggggcatcatcgaccccagcaccggtgagcgcttccctgtcaccgacgccgtcaacaagggcctggtggacaagatcatggtggaccgcatcaacctggcccagaaggccttctgcggcttcgaggacccacgcaccaagaccaagatgtcggccgcccaggccctgaagaagggctggctctactacgaggccggccagcgcttcctggaggtgcagtacctgaccggcggcttgatcgagcccgacacgccgggccgcgtgcccctggacgaggccctgcagcgcggcacggtggacgcccgcaccgcacagaagctgcgtgacgtgggcgcctactccaagtacctcacctgccctaagaccaagctcaagatctcctataaggacgcgctggaccgcagcatggtggaggagggcacggggctgcggctgctggaggctgccgcgcagtccaccaagggctactacagcccctacagcgtcagcggctccggctctaccgctggctcccgcaccggctcgcgcaccggctcccgggccggctcccgccgcggcagctttgacgccaccggctccggcttctccatgaccttctcttcatcctcctactcctcctcgggctacggccgccgctacgcctcggggtcctcggcctccctggggggccctgagtctgccgtggcctgaggctgcctgcgcccaccccgctctgcatgcggcccagcccggctcccaccgaggcgcgggggccgttttcaacgcttaaaggtgtcttcctcccaagtggtgcctaaagtttaaccaaaaagaccagactaatatattaatatatatctgctgtccagacagcctgtatcttgggggacagggctggcccagccctgctggccgcctcaccccctcgggtctcctcactcccttctacctgccactcacacagccaggtgccttggagggtcccaagctgggccccagcccaccctcctgtcttcccagggtagcccgcctgccagtcctagctgcacagggcagctgggcccaaccctgtctgtagagggccctggtgtttctagcactggcctgcacggtgggccttgctggggacggggggccccagtcagcctctctcccagtctacccagagaagccccttccccatgggaagacgaggccctcgggcccagcccccacagtgctgtctgatctgtgctttccagctcaccccccacactcactcctgagacccctggcctccggcgtcagcctccagcctctgttcccctagtaagtgccttccatgtcggcctctaaccccaggccccgaggacccagacccagtggggaggcggacgttccagccggcatggctgggaactgcagacctgtcctcctggtgggtccaggggcccctccagcttgtggagccccacactggggtgccgcctgcccgtctctctcccatggagccccagccccctttgggcccagggacaccagccaggctctgtgctgaccctcctgttgcacccagccctggtctcagcagcgaccacccctgcctccaccctctgagctttgcatgttccactaaccccgggcgggtggcaggtggaggtgtcaggctgctggcgcctctgcaagggcagaacactaacctgaccgtgggcggggccttgcggtatccgcccccaataaaagcaattccaacctt

SEQ ID NO: 88 - DNA, 14689 bp, Homo sapiens
gtggccggcatgtcgggggcggggggcgcctttgcctcgccgagggaggtcttgctggagcggccgtgctggctggacgggggctgcgagccggcccgcaggggctacctctaccagcagctgtgctgcgtagatgagcgggatcgtgtgcagaagaaaaccttcaccaagtgggtcaacaagcacctcatcaaggcccagaggcacatcagtgacctgtatgaagacctccgcgatggccacaacctcatctccctgctggaggtcctctcgggggacagcctgccccgggagaaggggaggatgcgtttccacaagctgcagaatgtccagattgccctggactacctccggcaccgccaggtgaagctggtgaacatcaggaatgatgacatcgctgacggcaaccccaagctgacccttggcctcatctggacaatcattctgcacttccagatctcagatatccaggtgagtgggcagtcggaggacatgacggccaaggagaagctgctgctgtggtcgcagcgaatggtggaggggtaccagggcctgcgatgcgacaacttcacctccagctggagagacggccgcctcttcaatgccatcatccaccggcacaagcccctgctcatcgacatgaacaaggtgtaccggcagaccaacctggagaacctggaccaggccttctctgtggcggagcgggacctgggagtgacgcggctcctggaccctgaggacgtggatgtccctcagcccgacgagaagtccatcatcacctacgtctcgtcgctgtatgacgccatgccccgcgtgccggacgtgcaggatggggtgagggccaacgagctgcagctgcgctggcaggagtaccgggagctggtgctgctgctgcttcagtggatgcgacaccacacggccgcctttgaggaacgcaggttcccctccagcttcgaggagattgagatcctgtggtctcagttcctgaagtttaaggagatggagctaccagccaaggaggccgacaagaacaggtccaagggcatctaccaatccctggagggagcggtgcaagcaggccagctcaaggtgccccctggctaccacccgctggatgtggagaaggagtggggcaagctgcacgtggccatcctggagcgggagaagcagctccgcagcgagtttgagaggctggagtgtcttcagcgcatcgtgaccaagctgcagatggaggcggggctgtgtgaggagcagctgaaccaggccgacgccctgctgcagtcggatgtccggctgctggctgcaggcaaagtgccacagcgggcgggggaggtggaacgggacttggacaaggcggatagcatgatccggctgctcttcaacgacgtgcagaccctcaaggatggacggcacccgcagggcgagcagatgtaccgcagggtgtaccgtctgcacgagcgcctggtagccatccgcaccgagtacaacctacggctgaaggcaggcgtggcggcccctgcaacccaggtggcccaggtgactctgcagagtgtgcagaggcgccccgagctggaggactccactctgcgctacctgcaggacctgctggcctgggtggaggagaaccagcaccgtgtggatggcgctgagtggggtgtggacctgcccagcgtggaggcgcagctgggcagccaccgaggcctgcaccagtccatcgaagaattccgggccaagatcgagcgggcacggagtgacgagggccagctctcccccgccacccggggtgcctaccgtgactgcctgggtcggctggacctgcagtacgccaagctgctgaactcctccaaggcccgcctcaggtccctggagagcttgcacagctttgtggcagccgccactaaggagctaatgtggctgaatgagaaggaggaggaggaggtgggcttcgactggagcgaccgcaacaccaacatgaccgccaagaaggagagctactcggcgctgatgcgggagctggagctgaaggagaagaagatcaaggagctccaaaatgctggggaccggctgctgcgggaggaccacccggcccggcccacggtggagtccttccaggcggccctgcagacgcagtggagctggatgctacagctgtgctgctgtatcgaggcacacctgaaggagaacgctgcctactttcagttcttctcagatgtgcgggaggccgaggggcagttgcagaagctgcaggaggcactgcgtaggaaatacagttgtgatcgctccgccaccgtcacccggctggaggacctgctgcaggatgcccaggacgagaaggaacagctgaacgagtacaagggccacctctcaggcctggccaagcgggccaaggccgtcgtgcagctgaagccccgccacccagcccaccccatgcggggccgcctgcccctgctggccgtgtgcgactataagcaggtggaggtgactgtgcacaagggtgacgagtgccagctggtgggccctgcacagccgtcccactggaaggtgctcagcagctccggcagcgaggccgccgtgccctccgtgtgcttcctggtgcccccgcccaaccaggaggcccaggaggccgtcaccaggctggaggcccagcaccaggccctggtcacgctgtggcaccagttgcacgtggacatgaagagccttctggcctggcagagccttcgccgcgacgtgcagctcatccgctcctggtccctggccacgttccgcaccctgaagccagaggagcagcgccaagccctgcacagcctggagctgcactaccaggccttcctgcgggacagccaggacgcgggcggcttcggacccgaggaccggctgatggctgagcgcgagtacggctcctgcagccaccactaccagcagctgctgcagagcctggaacagggtgcacaggaagagtctcgctgccagcgctgcatctccgagctcaaagacatccggctgcagctggaggcctgtgagacgcgcaccgtgcaccgcctgcggctgccgctggacaaagagccggcacgggagtgtgcccagcgcatcgccgagcagcagaaggcacaggcagaggtggaggggctgggcaagggggtcgcccggctctctgccgaggccgagaaggtcttggccctaccagagccatcgcctgcggcccccacgctgcgctcggagctggagctgacgctgggcaagctggagcaggtccgcagcctgtctgccatctacctggagaagctcaagaccatcagcctggtgatccgcggcacgcagggggccgaggaggtgctcagggcccacgaggagcagctcaaggaggcccaggccgtgccggccaccctcccggagctcgaggccaccaaggcctctctgaagaagctgcgggcccaggccgaggcacagcagcccacgttcgacgccctgcgggatgagctgcggggggcacaggaggtgggggagcgactgcagcagcggcacggggagcgggacgtggaggtggagcgctggcgggagcgggtcgcccagttgcttgagcgctggcaggctgtgctggcccagaccgacgtgcggcagcgcgagctcgagcaactgggccgccagctgcgttactaccgcgagagtgcagaccccttgggcgcctggctgcaggacgccaggcggcggcaggagcagatccaggccatgccgctggccgacagccaggctgtgcgggagcagctgcggcaggagcaggccctgctggaggagatcgagcgccacggcgagaaggtcgaggagtgccagaggtttgcgaaacagtacatcaacgccatcaaggactatgaactccagctggtgacgtacaaggcgcagcttgagccggtggcctccccggccaagaagcccaaggtccagtcgggatcagagagtgtcatccaggagtacgtggacctgcgtacgcactacagcgagctgaccacactgacgagccagtacatcaagttcatcagcgagactctgcggcgcatggaggaggaggagaggctggctgagcagcagcgggcagaggagcgcgagcggctggccgaggtggaggccgcgctggagaagcagcggcagctggccgaggcgcacgcccaggcaaaggcacaggcggagcgggaggcgaaggagctgcagcagcgcatgcaggaggaggtggtgcggcgggaggaggcggcggtggacgcgcagcagcagaagcgcagcattcaggaggagctgcagcagctgcggcagagctcggaggcggagatccaggccaaggcccggcaggcagaggcggctgagcgcagccggctgcgcatcgaggaggagatccgcgtggtgcgcctgcagttggaggccaccgagcgccagcgtggcggggctgagggggagctgcaggcactgcgtgcacgggcggaggaggctgaggcacaaaagcgacaggcgcaggaggaggccgagcgcttgcggaggcaggtgcaggacgagagccagcgtaagcggcaggcggaggtggagctggcctcgcgcgtgaaggccgaggccgaggcggcgcgcgagaagcagcgggccctgcaggccctggaggagctgcggctgcaggcggaggaggcggagcggcgcctgcggcaggccgaggtggagcgagcgcggcaggtacaggtggccctggagacggcgcagcgcagtgcagaggcggagctgcagagcaaacgcgcctccttcgccgagaagacggcacagctggagcgctccctgcaggaggaacacgtggctgtggcacagctgcgggaggaggctgagcggcgggcacagcagcaggccgaggccgagcgggcgcgcgaggaggcagagcgggagctggagcgctggcagctcaaggccaacgaggcgctacggctgcggctgcaggcggaggaggtggcgcagcagaagagcctggcgcaggccgaggctgagaagcagaaggaggaggcggagcgcgaggcgcggcggcgcggcaaggcggaggagcaggccgtccggcagcgggagctggctgaacaagagctggagaagcagcggcagctggcggaaggcaccgcgcagcagcgcctggccgcggagcaggagttgatccggctgcgggccgagacggagcagggggagcagcagcggcagctgctggaggaggagctggcccggctgcagcgtgaggcggctgcagccacgcagaaacggcaggagctggaagccgagctggccaaggtgcgggccgagatggaggtgctgctggccagcaaggcgagggctgaggaggagtcgcgctccaccagcgagaagtccaagcagaggctggaggccgaggccggccggttccgcgagctggccgaggaggccgcccgcctgcgtgccctggcggaagaggccaagcggcagcggcagctggccgaggaagacgcggcgcggcagcgggccgaggcggagcgggtgcttgcggagaagctggccgccatcggcgaggccacgcggctcaagacggaggcggagatcgcgctcaaggagaaggaggcggagaacgagcgcctgcggcggctggcggaggacgaggccttccagcggcggcggctggaggagcaggccgcgcaacacaaggctgacatcgaggagcgcctggcccagctgcgcaaggcatcggacagcgagctggagcggcagaaggggctggtggaggacacgctgaggcagcggcggcaggtggaggaggagatcctggcgctgaaggcgagcttcgagaaggcggccgctggcaaggcggagctggagctggagctgggacgcatccgcagcaacgcggaggacacgctgcgcagcaaggagcaggccgagctggaggctgcgaggcagcggcagctggcggcggaggaggagcggcggcgccgtgaggctgaggagcgcgtgcagaagagcctggcggccgaggaggaggccgcacggcagcggaaggcggcgctggaggaagtcgagcggctgaaagccaaggtggaggaggcgcggcgcctgcgggagcgagcggagcaggagtcggcgcggcagctgcagctggcccaggaggccgcccagaagcggctgcaggcggaagagaaggcacacgccttcgcggtgcagcagaaggagcaggagctacagcagacgctgcagcaggagcagagcgtgctggaccagctgcgcggcgaggcggaggcggcccggcgggcggctgaggaggcggaggaggcccgggtgcaggcggagcgtgaggcggcgcagtcccggcggcaggtggaagaggccgagcggctgaagcagtcggcagaggagcaggcacaggcccgggctcaggcacaggcggctgcagagaagctgcgcaaggaggccgagcaagaggcggcgcggcgggcacaggcggagcaggcggccctgcggcagaagcaggcagctgacgcggagatggagaagcataagaaattcgccgagcagacgctgcggcagaaggcgcaggtggagcaggagctgacaacactgcggctgcagctggaggagaccgaccaccagaagaacctgctggacgaggagctgcagcggctgaaggcggaggccacggaggccgcacgccagcgcagccaggtggaggaggagctcttctcggtgcgcgtgcagatggaggagctgagcaagctcaaggcacgcatcgaggctgagaaccgcgcactcatcttgcgtgacaaggacaatacgcagcgcttcctgcaggaggaggctgagaagatgaagcaggtggcggaggaggccgcgcggctgagtgtggcggcccaagaggctgcgcgactgcggcagctggcagaggaggacctggcacagcagcgggccttggcagagaagatgctcaaggagaagatgcaggcggtgcaggaggccacgcgactcaaggctgaggcggaactgctgcagcagcagaaggagcttgcgcaggagcaggcgcggcggctgcaggaggacaaggagcagatggcgcagcagctggcggaggagacgcagggcttccagcggacgctggaggccgagcggcagcggcagctggagatgagcgctgaggctgagcgcctcaagctgcgtgtggccgagatgagccgagcccaggcccgcgctgaggaggacgcccagcgcttccggaagcaggcggaggagatcggtgagaagctgcaccgcacggagctcgccacccaggagaaggtgaccctggtgcagacactggagatccagcgacagcagagtgaccatgatgccgagcgcctgcgggaggccatcgctgagctggagcgtgagaaggagaagctccaacaggaggccaaactgctgcagctcaagtctgaggagatgcagacggtgcagcaggagcagctgctgcaggagacgcaggccctgcagcaaagcttcctctctgaaaaggacagcctgctacagcgggagcgcttcatcgagcaggagaaggccaagctggagcagctcttccaggacgaggtggccaaggcacagcagctgcgtgaggagcagcagcggcagcagcagcagatggagcaggaacggcagcggctggtggccagcatggaggaggcgcggcggcggcagcatgaggccgaggagggcgtgcggcgcaagcaggaggagctgcagcagctggagcagcagcggcggcagcaggaggagctgctggctgaggagaaccagaggctgcgtgagcagctgcagctcctggaggagcagcaccgggccgcgctggcgcactcagaggaggtcactgcctcgcaggtggctgccacaaagaccctgcccaatggccgggatgcacttgatggccccgcggcagaggcagagccggagcacagcttcgatggcctgcggcggaaggtgtcagctcagaggctgcaggaggccggcatcctgagtgcggaggagctgcagcggttggcgcagggccacaccacggtggacgagctcgcacggcgggaagacgtgcgccactacctgcagggccgcagcagtatcgcagggctgttgctgaaggccaccaatgagaagctgagtgtttacgccgccctgcagaggcagctgctgagtcccggcacggccctcatcctgctggaggcgcaggcggcctcaggcttcctgctggaccctgtgcggaaccggcggctgaccgtcaacgaggctgtgaaggagggtgtggtgggccccgagctgcaccacaagctgctgtcggccgagcgcgccgtcactggctacaaggacccctacactggccagcagatctctctcttccaagccatgcagaagggcctcatcgtccgggagcacggcatccgcctgctggaggcccagatcgccacgggcggcgttatcgaccccgtgcacagccaccgcgtgcccgtggacgtggcctaccggcgcggctacttcgacgaggagatgaaccgcgtcctggcggaccccagcgacgacaccaagggcttctttgaccccaacacgcacgagaacctcacgtacctgcagctactggagcgctgcgtggaggaccccgagacgggcctgtgccttctgccactcacggataaggctgccaagggcggggagctggtctacactgactccgaggcccgggacgtctttgagaaggccaccgtgtctgcgccgttcggcaagttccagggcaagacggtgaccatttgggagatcatcaactcggaatacttcacggcagagcagcggcgggacctgctgcggcagttccgcacgggccggatcacagtggagaagatcatcaagatcatcatcacggtggtggaggagcaggagcagaagggccggctttgctttgagggcctgcgcagcctggtgccagccgccgagctgctggagagcagggtcatcgaccgcgagctctaccagcagctgcagcgaggtgagcgctctgtgcgagacgtagccgaggtggacactgtgcggcgggctctccggggtgccaacgtcatcgcgggtgtatggctggaggaggcggggcagaagctgagtatctacaatgccctgaagaaagacctgctgccatccgacatggccgtggccctgttggaagcccaggccggcaccgggcacatcatcgaccccgccaccagcgcccggctgaccgtggacgaggcagtgcgtgctggcctggtgggccccgagtttcatgagaagctgctatcagccgagaaggctgtgacagggtacagggacccctacacagggcagagcgtctccctgttccaggccctgaagaagggcctcattccccgggagcagggcctgcgcctgttggacgcccagctgtccacgggcggcatcgtggaccccagcaagagccaccgcgtgcccctggatgtcgcctgcgcccgaggctgcctggatgaggagaccagcagggccctgtcggcaccaagggccgacgccaaggcctacagtgaccccagcacaggggagccggccacctacggcgagctccagcagcggtgccggcccgaccagctgaccgggctgagcctgctgccgctctcagaaaaggctgctcgggcccggcaggaggagctctactcagagctgcaggcccgtgagacctttgaaaagaccccggttgaggtccccgtgggtggcttcaagggcaggacggtgacggtgtgggagctcatcagctctgagtacttcactgcggagcagcggcaggagctgttgcgtcagttccgcacgggcaaggtcaccgtggagaaggtcatcaagattctcattaccatcgtggaggaggtggagaccctgcggcaggagaggctgtccttcagcggcctccgtgcccctgtgccagccagcgagctcctggcttccggggtcctcagcagagcccagtttgagcagctcaaggacggcaagacgacggtcaaggacctttcggagctgggctccgtgcggacgctgctgcagggcagtggctgcctcgccggcatctacctggaggacaccaaggagaaggtgtccatctacgaggccatgcgccggggcctgctgagagccacaacggctgcgctcctgctggaggcgcaggcggccactggcttcctggtggaccccgtgcggaaccagcgcctgtatgtccacgaggccgtgaaggcgggcgtggtgggccccgagcttcacgagcagctgctgtctgccgagaaggccgtcaccggctacagagacccctactcgggcagcaccatctccctcttccaggccatgcagaagggcctggttctccggcagcacggcatccgcctgctggaggcccagatcgccacgggcggcatcatcgaccccgtgcacagccaccgcgtgcctgtggacgtggcctaccagcgcggctacttcagtgaggagatgaaccgcgtcctggcggaccccagcgacgacaccaagggcttctttgaccccaacacgcatgagaacctcacgtacaggcagctgctggagcggtgcgtggaggaccccgagacgggcttgcgccttctgccactgaaaggggcggagaaggctgaggtggtggagaccacgcaggtgtacactgaggaggagacaagaagggcatttgaagagacacagatcgacattcccggcggcggcagccacggcggctccaccatgtccctgtgggaggtgatgcagtcggacctgatccccgaggagcagcgggcccagctgatggctgacttccaggccggccgggtgaccaaggaacgcatgatcatcatcatcatcgagatcattgagaagacagagatcatccgccagcagggtctggcctcctacgactacgtgcgccgccgcctcacggctgaggacctgttcgaggctcggatcatctctctcgagacctacaacctgctccgggagggcaccaggagcctccgtgaggctctcgaggcggagtccgcctggtgctacctctatggcacgggctccgtggctggtgtctacctgcccggttccaggcagacactgagcatctaccaggctctcaagaaagggctgctgagtgccgaggtggcccgcctgctgctggaggcacaggcagccacaggcttcctgctggacccggtgaagggggagcggctgactgtggatgaggctgtgcggaagggcctcgtggggcccgagctgcacgaccgcctgctctcggctgagcgggcggtcaccggctaccgtgacccctacaccgagcagaccatctcgctcttccaggccatgaagaaggagctgatccctactgaggaggccctgcggctgctggatgcccagctggccaccggcggcatcgtggacccccgcctgggcttccaccttcccctggaggtggcttaccagcgtggctacctcaacaaggacacgcacgaccagctgtcagagcccagcgaggtgcgcagctacgtggacccgtccaccgacgagcgcctcagctacacgcagctgctcaggcggtgccgtcgtgacgacggcaccggccagctgctcctgccactgtcggacgcccgcaagctgaccttccgtggcctgcggaagcagatcaccatggaggagctggtgcgctcgcaggtcatggacgaggccacggcgctgcagctgcgggagggcctgacctccatcgaggaggtcaccaagaacttgcagaagttcctggaaggcaccagctgcatcgctggtgtcttcgtggacgccaccaaggaacggctctcggtgtaccaggccatgaagaagggcatcatccgccccggcacagcctttgagctcctggaggcgcaggcggccaccggttacgtcatcgaccccatcaagggactgaagctgacggtggaggaggctgtgcgtatgggcattgtgggccccgagttcaaggacaagctgctgtcggccgagcgcgccgtcactgggtacaaggacccctactctgggaagctcatctccctcttccaggccatgaagaagggcctgatcctgaaggaccatggcatccgcctgctggaggcccagatcgccacgggcggcatcatcgaccctgaggagagccaccggctgcccgtggaggtggcctacaagcgcggcctcttcgatgaggagatgaacgagatcctgaccgacccctcggacgacaccaagggcttctttgaccctaacacggaggagaacctcacctacctgcagctgatggagcgttgtatcactgacccccagacgggcctgtgtctcttgccgctgaaggagaagaagcgggagcggaagacgtcctccaagtcctccgtgcgcaagcgccgagtggtcatcgtggaccccgagacgggcaaggagatgtcagtgtacgaggcctaccgcaagggcctgattgaccaccagacgtacctggagctgtccgagcaggagtgcgagtgggaggagatcaccatctcctcctcggacggcgtggtcaagtccatgatcatcgaccgccgctccgggcgccagtacgacatcgatgatgccatcgccaagaacctcatcgaccgctcggcactggaccagtaccgcgccggcacgctctccatcaccgagttcgccgacatgctctcgggcaacgccggtggtttccgctcccgttcctcctcggtgggatcctcctcctcctaccccatcagccccgccgtctccaggacccagctggcctcctggtcagaccccactgaggagacgggccccgtggctggcatcctggacacggagacgctggagaaggtgtccatcaccgaggccatgcaccggaacctggtggataacatcacggggcagcggctgctggaggcgcaggcctgcaccgggggcatcatcgaccccagcaccggtgagcgcttccctgtcaccgacgccgtcaacaagggcctggtggacaagatcatggtggaccgcatcaacctggcccagaaggccttctgcggcttcgaggacccacgcaccaagaccaagatgtcggccgcccaggccctgaagaagggctggctctactacgaggccggccagcgcttcctggaggtgcagtacctgaccggcggcttgatcgagcccgacacgccgggccgcgtgcccctggacgaggccctgcagcgcggcacggtggacgcccgcaccgcacagaagctgcgtgacgtgggcgcctactccaagtacctcacctgccctaagaccaagctcaagatctcctataaggacgcgctggaccgcagcatggtggaggagggcacggggctgcggctgctggaggctgccgcgcagtccaccaagggctactacagcccctacagcgtcagcggctccggctctaccgctggctcccgcaccggctcgcgcaccggctcccgggccggctcccgccgcggcagctttgacgccaccggctccggcttctccatgaccttctcttcatcctcctactcctcctcgggctacggccgccgctacgcctcggggtcctcggcctccctggggggccctgagtctgccgtggcctgaggctgcctgcgcccaccccgctctgcatgcggcccagcccggctcccaccgaggcgcgggggccgttttcaacgcttaaaggtgtcttcctcccaagtggtgcctaaagtttaaccaaaaagaccagactaatatattaatatatatctgctgtccagacagcctgtatcttgggggacagggctggcccagccctgctggccgcctcaccccctcgggtctcctcactcccttctacctgccactcacacagccaggtgccttggagggtcccaagctgggccccagcccaccctcctgtcttcccagggtagcccgcctgccagtcctagctgcacagggcagctgggcccaaccctgtctgtagagggccctggtgtttctagcactggcctgcacggtgggccttgctggggacggggggccccagtcagcctctctcccagtctacccagagaagccccttccccatgggaagacgaggccctcgggcccagcccccacagtgctgtctgatctgtgctttccagctcaccccccacactcactcctgagacccctggcctccggcgtcagcctccagcctctgttcccctagtaagtgccttccatgtcggcctctaaccccaggccccgaggacccagacccagtggggaggcggacgttccagccggcatggctgggaactgcagacctgtcctcctggtgggtccaggggcccctccagcttgtggagccccacactggggtgccgcctgcccgtctctctcccatggagccccagccccctttgggcccagggacaccagccaggctctgtgctgaccctcctgttgcacccagccctggtctcagcagcgaccacccctgcctccaccctctgagctttgcatgttccactaaccccgggcgggtggcaggtggaggtgtcaggctgctggcgcctctgcaagggcagaacactaacctgaccgtgggcggggccttgcggtatccgcccccaataaaagcaattccaacctt

SEQ ID NO: 89 - DNA, 14797 bp, Homo sapiens
tgagctgagcctgtgccgagtgagcgtctcgtggggccgccagccttcagctgcctgtgtgccacacggggctgcccagagcaccgtgcctgaggccgagggtccgggcgacgaaggtgtgggggcagcatgtctcagcaccagctccgcgtgccgcagcccgagggcctgggccgaaagagaaccagctcggaggacaacctgtacctggctgtgctcagggcctctgagggcaagaaagatgagcgggatcgtgtgcagaagaaaaccttcaccaagtgggtcaacaagcacctcatcaaggcccagaggcacatcagtgacctgtatgaagacctccgcgatggccacaacctcatctccctgctggaggtcctctcgggggacagcctgccccgggagaaggggaggatgcgtttccacaagctgcagaatgtccagattgccctggactacctccggcaccgccaggtgaagctggtgaacatcaggaatgatgacatcgctgacggcaaccccaagctgacccttggcctcatctggacaatcattctgcacttccagatctcagatatccaggtgagtgggcagtcggaggacatgacggccaaggagaagctgctgctgtggtcgcagcgaatggtggaggggtaccagggcctgcgatgcgacaacttcacctccagctggagagacggccgcctcttcaatgccatcatccaccggcacaagcccctgctcatcgacatgaacaaggtgtaccggcagaccaacctggagaacctggaccaggccttctctgtggcggagcgggacctgggagtgacgcggctcctggaccctgaggacgtggatgtccctcagcccgacgagaagtccatcatcacctacgtctcgtcgctgtatgacgccatgccccgcgtgccggacgtgcaggatggggtgagggccaacgagctgcagctgcgctggcaggagtaccgggagctggtgctgctgctgcttcagtggatgcgacaccacacggccgcctttgaggaacgcaggttcccctccagcttcgaggagattgagatcctgtggtctcagttcctgaagtttaaggagatggagctaccagccaaggaggccgacaagaacaggtccaagggcatctaccaatccctggagggagcggtgcaagcaggccagctcaaggtgccccctggctaccacccgctggatgtggagaaggagtggggcaagctgcacgtggccatcctggagcgggagaagcagctccgcagcgagtttgagaggctggagtgtcttcagcgcatcgtgaccaagctgcagatggaggcggggctgtgtgaggagcagctgaaccaggccgacgccctgctgcagtcggatgtccggctgctggctgcaggcaaagtgccacagcgggcgggggaggtggaacgggacttggacaaggcggatagcatgatccggctgctcttcaacgacgtgcagaccctcaaggatggacggcacccgcagggcgagcagatgtaccgcagggtgtaccgtctgcacgagcgcctggtagccatccgcaccgagtacaacctacggctgaaggcaggcgtggcggcccctgcaacccaggtggcccaggtgactctgcagagtgtgcagaggcgccccgagctggaggactccactctgcgctacctgcaggacctgctggcctgggtggaggagaaccagcaccgtgtggatggcgctgagtggggtgtggacctgcccagcgtggaggcgcagctgggcagccaccgaggcctgcaccagtccatcgaagaattccgggccaagatcgagcgggcacggagtgacgagggccagctctcccccgccacccggggtgcctaccgtgactgcctgggtcggctggacctgcagtacgccaagctgctgaactcctccaaggcccgcctcaggtccctggagagcttgcacagctttgtggcagccgccactaaggagctaatgtggctgaatgagaaggaggaggaggaggtgggcttcgactggagcgaccgcaacaccaacatgaccgccaagaaggagagctactcggcgctgatgcgggagctggagctgaaggagaagaagatcaaggagctccaaaatgctggggaccggctgctgcgggaggaccacccggcccggcccacggtggagtccttccaggcggccctgcagacgcagtggagctggatgctacagctgtgctgctgtatcgaggcacacctgaaggagaacgctgcctactttcagttcttctcagatgtgcgggaggccgaggggcagttgcagaagctgcaggaggcactgcgtaggaaatacagttgtgatcgctccgccaccgtcacccggctggaggacctgctgcaggatgcccaggacgagaaggaacagctgaacgagtacaagggccacctctcaggcctggccaagcgggccaaggccgtcgtgcagctgaagccccgccacccagcccaccccatgcggggccgcctgcccctgctggccgtgtgcgactataagcaggtggaggtgactgtgcacaagggtgacgagtgccagctggtgggccctgcacagccgtcccactggaaggtgctcagcagctccggcagcgaggccgccgtgccctccgtgtgcttcctggtgcccccgcccaaccaggaggcccaggaggccgtcaccaggctggaggcccagcaccaggccctggtcacgctgtggcaccagttgcacgtggacatgaagagccttctggcctggcagagccttcgccgcgacgtgcagctcatccgctcctggtccctggccacgttccgcaccctgaagccagaggagcagcgccaagccctgcacagcctggagctgcactaccaggccttcctgcgggacagccaggacgcgggcggcttcggacccgaggaccggctgatggctgagcgcgagtacggctcctgcagccaccactaccagcagctgctgcagagcctggaacagggtgcacaggaagagtctcgctgccagcgctgcatctccgagctcaaagacatccggctgcagctggaggcctgtgagacgcgcaccgtgcaccgcctgcggctgccgctggacaaagagccggcacgggagtgtgcccagcgcatcgccgagcagcagaaggcacaggcagaggtggaggggctgggcaagggggtcgcccggctctctgccgaggccgagaaggtcttggccctaccagagccatcgcctgcggcccccacgctgcgctcggagctggagctgacgctgggcaagctggagcaggtccgcagcctgtctgccatctacctggagaagctcaagaccatcagcctggtgatccgcggcacgcagggggccgaggaggtgctcagggcccacgaggagcagctcaaggaggcccaggccgtgccggccaccctcccggagctcgaggccaccaaggcctctctgaagaagctgcgggcccaggccgaggcacagcagcccacgttcgacgccctgcgggatgagctgcggggggcacaggaggtgggggagcgactgcagcagcggcacggggagcgggacgtggaggtggagcgctggcgggagcgggtcgcccagttgcttgagcgctggcaggctgtgctggcccagaccgacgtgcggcagcgcgagctcgagcaactgggccgccagctgcgttactaccgcgagagtgcagaccccttgggcgcctggctgcaggacgccaggcggcggcaggagcagatccaggccatgccgctggccgacagccaggctgtgcgggagcagctgcggcaggagcaggccctgctggaggagatcgagcgccacggcgagaaggtcgaggagtgccagaggtttgcgaaacagtacatcaacgccatcaaggactatgaactccagctggtgacgtacaaggcgcagcttgagccggtggcctccccggccaagaagcccaaggtccagtcgggatcagagagtgtcatccaggagtacgtggacctgcgtacgcactacagcgagctgaccacactgacgagccagtacatcaagttcatcagcgagactctgcggcgcatggaggaggaggagaggctggctgagcagcagcgggcagaggagcgcgagcggctggccgaggtggaggccgcgctggagaagcagcggcagctggccgaggcgcacgcccaggcaaaggcacaggcggagcgggaggcgaaggagctgcagcagcgcatgcaggaggaggtggtgcggcgggaggaggcggcggtggacgcgcagcagcagaagcgcagcattcaggaggagctgcagcagctgcggcagagctcggaggcggagatccaggccaaggcccggcaggcagaggcggctgagcgcagccggctgcgcatcgaggaggagatccgcgtggtgcgcctgcagttggaggccaccgagcgccagcgtggcggggctgagggggagctgcaggcactgcgtgcacgggcggaggaggctgaggcacaaaagcgacaggcgcaggaggaggccgagcgcttgcggaggcaggtgcaggacgagagccagcgtaagcggcaggcggaggtggagctggcctcgcgcgtgaaggccgaggccgaggcggcgcgcgagaagcagcgggccctgcaggccctggaggagctgcggctgcaggcggaggaggcggagcggcgcctgcggcaggccgaggtggagcgagcgcggcaggtacaggtggccctggagacggcgcagcgcagtgcagaggcggagctgcagagcaaacgcgcctccttcgccgagaagacggcacagctggagcgctccctgcaggaggaacacgtggctgtggcacagctgcgggaggaggctgagcggcgggcacagcagcaggccgaggccgagcgggcgcgcgaggaggcagagcgggagctggagcgctggcagctcaaggccaacgaggcgctacggctgcggctgcaggcggaggaggtggcgcagcagaagagcctggcgcaggccgaggctgagaagcagaaggaggaggcggagcgcgaggcgcggcggcgcggcaaggcggaggagcaggccgtccggcagcgggagctggctgaacaagagctggagaagcagcggcagctggcggaaggcaccgcgcagcagcgcctggccgcggagcaggagttgatccggctgcgggccgagacggagcagggggagcagcagcggcagctgctggaggaggagctggcccggctgcagcgtgaggcggctgcagccacgcagaaacggcaggagctggaagccgagctggccaaggtgcgggccgagatggaggtgctgctggccagcaaggcgagggctgaggaggagtcgcgctccaccagcgagaagtccaagcagaggctggaggccgaggccggccggttccgcgagctggccgaggaggccgcccgcctgcgtgccctggcggaagaggccaagcggcagcggcagctggccgaggaagacgcggcgcggcagcgggccgaggcggagcgggtgcttgcggagaagctggccgccatcggcgaggccacgcggctcaagacggaggcggagatcgcgctcaaggagaaggaggcggagaacgagcgcctgcggcggctggcggaggacgaggccttccagcggcggcggctggaggagcaggccgcgcaacacaaggctgacatcgaggagcgcctggcccagctgcgcaaggcatcggacagcgagctggagcggcagaaggggctggtggaggacacgctgaggcagcggcggcaggtggaggaggagatcctggcgctgaaggcgagcttcgagaaggcggccgctggcaaggcggagctggagctggagctgggacgcatccgcagcaacgcggaggacacgctgcgcagcaaggagcaggccgagctggaggctgcgaggcagcggcagctggcggcggaggaggagcggcggcgccgtgaggctgaggagcgcgtgcagaagagcctggcggccgaggaggaggccgcacggcagcggaaggcggcgctggaggaagtcgagcggctgaaagccaaggtggaggaggcgcggcgcctgcgggagcgagcggagcaggagtcggcgcggcagctgcagctggcccaggaggccgcccagaagcggctgcaggcggaagagaaggcacacgccttcgcggtgcagcagaaggagcaggagctacagcagacgctgcagcaggagcagagcgtgctggaccagctgcgcggcgaggcggaggcggcccggcgggcggctgaggaggcggaggaggcccgggtgcaggcggagcgtgaggcggcgcagtcccggcggcaggtggaagaggccgagcggctgaagcagtcggcagaggagcaggcacaggcccgggctcaggcacaggcggctgcagagaagctgcgcaaggaggccgagcaagaggcggcgcggcgggcacaggcggagcaggcggccctgcggcagaagcaggcagctgacgcggagatggagaagcataagaaattcgccgagcagacgctgcggcagaaggcgcaggtggagcaggagctgacaacactgcggctgcagctggaggagaccgaccaccagaagaacctgctggacgaggagctgcagcggctgaaggcggaggccacggaggccgcacgccagcgcagccaggtggaggaggagctcttctcggtgcgcgtgcagatggaggagctgagcaagctcaaggcacgcatcgaggctgagaaccgcgcactcatcttgcgtgacaaggacaatacgcagcgcttcctgcaggaggaggctgagaagatgaagcaggtggcggaggaggccgcgcggctgagtgtggcggcccaagaggctgcgcgactgcggcagctggcagaggaggacctggcacagcagcgggccttggcagagaagatgctcaaggagaagatgcaggcggtgcaggaggccacgcgactcaaggctgaggcggaactgctgcagcagcagaaggagcttgcgcaggagcaggcgcggcggctgcaggaggacaaggagcagatggcgcagcagctggcggaggagacgcagggcttccagcggacgctggaggccgagcggcagcggcagctggagatgagcgctgaggctgagcgcctcaagctgcgtgtggccgagatgagccgagcccaggcccgcgctgaggaggacgcccagcgcttccggaagcaggcggaggagatcggtgagaagctgcaccgcacggagctcgccacccaggagaaggtgaccctggtgcagacactggagatccagcgacagcagagtgaccatgatgccgagcgcctgcgggaggccatcgctgagctggagcgtgagaaggagaagctccaacaggaggccaaactgctgcagctcaagtctgaggagatgcagacggtgcagcaggagcagctgctgcaggagacgcaggccctgcagcaaagcttcctctctgaaaaggacagcctgctacagcgggagcgcttcatcgagcaggagaaggccaagctggagcagctcttccaggacgaggtggccaaggcacagcagctgcgtgaggagcagcagcggcagcagcagcagatggagcaggaacggcagcggctggtggccagcatggaggaggcgcggcggcggcagcatgaggccgaggagggcgtgcggcgcaagcaggaggagctgcagcagctggagcagcagcggcggcagcaggaggagctgctggctgaggagaaccagaggctgcgtgagcagctgcagctcctggaggagcagcaccgggccgcgctggcgcactcagaggaggtcactgcctcgcaggtggctgccacaaagaccctgcccaatggccgggatgcacttgatggccccgcggcagaggcagagccggagcacagcttcgatggcctgcggcggaaggtgtcagctcagaggctgcaggaggccggcatcctgagtgcggaggagctgcagcggttggcgcagggccacaccacggtggacgagctcgcacggcgggaagacgtgcgccactacctgcagggccgcagcagtatcgcagggctgttgctgaaggccaccaatgagaagctgagtgtttacgccgccctgcagaggcagctgctgagtcccggcacggccctcatcctgctggaggcgcaggcggcctcaggcttcctgctggaccctgtgcggaaccggcggctgaccgtcaacgaggctgtgaaggagggtgtggtgggccccgagctgcaccacaagctgctgtcggccgagcgcgccgtcactggctacaaggacccctacactggccagcagatctctctcttccaagccatgcagaagggcctcatcgtccgggagcacggcatccgcctgctggaggcccagatcgccacgggcggcgttatcgaccccgtgcacagccaccgcgtgcccgtggacgtggcctaccggcgcggctacttcgacgaggagatgaaccgcgtcctggcggaccccagcgacgacaccaagggcttctttgaccccaacacgcacgagaacctcacgtacctgcagctactggagcgctgcgtggaggaccccgagacgggcctgtgccttctgccactcacggataaggctgccaagggcggggagctggtctacactgactccgaggcccgggacgtctttgagaaggccaccgtgtctgcgccgttcggcaagttccagggcaagacggtgaccatttgggagatcatcaactcggaatacttcacggcagagcagcggcgggacctgctgcggcagttccgcacgggccggatcacagtggagaagatcatcaagatcatcatcacggtggtggaggagcaggagcagaagggccggctttgctttgagggcctgcgcagcctggtgccagccgccgagctgctggagagcagggtcatcgaccgcgagctctaccagcagctgcagcgaggtgagcgctctgtgcgagacgtagccgaggtggacactgtgcggcgggctctccggggtgccaacgtcatcgcgggtgtatggctggaggaggcggggcagaagctgagtatctacaatgccctgaagaaagacctgctgccatccgacatggccgtggccctgttggaagcccaggccggcaccgggcacatcatcgaccccgccaccagcgcccggctgaccgtggacgaggcagtgcgtgctggcctggtgggccccgagtttcatgagaagctgctatcagccgagaaggctgtgacagggtacagggacccctacacagggcagagcgtctccctgttccaggccctgaagaagggcctcattccccgggagcagggcctgcgcctgttggacgcccagctgtccacgggcggcatcgtggaccccagcaagagccaccgcgtgcccctggatgtcgcctgcgcccgaggctgcctggatgaggagaccagcagggccctgtcggcaccaagggccgacgccaaggcctacagtgaccccagcacaggggagccggccacctacggcgagctccagcagcggtgccggcccgaccagctgaccgggctgagcctgctgccgctctcagaaaaggctgctcgggcccggcaggaggagctctactcagagctgcaggcccgtgagacctttgaaaagaccccggttgaggtccccgtgggtggcttcaagggcaggacggtgacggtgtgggagctcatcagctctgagtacttcactgcggagcagcggcaggagctgttgcgtcagttccgcacgggcaaggtcaccgtggagaaggtcatcaagattctcattaccatcgtggaggaggtggagaccctgcggcaggagaggctgtccttcagcggcctccgtgcccctgtgccagccagcgagctcctggcttccggggtcctcagcagagcccagtttgagcagctcaaggacggcaagacgacggtcaaggacctttcggagctgggctccgtgcggacgctgctgcagggcagtggctgcctcgccggcatctacctggaggacaccaaggagaaggtgtccatctacgaggccatgcgccggggcctgctgagagccacaacggctgcgctcctgctggaggcgcaggcggccactggcttcctggtggaccccgtgcggaaccagcgcctgtatgtccacgaggccgtgaaggcgggcgtggtgggccccgagcttcacgagcagctgctgtctgccgagaaggccgtcaccggctacagagacccctactcgggcagcaccatctccctcttccaggccatgcagaagggcctggttctccggcagcacggcatccgcctgctggaggcccagatcgccacgggcggcatcatcgaccccgtgcacagccaccgcgtgcctgtggacgtggcctaccagcgcggctacttcagtgaggagatgaaccgcgtcctggcggaccccagcgacgacaccaagggcttctttgaccccaacacgcatgagaacctcacgtacaggcagctgctggagcggtgcgtggaggaccccgagacgggcttgcgccttctgccactgaaaggggcggagaaggctgaggtggtggagaccacgcaggtgtacactgaggaggagacaagaagggcatttgaagagacacagatcgacattcccggcggcggcagccacggcggctccaccatgtccctgtgggaggtgatgcagtcggacctgatccccgaggagcagcgggcccagctgatggctgacttccaggccggccgggtgaccaaggaacgcatgatcatcatcatcatcgagatcattgagaagacagagatcatccgccagcagggtctggcctcctacgactacgtgcgccgccgcctcacggctgaggacctgttcgaggctcggatcatctctctcgagacctacaacctgctccgggagggcaccaggagcctccgtgaggctctcgaggcggagtccgcctggtgctacctctatggcacgggctccgtggctggtgtctacctgcccggttccaggcagacactgagcatctaccaggctctcaagaaagggctgctgagtgccgaggtggcccgcctgctgctggaggcacaggcagccacaggcttcctgctggacccggtgaagggggagcggctgactgtggatgaggctgtgcggaagggcctcgtggggcccgagctgcacgaccgcctgctctcggctgagcgggcggtcaccggctaccgtgacccctacaccgagcagaccatctcgctcttccaggccatgaagaaggagctgatccctactgaggaggccctgcggctgctggatgcccagctggccaccggcggcatcgtggacccccgcctgggcttccaccttcccctggaggtggcttaccagcgtggctacctcaacaaggacacgcacgaccagctgtcagagcccagcgaggtgcgcagctacgtggacccgtccaccgacgagcgcctcagctacacgcagctgctcaggcggtgccgtcgtgacgacggcaccggccagctgctcctgccactgtcggacgcccgcaagctgaccttccgtggcctgcggaagcagatcaccatggaggagctggtgcgctcgcaggtcatggacgaggccacggcgctgcagctgcgggagggcctgacctccatcgaggaggtcaccaagaacttgcagaagttcctggaaggcaccagctgcatcgctggtgtcttcgtggacgccaccaaggaacggctctcggtgtaccaggccatgaagaagggcatcatccgccccggcacagcctttgagctcctggaggcgcaggcggccaccggttacgtcatcgaccccatcaagggactgaagctgacggtggaggaggctgtgcgtatgggcattgtgggccccgagttcaaggacaagctgctgtcggccgagcgcgccgtcactgggtacaaggacccctactctgggaagctcatctccctcttccaggccatgaagaagggcctgatcctgaaggaccatggcatccgcctgctggaggcccagatcgccacgggcggcatcatcgaccctgaggagagccaccggctgcccgtggaggtggcctacaagcgcggcctcttcgatgaggagatgaacgagatcctgaccgacccctcggacgacaccaagggcttctttgaccctaacacggaggagaacctcacctacctgcagctgatggagcgttgtatcactgacccccagacgggcctgtgtctcttgccgctgaaggagaagaagcgggagcggaagacgtcctccaagtcctccgtgcgcaagcgccgagtggtcatcgtggaccccgagacgggcaaggagatgtcagtgtacgaggcctaccgcaagggcctgattgaccaccagacgtacctggagctgtccgagcaggagtgcgagtgggaggagatcaccatctcctcctcggacggcgtggtcaagtccatgatcatcgaccgccgctccgggcgccagtacgacatcgatgatgccatcgccaagaacctcatcgaccgctcggcactggaccagtaccgcgccggcacgctctccatcaccgagttcgccgacatgctctcgggcaacgccggtggtttccgctcccgttcctcctcggtgggatcctcctcctcctaccccatcagccccgccgtctccaggacccagctggcctcctggtcagaccccactgaggagacgggccccgtggctggcatcctggacacggagacgctggagaaggtgtccatcaccgaggccatgcaccggaacctggtggataacatcacggggcagcggctgctggaggcgcaggcctgcaccgggggcatcatcgaccccagcaccggtgagcgcttccctgtcaccgacgccgtcaacaagggcctggtggacaagatcatggtggaccgcatcaacctggcccagaaggccttctgcggcttcgaggacccacgcaccaagaccaagatgtcggccgcccaggccctgaagaagggctggctctactacgaggccggccagcgcttcctggaggtgcagtacctgaccggcggcttgatcgagcccgacacgccgggccgcgtgcccctggacgaggccctgcagcgcggcacggtggacgcccgcaccgcacagaagctgcgtgacgtgggcgcctactccaagtacctcacctgccctaagaccaagctcaagatctcctataaggacgcgctggaccgcagcatggtggaggagggcacggggctgcggctgctggaggctgccgcgcagtccaccaagggctactacagcccctacagcgtcagcggctccggctctaccgctggctcccgcaccggctcgcgcaccggctcccgggccggctcccgccgcggcagctttgacgccaccggctccggcttctccatgaccttctcttcatcctcctactcctcctcgggctacggccgccgctacgcctcggggtcctcggcctccctggggggccctgagtctgccgtggcctgaggctgcctgcgcccaccccgctctgcatgcggcccagcccggctcccaccgaggcgcgggggccgttttcaacgcttaaaggtgtcttcctcccaagtggtgcctaaagtttaaccaaaaagaccagactaatatattaatatatatctgctgtccagacagcctgtatcttgggggacagggctggcccagccctgctggccgcctcaccccctcgggtctcctcactcccttctacctgccactcacacagccaggtgccttggagggtcccaagctgggccccagcccaccctcctgtcttcccagggtagcccgcctgccagtcctagctgcacagggcagctgggcccaaccctgtctgtagagggccctggtgtttctagcactggcctgcacggtgggccttgctggggacggggggccccagtcagcctctctcccagtctacccagagaagccccttccccatgggaagacgaggccctcgggcccagcccccacagtgctgtctgatctgtgctttccagctcaccccccacactcactcctgagacccctggcctccggcgtcagcctccagcctctgttcccctagtaagtgccttccatgtcggcctctaaccccaggccccgaggacccagacccagtggggaggcggacgttccagccggcatggctgggaactgcagacctgtcctcctggtgggtccaggggcccctccagcttgtggagccccacactggggtgccgcctgcccgtctctctcccatggagccccagccccctttgggcccagggacaccagccaggctctgtgctgaccctcctgttgcacccagccctggtctcagcagcgaccacccctgcctccaccctctgagctttgcatgttccactaaccccgggcgggtggcaggtggaggtgtcaggctgctggcgcctctgcaagggcagaacactaacctgaccgtgggcggggccttgcggtatccgcccccaataaaagcaattccaacctt

SEQ ID NO: 90 - DNA, 3830 bp, Homo sapiens
gactagggaccgcctgggtgaggtgaggacctggtggccgcagttgtggcactgtgcgcaggcgctgaactgaccggacggagcgggcggctgtggcctcgccagctggtttaaaaatatccttttttgctgaaggaacacatttgctggtatagtttcagaatgtcaagtactgtgtcctactggatcttaaattctacaaggaacagcattgccacattgcaagggggtagacgcttatactccaggtatgtctcaaataggaataaattaaaatggaggctcttttcccgggtgccacccaccctaaacagttccccatgtggtggctttactctgtgcaaagcctacagacacacatcaacagaggaagatgattttcacttgcaactcagccctgagcagataaatgaagtgcttcgagctggcgagacaacccacaagattcttgaccttgaaagcagagtcccaaattcagtgttgcggtttgagagcaaccagctggctgccaattccccagtggaggaccggcgaggtgtagcctcctgcctgcaaaccaatggactgatgtttggcatcttcgatggacatggtggtcatgcatgtgcccaagcagtgagcgagaggctcttctactatgtggcagtgtccctgatgtcccaccagaccctggagcacatggagggagctatggaaagcatgaaacccttgctgcccatcctgcattggctcaagcacccaggggacagtatctacaaggatgtcacatctgtgcatcttgaccacctccgtgtctattggcaggaactgcttgatttgcacatggaaatgggactaagcattgaagaagcattaatgtactccttccagagactggattctgacatctcgctggaaatccaggcccccctggaagatgaggtgacaaggaacctgtcactccaggttgctttctctggggcaacagcttgcatggcccatgttgatggaattcacttgcacgtggcaaatgctggtgactgccgagccatccttggtgtccaagaggacaatggcatgtggtcttgtctgccccttacacgtgaccacaatgcctggaaccaggccgagctgtcccggctaaagagggagcaccctgagtcagaggacaggacgatcatcatggaggacaggctactgggcgtcctcatcccctgcagggcctttggggatgttcagctgaagtggagtaaagagttgcagcgcagcattctggagaggggcttcaataccgaggccctcaacatttaccagttcacacccccacactactacactccaccctacctgactgctgagcctgaggtcacataccacaggctgaggccccaggataagttccttgtgctggcctcagatggcctgtgggacatgctgagcaatgaggacgtggtaaggctggtggtggggcacctggctgaggcagattggcacaagacagacctggcccagagacccgccaacttggggctcatgcagagcctgctgctgcagaggaaagccagcgggctccacgaggctgaccaaaatgcagccacgcggctgatcagacatgccatcgggaacaatgagtatggggagatggaggcagagcggctggcggcgatgctgacattgccagaggacttggcgaggatgtacagggatgatatcactgtcactgtggtgtattttaactcagaatcaatcggtgcatattacaaggggggttaagaatctcccatcctattgtcaaggttaacataaatgctcttctaaaatgtttcacttactcctaaactagctatccaaaccttactattaaaagcgcaggcagatttaatttgctaaatagactaacaggaggaaaaaaacaaacagcctagctttaaaaaacagtgaaatagcagtgatttcatgtccctgtatgttctgattaagtcttatatgcagagaggacagagcataaagtctatagaattggcttgggcttgtgtagccccagtcatttgataaagatgttgttaaactgtgtcagcctgagccttcaaagggtaaatttaatcatgattctgagaataaagaacttcaggagcttcttaggtcttgccacaaaaatctgcaaatttgataattctcctgaattcacaatcatggacttgtagactatgaagagatattttatttgtttgtcttttatttaaattactaaggtctaggtttacaaagcatactacaggacccttttctatgcaatatcctaacttttttttttgtgattatgcttgtgagaaattttgtaatactacattctagttctgttttcgtttattttaaaactgaatccttaaacttgcaaacacgcctactgtaagcatgcttggaatgacttgttttggttttcagctgataggatctatgcctctggaccagctgaacttactggtgcagctttttgtgccctctactgagtcccattccagaaactttgagccatgctaggaggtaactagtctatgccttaactcctgacctttcctgcattagtaaaatttcctcctgggctgagcctttgggggttgattcacagcatttaagctttctgattatacctctcaaacattcttctgtcaattccacacaatccttctacctctgctatgctgaacccctcattcaccctgcacctgccaactgcaaaatattgtctgaaagaatctttcacatgttcctgcttcctatggctgcaggaaaggagaaaatgtgattgcatgtggtagttgtggtgatagacgtttagacaggacaggttaatttagcggattgtggacttaagattcaacctctatctggagaggtgaaaacacaaaggcttaaggacaacagtttctaaccaagtttctctgaatcctttcctgagaggtggtgggcaggagggaggagtgagacttatcagatgggacgcttgccccaagactgtgggataaaccaccattgctagtcctcaggaattagaccatatttagtataggagttggggcaaaaataaaagtgtaatttgtaatggtttctgtgggctgtagactctttgtatttacttggaaattcagttatgtggatccattttggagatgaatttcatctcatgagttgctgtggcatttaaacaacaggaaatgtgtccctaaatggaaacaaatataatcccacaaaaccaacaattttatttgcctctactacgtcaggcagaattcttcaattaagttgaactacatttgttgatcccttttctcatcttacccctttatgccacctactgaaaagaaaaacaaatagctaggtttggtttcctgttttttgtctatgtcccagctgacattcagtcaaatgttgggatacttctaatttggtggtgtttctttgtacatttttcagtgcaactgtttagtcatgtgttttcatctaagaaattatcttttgaatatttaagccttgatccttttattctgaaaccattaatattccttcttggctgggtgcagtggtttacgcctgtaatcccagcactgtgggaggccgaggcggatggatcacctgaggtcgggaattcgagaccagcctgaccaacatggagaaactccatctctactaaaaatacaaaattagccaggtgtggtggtgcatgcctgtaatcccagctactcgggaggctgaggcaggaaaatcacttgaacccgggaggcggaggttgcggtgagccaagatcgcaccattgcactccagcctgggcaacaagagtgaaactctgtctc

SEQ ID NO: 91 - DNA, 1858 bp, Homo sapiens
gctgcggccccgccccctggccgcgtggctgcgcgtcctggctgttgccgataaagttgtttgacgccggcccggcggcgggtcacgtgagcggaaaatggcggccccggcaggcggcggaggctccgcggtgtcggtgctggccccgaacggccggcgccacacggtgaaggtgacgccgagcaccgtgctgcttcaggttctggaggacacgtgccggcggcaggacttcaacccctgtgaatatgatctgaagtttcagaggagcgtgctcgacctttctctccagtggagatttgccaacctgcccaacaatgccaagctggagatggtgcccgcttcccggagccgtgaggggcctgagaacatggttcgcatcgctttgcagctggacgatggctcgaggttgcaggactctttctgttcaggccagaccctctgggagcttctcagccattttccacagatcagggagtgcctgcagcaccccggcggggccaccccagtctgcgtgtacacgagggatgaggtgacgggtgaagctgccctgcggggcacgacgctgcagtcgctgggcctgaccgggggcagcgccaccatcaggtttgtcatgaagtgctacgaccccgtgggcaagaccccaggaagcctgggctcgtcagcgtcggctggccaggcagccgccagcgctccacttcccttggaatctggggagctcagccgcggcgacttgagccgtccggaggacgcggacacctcagggccctgctgcgagcacactcaggagaagcagagcacaagggcacccgcagctgccccctttgttcctttctcgggtgggggacagagactggggggccctcctgggcccacgaggcctctgacatcatcttcagctaagttgccgaagtccctctccagccctggaggcccctccaagccaaagaagtccaagtcgggccaggatccccagcaggagcaggagcaggagcgggagcgggatccccagcaggagcaggagcgggagcggcccgtggaccgggagcccgtggaccgggagccggtggtgtgccaccccgacctggaggagcggctgcaggcctggccagcggagctgcctgatgagttctttgagctgacggtggacgacgtgagaagacgcttggcccagctcaagagtgagcggaagcgcctggaagaagcccccttggtgaccaaggccttcagggaggcgcagataaaggagaagctggagcgctacccaaaggtggctctgagggtcctgttccccgaccgctacgtcctacagggcttcttccgccccagcgagacagtgggggacttgcgagacttcgtgaggagccacctggggaaccccgagctgtcattttacctgttcatcacccctccaaaaacagtcctggacgaccacacgcagaccctctttcaggcgaacctcttcccggccgctctggtgcacttgggagccgaggagccggcaggtgtctacctggagcctggcctgctggagcatgccatctccccatctgcggccgacgtgctggtggccaggtacatgtccagggccgccgggtccccttccccattgccagcccctgaccctgcacctaagtctgagccagctgctgaggagggggcgctggtcccccctgagcccatcccagggacggcccagcccgtgaagaggagcctgggcaaggtgcccaagtggctgaagctgccggccagcaagaggtgagagctgccagcctgaggtgcccactccgccagccacaggaccacctcctctgccagcaggaataaagacttgtgcatccctcaaaaaaaaaaaaaaaaa

SEQ ID NO: 92 - DNA, 1894 bp, Homo sapiens
actctcctcccccgagcggcagcggcagcggcggcggcggcggctgctgcgggcgctgaatgagagacggtgactgttcgggtcgacgagtgctactctaggcggcggcggccgtggcggtgaagcgtggggccggcatcgtctttccgtcctctgagacgacggccgcggctgcacaggaataatgtatttgtggccttggacatgaggcagtcagtcctctgttgctgttaacataaggtcagggactgatgaggaaagcatggacctaatgaacgggcaggcaagcagtgtcaatattgcagctactgcttctgagaaaagtagcagctctgaatccttaagtgacaaaggctctgaattgaagaaaagctttgatgctgtggtattcgatgttcttaaggttacaccagaagaatatgcgggtcagataacattaatggatgttccagtatttaaagctattcaaccagatgagctttcaagttgtggatggaataaaaaagaaaaatatagttctgcaccaaatgcagttgccttcacaagaagattcaatcatgtaagcttttgggttgttagagagattcttcatgctcaaacattaaaaattagagcagaagttttgagccactatattaaaactgctaagaaactgtatgagctgaataaccttcatgcacttatggcagtggtttctggcctacagagtgccccaattttcaggttgactaaaacatgggcgttattaagtcgaaaagacaaaactacctttgaaaaattagaatatgtaatgagtaaagaagataactacaaaagactcagagactatataagtagcttaaagatgacaccttgcattccctatttaggtatctatttgtcagatttaacatacatcgattcagcatacccatcaactggcagcattctagaaaatgagcaaagatcaaatttaatgaataatatccttcgaataatttctgatttacagcagtcttgtgaatatgatattcccatgttgcctcatgtccaaaaatatctcaactctgttcagtatatagaagaactacaaaaatttgtggaagacgataattacaagtaggttggatcttcaaaagtggtttgtataactttgtcctgtcctccacctttctatccctatgtatttaaacatctaaatcctacatggtatcatacaaaggactaatccagtggtttacagcagtaaaggtactaacatgtattacttcttaatcacttgttatgattgagccaatatacaaatacctcatctgttctttttaatattttatctctgtttgtagagagctaacgtttgatagttctaatttaaatttcttcctttcccccatattcaatcattgaatccttatagaatttgtcttttaatagacagaaaaattaatgaaactttttaaaatagaaaaattactcttctttaatgctaagtattgacacatcgttgtttgtttttcattgtttttgcggattgagagacttggtccatcttgtctcaggagaagaaacctttctccaatgtagcagaattatcctcttccctgtattatagcaagttctttattaaagatttttgaggccgggcacagtgactcacgcctgtaaccccagcactttgggaggccgaggcgggtggatcacttgaggtcaggagctcaagaccagcctgaccaatatagtgaaacactgtctgtactaaaaatacagaattagccgggcatggtgcatgcctgtaatcccagctgcttgggaggctgaggcaggagaatcacttgaacacaggaggcagaggttgcagtgagccgagagtgcaccattgcactccagcctgggcaaaaagagcaaaactccgtct

SEQ ID NO: 93 - DNA, 2458 bp, Homo sapiens
gccccgcccgcttggcgcgcgcccccgccaggtccgctctcgtcccccacccctggcgcggacggggtggttccagctcactctcctcccccgagcggcagcggcagcggcggcggcggcggctgctgcgggcgctgaatgagagacggtgactgttcgggtcgacgagtgctactctaggcggcggcggccgtggcggtgaagcgtgaggccggcatcgtctttccgtcctctgaggcgacggccgcggctgcacaggaataatgtatttgtggccttggacatgaggcagtcagtcctctgttgctgttaacataaggtcagggactgatgaggaaagcatggacctaatgaacgggcaggcaagcagtgtcaatattgcagctactgcttctgagaaaagtagcagctctgaatccttaagtgacaaaggctctgaattgaagaaaagctttgatgctgtggtattcgatgttcttaaggttacaccagaagaatatgcgggtcagataacattaatggatgttccagtatttaaagctattcaaccagatgagctttcaagttgtggatggaataaaaaagaaaaatatagttctgcaccaaatgcagttgccttcacaagaagattcaatcatgtaagcttttgggttgttagagagattcttcatgctcaaacattaaaaattagagcagaagttttgagccactatattaaaactgctaagaaactgtatgagctgaataaccttcatgcacttatggcagtggtttctggcctacagagtgccccaattttcaggttgactaaaacatgggcgttattaagtcgaaaagacaaaactacctttgaaaaattagaatatgtaatgagtaaagaagataactacaaaagactcagagactatataagtagcttaaagatgacaccttgcattccctatttaggtatctatttgtcagatttaacatacatcgattcagcatacccatcaactggcagcattctagaaaatgagcaaagatcaaatttaatgaataatatccttcgaataatttctgatttacagcagtcttgtgaatatgatattcccatgttgcctcatgtccaaaaatatctcaactctgttcagtatatagaagaactacaaaaatttgtggaagacgataattacaagctttcattaaagatagaaccagggacaagcaccccacgttctgctgcttccagagaagatttagtaggtcctgaagtaggagcgtctccacagagtggacgaaaaagtgtggcagctgaaggagccttgctcccacagacaccgccatcccctcggaatctgattccacatggacataggaagtgccatagtttgggttataatttcattcataaaatgaacacagcagaatttaagagtgcaacgtttccaaatgcaggaccaagacatctgttagatgatagcgtcatggagccccatgcgccatctcgaggccaagctgaaagttctactctttctagtggaatatcaataggtagcagcgatggttctgaactaagtgaagagacctcatggcctgcttttgaaaggaacagattataccattctctcggcccggtgacaagagtggcacgaaatggctatcgaagtcacatgaaggccagcagttctgcagaatcagaagatttggcagtacatttatatccaggagctgttactattcaaggtgttctcaggagaaaaactttgttaaaagaaggcaaaaagcctacagtagcatcttggacaaaatattgggcagctttgtgtgggacacagcttttttactatgctgccaaatctctaaaggctaccgaaagaaaacatttcaaatcaacatccaataagaacgtatctgtgataggatggatggtgatgatggctgatgaccctgaacatcctgatctcttcctgctgactgactctgagaaaggaaattcgtacaagtttcaagctggcaatagaatgaatgcaatgttatggtttaagcatttgagtgcagcctgccaaagtaacaaacaacaggttcctacaaacttgatgacttttgagtagaagcctgagaaaaaaagagaggtgaactgttgcttctacgtgagcatgaggacctgataaaagagcgccagctataaaccatcctgtgccaggaagagcccagaggctctgtctcagtcgttggagttctcaaccaaaaaagcactaatttcagggaatgatttgagatattcccagagaacaaattggagttgcaaaacaaactgccatgaaccatgcttcttatctcagaactgacctgtggaaacccctgccttaaaagaatgaaaggaaaaccaacatgaaacaccaaatagtgtgtgtgaatcttctggcggtgctgtgcttggaatagatcgtagctaatttacaaaaaaaaaaaaaaa

SEQ ID NO: 94 - DNA, 4653 bp, Homo sapiens
cttccggcgggggcgcggcttggactgaggagcggacccggccgggcgcaggggctggactggcggagcaggtggggtccgcggccgccggagcgttccggtcggcgtctgggcatctcggcctcggcagaaagcgcgaccgccctgctgcgcggggcccgcggcgatgccgttcctgcacggcttccggaggatcatcttcgagtaccagccgctggtggatgcgattctgggctccctggggatccaggaccccgagcggcaggagtctctggaccggcccagttatgtcgccagcgaggagagccgaatccttgttctcactgagctgctggagaggaaagcccactctcccttttaccaggaaggcgtgagcaacgccctgctcaagatggctgagctggggctgacgcgggcggccgacgttctcttgcggcatggggccaatctcaactttgaagacccagtcacctactacacggccttgcacatcgccgtcctgcggaaccagccggacatggtggagctgctggtgcatcacggggccgacgttaatcggagggaccggatccacgagagtagccccttggacctggccagcgaggagcctgagcgcctgccctgcctgcagcgcctcctggaccttggagctgatgtcaatgccgctgacaagcatggaaaaactgctctgctccatgctctggccagcagcgacggggtgcagatccacaatactgagaacattcgtctcttactggaaggaggggcagacgtcaaggccaccaccaaagatggggacacagtgttcacctgcatcatcttcctgcttggtgagaccgtgggaggggacaaagaggaggcccagatgatcaaccgcttctgcttccaagtcacacggctgctgctggcacacggggccgaccccagcgagtgcccagcccacgagtccctcacccacatctgcctgaagagctttaaactgcacttccctctcctgcgcttcctcctggagtccggagccgcctacaactgctccctgcacggtgcgtcctgctggtctggctttcacatcatctttgagaggctctgttcccacccaggctgcacggaagacgagagccatgcggacctcctgcgcaaagctgagactgtcctggatctcatggtgaccaactctcagaaactccagctgcccgaaaacttcgatatccaccctgtgggcagcctggcggaaaagatccaggccctccacttctccttgaggcagctggagagctatcccccgcccctcaagcacctgtgccgtgtggccatccggctctaccttcagccgtggcctgtggatgtgaaggtcaaagccctgcctctgcccgacaggctgaagtggtacctccttagcgagcacagtggctccgtggaagatgacatctgataggtctcaggctacaggaacgggggacacgggcagctcaggtcagcctgttggtagatgctgggacagcattagaagagggtctttttgatctgggagatgagacgggatccttcatgagaaaagccagccaggtagagcctgaagctgtgatcactccagtggtgaagggtgcagctctggttcttccagagagactgcccccttccctccagcggcactccaagtcccccccatgttggaaagaggaacagggcttggattgatgtttataccctctgaattggagggcagtgccagggcatttgcagaagctgggaaggaccaagcctcagcaccccagggctgcggggctcttgttggccgcacgtggcagtgcagctggagaggaagcctggggcacgtcctgtgcggtgccaccaaggccccacccctgccccttttccttccaggttctgttactcacagaagtgtttctggtgggctctgcgggagaagacactaagggccccacaggcttgtttcatggtgttgcaagccaagctggcccctgcctgttcctgtagctctggggccaggtcagccgtggccccacctaccagaactgtgctctgctggcagctgtgcttttgccaaacccagggcctcagcgaccatgacttctgctaaaaagcaatcatgagtgcgtggctggggacagacctctctgaagtgtctcctgttgtgaggggctcactttggagccactgaagagccgactgtgccacccacttgcgagcctcagtcccttccaagctgcactggtcattgggaattgtgtaaacacctctggggataagctgaggtgactaaatgatatatttatattataagattaaactgactttcttggccttaacaaggtccttatataaaatttccaccccgcccctccatagttcaggatagaggctcccacagcagccggtaaggaagtgggtggcaggtgtgaggggatgctgtgtttggggggttgtttccaagtccctgcaaagaagcaccactctagactggcaagggcctccacagtgtggaggtcccattttattatttttttttttcgagacactctgtcacccaggctggagtgcaatggtgcaatctcggctcactgcgacctctgcctcccaggttcaagcagttctcctgcctcagcctcctgagtagctggcattataggtgcccaccaccatgcctggctgatttttgtatttttagtagagacggggtttcgccatgttggtcaggctggtctcaaactcctgacctcaggtgattcgcctgcctcggcctttcaaagtgctgggattacagacatgagccactgtgcccggcccccattttattttagttttattttgagacagagtctcgctctgtcacctaggctggagtgcagtggcgcaatctcacctcactgcaagctctgcctcccgggctcaccccattctcctgcctcagcctcctgagtagctgggactacaggcgcccgccatcacgcctggctaattttttttttttttgtattttaagtagagacggggtttcacctgttagccaggatggtctcaatctcctgacctcgtgatctgcccgcctcggcctcccaaagtgctgggattacaggcgtgagccaccgcgcccagccccattttattttttactttaaatgcctgccaaggagcagcctcaagcccagagaagactgaggctacggggaacttcccttgctgcaggctgttgtaacactttaagggccccaggtctccactgccaagcaggacttggcacatgagcacccaccccacagcaccatcaggcagcacccatgggctccaccagcccagctctgtccctcccctaggtaaagatcacactgaagtcttcaagtccccagcaaccaagttgggggtggtttccttcctcttcaggcagccaggcccatggctggaaggccgggctggaggcccagggaatcggttactgatgtggccaccctattcccacatggggagcaccaggagccctggagccccttccacccaatcccatctcgcaggagagcagggtctgggctcctgcctcaccgctggttcagcagcaccctccccgccgggtcccaccttgccttttgaagaagagcccgcataatgagtggacggcagacagctatatttagtggtgcctcgacactcacgaaccgccagcgtggcgcctggatcttgcccagctgccagctccccccaccaggactgtggttcctcagtttctcctgccagccccggctcatctcagggcaaagctatagacatggtagatctcatcggggaggttctcctgcctctcctcggccaggaggctgaggcctgcactgcagatgatcctgcggaccacgtcaaggtcccggcacacgctgctgtccacgtcgtccagaatcacgccctcctgggccatgttgtctttgatgacgatgatgccgttggggcggaggctgcccttgcagcgccgcaggaactcggccaggtgctgatcggtgaggtggcctggggagggcagaggcaaggttaccagggcaccatgcaagcggatgtcggcactggatgggatgtacttctcagccccgctgagcccctcatttgtgcccagcattttgtgtgcacacatggcctcattggctctcagtcccgagagatttactaaaccccaattcatagaataggaaactgtggctcagaggtcatctacctaaagacacattaagccagaatttgacttgacgggatggcttacaagtcctgcctgatacctacacaccatgatgccccacccctgccaggcttggatcggaggagtgaacctgggctaagagtttggcattgcaggagctcccagagagactgccttccctacactagaagtccccacaaaggcttctgagaccacaaaatacaaggccagacctagagtgtccacagcaggcctgtgctgcccgcctcaggaggtggccgactgctgctagcggcctgccgccacgtcagcagcccagggcacagcgctcgaggtgtgctgttaggctaagagggtgcagggctagacacgaagcttaaactattcatcttattaaaaataaaacccttataaaactccaaaaaaaaaaaaaaaaaaaaaaaaaaaaaaaaaaa

SEQ ID NO: 95 - DNA, 4544 bp, Homo sapiens
cttccggcgggggcgcggcttggactgaggagcggacccggccgggcgcaggggctggactggcggagcaggtggggtccgcggccgccggagcgttccggtcggcgtctgggcatctcggcctcggcagaaagcgcgaccgccctgctgcgcggggcccgcggcgatgccgttcctgcacggcttccggaggatcatcttcgagtaccagccgctggtggatgcgattctgggctccctggggatccaggaccccgagcggcaggagtctctggaccggcccagttatgtcgccagcgaggagagccgaatccttgttctcactgagctgctggagaggaaagcccactctcccttttaccaggaaggcgtgagcaacgccctgctcaagatggctgagctggggctgacgcgggcggccgacgttctcttgcggcatggggccaatctcaactttgaagacccagtcacctactacacggccttgcacatcgccgtcctgcggaaccagccggacatggtggagctgctggtgcatcacggggccgacgttaatcggagggaccgggaaaaactgctctgctccatgctctggccagcagcgacggggtgcagatccacaatactgagaacattcgtctcttactggaaggaggggcagacgtcaaggccaccaccaaagatggggacacagtgttcacctgcatcatcttcctgcttggtgagaccgtgggaggggacaaagaggaggcccagatgatcaaccgcttctgcttccaagtcacacggctgctgctggcacacggggccgaccccagcgagtgcccagcccacgagtccctcacccacatctgcctgaagagctttaaactgcacttccctctcctgcgcttcctcctggagtccggagccgcctacaactgctccctgcacggtgcgtcctgctggtctggctttcacatcatctttgagaggctctgttcccacccaggctgcacggaagacgagagccatgcggacctcctgcgcaaagctgagactgtcctggatctcatggtgaccaactctcagaaactccagctgcccgaaaacttcgatatccaccctgtgggcagcctggcggaaaagatccaggccctccacttctccttgaggcagctggagagctatcccccgcccctcaagcacctgtgccgtgtggccatccggctctaccttcagccgtggcctgtggatgtgaaggtcaaagccctgcctctgcccgacaggctgaagtggtacctccttagcgagcacagtggctccgtggaagatgacatctgataggtctcaggctacaggaacgggggacacgggcagctcaggtcagcctgttggtagatgctgggacagcattagaagagggtctttttgatctgggagatgagacgggatccttcatgagaaaagccagccaggtagagcctgaagctgtgatcactccagtggtgaagggtgcagctctggttcttccagagagactgcccccttccctccagcggcactccaagtcccccccatgttggaaagaggaacagggcttggattgatgtttataccctctgaattggagggcagtgccagggcatttgcagaagctgggaaggaccaagcctcagcaccccagggctgcggggctcttgttggccgcacgtggcagtgcagctggagaggaagcctggggcacgtcctgtgcggtgccaccaaggccccacccctgccccttttccttccaggttctgttactcacagaagtgtttctggtgggctctgcgggagaagacactaagggccccacaggcttgtttcatggtgttgcaagccaagctggcccctgcctgttcctgtagctctggggccaggtcagccgtggccccacctaccagaactgtgctctgctggcagctgtgcttttgccaaacccagggcctcagcgaccatgacttctgctaaaaagcaatcatgagtgcgtggctggggacagacctctctgaagtgtctcctgttgtgaggggctcactttggagccactgaagagccgactgtgccacccacttgcgagcctcagtcccttccaagctgcactggtcattgggaattgtgtaaacacctctggggataagctgaggtgactaaatgatatatttatattataagattaaactgactttcttggccttaacaaggtccttatataaaatttccaccccgcccctccatagttcaggatagaggctcccacagcagccggtaaggaagtgggtggcaggtgtgaggggatgctgtgtttggggggttgtttccaagtccctgcaaagaagcaccactctagactggcaagggcctccacagtgtggaggtcccattttattatttttttttttcgagacactctgtcacccaggctggagtgcaatggtgcaatctcggctcactgcgacctctgcctcccaggttcaagcagttctcctgcctcagcctcctgagtagctggcattataggtgcccaccaccatgcctggctgatttttgtatttttagtagagacggggtttcgccatgttggtcaggctggtctcaaactcctgacctcaggtgattcgcctgcctcggcctttcaaagtgctgggattacagacatgagccactgtgcccggcccccattttattttagttttattttgagacagagtctcgctctgtcacctaggctggagtgcagtggcgcaatctcacctcactgcaagctctgcctcccgggctcaccccattctcctgcctcagcctcctgagtagctgggactacaggcgcccgccatcacgcctggctaattttttttttttttgtattttaagtagagacggggtttcacctgttagccaggatggtctcaatctcctgacctcgtgatctgcccgcctcggcctcccaaagtgctgggattacaggcgtgagccaccgcgcccagccccattttattttttactttaaatgcctgccaaggagcagcctcaagcccagagaagactgaggctacggggaacttcccttgctgcaggctgttgtaacactttaagggccccaggtctccactgccaagcaggacttggcacatgagcacccaccccacagcaccatcaggcagcacccatgggctccaccagcccagctctgtccctcccctaggtaaagatcacactgaagtcttcaagtccccagcaaccaagttgggggtggtttccttcctcttcaggcagccaggcccatggctggaaggccgggctggaggcccagggaatcggttactgatgtggccaccctattcccacatggggagcaccaggagccctggagccccttccacccaatcccatctcgcaggagagcagggtctgggctcctgcctcaccgctggttcagcagcaccctccccgccgggtcccaccttgccttttgaagaagagcccgcataatgagtggacggcagacagctatatttagtggtgcctcgacactcacgaaccgccagcgtggcgcctggatcttgcccagctgccagctccccccaccaggactgtggttcctcagtttctcctgccagccccggctcatctcagggcaaagctatagacatggtagatctcatcggggaggttctcctgcctctcctcggccaggaggctgaggcctgcactgcagatgatcctgcggaccacgtcaaggtcccggcacacgctgctgtccacgtcgtccagaatcacgccctcctgggccatgttgtctttgatgacgatgatgccgttggggcggaggctgcccttgcagcgccgcaggaactcggccaggtgctgatcggtgaggtggcctggggagggcagaggcaaggttaccagggcaccatgcaagcggatgtcggcactggatgggatgtacttctcagccccgctgagcccctcatttgtgcccagcattttgtgtgcacacatggcctcattggctctcagtcccgagagatttactaaaccccaattcatagaataggaaactgtggctcagaggtcatctacctaaagacacattaagccagaatttgacttgacgggatggcttacaagtcctgcctgatacctacacaccatgatgccccacccctgccaggcttggatcggaggagtgaacctgggctaagagtttggcattgcaggagctcccagagagactgccttccctacactagaagtccccacaaaggcttctgagaccacaaaatacaaggccagacctagagtgtccacagcaggcctgtgctgcccgcctcaggaggtggccgactgctgctagcggcctgccgccacgtcagcagcccagggcacagcgctcgaggtgtgctgttaggctaagagggtgcagggctagacacgaagcttaaactattcatcttattaaaaataaaacccttataaaactccaaaaaaaaaaaaaaaaaaaaaaaaaaaaaaaaaaa

SEQ ID NO: 96 - DNA, 4895 bp, Homo sapiens
cagacccggaagtggatcgtgcggagcaagcatcacaccatggcgtatgagtgttcctctgtgtagactcaacctgcgcctcgccgtcccccattcgcacacccgatgcccgggggtcgctacggacttaaaatctccgcaccgcaccctccacctcagaaacgttcctggatccgaacactgccccctgacgacctagagagatcccggctcccagcccactgagtggcttcagcctcgctggaagaagtctggaagaagaggaagaggaaagaaaaggagtcagggatggcccttactcaggtacggttgacatttagggatgtggccatagaattctctcaggaggagtggaaatgcctggaccctgctcagaggatcttatacagggacgtgatgttggagaactactggaaccttgtttctctgggactgtgtcattttgatatgaatattatctccatgttggaggaagggaaagagccctggactgtgaagagctgtgtgaaaatagcaagaaaaccaagaacgccggaatgtgtcaaaggcgtggtcacagatatccctcctaaatgtacaatcaaggatttgctaccaaaagagaagagcagtacagaagcagtattccacacagtggtgttggaaagacacgaaagccctgacattgaagacttttccttcaaggaaccccagaaaaatgtgcatgattttgagtgtcaatggagagatgacacaggaaattacaagggagtgcttatggcccagaaagaaggtaaaagagatcaacgcgacagaagagacatagaaaacaagcttatgaacaatcagcttggagtaagctttcattctcatctgcctgaactgcagctatttcaaggtgaggggaaaatgtatgaatgtaatcaagttgagaagtctaccaacaatggttcctcagtgtcaccacttcaacaaattccttctagtgtccaaacccacaggtctaaaaaatatcatgaacttaaccatttttcattactcacacaaagacgaaaagcaaacagttgtggaaaaccttataaatgtaatgaatgtggcaaggcgttcactcagaattcgaaccttacaagtcataggagaattcatagtggagagaagccttacaaatgcagtgagtgcggcaaaacctttactgttcgttcaaatctaactattcatcaggtcatccatactggagaaaaaccttacaaatgtcatgagtgtggcaaggtcttcaggcacaattcataccttgcaactcatcggcgaattcatactggagagaaaccttacaagtgtaatgagtgtggaaaagcctttagaggacattcaaacctaactacccatcagttaattcatactggagaaaaaccgttcaaatgtaatgaatgtggcaagctcttcactcaaaattcacaccttataagtcattggagaattcacactggagagaaaccttacaagtgcaatgagtgcggcaaagcctttagtgttcgttcaagcctagcaatccatcagacaatccacactggagaaaaaccttacaaatgtaatgaatgtggcaaagtctttaggtacaattcatacctcggaaggcatcggagagttcatactggtgagaaaccttacaagtgtaatgaatgtggcaaagccttcagtatgcattcaaacctagctacccatcaggtcatccatactggaacaaaacctttcaaatgcaatgaatgcagcaaggttttcactcaaaattcacaacttgcaaatcatcgaagaattcatactggagagaaaccttacaagtgtaatgagtgtgggaaagccttcagtgttcgttcaagtctgactacccatcaggcaatccattctggagagaaaccttacaaatgtattgaatgtggcaagagcttcactcaaaaatcacaccttagaagtcatcggggaattcattctggagagaaaccttacaagtgtaatgaatgtggtaaagtcttcgctcaaacatcacaacttgcaaggcattggagagttcatactggagaaaaaccttacaagtgtaatgactgtggcagagcctttagtgatcgttcaagcctaacttttcatcaggcaatacatactggagagaaaccttacaaatgtcatgaatgcggcaaggtttttaggcacaattcataccttgcaactcatcggcgaattcatactggagagaaaccttacaagtgtaatgagtgtgggaaagcctttagtatgcattcaaacctaactacccataaggtcatccatactggagagaagccttacaaatgtaatcaatgtggcaaggtcttcactcagaactcacaccttgcaaatcatcaaaggactcacaccggagagaaaccttaccgatgcaatgagtgtgggaaagccttcagtgttcgttcaagcctaaccacccatcaggcaatccatactgggaaaaaaccttacaaatgtaatgaatgtggcaaggtctttactcaaaatgctcacctggcaaatcaccgaagaattcatactggggagaaaccttacaggtgtacagagtgtgggaaagcctttagggtaagatcaagtctaactacccatatggcaatccacactggagaaaagcgttacaaatgtaatgagtgtggcaaggtcttcaggcagagttcaaatcttgcaagtcatcacagaatgcataccggagagaaaccttacaaatgagtgtggtgaggtcattaggtacaattcactcctttcacatcagttaatttcattcttgacagaatccttacaaatgtagtgacagtggccaatccctcatgagttgaagcattaatagatatgagaggccataagcaagagacatcatgtaaacatatgtggcagagggtctatccaggcctcgcaggttactaggcatcaagatttatatctttgatgaaacgaaacaaatgtaatatgcatcctgaggccattacccagtgaccgatggtaagtgaggattcctaggaggaataacagtctctggtttccctgtttgcctttgatattatacactgtagaatactcacaagtccaaatatgctaaaaattatatatttttaactcacatacgaaaaggttgcaggatatttgtaggcagtcagttaccttcaccttatgaaatgtttcactgagttatttgaggttttttggaaagcctactattgcgtttcaatgtgaactttgaaatcttattgtgcatccttacacaccttccatggtgctttcttggaaagatcattgggatggaaggatcattgattgggtgaagatcattgattaggtgaaggattatttctatccaatttgtgaagaaggaggactttgcttttaaaattaagtatcatctgaattagcatttgggagtggcgaaaaacaatgtaaaactatgatgtcactcaccattctgataatgttcagggtgcctttctcctaccaggagagtactgtggcttagaggaaagaaatggtctatcaactgaacatgaaatggagcaggccaagaccttaggacattgggatttttgtgggaggagagtaataggtaattagacactgattgtgtggtagaaatactgcaggggaaaaggtcgccctcttatgcatcaaagagcaatacctgttgtttagcaaagagtgatgaaaaattgatcttgttttgaaattgaagagagaggccaggcgcggtggctcacacctgtaatcccagcactttgggaggctgaggcaggtggatcacctgaggtcgggagttcgagaccagcctgaccaacatggagaaaccccaattgtactaaaaatacaaaattagccgggcgtggtggcaggtgcctgtaatcccagctacttgggaggctgaggcaggagagtgcttgaacccaggaggcggaggttgtggtgagccaagatcatgccactgcactccagcctgggcaacaagaacaaaactccatctaaagaagaaaaagaaaaactgaagagagagtagttgtcagagtgaagagtttaatcaacagaagtagagtaacatattctttagtagaactcacattatctgcttgaagcacattttgctaatgttttattcagaatgtatcatagatataatgttttaactaataaaatagaatggtttttctctatgaatgaatcacattctttctgccaacatagttttatcctgtctcagtaggatactccataacacaatagcagtacaccactaggctcttaaacgatcaagaacaatttttttcatggtgaaatcaaataacgcagttttggaaacctataaccgcattttgtgcttgaattacgtgccccacactgtggcttaggatacttattggggtataatgaaaatcttactgaaagttaatttcacattcttacaccccaaaatctgcattgccattgatgcatatgcaccacattattatatttccacatcagtttcttgtgtgccaaataagacccatgctatgcatcttggtttccatgaagtgaaaatacatagtaagaatgcgagaaatataaatcaggccaggcacggtggctcacacctgtaatcccagtactttgggaggccaaggcaagcagatcacctgaagtcaggagagaccagcctggccagcatagtgaaaccccatctctactaaaaatacaaacttagctgggcttagtggtgcatgcctgtagtctcagctacttgggaggctgaggcaggagaattgcttgaatccaagaggcagaggttctattaatggagatcattccattacactccagcctgggcaccaggaacgaaactcgttctcaaaaaacaaaac

SEQ ID NO: 97 - DNA, 4980 bp, Homo sapiens
cagacccggaagtggatcgtgcggagcaagcatcacaccatggcgtatgagtgttcctctgtgtagactcaacctgcgcctcgccgtcccccattcgcacacccgatgcccgggggtcgctacggacttaaaatctccgcaccgcaccctccacctcagaaacgttcctggatccgaacactgccccctgacgacctagagagatcccggctcccagcccactgagtggcttcagcctcgctggcgcctgccccgggccccgcctacaggggacccagctcttcttgcagccactggaagctgatcacctggagtgaagacctcacacgaagaagtctggaagaagaggaagaggaaagaaaaggagtcagggatggcccttactcaggtacggttgacatttagggatgtggccatagaattctctcaggaggagtggaaatgcctggaccctgctcagaggatcttatacagggacgtgatgttggagaactactggaaccttgtttctctgggactgtgtcattttgatatgaatattatctccatgttggaggaagggaaagagccctggactgtgaagagctgtgtgaaaatagcaagaaaaccaagaacgccggaatgtgtcaaaggcgtggtcacagatatccctcctaaatgtacaatcaaggatttgctaccaaaagagaagagcagtacagaagcagtattccacacagtggtgttggaaagacacgaaagccctgacattgaagacttttccttcaaggaaccccagaaaaatgtgcatgattttgagtgtcaatggagagatgacacaggaaattacaagggagtgcttatggcccagaaagaaggtaaaagagatcaacgcgacagaagagacatagaaaacaagcttatgaacaatcagcttggagtaagctttcattctcatctgcctgaactgcagctatttcaaggtgaggggaaaatgtatgaatgtaatcaagttgagaagtctaccaacaatggttcctcagtgtcaccacttcaacaaattccttctagtgtccaaacccacaggtctaaaaaatatcatgaacttaaccatttttcattactcacacaaagacgaaaagcaaacagttgtggaaaaccttataaatgtaatgaatgtggcaaggcgttcactcagaattcgaaccttacaagtcataggagaattcatagtggagagaagccttacaaatgcagtgagtgcggcaaaacctttactgttcgttcaaatctaactattcatcaggtcatccatactggagaaaaaccttacaaatgtcatgagtgtggcaaggtcttcaggcacaattcataccttgcaactcatcggcgaattcatactggagagaaaccttacaagtgtaatgagtgtggaaaagcctttagaggacattcaaacctaactacccatcagttaattcatactggagaaaaaccgttcaaatgtaatgaatgtggcaagctcttcactcaaaattcacaccttataagtcattggagaattcacactggagagaaaccttacaagtgcaatgagtgcggcaaagcctttagtgttcgttcaagcctagcaatccatcagacaatccacactggagaaaaaccttacaaatgtaatgaatgtggcaaagtctttaggtacaattcatacctcggaaggcatcggagagttcatactggtgagaaaccttacaagtgtaatgaatgtggcaaagccttcagtatgcattcaaacctagctacccatcaggtcatccatactggaacaaaacctttcaaatgcaatgaatgcagcaaggttttcactcaaaattcacaacttgcaaatcatcgaagaattcatactggagagaaaccttacaagtgtaatgagtgtgggaaagccttcagtgttcgttcaagtctgactacccatcaggcaatccattctggagagaaaccttacaaatgtattgaatgtggcaagagcttcactcaaaaatcacaccttagaagtcatcggggaattcattctggagagaaaccttacaagtgtaatgaatgtggtaaagtcttcgctcaaacatcacaacttgcaaggcattggagagttcatactggagaaaaaccttacaagtgtaatgactgtggcagagcctttagtgatcgttcaagcctaacttttcatcaggcaatacatactggagagaaaccttacaaatgtcatgaatgcggcaaggtttttaggcacaattcataccttgcaactcatcggcgaattcatactggagagaaaccttacaagtgtaatgagtgtgggaaagcctttagtatgcattcaaacctaactacccataaggtcatccatactggagagaagccttacaaatgtaatcaatgtggcaaggtcttcactcagaactcacaccttgcaaatcatcaaaggactcacaccggagagaaaccttaccgatgcaatgagtgtgggaaagccttcagtgttcgttcaagcctaaccacccatcaggcaatccatactgggaaaaaaccttacaaatgtaatgaatgtggcaaggtctttactcaaaatgctcacctggcaaatcaccgaagaattcatactggggagaaaccttacaggtgtacagagtgtgggaaagcctttagggtaagatcaagtctaactacccatatggcaatccacactggagaaaagcgttacaaatgtaatgagtgtggcaaggtcttcaggcagagttcaaatcttgcaagtcatcacagaatgcataccggagagaaaccttacaaatgagtgtggtgaggtcattaggtacaattcactcctttcacatcagttaatttcattcttgacagaatccttacaaatgtagtgacagtggccaatccctcatgagttgaagcattaatagatatgagaggccataagcaagagacatcatgtaaacatatgtggcagagggtctatccaggcctcgcaggttactaggcatcaagatttatatctttgatgaaacgaaacaaatgtaatatgcatcctgaggccattacccagtgaccgatggtaagtgaggattcctaggaggaataacagtctctggtttccctgtttgcctttgatattatacactgtagaatactcacaagtccaaatatgctaaaaattatatatttttaactcacatacgaaaaggttgcaggatatttgtaggcagtcagttaccttcaccttatgaaatgtttcactgagttatttgaggttttttggaaagcctactattgcgtttcaatgtgaactttgaaatcttattgtgcatccttacacaccttccatggtgctttcttggaaagatcattgggatggaaggatcattgattgggtgaagatcattgattaggtgaaggattatttctatccaatttgtgaagaaggaggactttgcttttaaaattaagtatcatctgaattagcatttgggagtggcgaaaaacaatgtaaaactatgatgtcactcaccattctgataatgttcagggtgcctttctcctaccaggagagtactgtggcttagaggaaagaaatggtctatcaactgaacatgaaatggagcaggccaagaccttaggacattgggatttttgtgggaggagagtaataggtaattagacactgattgtgtggtagaaatactgcaggggaaaaggtcgccctcttatgcatcaaagagcaatacctgttgtttagcaaagagtgatgaaaaattgatcttgttttgaaattgaagagagaggccaggcgcggtggctcacacctgtaatcccagcactttgggaggctgaggcaggtggatcacctgaggtcgggagttcgagaccagcctgaccaacatggagaaaccccaattgtactaaaaatacaaaattagccgggcgtggtggcaggtgcctgtaatcccagctacttgggaggctgaggcaggagagtgcttgaacccaggaggcggaggttgtggtgagccaagatcatgccactgcactccagcctgggcaacaagaacaaaactccatctaaagaagaaaaagaaaaactgaagagagagtagttgtcagagtgaagagtttaatcaacagaagtagagtaacatattctttagtagaactcacattatctgcttgaagcacattttgctaatgttttattcagaatgtatcatagatataatgttttaactaataaaatagaatggtttttctctatgaatgaatcacattctttctgccaacatagttttatcctgtctcagtaggatactccataacacaatagcagtacaccactaggctcttaaacgatcaagaacaatttttttcatggtgaaatcaaataacgcagttttggaaacctataaccgcattttgtgcttgaattacgtgccccacactgtggcttaggatacttattggggtataatgaaaatcttactgaaagttaatttcacattcttacaccccaaaatctgcattgccattgatgcatatgcaccacattattatatttccacatcagtttcttgtgtgccaaataagacccatgctatgcatcttggtttccatgaagtgaaaatacatagtaagaatgcgagaaatataaatcaggccaggcacggtggctcacacctgtaatcccagtactttgggaggccaaggcaagcagatcacctgaagtcaggagagaccagcctggccagcatagtgaaaccccatctctactaaaaatacaaacttagctgggcttagtggtgcatgcctgtagtctcagctacttgggaggctgaggcaggagaattgcttgaatccaagaggcagaggttctattaatggagatcattccattacactccagcctgggcaccaggaacgaaactcgttctcaaaaaacaaaac

SEQ ID NO: 98 - DNA, 1554 bp, Homo sapiens
accggtgtatcatgggagcggcccgggctacacgttaaaaacactaaggggagcgcgcgaagctgaacttggcgctcgatgggggccgttagccgccctagagcgcgcggagccgcagaggcgtagctggactacaacgcagtgcatctcgggaggccaactcgactggactgggtgagaggacagaggtggctcgatgggcggcccgaaggccggggatcatggcgggaaggcgggcccagccaggttcagccccgccccgacccgccgctccccacccccggccggcctcgcgtgccttcccgcagcactgccgtccccgggatgctgagcgcccaccgtctccccgcagccccctcatgcccggctgcgagctgcccgtgggcacctgcccggacatgtgcccggccgccgagcgcgcccagcgcgaaagggagcaccgcctgcaccgcttggaggtggtgccgggttgccgccaggacccgccccgcgcggatccgcagcgcgcggtgaaggagtacagccgacccgccgccggcaagccccggcccccgcccagccagttgcgtccgccctccgtgctgctggccaccgtgcgctacctggccggtgaggtggcggagagcgccgacatcgcccgcgccgaggtggccagcttcgtggcagaccgcttgcgagctgtgcgcctggacctggcgctgcagggagcgggcgacgccgaggcagcggtggtgctggaggcggcgctggccacgctgctggccgtagtggcgcggctcgggcccgacgcggcgcggggacccgcggacccggtgctgctgcaggcccaggtgcaggagggcttcggctcgctgcggcgctgctacgcgcggggcgccgggccgcacccccgccaacccgccttccagggcctctttctgctctataacctgggctcggtggaagccctgcatgaggttctacagctgcctgctgccctgcgcgcctgcccgcccctccgcaaggccttggcggtagatgctgccttccgagagggcaatgctgcccgcctgttccgtctgctccagaccctgccctacctgccaagttgcgctgtgcagtgccatgtgggccatgcccgccgggaagccctggcccgcttcgctcgtgcctttagcacccccaagggccagaccttgcctctgggcttcatggtcaacctcttggccctggatggactcagggaagcacgggacctgtgccaggcccacgggctgcccttggacggagaggagagagttgtgttcctgaggggtcgctacgtggaggaagggctaccgcctgccagtacgtgcaaggtgttagtggagagcaaacttcgaggacgtaccctggaggaggtggtcatggcagaggaggaagatgagggcacggacagacctgggtccccagcctgaggagggagcgtgagcctcccagagccccaggactgggccagagcacttaggtttctttttccatggtttccaggtaataaaaggaacttgttttgttggtaaaaaaaaaaaaaaaaaa

SEQ ID NO: 99 - DNA, 3325 bp, Homo sapiens
cgggtgtcagggctatgagtgcttttaaggaaggtctccatagaaggttcccccagcaaagtagggaggggtactccccgagaggagtcgaggtgccggagcctgctgcctcgccgacgctgggaggagccccgtgtcccgccgcgcttgccaagggttggctgcgcgtgcggcgggagtagaggcgccttgcgcaccaggaagtgactgtttccccgccgcagcaaaccaggccatccgctggccttttagtttgccgcctcagaaaactccctactatgccaaactgtccgcggggcggggaatggaggaggcaggcggggctggagacgggacccgacggtgactgcgcaaggtcgtgtacggcccagcgtgggcctgtgccctaactcctcccactcccttactttctgtccttcccgggccctgcagaccggccaagtttagtggtagcctttcctagtgtctcctctttgttaacccttcctacagacacagtgggcagaacttgcctaaagaagaagggaatggaagggctagtggagtcttgttggggagacaaggacctgactgcctgtgggctgcattcgggacacgacacagcagtcaacccatttgcttgtttggtttagcaaggaatagtgtctggagccggtccagctgaaggaagggtgagcagagagtgcaagcaggacccttgtcggtgggtgaacattttgctccaaaagggatccttggccctgcgcaggtggatttcagtgtgttctttggatggcaggccttaagagaagagtcccactgcacagcctcagatacttcatctccatggtgggtctcttctccaaaccaggactgcttccctggtatgccagaaatccaccaggatggtcacagctctttctgggcacagtatgtaagggagatttcacccgtgtgatagccacgaaatgtcagaaaggacaaaaaagtcagaagaaaccaagccatcttggaccactagatggttcctggcaggaaaggctggctgatgttgtgacaccactctggaggttgagctatgaagaacagctcaaggtgaaatttgcagctcagaagaaaattttacaaagactagagtcttacatccaaatgctcaatggagtcagtgtgacaacggctgtacccaaatctgagaggctctcttgtcttctccatcctattataccctctcctgtcatcaatggttaccgaaataagtccaccttctctgtgaaccgaggtccagatggcaatccaaagactgtggggttctacctgggaacttggagagatgggaacgttgtctgtgtgcagtctaatcatctgaaaaacatccctgagaaacacagtcaagtggcgcagtactatgaagtattccttcgacagtctccattggagccctgccttgtatttcatgaaggtggatactggcgtgagctcacagtccgcaccaatagccaagggcacacaatggctatcatcactttccatccccagaaattaagtcaggaggagctccatgttcagaaggagattgtaaaggaatttttcatcagaggtcctggagcagcctgtggcttgacctcactttacttccaggaaagtaccatgacccgttgcagccatcagcagtctccctatcagcttctgtttggggaaccctacatctttgaagaacttctgagcttgaagatccgcatctctccagatgcctttttccagattaacacagctggtgcagagatgctgtatcggactgtgggggagctgactggagtgaactctgacaccatccttcttgacatctgctgtggaactggtgtgattggcctctctctggctcagcatacatctcgggtccttgggattgaattgttggagcaggcagtggaggatgcaagatggactgcagccttcaatggcatcaccaactctgaatttcatactggtcaagcagagaagattttgccagggctgctaaagtcaaaggaagatggacagtcaattgttgctgtggtgaacccagcccgtgccggactgcattacaaggtgattcaagccattcgaaacttcagggccatccacacgctagtttttgtttcctgcaagctccatggtgaatccactaggaatgtcattgagctgtgctgtcctccagaccctgctaagaagctcttaggcgagccctttgtcctgcagcaagctgtacctgtggatttgttccctcacaccccacattgtgagctggtgctcctctttactcgataagcagcctcctagaagactgcaggctatttgttaaggctgaagtttcagaaactttcaggtttggcatattgctacattgcagaccctgggagcattacagtggaaaccaatctttggtttgtgaataggaagaatctattaggcctctggtctgaggcagattttttttttgagatggggtctcactcttgcccaggctggagtgtcgtggcgtgatctcagctcgctgcaacctccgcctcccgggttcaggtgattctcgtgcctcagcttccccagtagctaggattaaaggtgcgtgccaccatgcccggctaatttttgtatttttggtagagacagggtttcaccatgttggccaggctggtctcaaactcctgacctcaagtgatccacccgcctcggcctctcaaagtgctgggattataggcgtgagccaccacaccccgccgcggctgacttaaccttagatttcagattccctttcaatcatgcccgtttgcttgggtttgaccactccccactcctggatctggactgtttcttcctgttgctgtcagccttggttctagtttatagtcttgtctcctccgtttctgcttatggtgtggacaaatgaccttttttaagcagctggtaataattttacattgactggagcctgtgcatttgctcagagatgctacaatttttagatatttctaagacttctggattcttgaggtagttaaggattaaaaccagaaacagtcgaggttttttaaaagcagggtaagccatgaagtgaatacagggtgactgagtgatcatcagatgagattaattcttttgggttttcttggttttaaggcatctcgaatgccccttgaaaatgtagttttccctggtggtgggcacctgtaatcccagctgctcgggaggctgaggcaggataattgcttgagcctgggaggtggaggttgcagtgagctgagattgtgccactgcgctccagcctgggtgacagagtgggacaccatctcaaaaaaaaaaaaaaaaa

SEQ ID NO: 100 - DNA, 1547 bp, Homo sapiens
ttgccgccgccgccacccccgcccaggatggcggaagtggaggcgccgacggcggccgagacggacatgaagcaatatcaaggctccggcggcgtcgccatggatgtggaacggagtcgcttcccctactgcgtggtgtggacgcccatcccggtgctcacgtggtttttccccatcatcggccacatgggcatctgcacatccacaggagtcattcgggacttcgcgggcccctactttgtctcagaggacaacatggcctttggaaagcctgccaagtactggaagttggaccctgctcaggtctatgctagcgggcccaacgcatgggacacggctgtgcacgacgcctctgaggagtacaagcaccgcatgcacaatctctgctgtgacaactgccactcgcacgtggcattggccctgaatctgatgcgctacaacaacagcaccaactggaatatggtgacgctctgcttcttctgcctgctctacgggaagtacgtcagcgttggggccttcgtgaagacctggctgcccttcatccttctcctgggcatcatcctcaccgtcagcctggtctttaacctccggtgatggctgctcggtggccccacacccaccagggtcccgaggaaacagccgccatcccttttggttccagatttttttctcctcaccccaaaaggcagggttgggcctgctgttgtggaccgggggtcggggctggcaggatggaaggactgaggaccagcatgaagtgggggtttgttgtctccctgcctctcagaagcaccctgtcccctcctccccaggcctgtgactccggccctggaagcccctttgttcttctgttgaaaggctttggcttccctctgtagagctgctcccgccaccacctgctggggtcctgcctcagcccagtgcccagtatggggagaggaggacatttgggctcacctgtcaaggtggccctgggaccagagctggtcccagcatggggtgcaccgggtacacttaacgtgtctctataagccaagttgcttcaggaccttcaccactggcctctagaatggtccagaggggctggctgggtccctttgtcagactcctgccggcagctgccctgggggacatgtgtgcccatctggcatcctccagcccgtgcagtccgctcttcactgttccacggcctcccagtgcctcccagcattggacccatctccccctgcagtttgaggccagagaggtgagtggacctgacaagtgccagagtaaccgtgtagacagagcagtgtagacagcgctcagccccagccccaggtgtggacctcatgctggtgatggctcccctgggtggcctgccagcacagccagtgccatcagggagctgaaggggctgtcccccacctaactccagctcccccttcacgttgtcaccaaggccctgtgccgcccgcctcgcccccctgctctgtggattcctttgggaagggctccctgggcaggacaataaagagttttgactccaaaaaaaaaaaaaaaaaaaa

SEQ ID NO: 101 - DNA, 3089 bp, Homo sapiens
aggcgcctgagaggctctctaccggtgagggtttgcggggaagatggagtatcccgcgccggccacggtgcaggccgcggacggcggagcggccgggccttacagcagctcggagttgctggagggccaggagccggacggggtgcgctttgaccgcgagagggcgcgccgcctgtgggaagccgtgtccggtgcccagccggtgggtagagaggaagtggagcacatgatccagaagaaccaatgtctcttcaccaacacccagtgtaaggtttgctgcgccttgcttatttctgagtcccagaagctggcacattaccagagcaaaaaacatgccaacaaagtgaagagatacctagcaatccatggaatggagacattaaagggggaaacgaagaagctagactcagatcagaagagcagcagaagcaaagacaagaaccagtgctgccccatctgtaacatgaccttttcctcccctgtcgtggcccagtcgcactacctggggaagacccacgcaaagaacttaaagctgaagcagcagtccactaaggtggaagccttgcaccagaatagagagatgatagacccagacaagttctgcagcctctgccatgcaactttcaacgaccctgtcatggctcaacaacattatgtgggcaagaaacacagaaaacaggagaccaagctcaaactaatggcacgctatgggcggctggcggaccctgctgtcactgactttccagctggaaagggctacccctgcaaaacatgtaagatagtgctgaactccatagaacagtaccaagctcatgtcagcggcttcaaacacaagaaccagtcaccaaaaacagtggcatcatccctgggccagattccaatgcaaaggcaacccattcagaaagactcaaccaccttggaagactagaggtgattctgcccagcatcccatattgggccagccatgagccagcttcccgtgactgctcagcccttggctccctcttgctcgttgttctcaccaggaaagtacacgggcctgaggcaggattgggccacagacagcctctcattggtccgggctaattcactcctgctgctcccctttggcaggggtcctgtaggtcatgacaggggaggcaagggtattgagagactcggggtctcgcggggtggtagtttggagggtggctttccccatttcccaacccctctgggccttaggtgctgaggcccctgccacctgtctttcctctaaaggtcagttttgggccagttcttgcaactaaagagcagagatctctctgggccctagacatttccagcaaaacctggaactttcatgccaaacctggggcagggcaggaaacagaggaaatggctgcaacatgggagcttggagctaatacgacactctgccttcccccagaaggtgcaggctttcctgagtcttagaccagatatggccagttgcgcaggtttctgccaactgtgaagtatcctcctggagcagtgacacaatcttggcggagcattgctacccccgctgccccctccacagttcctgaatggtgctaaggatctgcagcagttggcaacgagctggggctgggggcggcctccatgtccactgagatcataggacactccaatggggatgggacctttcccctcctccatcagaggtgctctgaccctaggttacacgggaaagtgccccacatgcaagtctccctgagggttctgcccctaaaggcagactgcctcatgcccgctagctgtgaggttcattgctaccctcggccctactagccctctcttcccccttgtgcagcggaccacttgcccagtttgctgtggtgctagccttccccatcatccaccgggtgatttctgggtcccagggaaagaaagagagagctgatgcaggtttctacagtgaggaacaggcgtttcccaggccccacacccagatttctctatctttgctgtgttttatggcctgggactgagtccacacggatagatttttccttgtaaccttgagacgagaattccaaggagtgtcaccatcagaggcttctcttcattgtgtcaaagaagcccctagctgctctcgtggcctccttcccccactccctatcccttcacctgtgaaatgcctttgctttgcatattgtgtgtggatgtgtgtgtgtgtgtgtgtgtgtttgtgtgtatgtgtgtgcttctgtgtgtgcctaatgctctgtctcttggtcactgaagcatccaaataaagaatttccctcatgggccagactacaacttaacagacctagggttttgagccatattgccattggatctagtatgtctgtcttgacccctcacccccaccccattcagacctcagtagtccccagtagtcactttaggagttgggacagagtcgagcaccctgtgaaagtctcccttgagttcaggtgccctgaactcagtacagcctcatcttctcatccaccaccttctcctgcttctcctgtcacatagggcctcatgaaggtctttaaagggtttaagctggggatctgctttatgtttgagagaactgttctggctgttatgtaaaggagtgcagggaggggcaggaaaggagacaaggaggccagtatggacactgtgtccagtatggctttccaggctaatcacttagggcagagacccagccttattcatctctacttcctgatgtccatagtggtgtgtcatgaatttttattgaatgaacaaatgaggtgtatgaggagagatggttttctcctgctcagctcttacacagtgataggtttgttccatgggacttatcataggcctggtgattcttgaaagagcatttttcatgactcaaaaatgagctgagaaggagtgttatggccaggtgcggcgtcatgcacctatagtcccagctgctcaggaggctaaggcagaaagaccattcaagcccaggagttccagcctgaagtatgctgtgatcatgcctgtgaataaccactgcactccagccagggcaacataacaagactctatctaaaaaaaaaaaaaaaaaa

SEQ ID NO: 102 - DNA, 2012 bp, Homo sapiens
gcggttcggcgcggaaagcgggaggtggaggggcggcttggggcaagcgcgcgcgcgcagtgcagaagccagccccccgcggctgaggtactcaaggtgcccaaaggcggggtagtgacctcgcgcgtgcgctgtgcccgcggcagcgccgggtcctagtgtgtgggttgttgttggcaccgcacggcgcgtgcgcagtgaggacggcggagggatttgcggccgggacccaccccctgctccagtcgctatcggaggccgcgcgggtggctgagcagcggcctggtgcgctcgcttagcgggcgacggaatcagacggacgtggacgcccccggagtggaagccgaagcaggagttgttgttgctgaggggctgccgcagccgccgcgagcctccggacagacgccagagcgaggagggcgctacgcgacttggcaagatgacccagttcctgccgcccaaccttctggccctctttgccccccgtgaccctattccatacctgccacccctggagaaactgccacatgaaaaacaccacaatcaaccttattgtggcattgcgccgtacattcgagagtttgaggaccctcgagatgcccctcctccaactcgtgctgaaacccgagaggagcgcatggagaggaaaagacgggaaaagattgagcggcgacagcaagaagtggagacagagcttaaaatgtgggaccctcacaatgatcccaatgctcagggggatgccttcaagactctcttcgtggcgagagtgaattatgacacaacagaatccaagctccggagagagtttgaggtgtacggacctatcaaaagaatacacatggtctacagtaagcggtcaggaaagccccgtggctatgccttcatcgagtacgaacacgagcgagacatgcactccaccacgcagctggcttgcagctgatgcttacgctccccttacaacacctcagtgtatggttggtataaggccgcttacaaacacgcagatggcaagaagattgatggcaggagggtccttgtggacgtggagaggggccgaaccgtgaagggctggaggccccggcggctaggaggaggcctcggtggtaccagaagaggaggggctgatgtgaacatccggcattcaggccgcgatgacacctcccgctacgatgagaggcccggcccctccccgcttccgcacagggaccgggaccgggaccgtgagcgggagcgcagagagcggagccgggagcgagacaaggagcgagaacggcgacgctcccgctcccgggaccggcggaggcgctcacggagtcgcgacaaggaggagcggaggcgctccagggagcggagcaaggacaaggaccgggaccggaagcggcgaagcagccggagtcgggagcgggcccggcgggagcgggagcgcaaggaggagctgcgtggcggcggtggcgacatggcggagccctccgaggcgggtgacgcgccccctgatgatgggcctccaggggagctcgggcctgacggccctgacggtccagaggaaaagggccgggatcgtgaccgggagcgacggcggagccaccggagcgagcgcgagcggcgccgggaccgggatcgtgaccgtgaccgtgaccgcgagcacaaacggggggagcggggcagtgagcggggcagggatgaggcccgaggtgggggcggtggccaggacaacgggctggagggtctgggcaacgacagccgagacatgtacatggagtctgagggcggcgacggctacctggctccggagaatgggtatttgatggaggctgcgccggagtgaagaggtcgtcctctccatctgctgtgtttggacgcgttcctgcccagccccttgctgtcatcccctcccccaaccttggccacttgagtttgtcctccaagggtaggtgtctcatttgttctggccccttggatttaaaaataaaattaatttcctgttgatagtgggcaaaaaaaaaaaaaaaaaa

SEQ ID NO: 103 - DNA, 1940 bp, Homo sapiens
gcggttcggcgcggaaagcgggaggtggaggggcggcttggggcaagcgcgcgcgcgcagtgcagaagccagccccccgcggctgaggtactcaaggtgcccaaaggcggggtagtgacctcgcgcgtgcgctgtgcccgcggcagcgccgggtcctagtgtgtgggttgttgttggcaccgcacggcgcgtgcgcagtgaggacggcggagggatttgcggccgggacccaccccctgctccagtcgctatcggaggccgcgcgggtggctgagcagcggcctggtgcgctcgcttagcgggcgacggaatcagacggacgtggacgcccccggagtggaagccgaagcaggagttgttgttgctgaggggctgccgcagccgccgcgagcctccggacagacgccagagcgaggagggcgctacgcgacttggcaagatgacccagttcctgccgcccaaccttctggccctctttgccccccgtgaccctattccatacctgccacccctggagaaactgccacatgaaaaacaccacaatcaaccttattgtggcattgcgccgtacattcgagagtttgaggaccctcgagatgcccctcctccaactcgtgctgaaacccgagaggagcgcatggagaggaaaagacgggaaaagattgagcggcgacagcaagaagtggagacagagcttaaaatgtgggaccctcacaatgatcccaatgctcagggggatgccttcaagactctcttcgtggcgagagtgaattatgacacaacagaatccaagctccggagagagtttgaggtgtacggacctatcaaaagaatacacatggtctacagtaagcggtcaggaaagccccgtggctatgccttcatcgagtacgaacacgagcgagacatgcactccgcttacaaacacgcagatggcaagaagattgatggcaggagggtccttgtggacgtggagaggggccgaaccgtgaagggctggaggccccggcggctaggaggaggcctcggtggtaccagaagaggaggggctgatgtgaacatccggcattcaggccgcgatgacacctcccgctacgatgagaggcccggcccctccccgcttccgcacagggaccgggaccgggaccgtgagcgggagcgcagagagcggagccgggagcgagacaaggagcgagaacggcgacgctcccgctcccgggaccggcggaggcgctcacggagtcgcgacaaggaggagcggaggcgctccagggagcggagcaaggacaaggaccgggaccggaagcggcgaagcagccggagtcgggagcgggcccggcgggagcgggagcgcaaggaggagctgcgtggcggcggtggcgacatggcggagccctccgaggcgggtgacgcgccccctgatgatgggcctccaggggagctcgggcctgacggccctgacggtccagaggaaaagggccgggatcgtgaccgggagcgacggcggagccaccggagcgagcgcgagcggcgccgggaccgggatcgtgaccgtgaccgtgaccgcgagcacaaacggggggagcggggcagtgagcggggcagggatgaggcccgaggtgggggcggtggccaggacaacgggctggagggtctgggcaacgacagccgagacatgtacatggagtctgagggcggcgacggctacctggctccggagaatgggtatttgatggaggctgcgccggagtgaagaggtcgtcctctccatctgctgtgtttggacgcgttcctgcccagccccttgctgtcatcccctcccccaaccttggccacttgagtttgtcctccaagggtaggtgtctcatttgttctggccccttggatttaaaaataaaattaatttcctgttgatagtgggcaaaaaaaaaaaaaaaaaa

SEQ ID NO: 104 - DNA, 2698 bp, Homo sapiens
ggttccgtttccggagtggagggcacgccagggtgtctgaagctgagaccccgggctcgcagtcgccccatgaatttcgagttccgcaactgacgctactgggcggggcttcatggccagggcctcgctcaggcctaagtttccccacctgtgctcaatgcacaggtgcggtgccgcctccagggccggccgagaagagaggccgcacccgcacggggactgcatctcccagagcgccccgcgagcggccgagcggcgggactccatgccctagagtgccccgcgggcggccgggcggcgggactccatgtcctagagtgccccgcgggcggccgggcggcgggactccatgtcctagagtgccccgcgggcggccgggcggcgggactccatgtcctagagtgccccgcgggcggccgggcggcggccgccgcaaccgacaggtccgggactgggcgctgcggcctcgtccgcgcgccggggcgggggcctagctcgacagcttcccggcggctgcgcgatggacagccccgaggtgaccttcactctcgcctatctggtgttcgccgtgtgcttcgtgttcacgcccaacgagttccacgcggcggggctcacggtgcagaacctgctgtcgggctggctgggcagcgaggacgccgccttcgtgcccttccacttgcgccgcacggccgccacgctgttgtgccactcgctgctgccgctcggctactacgtgggcatgtgccttgcggcttcagaaaagcggctccacgccctcagccaggcccctgaggcctggcggctcttcctgctgctggccgtgaccctcccctccatcgcctgcatcctgatctactactggtcccgtgaccggtgggcctgccacccactggcgcgcaccctggccctctacgccctcccacagtctggctggcaggctgttgcctcctctgtcaacactgagttccggcggattgacaagtttgccaccggtgcaccaggtgcccgtgtgattgtgacagacacgtgggtgatgaaggtaaccacctaccgagtgcacgtggcccagcagcaggacgtgcacctgactgtgacggagtctcggcagcatgagctctcgccagactcgaacttgcccgtgcagctcctcaccatccgtgtggccagcaccaaccctgctgtgcaggcctttgacatctggagctggaggcctgcataggctgcatgcagacacgtgccagcgtgaagctggtgaagacctgccaggaggcagccacaggcgagtgccagcagtgttactgccgccccatgtggtgcctcacctgcatgggcaagtggttcgccagccgccaggaccccctgcgccctgacacctggctggccagccgcgtgccctgccccacctgccgcgcacgcttctgcatcctggatgtgtgcaccgtgcgctgagtgggctggggccttgaggtgactctgtgtctccccgcaaagccacagggcagggaagggggtggctgggcctcctggctggcaaagggctctacttaaagcacatgatgtagagcaactcgcctctgccctgggtctgcagaaggctgaggacttttggttaaaagcaatcctcatgaaaacaccccaccctgcttggcagccagggtacaagtcctgggcacctcctctttgcctccctcctgcccctttcctgctggtgggggcagatcctgcacacacagacacagcgtctgcccccgagccattccctggagaccctgggtctaccccaggtggtcgtcatctgggccatttgccttacttctctggagcatacccaccctcagttacgtgccagacctggaccgcattctcctgccctgtcctggagctggcccctggctgcctggaggaccctgggtaggtcctgagggtgggatggagaagagggcactgctgtggtgtgggagcagtcctggggcttcctggtggctgtgaccagttgaggggctgttcctgggtggggtggcaatgggaggacaggtcagagcgccctcatttgtggggctgcccctccgggtttctcatcctgtccttggtgcctttttctgcccaacaagtccagggaaggccgaggtctcagactcctgggtaggggtgggggtttgagttgaggaccaaagtgccatagcgacatccagaacacaagcccaccaggggtccagcccaggctacccactcccctagggtctcccaggctcagaaggggatgcacgccccctgtggtcaagcctctggtgggcgtcttgcccagttcctgatggttcaaggggaggggggatgttggccaggccccagggcacagccctgacacaggtgtggctactggaggggccttcatacctgcggccccaaagcccctgggcttggctgtttgaggcagaggtgatggactccgggggcctgacacttgggatttgggaggcttcctagagcgctcagcaggtgaaggcagcaggggccatggccgggagccaggcctagctttgaactgagtttcaagggctgccaaagaggggcagtgggttggggttgtttttactacaaaataagttacttagttttataaagacaaaccgattgtagccaaatgacaccatatttaataaaatttagtctgaagtgaaaaaaaaaaaaaaaaaaaaaa

SEQ ID NO: 105 - DNA, 3294 bp, Homo sapiens
gtgaagagaggcgcggcgtgactgagctacggttctggctgcgtcctagaggcatccggggcagtaaaaccgctgcgatcgcggaggcggcggccaggccgagaggcaggccgggcaggggtgtcggacgcagggcgctgggccgggtttcggcttcggccacagctttttttctcaaggtgcaatgaaagccttccacactttctgtgttgtccttctggtgtttgggagtgtctctgaagccaagtttgatgattttgaggatgaggaggacatagtagagtatgatgataatgacttcgctgaatttgaggatgtcatggaagactctgttactgaatctcctcaacgggtcataatcactgaagatgatgaagatgagaccactgtggagttggaagggcaggatgaaaaccaagaaggagattttgaagatgcagatacccaggagggagatactgagagtgaaccatatgatgatgaagaatttgaaggttatgaagacaaaccagatacttcttctagcaaaaataaagacccaataacgattgttgatgttcctgcacacctccagaacagctgggagagttattatctagaaattttgatggtgactggtctgcttgcttatatcatgaattacatcattgggaagaataaaaacagtcgccttgcacaggcctggtttaacactcatagggagcttttggagagcaactttactttagtgggggatgatggaactaacaaagaagccacaagcacaggaaagttgaaccaggagaatgagcacatctataacctgtggtgttctggtcgagtgtgctgtgagggcatgcttatccagctgaggttcctcaagagacaagacttactgaatgtcctggcccggatgatgaggccagtgagtgatcaagtgcaaataaaagtaaccatgaatgatgaagacatggatacctacgtatttgctgttggcacacggaaagccttggtgcgactacagaaagagatgcaggatttgagtgagttttgtagtgataaacctaagtctggagcaaagtatggactgccggactctttggccatcctgtcagagatgggagaagtcacagacggaatgatggatacaaagatggttcactttcttacacactatgctgacaagattgaatctgttcatttttcagaccagttctctggtccaaaaattatgcaagaggaaggtcagcctttaaagctacctgacactaagaggacactgttgtttacatttaatgtgcctggctcaggtaacacttacccaaaggatatggaggcactgctacccctgatgaacatggtgatttattctattgataaagccaaaaagttccgactcaacagagaaggcaaacaaaaagcagataagaaccgtgcccgagtagaagagaacttcttgaaactgacacatgtgcaaagacaggaagcagcacagtctcggcgggaggagaaaaaaagagcagagaaggagcgaatcatgaatgaggaagatcctgagaaacagcgcaggctggaggaggctgcattgaggcgtgcaaaaaagaagttggaaaagaagcaaatgaaaatgaaacaaatcaaagtgaaagccatgtaaagccatcccagagatttgagttctgatgccacctgtaagctctgaattcacaggaaacatgaaaaacgccagtccatttctcaaccttaaatttcagacagtcttgggcaactgagaaatccttatttcatcatctactctgtttggggtttggggttttacagagattgaagatacctggaaagggctctgtttcaagaatttttttttccagataatcaaattattttgattattttataaaaggaatgatctatgaaatctgtgtaggttttaaatattttaaaaattataatacaaatcatcagtgcttttagtacttcagtgtttaaagaaataccatgaaatttataggtagataaccagattgttgctttttgtttaaaccaagcagttgaaatggctataaagactgactctaaaccaagattctgcaaataatgattggaattgcacaataaacattgcttgatgttttcttgtatgtctacattaaacttgagaaaaagtaaaaattagaacactgtatgtagtaatgaaatttcagggacccagaacataatgtagtatatgtttttaggtgggagatgctgataacaaaattaataggaagtctgtaggcattaggatactgacatgtacatggaaaattctagggacaggagcatcattttttccttacctgataccacgaaccagtgacaacgtgaatgctgtattttaagtggttgtatgtttattttcttgagtaacaaatgcatgaaaaattaatgcttcacctaggtaagatcattggtctgtgtgaaatcacaaatgttttttccttcttggttgctgcagcctgggtggatgttcatggagaagctctgttctctatattatggctgtgtgccgttgcttctccctctgcttttatcttttccacagttgaggctgggtatgttctttcaaagaaatggccatgaatatgtgtaagtatacttttgaaaatgagctttcctaaactattgagagttctttccacctcttgcggaaccaactcttggaggagaggcccatgtatctgcacgagcacttagcttgttcagatctctgcattttataaatgcttcttaccaagaaagcatttttaggtcattgcttgtaccaggtaatttttgccggggatgggtaagggttgggttttctggtgggagtggggtggtgggtattttttgttgatgctttagtgcaggcctgttctgaggcaataacaagttgctgtgaaaacagcatgtgctgctgcctttgtaactgcatggaaacttttcacatgggtttttctccaagttaatacagaaatatgtaaactgagagatgcaaatgtaatatttttaacagttcatgaagttgttattaaaataactaacataaaacttaattactttaatattatataattatagtagtggccttgttttacaaacctttaaattacattttagaaatcaaagttgatagtcttagttatcttttgagtaagaaaagctttcctaaagtcccatacatttggaccatggcagctaattttgtaacttaagcattcatatgaactacctatggacatctattaaagtgattgacaaaatctcaaaaaaaaaaaaaaaaaaaaaaaaaaa

SEQ ID NO: 106 - DNA, 2593 bp, Homo sapiens
ggccagcgcgtctgcttgttcgtgtgtgtgtcgttgcaggccttattcatgggctcaccgctgaggttcgacgggcgggtggtactggtcaccggcgcgggggcaggattgggccgagcctatgccctggcttttgcagaaagaggagcgttagttgttgtgaatgatttgggaggggacttcaaaggagttggtaaaggctccttagctgctgataaggttgttgaagaaataagaaggagaggtggaaaagcagtggccaactatgattcagtggaagaaggagagaaggttgtgaagacagccctggatgcttttggaagaatagatgttgtggtcaacaatgctggaattctgagggatcgttcctttgctaggataagtgatgaagactgggatataatccacagagttcatttgcggggttcattccaagtgacacgggcagcatgggaacacatgaagaaacagaagtatggaaggattattatgacttcatcagcttcaggaatatatggcaactttggccaggccaattatagtgctgcaaagttgggtcttctgggccttgcaaattctcttgcaattgaaggcaggaaaagcaacattcattgtaacaccattgctcctaatgcgggatcacggatgactcagacagttatgcctgaagatcttgtggaagccctgaagccagagtatgtggcacctcttgtcctttggctttgtcacgagagttgtgaggagaatggtggcttgtttgaggttggagcaggatggattggaaaattacgctgggagcggactcttggagctattgtaagacaaaagaatcacccaatgactcctgaggcagtcaaggctaactggaagaagatctgtgactttgagaatgccagcaagcctcagagtatccaagaatcaactggcagtataattgaagttctgagtaaaatagattcagaaggaggagtttcagcaaatcatactagtcgtgcaacgtctacagcaacatcaggatttgctggagctattggccagaaactccctccattttcttatgcttatacggaactggaagctattatgtatgcccttggagtgggagcgtcaatcaaggatccaaaagatttgaaatttatttatgaaggaagttctgatttctcctgtttgcccaccttcggagttatcataggtcagaaatctatgatgggtggaggattagcagaaattcctggactttcaatcaactttgcaaaggttcttcatggagagcagtacttagagttatataaaccacttcccagagcaggaaaattaaaatgtgaagcagttgttgctgatgtcctagataaaggatccggtgtagtgattattatggatgtctattcttattctgagaaggaacttatatgccacaatcagttctctctctttcttgttggctctggaggctttggtggaaaacggacatcagacaaagtcaaggtagctgtagccatacctaatagacctcctgatgctgtacttacagataccacctctcttaatcaggctgctttgtaccgcctcagtggagactggaatcccttacacattgatcctaactttgctagtctagcaggttttgacaagcccatattacatggattatgtacatttggattttctgccaggcgtgtgttacagcagtttgcagataatgatgtgtcaagattcaaggcaattaaggctcgttttgcaaaaccagtatatccaggacaaactctacaaactgagatgtggaaggaaggaaacagaattcattttcaaaccaaggtccaagaaactggagacattgtcatttcaaatgcatatgtggatcttgcaccaacatctggtacttcagctaagacaccctctgagggcgggaagcttcagagtacctttgtatttgaggaaataggacgccgcctaaaggatattgggcctgaggtggtgaagaaagtaaatgctgtatttgagtggcatataaccaaaggcggaaatattggggctaagtggactattgacctgaaaagtggttctggaaaagtgtaccaaggccctgcaaaaggtgctgctgatacaacaatcatactttcagatgaagatttcatggaggtggtcctgggcaagcttgaccctcagaaggcattctttagtggcaggctgaaggccagagggaacatcatgctgagccagaaacttcagatgattcttaaagactacgccaagctctgaagggcacactacactattaataaaaatggaatcattaaatactctcttcacccaaatatgcttgattattctgcaaaagtgattagaactaagatgcaggggaaattgcttaacattttcagatatcagataactgcagattttcattttctactaattttcatgtatcattatttttacaaggaactatatataagctagcacatgattatccttctgttcttagatctgtatcttcataataaaaaattttgcccaagtcctgtttccttagaatttgtgatagcattgataagttgaaaggaaaattaaatcaataaaggcctttgatacc

SEQ ID NO: 107 - DNA, 2024 bp, Homo sapiens
ctcaaagaaaatgaacggcaccctggaccacccagaccaaccagatcttgatgctatcaagatgtttgtgggccaggttccaaggacctggtctgaaaaggacttgcgggaactcttcgaacagtatggtgctgtgtatgaaatcaacgtcctaagggataggagccaaaacccgcctcagagcaaagggtgctgttttgttacattttacacccgtaaagctgcattagaagctcagaatgctcttcacaacatgaaagtcctcccagggatgcatcaccctatacagatgaaacctgctgacagtgagaagaacaatgcagtggaagacaggaagctgtttattggtatgatttccaagaagtgcactgaaaatgacatccgagtcatgttctcttcgtttggacagattgaagaatgccggatattgcggggacctgatggcctgagccgaggttgtgcatttgtgacttttacaacaagagccatggcacagacggctatcaaggcaatgcaccaagcacagaccatggagggttgctcatcacccatggtggtaaaatttgctgatacacagaaggacaaagaacagaagagaatggcccagcagctccagcagcagatgcagcaaatcagcgcagcatctgtgtggggaaaccttgctggtctaaatactcttggaccccagtatttagcactttatttgcagctccttcagcagactgcctcctctgggaacctcaacaccctgagcagcctccacccaatgggagggttgaatgcaatgcagttacagaatttggctgcactagctgctgcagctagtgcagctcagaacacaccaagtggtaccaatgctctcactacatccagcagtcccctcagcgtgctcactagttcagggtcctcacctagctctagcagcagtaattctgtcaaccccatagcctcacttggagccctgcagacattagctggagcaacggctggcctcaatgttggctctttggcaggaatggctgctttaaatggtggcctgggcagcagtggcctttccaatggcaccgggagcaccatggaggccctcactcaggcctactcgggtatccagcaatatgctgctgctgcgctccccactctgtacaaccagaatcttctgacacagcagagtattggtgctgctggaagccagaaggaaggtccagagggagccaacctgttcatctaccacctgccccaggagtttggtgatcaggacctgctgcagatgtttatgccctttgggaatgtcgtgtctgccaaggttttcatagacaagcagacaaacctgagcaagtgttttggttttgtaagttacgacaatcctgtttcggcccaagctgccatccagtccatgaacggctttcagattggcatgaagcggcttaaagtgcagctcaaacgttcgaagaatgacagcaagccctactgagcgtgctcccctctgagactggagtgagagggtcttctgattcctgccgtttgttcatcgttgtgcctaaagcatgtcgatgtggcgtcaagtacatcgtccaaatccctgtctcttcagcttctctgatgcttgaactctcacctttgaccttgtgttgacctttgatgctgatgtgtatttttattatgtttgtttctttcttcgtttttttttctttttttctttcctttttttttccttttgtgctgccaaattggttttgctagaacgactgctgaaggggaaatatttaaacttgcatttgaatataaaaaaaatctatttttctagaacttcataagataaccacttgattttgtgattccaattctttgtaattgtcttcagagcagccctactagcacataccgcgtggtgtttgtatttctgtgaacacacagccagtccgtttctaggctttgtttctctgtgtgcttagttttaaagacaactttgaagtaaacaatgaaataaaagatgtcactaaaacctctgaaaaaaaaaaaaaaaa

SEQ ID NO: 108 - DNA, 2157 bp, Homo sapiens
tggggtgttctgctctggcggcagcggcagcggcggcgggacgcggaggctcccccgggattcggcctcagcagcgaggcggcggcggcggctgcggaggcgcaggcagcaactgaggcagcggcaggctcaggtgcagccgctgctcaaagaaaatgaacggcaccctggaccacccagaccaaccagatcttgatgctatcaagatgtttgtgggccaggttccaaggacctggtctgaaaaggacttgcgggaactcttcgaacagtatggtgctgtgtatgaaatcaacgtcctaagggataggagccaaaacccgcctcagagcaaagggtgctgttttgttacattttacacccgtaaagctgcattagaagctcagaatgctcttcacaacatgaaagtcctcccagggatgcatcaccctatacagatgaaacctgctgacagtgagaagaacaatgcagtggaagacaggaagctgtttattggtatgatttccaagaagtgcactgaaaatgacatccgagtcatgttctcttcgtttggacagattgaagaatgccggatattgcggggacctgatggcctgagccgaggttgtgcatttgtgacttttacaacaagagccatggcacagacggctatcaaggcaatgcaccaagcacagaccatggagggttgctcatcacccatggtggtaaaatttgctgatacacagaaggacaaagaacagaagagaatggcccagcagctccagcagcagatgcagcaaatcagcgcagcatctgtgtggggaaaccttgctggtctaaatactcttggaccccagtatttagcactccttcagcagactgcctcctctgggaacctcaacaccctgagcagcctccacccaatgggagggttgaatgcaatgcagttacagaatttggctgcactagctgctgcagctagtgcagctcagaacacaccaagtggtaccaatgctctcactacatccagcagtcccctcagcgtgctcactagttcagggtcctcacctagctctagcagcagtaattctgtcaaccccatagcctcacttggagccctgcagacattagctggagcaacggctggcctcaatgttggctctttggcaggaatggctgctttaaatggtggcctgggcagcagtggcctttccaatggcaccgggagcaccatggaggccctcactcaggcctactcgggtatccagcaatatgctgctgctgcgctccccactctgtacaaccagaatcttctgacacagcagagtattggtgctgctggaagccagaaggaaggtccagagggagccaacctgttcatctaccacctgccccaggagtttggtgatcaggacctgctgcagatgtttatgccctttgggaatgtcgtgtctgccaaggttttcatagacaagcagacaaacctgagcaagtgttttggttttgtaagttacgacaatcctgtttcggcccaagctgccatccagtccatgaacggctttcagattggcatgaagcggcttaaagtgcagctcaaacgttcgaagaatgacagcaagccctactgagcgtgctcccctctgagactggagtgagagggtcttctgattcctgccgtttgttcatcgttgtgcctaaagcatgtcgatgtggcgtcaagtacatcgtccaaatccctgtctcttcagcttctctgatgcttgaactctcacctttgaccttgtgttgacctttgatgctgatgtgtatttttattatgtttgtttctttcttcgtttttttttctttttttctttcctttttttttccttttgtgctgccaaattggttttgctagaacgactgctgaaggggaaatatttaaacttgcatttgaatataaaaaaaatctatttttctagaacttcataagataaccacttgattttgtgattccaattctttgtaattgtcttcagagcagccctactagcacataccgcgtggtgtttgtatttctgtgaacacacagccagtccgtttctaggctttgtttctctgtgtgcttagttttaaagacaactttgaagtaaacaatgaaataaaagatgtcactaaaacctctgaaaaaaaaaaaaaaaa

SEQ ID NO: 109 - DNA, 2206 bp, Homo sapiens
atactttgaaaataacagctcttttttgttccctcgtgtgtctcttcccaattgtatccctattgtattttctcatagtatgtttcagcagaaatcaaggtagacgaagtaacctcttgtcctgaattttcatagttgctcattcttaataatggcagcagaagcaacaatgagagtaactacctcctcagctcaaagaaaatgaacggcaccctggaccacccagaccaaccagatcttgatgctatcaagatgtttgtgggccaggttccaaggacctggtctgaaaaggacttgcgggaactcttcgaacagtatggtgctgtgtatgaaatcaacgtcctaagggataggagccaaaacccgcctcagagcaaagggtgctgttttgttacattttacacccgtaaagctgcattagaagctcagaatgctcttcacaacatgaaagtcctcccagggatgcatcaccctatacagatgaaacctgctgacagtgagaagaacaatgcagtggaagacaggaagctgtttattggtatgatttccaagaagtgcactgaaaatgacatccgagtcatgttctcttcgtttggacagattgaagaatgccggatattgcggggacctgatggcctgagccgaggttgtgcatttgtgacttttacaacaagagccatggcacagacggctatcaaggcaatgcaccaagcacagaccatggagggttgctcatcacccatggtggtaaaatttgctgatacacagaaggacaaagaacagaagagaatggcccagcagctccagcagcagatgcagcaaatcagcgcagcatctgtgtggggaaaccttgctggtctaaatactcttggaccccagtatttagcactccttcagcagactgcctcctctgggaacctcaacaccctgagcagcctccacccaatgggagggttgaatgcaatgcagttacagaatttggctgcactagctgctgcagctagtgcagctcagaacacaccaagtggtaccaatgctctcactacatccagcagtcccctcagcgtgctcactagttcagcagggtcctcacctagctctagcagcagtaattctgtcaaccccatagcctcacttggagccctgcagacattagctggagcaacggctggcctcaatgttggctctttggcaggaatggctgctttaaatggtggcctgggcagcagtggcctttccaatggcaccgggagcaccatggaggccctcactcaggcctactcgggtatccagcaatatgctgctgctgcgctccccactctgtacaaccagaatcttctgacacagcagagtattggtgctgctggaagccagaaggaaggtccagagggagccaacctgttcatctaccacctgccccaggagtttggtgatcaggacctgctgcagatgtttatgccctttgggaatgtcgtgtctgccaaggttttcatagacaagcagacaaacctgagcaagtgttttggttttgtaagttacgacaatcctgtttcggcccaagctgccatccagtccatgaacggctttcagattggcatgaagcggcttaaagtgcagctcaaacgttcgaagaatgacagcaagccctactgagcgtgctcccctctgagactggagtgagagggtcttctgattcctgccgtttgttcatcgttgtgcctaaagcatgtcgatgtggcgtcaagtacatcgtccaaatccctgtctcttcagcttctctgatgcttgaactctcacctttgaccttgtgttgacctttgatgctgatgtgtatttttattatgtttgtttctttcttcgtttttttttctttttttctttcctttttttttccttttgtgctgccaaattggttttgctagaacgactgctgaaggggaaatatttaaacttgcatttgaatataaaaaaaatctatttttctagaacttcataagataaccacttgattttgtgattccaattctttgtaattgtcttcagagcagccctactagcacataccgcgtggtgtttgtatttctgtgaacacacagccagtccgtttctaggctttgtttctctgtgtgcttagttttaaagacaactttgaagtaaacaatgaaataaaagatgtcactaaaacctctgaaaaaaaaaaaaaaaa

SEQ ID NO: 110 - DNA, 6137 bp, Homo sapiens
aagggagctcagtaagtcacttctgggcgactgttgttttatttccggtctatgggacccggctgcgatttgctgctgcggacagcagctaccatcactgctgccgccatcatgtcagacacggacagcgacgaagattccgctggaggcggcccattttctttagcgggtttccttttcggcaacatcaatggagccgggcagctggagggggaaagcgtcttggatgatgaatgtaagaagcacttggcaggcttgggggctttggggctgggcagcctgatcactgaactcacggcaaatgaagaattgaccgggactgacggtgccttggtaaatgatgaagggtgggttaggagtacagaagatgctgtggactattcagacatcaatgaggtggcagaagatgaaagccgaagataccagcagacgatggggagcttgcagcccctttgccactcagattatgatgaagatgactatgatgctgattgtgaagacattgattgcaagttgatgcctcctccacctccacccccgggaccaatgaagaaggataaggaccaggattctattactggtgtgtctgaaaatggagaaggcatcatcttgccctccatcattgccccttcctctttggcctcagagaaagtggacttcagtagttcctctgactcagaatctgagatgggacctcaggaagcaacacaggcagaatctgaagatggaaagctgacccttccattggctgggattatgcagcatgatgccaccaagctgttgccaagtgtcacagaactttttccagaatttcgacctggaaaggtgttacgttttctacgtctttttggaccagggaagaatgtcccatctgtttggcggagtgctcggagaaagaggaagaagaagcaccgtgagctgatacaggaagagcagatccaggaggtggagtgctcagtagaatcagaagtcagccagaagtctttgtggaactacgactacgctccaccaccacctccagagcagtgtctctctgatgatgaaatcacgatgatggctcctgtggagtccaaattttcccaatcaactggagatatagataaagtgacagataccaaaccaagagtggctgagtggcgttatgggcctgcccgactgtggtatgatatgctgggtgtccctgaagatggcagtgggtttgactatggcttcaaactgagaaagacagaacatgaacctgtgataaaatctagaatgatagaggaatttaggaaacttgaggaaaacaatggcactgatcttctggctgatgaaaacttcctgatggtgacacagctgcattgggaggatgatatcatctgggatggggaggatgtcaaacacaaagggacaaaacctcagcgtgcaagcctggcaggctggcttccttctagcatgactaggaatgcgatggcttacaatgttcagcaaggttttgcagccactcttgatgatgacaaaccttggtactccatttttcccattgacaatgaggatctggtatatggacgctgggaggacaatatcatttgggatgctcaggccatgccccggctgttggaacctcctgttttgacacttgatcccaatgatgagaacctcattttggaaattcctgatgagaaggaagaggccacctctaactccccctccaaggagagtaagaaggaatcatctctgaagaagagtcgaattctcttagggaaaacaggagtcatcaaggaggaaccacagcagaacatgtctcagccagaagtgaaagatccatggaatctctccaatgatgagtattattatcccaagcaacagggtcttcgaggcacctttggagggaatattatccagcattcaattcctgctgtggaattacggcagcccttctttcccacccacatggggcccatcaaactccggcagttccatcgcccacctctgaaaaagtactcatttggtgcactttctcagccaggtccccactcagtccaacctttgctaaagcacatcaaaaaaaaggccaagatgagagaacaagagaggcaagcttcaggtggtggagagatgttttttatgcgcacacctcaggacctcacaggcaaagatggtgatcttattcttgcagaatatagtgaggaaaatggacccttaatgatgcaggttggcatggcaaccaagataaagaactattataaacggaaacctggaaaagatcctggagcaccagattgtaaatatggggaaactgtttactgccatacatctcctttcctgggttctctccatcctggccaattgctgcaagcatttgagaacaacctttttcgtgctccaatttatcttcataagatgccagaaactgatttcttgatcattcggacaagacagggttactatattcgggaattagtggatatttttgtggttggccagcagtgtcccttgtttgaagttcctgggcctaactccaaaagggccaatacgcatattcgagactttctacaggtttttatttaccgccttttctggaaaagtaaagatcggccacggaggatacgaatggaagatataaaaaaagcctttccttcccattcagaaagcagcatccggaagaggctaaagctctgcgctgacttcaaacgcacagggatggactcaaactggtgggtgcttaagtctgattttcgtttaccaacggaagaagagatcagagctatggtgtcaccagagcagtgctgtgcttattatagcatgatagctgcagagcaacgactgaaggatgctggctatggtgagaaatccttttttgctccagaagaagaaaatgaggaagatttccagatgaagattgatgatgaagttcgcactgccccttggaacaccacaagggccttcattgctgccatgaagggcaagtgtctgctagaggtgactggggtggcagatcccacggggtgtggtgaaggattctcctatgtgaagattccaaacaaaccaacacagcagaaggatgataaagaaccgcagccagtgaagaagacagtgacaggaacagatgcagaccttcgtcgcctttccctgaaaaatgccaagcaacttctacgtaaatttggtgtgcctgaggaagagattaaaaagttgtcccgctgggaagtgattgatgtggtgcgcacaatgtcaacagaacaggctcgttctggagaggggcccatgagtaaatttgcccgtggatcaaggttttctgtggctgagcatcaagagcgttacaaagaggaatgtcagcgcatctttgacctacagaacaaggttctgtcatcaactgaagtcttatcaactgacacagacagcagctcagctgaagatagtgactttgaagaaatgggaaagaacattgagaacatgttgcagaacaagaaaaccagctctcagctttcacgtgaacgggaggaacaggagcggaaggaactacagcgaatgctactggcagcaggctcagcagcatccggaaacaatcacagagatgatgacacagcttccgtgactagccttaactcttctgccactggacgctgtctcaagatttatcgcacgtttcgagatgaagaggggaaagagtatgttcgctgtgagacagtccgaaaaccagctgtcattgatgcctatgtgcgcatacggactacaaaagatgaggaattcattcgaaaatttgccctttttgatgaacaacatcgggaagagatgcgaaaagaacggcggaggattcaagagcaactgaggcggcttaagaggaaccaggaaaaggagaagcttaagggtcctcctgagaagaagcccaagaaaatgaaggagcgtcctgacctaaaactgaaatgtggggcatgtggtgccattggacacatgaggactaacaaattctgccccctctattatcaaacaaatgcgccaccttccaaccctgttgccatgacagaagaacaggaggaggagttggaaaagacagtcattcataatgataatgaagaacttatcaaggttgaagggaccaaaattgtcttggggaaacagctaattgagagtgcggatgaggttcgcagaaaatctctggttctcaagtttcctaaacagcagcttcctccaaagaagaaacggcgagttggaaccactgttcactgtgactatttgaatagacctcataagtccatccaccggcgccgcacagaccctatggtgacgctgtcgtccatcttggagtctatcatcaatgacatgagagatcttccaaatacataccctttccacactccagtcaatgcaaaggttgtaaaggactactacaaaatcatcactcggccaatggacctacaaacactccgcgaaaacgtgcgtaaacgcctctacccatctcgggaagagttcagagagcatctggagctaattgtgaaaaatagtgcaacctacaatgggccaaaacactcattgactcagatctctcaatccatgctggatctctgtgatgaaaaactcaaagagaaagaagacaaattagctcgcttagagaaagctatcaaccccttgctggatgatgatgaccaagtggcgttttctttcattctggacaacattgtcacccagaaaatgatggcagttccagattcttggccatttcatcacccagttaataagaaatttgttccagattattacaaagtgattgtcaatccaatggatttagagaccatacgtaagaacatctccaagcacaagtatcagagtcgggagagctttctggatgatgtaaaccttattctggccaacagtgttaagtataatggacctgagagtcagtatactaagactgcccaggagattgtgaacgtctgttaccagacattgactgagtatgatgaacatttgactcaacttgagaaggatatttgtactgctaaagaagcagctttggaggaagcagaattagaaagcctggacccaatgaccccagggccctacacgcctcagcctcctgatttgtatgataccaacacatccctcagtatgtctcgagatgcctctgtatttcaagatgagagcaatatgtctgtcttggatattcccagtgccactccagaaaagcaggtaacacaggaaggtgaagatggagatggtgatcttgcagatgaagaggaaggaactgtacaacagcctcaagccagtgtcctgtatgaggatttgcttatgtctgaaggagaagatgatgaggaagatgctgggagtgatgaagaaggagacaatcctttctctgctatccagctgagtgaaagtggaagtgactctgatgtgggatctggtggaataagacccaaacaaccccgcatgcttcaggagaacacaaggatggacatggaaaatgaagaaagcatgatgtcctatgagggagacggtggggaggcttcccatggtttggaggatagcaacatcagttatgggagctatgaggagcctgatcccaagtcgaacacccaagacacaagcttcagcagcatcggtgggtatgaggtatcagaggaggaagaagatgaggaggaggaagagcagcgctctgggccgagcgtactaagccaggtccacctgtcagaggacgaggaggacagtgaggatttccactccattgctggggacagtgacttggactctgatgaatgaggcttcctttgggcctccttggtcagccttccctgttctccagcctaggtggttcacctttccccaatttgttcatatttgtacagtatctgatcctgaaatcatgaaattaactaacaccttagcctttttaaaagtagtaagtaaatgataataaatcacctctcctaatcttcctggggcaatgtcaccctttgatttaaaacaaagcaaccccctttcccctaccactacggaaaagagcaagctcatttttccgtgtcctcctttatttaactccatttattgcttttggtataatttttccctggggaaggaggggaaattatgaaagaactagtaactttatgtcctcttgatgtattaggaaatttccggccaggcgtggtggctcacacctgtaa

SEQ ID NO: 111 - DNA, 6074 bp, Homo sapiens
aagggagctcagtaagtcacttctgggcgactgttgttttatttccggtctatgggacccggctgcgatttgctgctgcggacagcagctaccatcactgctgccgccatcatgtcagacacggacagcgacgaagattccgctggaggcggcccattttctttagcgggtttccttttcggcaacatcaatggagccgggcagctggagggggaaagcgtcttggatgatgaatgtaagaagcacttggcaggcttgggggctttggggctgggcagcctgatcactgaactcacggcaaatgaagaattgaccgggactgacggtgccttggtaaatgatgaagggtgggttaggagtacagaagatgctgtggactattcagacatcaatgaggtggcagaagatgaaagccgaagataccagcagacgatggggagcttgcagcccctttgccactcagattatgatgaagatgactatgatgctgattgtgaagacattgattgcaagttgatgcctcctccacctccacccccgggaccaatgaagaaggataaggaccaggattctattactggtgagaaagtggacttcagtagttcctctgactcagaatctgagatgggacctcaggaagcaacacaggcagaatctgaagatggaaagctgacccttccattggctgggattatgcagcatgatgccaccaagctgttgccaagtgtcacagaactttttccagaatttcgacctggaaaggtgttacgttttctacgtctttttggaccagggaagaatgtcccatctgtttggcggagtgctcggagaaagaggaagaagaagcaccgtgagctgatacaggaagagcagatccaggaggtggagtgctcagtagaatcagaagtcagccagaagtctttgtggaactacgactacgctccaccaccacctccagagcagtgtctctctgatgatgaaatcacgatgatggctcctgtggagtccaaattttcccaatcaactggagatatagataaagtgacagataccaaaccaagagtggctgagtggcgttatgggcctgcccgactgtggtatgatatgctgggtgtccctgaagatggcagtgggtttgactatggcttcaaactgagaaagacagaacatgaacctgtgataaaatctagaatgatagaggaatttaggaaacttgaggaaaacaatggcactgatcttctggctgatgaaaacttcctgatggtgacacagctgcattgggaggatgatatcatctgggatggggaggatgtcaaacacaaagggacaaaacctcagcgtgcaagcctggcaggctggcttccttctagcatgactaggaatgcgatggcttacaatgttcagcaaggttttgcagccactcttgatgatgacaaaccttggtactccatttttcccattgacaatgaggatctggtatatggacgctgggaggacaatatcatttgggatgctcaggccatgccccggctgttggaacctcctgttttgacacttgatcccaatgatgagaacctcattttggaaattcctgatgagaaggaagaggccacctctaactccccctccaaggagagtaagaaggaatcatctctgaagaagagtcgaattctcttagggaaaacaggagtcatcaaggaggaaccacagcagaacatgtctcagccagaagtgaaagatccatggaatctctccaatgatgagtattattatcccaagcaacagggtcttcgaggcacctttggagggaatattatccagcattcaattcctgctgtggaattacggcagcccttctttcccacccacatggggcccatcaaactccggcagttccatcgcccacctctgaaaaagtactcatttggtgcactttctcagccaggtccccactcagtccaacctttgctaaagcacatcaaaaaaaaggccaagatgagagaacaagagaggcaagcttcaggtggtggagagatgttttttatgcgcacacctcaggacctcacaggcaaagatggtgatcttattcttgcagaatatagtgaggaaaatggacccttaatgatgcaggttggcatggcaaccaagataaagaactattataaacggaaacctggaaaagatcctggagcaccagattgtaaatatggggaaactgtttactgccatacatctcctttcctgggttctctccatcctggccaattgctgcaagcatttgagaacaacctttttcgtgctccaatttatcttcataagatgccagaaactgatttcttgatcattcggacaagacagggttactatattcgggaattagtggatatttttgtggttggccagcagtgtcccttgtttgaagttcctgggcctaactccaaaagggccaatacgcatattcgagactttctacaggtttttatttaccgccttttctggaaaagtaaagatcggccacggaggatacgaatggaagatataaaaaaagcctttccttcccattcagaaagcagcatccggaagaggctaaagctctgcgctgacttcaaacgcacagggatggactcaaactggtgggtgcttaagtctgattttcgtttaccaacggaagaagagatcagagctatggtgtcaccagagcagtgctgtgcttattatagcatgatagctgcagagcaacgactgaaggatgctggctatggtgagaaatccttttttgctccagaagaagaaaatgaggaagatttccagatgaagattgatgatgaagttcgcactgccccttggaacaccacaagggccttcattgctgccatgaagggcaagtgtctgctagaggtgactggggtggcagatcccacggggtgtggtgaaggattctcctatgtgaagattccaaacaaaccaacacagcagaaggatgataaagaaccgcagccagtgaagaagacagtgacaggaacagatgcagaccttcgtcgcctttccctgaaaaatgccaagcaacttctacgtaaatttggtgtgcctgaggaagagattaaaaagttgtcccgctgggaagtgattgatgtggtgcgcacaatgtcaacagaacaggctcgttctggagaggggcccatgagtaaatttgcccgtggatcaaggttttctgtggctgagcatcaagagcgttacaaagaggaatgtcagcgcatctttgacctacagaacaaggttctgtcatcaactgaagtcttatcaactgacacagacagcagctcagctgaagatagtgactttgaagaaatgggaaagaacattgagaacatgttgcagaacaagaaaaccagctctcagctttcacgtgaacgggaggaacaggagcggaaggaactacagcgaatgctactggcagcaggctcagcagcatccggaaacaatcacagagatgatgacacagcttccgtgactagccttaactcttctgccactggacgctgtctcaagatttatcgcacgtttcgagatgaagaggggaaagagtatgttcgctgtgagacagtccgaaaaccagctgtcattgatgcctatgtgcgcatacggactacaaaagatgaggaattcattcgaaaatttgccctttttgatgaacaacatcgggaagagatgcgaaaagaacggcggaggattcaagagcaactgaggcggcttaagaggaaccaggaaaaggagaagcttaagggtcctcctgagaagaagcccaagaaaatgaaggagcgtcctgacctaaaactgaaatgtggggcatgtggtgccattggacacatgaggactaacaaattctgccccctctattatcaaacaaatgcgccaccttccaaccctgttgccatgacagaagaacaggaggaggagttggaaaagacagtcattcataatgataatgaagaacttatcaaggttgaagggaccaaaattgtcttggggaaacagctaattgagagtgcggatgaggttcgcagaaaatctctggttctcaagtttcctaaacagcagcttcctccaaagaagaaacggcgagttggaaccactgttcactgtgactatttgaatagacctcataagtccatccaccggcgccgcacagaccctatggtgacgctgtcgtccatcttggagtctatcatcaatgacatgagagatcttccaaatacataccctttccacactccagtcaatgcaaaggttgtaaaggactactacaaaatcatcactcggccaatggacctacaaacactccgcgaaaacgtgcgtaaacgcctctacccatctcgggaagagttcagagagcatctggagctaattgtgaaaaatagtgcaacctacaatgggccaaaacactcattgactcagatctctcaatccatgctggatctctgtgatgaaaaactcaaagagaaagaagacaaattagctcgcttagagaaagctatcaaccccttgctggatgatgatgaccaagtggcgttttctttcattctggacaacattgtcacccagaaaatgatggcagttccagattcttggccatttcatcacccagttaataagaaatttgttccagattattacaaagtgattgtcaatccaatggatttagagaccatacgtaagaacatctccaagcacaagtatcagagtcgggagagctttctggatgatgtaaaccttattctggccaacagtgttaagtataatggacctgagagtcagtatactaagactgcccaggagattgtgaacgtctgttaccagacattgactgagtatgatgaacatttgactcaacttgagaaggatatttgtactgctaaagaagcagctttggaggaagcagaattagaaagcctggacccaatgaccccagggccctacacgcctcagcctcctgatttgtatgataccaacacatccctcagtatgtctcgagatgcctctgtatttcaagatgagagcaatatgtctgtcttggatattcccagtgccactccagaaaagcaggtaacacaggaaggtgaagatggagatggtgatcttgcagatgaagaggaaggaactgtacaacagcctcaagccagtgtcctgtatgaggatttgcttatgtctgaaggagaagatgatgaggaagatgctgggagtgatgaagaaggagacaatcctttctctgctatccagctgagtgaaagtggaagtgactctgatgtgggatctggtggaataagacccaaacaaccccgcatgcttcaggagaacacaaggatggacatggaaaatgaagaaagcatgatgtcctatgagggagacggtggggaggcttcccatggtttggaggatagcaacatcagttatgggagctatgaggagcctgatcccaagtcgaacacccaagacacaagcttcagcagcatcggtgggtatgaggtatcagaggaggaagaagatgaggaggaggaagagcagcgctctgggccgagcgtactaagccaggtccacctgtcagaggacgaggaggacagtgaggatttccactccattgctggggacagtgacttggactctgatgaatgaggcttcctttgggcctccttggtcagccttccctgttctccagcctaggtggttcacctttccccaatttgttcatatttgtacagtatctgatcctgaaatcatgaaattaactaacaccttagcctttttaaaagtagtaagtaaatgataataaatcacctctcctaatcttcctggggcaatgtcaccctttgatttaaaacaaagcaaccccctttcccctaccactacggaaaagagcaagctcatttttccgtgtcctcctttatttaactccatttattgcttttggtataatttttccctggggaaggaggggaaattatgaaagaactagtaactttatgtcctcttgatgtattaggaaatttccggccaggcgtggtggctcacacctgtaa

SEQ ID NO: 112 - DNA, 2713 bp, Homo sapiens
gttgcggcggaggacgcaaccgagcgggcctgcggcctcaccatggacccagaatgcgcccagctgctcccggctctctgtgctgttctggtagatcccgggcagccggtggcagatgacacctgtttggagaagctcctggactggtttaaaacggtcactgaaggagagtccagtgtcgtgctgctgcaggagcacccctgcctggtggagctgctgtcccatgtgctgaaagtccaggacctgagttctggggtcctctccttctcactgcgcctggcaggaaccttcgcagcccaggaaaactgcttccagtatcttcagcagggggagttactaccagggctctttggggagccaggacccctcggccgagcaacctgggccgtccccaccgtgcgcagcggctggatccagggcctgcgctccctggcacagcaccccagcgccctgcgcttcctggccgaccatggtgcggtcgacaccatcttctccctgcagggagactccagcctgtttgtggcctcggcggccagtcagctcctggtgcacgtcctggctttgtccatgcgaggtggagccgaggggcagccctgcctgccggggggtgactggcccgcgtgtgcccagaagatcatggatcacgttgaagagtccttgtgctccgcggccacccccaaggtcactcaggccctgaacgtcctgaccacgaccttcgggcgctgccagagcccctggacggaagccctgtgggtgcggctgagtccccgcgtggcctgtctgctggagagagaccccatccccgccgcacactcgttcgtggacctgcttctctgtgtggctcgttctcccgtgttcagttcttccgacggcagcctgtgggagacagtggcgcgggctctgagctgcctgggtcccacccacatgggacccctggctttggggatcctgaagctcgagcactgtccacaggcactgaggacccaggccttccaggtccttctccagcccctggcctgtgtcctgaaggccacggttcaggcccccggacccccaggcttgctggacgggacggcagacgatgccacgacggtggacacactcctggcctccaagtcgtcctgcgccggcctcctgtgccgcaccctggctcacctggaggagctgcagccgctgccccagcgcccttcaccgtggccccaggcgtctctactgggggctacagtgactgtcctgcggctctgtgacggctcggctgcccctgcctccagtgtggggggccacctctgtgggaccctggcgggctgcgtccgggtccagcgagcagccctcgacttcctggggacgctgtcacaggggacaggcccccaggagctggtgacgcaggcgcttgctgtcctcctggagtgcctcgagagccccggctccagccccacggttctgaagaaggccttccaggccacgctcaggtggctcctgagctcacccaagacccccggctgctctgatctcggccccctcatcccgcagttcctcagagagctgttccctgtgctgcagaaacgcctgtgccacccctgctgggaggtgagggactccgccctcgagttcctgacccagctgagcaggcactggggaggacaggctgacttcagatgcgcactcttggcttcagaggtgcctcagctggccctgcagctcctccaggaccctgagagttatgtccgagcgagtgcagtgaccgccatggggcagctgtccagccagggcctgcacgcccccaccagccctgagcatgcagaggcccggcagagcctgttcctggagctcctgcacatcctctccgtagactcggagggcttcccacggcgggcggtcatgcaagtcttcactgagtggctgcgggacggccacgccgacgcggcccaggacacggagcagttcgtggccactgtgctgcaggcggcgagccgagacctggactgggaggtccgcgcccagggcctggagctggccctcgtgttcctgggccagactttggggccgccgcgtacccactgcccctatgccgtggccctacccgaggtggccccagcccagccactcaccgaggcactgagggctctctgccacgtggggctctttgacttcgccttttgtgccttgtttgactgcgaccgccctgtggcgcagaagtcttgtgacctccttctcttcctgagggacaagattgcttcctacagcagcctgcgggaggccaggggcagccccaacactgcctccgcagaggccaccctgccgaggtggcgggcgggtgagcaggcccagcccccaggggaccaggagcctgaggctgtgctggccatgctcaggtccctagacctggagggcctgcggagcacgctggccgagagcagcgaccacgtggaaaagagtccccagtccctcctgcaggacatgctggccacgggaggcttcctgcagggggacgaggccgactgctactgagcagaaccagagtctgccactggggctcaggaccaagggaggcagcaccatgtccttctgtgggacactgccagccccagggctccagcccagcccggtggatcctctggggaagccaggaccaggagagaagcaaggtcaagaaatcccacagtttgatgtattaaagaaatgacttatttctactcaaaaaaaaaaaaaaaaa

SEQ ID NO: 113 - DNA, 1905 bp, Homo sapiens
gttagtctccgctgctagttcttggctctgggaggcccaggtggctctgcagcagcctctgccaccctgtgacctgcgagtattgggacatccctagctgacgccaggacacccgggaagccgaggaatggtgagtggactgcgcctggcttcccgaagtggagaagagggctggttgaaacctgctgtggcgcgactcgggcctccacgccatcggctccggaacctgcggaccgagtcgccgtggcgtagccggggctcagtcctcttctgttcagggccgggccgggcggggcgggcagcggaacccctgcatcctgtctgtacctgcgggcgccacttccgccggccggatccctgtcgggaacccctcgcctcccctatccaggactcggtggcttttgaggatgtggctgtgaactttacccaggaggaatgggctttgctagattcttctcagaagaatctctacagagaagtgatgcaggaaacctgtaggaacctggcttctgtaggaagccaatggaaagaccagaatattgaagatcacttcgaaaaacctgggaaagatataagaaatcatatcgtacagagactgtgtgaaagtaaagaagatggtcagtatggagaagttgtcagccaaattccaaatcttgatctgaacgagaacatttctactggattaaaaccatgtgaatgcagtatttgtggaaaagtctttgtacgtcattccctctttaataggcatatcctagctcactcaggatacaaaccatatggagagaagcaatataaatgtgaacagtgtgggaaattcttcgtttctgttccaggtgttagaagacacatgataatgcacagtggaaatccagcttataaatgtacgatatgtgggaaagctttttattttctcaattcagttgaaagacatcagagaactcacacaggagaaaaaccctataaatgtaaacaatgtggtaaagcattcactgtttccggttcttgtctaatacatgaacgaactcacactggagagaaaccctacgaatgtaaggaatgtgggaaaacattcagattttcttgttcttttaagacgcatgaaaggactcacactggagaaagaccctataaatgtaccaaatgtgataaagccttcagctgttccacttcccttcgttaccatggaagcattcatactggagagagaccctatgagtgtaaacaatgtggcaaagcctttagtcgtttgagttccctttgtaaccatagaagtactcataccggagagaaaccctatgaatgtaaacaatgtgatcaagccttcagtcgcctcagttcccttcacctccacgaaagaattcatactggagaaaaaccctatgaatgtaagaaatgcggtaaagcctacactcgttccagtcaccttactcgccatgaaagaagtcatgatatagaggctgggtgtagtgactcagcctataatcccagcactttgggaggccaaggcgtgtggattgcttgagcccaggagttcataaccagcctggattaaaacaatgtgaaacaacctgggcaacatggtgaaaccctgtctttacaaaaaataaaataatgccgggcacggtggcttacgcctgtaatcccagcactttgggaggccgaggcgggtggatcacgaggtcaggagatcgagaccatcctggccaacacggtgaaaccccgtctctactaaaaatacaaaaaattagctgggcgtggtggcgggcgcctgtggtcccagttactcggggggctgaggcaggagaatggcatgaacccgggaggcggaacttgcggtgagccgagatcgcaccactgcacttcagcctgggtgacagagtgagactctgtctcaaaaaataagat

SEQ ID NO: 114 - DNA, 1539 bp, Homo sapiens
gaattcggggggagggggcagtgtcctccgagccaggacaggcatgttgttgggactggcggccatggagctgaaggtgtgggtggatggcatccagcgtgtggtctgtggggtctcagagcagaccacctgccaggaagtggtcatcgcactagcccaagcaataggccagactggccgctttgtgcttgtgcagcggcttcgggagaaggagcggcagttgctgccacaagagtgtccagtgggcgcccaggccacctgcggacagtttgccagcgatgtccagtttgtcctgaggcgcacagggcccagcctagctgggaggccctcctcagacagctgtccacccccggaacgctgcctaattcgtgccagcctccctgtaaagccacgggctgcgctgggctgtgagccccgcaaaacactgacccccgagccagcccccagcctctcacgccctgggcctgcggcccctgtgacacccacaccaggctgctgcacagacctgcggggcctggagctcagggtgcagaggaatgctgaggagctgggccatgaggccttctgggagcaagagctgcgccgggagcaggcccgggagcgagagggacaggcacgcctgcaggcactaagtgcggccactgctgagcatgccgcccggctgcaggccctggacgctcaggcccgtgccctggaggctgagctgcagctggcagcggaggcccctgggcccccctcacctatggcatctgccactgagcgcctgcaccaggacctggctgttcaggagcggcagagtgcggaggtgcagggcagcctggctctggtgagccgggccctggaggcagcagagcgagccttgcaggctcaggctcaggagctggaggagctgaaccgagagctccgtcagtgcaacctgcagcagttcatccagcagaccggggctgcgctgccaccgcccccacggcctgacaggggccctcctggcactcagggccctctgcctccagccagagaggagtccctcctgggcgctccctctgagtcccatgctggtgcccagcctaggccccgaggtggcccccatgacgcagaactcctggaggtagcagcagctcctgccccagagtggtgtcctctggcagcccagccccaggctctgtgacagcctagtgagggctgcaagaccatcctgcccggaccacagaaggagagttggcggtcacagagggctcctctgccaggcagtgggaagccctgggtttggcctcaggagctgggggtgcagtgggggactgccctagtccttgccaggtcgcccagcaccctggagaagcatggggcgtagccagctcggaacttgccaggccccaaaggccacgactgcctgttggggacaggagatgcatggacagtgtgctcaagctgtgggcatgtgcttgcctgcgggagaggtccttcactgtgtgtacacagcaagagcatgtgtgtgccacttcccctaccccaacgtgaaaacctcaataaactgcccgaagc

SEQ ID NO: 115 - DNA, 1341 bp, Homo sapiens
gtcagtgccaagatgtcgacggcggcggttccggagctgaagcagatcagccgggtggaggcgatgcgcctagggccgggctggagccactcgtgccacgccatgctgtacgccgccaaccctgggcagctcttcggccgcatccccatgcgcttctcggtgctgatgcagatgcgtttcgacgggctgctgggcttccccgggggcttcgtggaccggcgcttctggtcgctggaggacggcctgaaccgggtgctgggcctgggcctgggctgcctgcgcctcaccgaggccgactacctgagctcgcacctgaccgagggcccacaccgcgtcgtggcgcacctgtacgcgcggcagctgacgctggagcagctgcacgccgtggagatcagcgcggtgcactcgcgcgaccacggcctggaggtgctgggcctcgtgcgggtcccgctgtacacccagaaggaccgagtcggaggcttccccaacttcctgagcaacgccttcgtgagcacggctaagtgccagctcctctttgccctcaaggtgctcaacatgatgcccgaggagaagctggttgaggccctggctgcagccaccgagaagcagaagaaggccctggagaagttgctcccggcctcctcttgagggctgcctgagctggtggcaccctcccctgggccggaagactgggaattcctgctaagtgtggcttctagagtgtttgtgtgtaccccgcttctgactgcctagggcgagtgggcatcctgtcatcatctccactgtcccaagcagtcactaggtggcggccgggccagctggaacccagcccatcctctcaggcagagcagggtggtccgggcacactgggcctgcctctccagcctcaggatgctcttgtttattctgggctcagaccctcctcttgtacgtctcatcacagctggtagagacccaggagtgcctgattgtcccacaggggtggcgcacagctctgggaccactcagaagatgggatgtgtgggtggaggatgccttgtctcggtcagctcattcctgcctccttcctgagccagttcagggcctgggggagagccagcttggggtaggaagttaataatactgttaatttgggttgttgttggatttactttgctagattttctctttcaccacgtgtgaactgtgggtgaggtttcaaagtagcttcaccccacgtggcttggttcccagggacagtcagggcctcgggggcccagctatgtacaacgaagctgtcgaaggagaagacaataaagtcgctccgcagctgcaaaaaaaaaaaaaaaaaaaaaaaaaaaa

SEQ ID NO: 116 - DNA, 2274 bp, Homo sapiens
gtgaaaatggcgcccagctcgaaatcggagcggaacagcggggctgggagcggcggcggcggccccgggggagccggagggaagcgggcagcagggcggcggcgggagcacgtcctcaagcagctggagcgggtcaagatcagcggacagctctcccctcgcctcttccggaagctgcctccccgggtgtgcgtgtccctcaagaacattgtggatgaggacttcctctatgcaggacatatcttcctgggcttttccaaatgcggccgctacgtcctctcctacaccagcagcagtggggatgacgacttctccttctacatctaccatctgtactggtgggagttcaacgttcacagcaagctcaagctggtccggcaggttcggctattccaggacgaggagatctacagcgacctgtacctgaccgtatgcgagtggcccagcgacgcctccaaggtcatcgtcttcggcttcaacacccgctcggccaacgggatgctcatgaacatgatgatgatgagtgacgagaaccaccgtgacatctacgtcagcaccgtggccgtgccaccgccaggccgctgtgctgcttgccaggatgccagccgagcccacccaggagacccgaatgcacagtgcctacggcatggcttcatgctgcacaccaagtaccaggtggtctaccccttccccaccttccagcccgccttccagctcaagaaggaccaggtggtgctgctcaacaccagctactccctggtggcctgcgccgtctccgtccactcggcaggtgacaggagtttctgccaaatcctgtatgaccacagcacctgccccctggcgcctgccagcccccctgagccccagagcccagagctgccccctgccctccccagcttctgccctgaggcggccccagcccgttcttctgggtctcctgagccctcgcccgccattgccaaagccaaggagtttgtggctgacatcttccgccgggccaaagaggccaagggcggggtccctgaggaagcccggcctgccctgtgcccaggaccctctggcagccgctgccgtgcgcactctgagcccctagccctgtgtggagagacggcaccccgggacagcccccctgcctcggaggcacctgcctccgagcctggctatgtcaactacaccaagctgtactatgtgctggagtccggagaggggacggagccggaggatgagttggaggacgacaagatctccctgcccttcgtggtgactgatcttcgtggccgcaacctgcggcccatgcgggagcggactgctgtccagggccagtacctgacagtggagcagctcacactagacttcgaatatgttatcaatgaggtcatccgccacgacgctacctggggccatcagttctgttctttcagcgactatgacatcgtcattctggaggtctgcccagaaaccaaccaggtcctcatcaacattggcctgctgctcctggccttcccgtcccccactgaggagggccagctccgaccaaagacctatcacaccagcctcaaggtggcatgggacctcaacacagggatcttcgagacagtcagtgtaggcgacctgactgaggtcaaagggcagaccagcggcagtgtctggagctcctaccgcaagagctgcgtggacatggtcatgaagtggctggtgccggagagcagcggccgctacgtcaacaggatgaccaatgaggcgctgcacaaagggtgctccctgaaggttctggcggacagcgagcgatatacgtggatcgtgctgtgagggccaggccgccccggacactgactccaactacctccgtggcctgggaccggcccccttcctggggtggcctcttcctggccggctggcccaccgactgatgaccggcactagtgttagcctgcggaacggggctgggcagggcagcctctgttggcctgagggtctggacgctttttatttatgcctatttaagttgggaaggggcagagagagggcgccccctgccccaccagcctgagtgccccgccttcaccccgagctgggcatgggcctggcccctcgtgcatttgcccttttctcggctacagctgtggacgttgccctcggggaggtcgaatggaccccattccccctgccctgcccgcccccagcctccccacccaggccggcaacctggccatccccattccgttcttcttcatgtaataaatgttttaatttctgaaaaaaaaaaaaaaaaaa

SEQ ID NO: 117 - DNA, 7182 bp, Homo sapiens
gcgctggcgcgagcccacgaagaggtacgattccggagaatcgcgaggcagagcgggagcgcgcagccaggtggaaactaattctaagccagactgctggagatcaccctgttctagtgtgtggaggcttccaccaggaggcgcattggagtgactgtctggcatcaccaagatgacactccacgccacccggggggctgcactcctctcttgggtgaacagtctacacgtggctgaccctgtggaggctgtgctgcagctccaggactgcagcatcttcatcaagatcattgacagaatccatggcactgaagagggacagcaaatcttgaagcagccggtgtcagagagactggactttgtgtgcagttttctgcagaaaaatcgaaaacatccctcttccccagaatgcctggtatctgcacagaaggtgctagagggatcagagctggaactggcgaagatgaccatgctgctcttataccactctaccatgagctccaaaagtcccagggactgggaacagtttgaatataaaattcaggctgagttggctgtcattcttaaatttgtgctggaccatgaggacgggctaaaccttaatgaggacctagagaacttcctacagaaagctcctgtgccttctacctgttctagcacattccctgaagagctctccccacctagccaccaggccaagagggagattcgcttcctagagctacagaaggttgcctcctcttccagtgggaacaactttctctcaggttctccagcttctcccatgggtgatatcctgcagaccccacagttccagatgagacggctgaagaagcagcttgctgatgagagaagtaatagggatgagctggagctggagctagctgagaaccgcaagctcctcaccgagaaggatgcacagatagccatgatgcagcagcgcattgaccgcctagccctgctgaatgagaagcaggcggccagcccactggagcccaaggagcttgaggagctgcgtgacaagaatgagagccttaccatgcggctgcatgaaaccctgaagcagtgccaggacctgaagacagagaagagccagatggatcgcaaaatcaaccagctttcggaggagaatggagacctttcctttaagctgcgggagtttgccagtcatctgcagcagctacaggatgccctcaatgagctgacggaggagcacagcaaggccactcaggagtggctagagaagcaggcccagctggagaaggagctcagcgcagccctgcaggacaagaaatgccttgaagagaagaacgaaatccttcagggaaaactttcacagctggaagaacacttgtcccagctgcaggataacccaccccaggagaagggcgaggtgctgggtgatgtcttgcagctggaaaccttgaagcaagaggcagccactcttgctgcaaacaacacacagctccaagccagggtagagatgctggagactgagcgaggccagcaggaagccaagctgcttgctgagcggggccacttcgaagaagaaaagcagcagctgtctagcctgatcactgacctgcagagctccatctccaacctcagccaggccaaggaagagctggagcaggcctcccaggctcatggggcccggttgactgcccaggtggcctctctgacctctgagctcaccacactcaatgccaccatccagcaacaggatcaagaactggctggcctgaagcagcaggccaaagagaagcaggcccagctagcacagaccctccaacagcaagaacaggcctcccagggcctccgccaccaggtggagcagctaagcagtagcctgaagcagaaggagcagcagttgaaggaggtagcggagaagcaggaggcaactaggcaggaccatgcccagcaactggccactgctgcagaggagcgagaggcctccttaagggagcgggatgcggctctcaagcagctggaggcactggagaaggagaaggctgccaagctggagattctgcagcagcaacttcaggtggctaatgaagcccgggacagtgcccagacctcagtgacacaggcccagcgggagaaggcagagctgagccggaaggtggaggaactccaggcctgtgttgagacagcccgccaggaacagcatgaggcccaggcccaggttgcagagctagagttgcagctgcggtctgagcagcaaaaagcaactgagaaagaaagggtggcccaggagaaggaccagctccaggagcagctccaggccctcaaagagtccttgaaggtcaccaagggcagccttgaagaggagaagcgcagggctgcagatgccctggaagagcagcagcgttgtatctctgagctgaaggcagagacccgaagcctggtggagcagcataagcgggaacgaaaggagctggaagaagagagggctgggcgcaaggggctggaggctcgattacagcagcttggggaggcccatcaggctgagactgaagtcctgcggcgggagctggcagaggccatggctgcccagcacacagctgagagtgagtgtgagcagctcgtcaaagaagtagctgcctggcgtgagcggtatgaggatagccagcaagaggaggcacagtatggcgccatgttccaggaacagctgatgactttgaaggaggaatgtgagaaggcccgccaggagctgcaggaggcaaaggagaaggtggcaggcatagaatcccacagcgagctccagataagccggcagcagaacgaactagctgagctccatgccaacctggccagagcactccagcaggtccaagagaaggaagtcagggcccagaagcttgcagatgacctctccactctgcaggaaaagatggctgccaccagcaaagaggtggcccgcttggagaccttggtgcgcaaggcaggtgagcagcaggaaacagcctcccgggagttagtcaaggagcctgcgagggcaggagacagacagcccgagtggctggaagagcaacagggacgccagttctgcagcacacaggcagcgctgcaggctatggagcgggaggcagagcagatgggcaatgagctggaacggctgcgggccgcgctgatggagagccaggggcagcagcaggaggagcgtgggcagcaggaaagggaggtggcgcggctgacccaggagcggggccgtgcccaggctgaccttgccctggagaaggcggccagagcagagcttgagatgcggctgcagaacgccctcaacgagcagcgtgtggagttcgctaccctgcaagaggcactggctcatgccctgacggaaaaggaaggcaaggaccaggagttggccaagcttcgtggtctggaggcagcccagataaaagagctggaggaacttcggcaaaccgtgaagcaactgaaggaacagctggctaagaaagaaaaggagcacgcatctggctcaggagcccaatctgaggctgctggcaggacagagccaacaggccccaagctggaggcactgcgggcagaggtgagcaagctggaacagcaatgccagaagcagcaggagcaggctgacagcctggaacgcagcctcgaggctgagcgggcctcccgggctgagcgggacagtgctctggagactctgcagggccagttagaggagaaggcccaggagctagggcacagtcagagtgccttagcctcggcccaacgggagttggctgccttccgcaccaaggtacaagaccacagcaaggctgaagatgagtggaaggcccaggtggcccggggccggcaagaggctgagaggaaaaatagcctcatcagcagcttggaggaggaggtgtccatcctgaatcgccaggtcctggagaaggagggggagagcaaggagttgaagcggctggtgatggccgagtcagagaagagccagaagctggaggagaggctgcgcctgctgcaggcagagacagccagcaacagtgccagagctgcagaacgcagctctgctctgcgggaggaggtgcagagcctccgggaggaggctgagaaacagcgggtggcttcagagaacctgcggcaggagctgacctcacaggctgagcgtgcggaggagctgggccaagaattgaaggcgtggcaggagaagttcttccagaaagagcaggccctctccaccctgcagctcgagcacaccagcacacaggccctggtgagtgagctgctgccagctaagcacctctgccagcagctgcaggccgagcaggccgctgccgagaaacgccaccgtgaggagctggagcagagcaagcaggccgctgggggactgcgggcagagctgctgcgggcccagcgggagcttggggagctgattcctctgcggcagaaggtggcagagcaggagcgaacagctcagcagctgcgggcagagaaggccagctatgcagagcagctgagcatgctgaagaaggcgcatggcctgctggcagaggagaaccgggggctgggtgagcgggccaaccttggccggcagtttctggaagtggagttggaccaggcccgggagaagtatgtccaagagttggcagccgtacgtgctgatgctgagacccgtctggctgaggtgcagcgagaagcacagagcactgcccgggagctggaggtgatgactgccaagtatgagggtgccaaggtcaaggtcctggaggagaggcagcggttccaggaagagaggcagaaactcactgcccaggtggagcagctagaggtatttcagagagagcaaactaagcaggtggaagaactgagtaagaaactggctgactctgaccaagccagcaaggtgcagcagcagaagctgaaggctgtccaggctcagggaggcgagagccagcaggaggcccagcgcctccaggcccagctgaatgaactgcaagcccagttgagccagaaggagcaggcagctgagcactataagctgcagatggagaaagccaaaacacattatgatgccaagaagcagcagaaccaagagctgcaggagcagctgcggagcctggagcagctgcagaaggaaaacaaagagctgcgagctgaagctgaacggctgggccatgagctacagcaggctgggctgaagaccaaggaggctgaacagacctgccgccaccttactgcccaggtgcgcagcctggaggcacaggttgcccatgcagaccagcagcttcgagacctgggcaaattccaggtggcaactgatgctttaaagagccgtgagccccaggctaagccccagctggacttgagtattgacagcctggatctgagctgcgaggaggggaccccactcagtatcaccagcaagctgcctcgtacccagccagacggcaccagcgtccctggagaaccagcctcacctatctcccagcgcctgccccccaaggtagaatccctggagagtctctacttcactcccatccctgctcggagtcaggcccccctggagagcagcctggactccctgggagacgtcttcctggactcgggtcgtaagacccgctccgctcgtcggcgcaccacgcagatcatcaacatcaccatgaccaagaagctagatgtggaagagccagacagcgccaactcatcgttctacagcacgcggtctgctcctgcttcccaggctagcctgcgagccacctcctctactcagtctctagctcgcctgggttctcccgattatggcaactcagccctgctcagcttgcctggctaccgccccaccactcgcagttctgctcgtcgttcccaggccggggtgtccagtggggcccctccaggaaggaacagcttctacatgggcacttgccaggatgagcctgagcagctggatgactggaaccgcattgcagagctgcagcagcgcaatcgagtgtgccccccacatctgaagacctgctatcccctggagtccaggccttccctgagcctgggcaccatcacagatgaggagatgaaaactggagacccccaagagaccctgcgccgagccagcatgcagccaatccagatagccgagggcactggcatcaccacccggcagcagcgcaaacgggtctccctagagccccaccagggccctggaactcctgagtctaagaaggccaccagctgtttcccacgccccatgactccccgagaccgacatgaagggcgcaaacagagcactactgaggcccagaagaaagcagctccagcttctactaaacaggctgaccggcgccagtcgatggccttcagcatcctcaacacacccaagaagctagggaacagccttctgcggcggggagcctcaaagaaggccctgtccaaggcttcccccaacactcgcagtggaacccgccgttctccgcgcattgccaccaccacagccagcgccgccactgctgccgccattggtgccacccctcgagccaagggcaaggcaaagcactaaagggccagtaccagtgagtggccccacctgtgtccccgatgctgacctcacctggtcctccgcctactgtccctctcagtgccttctctcagctcccaggccaacagtagccaaacccctagagacagtgatgcctgcccgcaccctggcctggtccctggtccttcactggcgccttctcggagctggcccagggggcctggagcatggacagtgtgggcgctctccctaccttgcctccttttttcttaaagcaaagtcacttctccatcacaaccagatttgaggctggttttgatggctgggtccttgggcctggccagtcttcctcttagcctctggatctagaagggaccataagaggagtaggccctggttcctgctgtcctggtggctgggcccagcaggggccctcactcttgaagtccaggactgggtctgacctggtgggagcacctgccagaggatgctctttcccaggacggatgggccctatgtctcaggagtggggttgggggacagccttcagcagcagctcacaccctaccttccccagacttgcactggggtgggatttggagtgatgggaaggtttttaagggccggggatggatcttttctaaatgttattacttgtaaataaagtctatttttctcccgtg

SEQ ID NO: 118 - DNA, 1849 bp, Homo sapiens
acaggcattttccaaaggcaagcctggagcgcacggatctgtataaccgcggaaggccctgtttccggtcccttgcgcctgcgctcttgcagccaagaaggcgggaggctggagtagagggaagcctgcaaccggaagtgaaggcagatttccctccttcgtcgctgttgctgccgccatacgcgctctccctgtttagctcttctgttagaaatagtatctttgttttcctttgctgttcctcaatcccctactcttcaccccttgttttcacctattttgcgagaacccatccagatcccccttcccttcttcccctgccggcccagttatggcagagaacgatgtggacaatgagctcttggactatgaagatgatgaggtggagacagcagctgggggagatggggctgaggcccctgccaagaaggatgtcaagggctcctatgtctccatccacagctctggctttcgtgacttcctgctcaagccagagttgctccgggccattgtcgactgtggctttgagcatccgtcagaagtccagcatgagtgcatccctcaggccattctgggaatggatgtcctgtgccaggccaagtcgggcatgggaaagacagcagtgtttgtcttggccacactgcaacagctggagccagttactgggcaggtgtctgtgctggtgatgtgtcacactcgggagttggcttttcagatcagcaaggaatatgagcgcttctctaaatacatgcccaatgtcaaggttgctgttttttttggtggtctgtctatcaagaaggatgaagaggtgctgaagaagaactgcccgcatatcgtcgtggggactccaggccgtatcctagccctggctcgaaataagagcctcaacctcaaacacattaaacactttattttggatgaatgtgataagatgcttgaacagctcgacatgcgtcgggatgtccaggaaatttttcgcatgaccccccacgagaagcaggtcatgatgttcagtgctaccttgagcaaagagatccgtccagtctgccgcaagttcatgcaagatccaatggagatcttcgtggatgatgagacgaagttgacgctgcatgggttgcagcagtactacgtgaaactgaaggacaacgagaagaaccggaagctctttgaccttctggatgtccttgagttcaaccaggtggtgatctttgtgaagtctgtgcagcggtgcattgccttggcccagctactagtggagcagaacttcccagccattgccatccaccgtgggatgccccaggaggagaggctttctcggtatcagcagtttaaagattttcaacgacgaattcttgtggctaccaacctatttggccgaggcatggacatcgagcgggtgaacattgcttttaattatgacatgcctgaggattctgacacctacctgcatcgggtggccagagcaggccggtttggcaccaagggcttggctatcacatttgtgtccgatgagaatgatgccaagatcctcaatgatgtgcaggatcgctttgaggtcaatattagtgagctgcctgatgagatagacatctcctcctacattgaacagacacggtagaagactcgcccattttggaatgtgaccgtctgtccttcaggagaggacaccagggtgggggtgaaggagacactactgcccccacccctgacagcccccaccccatggcttccatcttttgcatcaccaccactcctgaacccccatttctgatttgtcagaatttttttttaacaaaactaaaaatgaaacacatgtgtctgtggtatctataaaaaaaaaaaaaaaaaa

SEQ ID NO: 119 - DNA, 1719 bp, Homo sapiens
acaggcattttccaaaggcaagcctggagcgcacggatctgtataaccgcggaaggccctgtttccggtcccttgcgcctgcgctcttgcagccaagaaggcgggaggctggagtagagggaagcctgcaaccggaagtgaaggcagatttccctccttcgtcgctgttgctgccgccatacgcgctctccctgtttagttatggcagagaacgatgtggacaatgagctcttggactatgaagatgatgaggtggagacagcagctgggggagatggggctgaggcccctgccaagaaggatgtcaagggctcctatgtctccatccacagctctggctttcgtgacttcctgctcaagccagagttgctccgggccattgtcgactgtggctttgagcatccgtcagaagtccagcatgagtgcatccctcaggccattctgggaatggatgtcctgtgccaggccaagtcgggcatgggaaagacagcagtgtttgtcttggccacactgcaacagctggagccagttactgggcaggtgtctgtgctggtgatgtgtcacactcgggagttggcttttcagatcagcaaggaatatgagcgcttctctaaatacatgcccaatgtcaaggttgctgttttttttggtggtctgtctatcaagaaggatgaagaggtgctgaagaagaactgcccgcatatcgtcgtggggactccaggccgtatcctagccctggctcgaaataagagcctcaacctcaaacacattaaacactttattttggatgaatgtgataagatgcttgaacagctcgacatgcgtcgggatgtccaggaaatttttcgcatgaccccccacgagaagcaggtcatgatgttcagtgctaccttgagcaaagagatccgtccagtctgccgcaagttcatgcaagatccaatggagatcttcgtggatgatgagacgaagttgacgctgcatgggttgcagcagtactacgtgaaactgaaggacaacgagaagaaccggaagctctttgaccttctggatgtccttgagttcaaccaggtggtgatctttgtgaagtctgtgcagcggtgcattgccttggcccagctactagtggagcagaacttcccagccattgccatccaccgtgggatgccccaggaggagaggctttctcggtatcagcagtttaaagattttcaacgacgaattcttgtggctaccaacctatttggccgaggcatggacatcgagcgggtgaacattgcttttaattatgacatgcctgaggattctgacacctacctgcatcgggtggccagagcaggccggtttggcaccaagggcttggctatcacatttgtgtccgatgagaatgatgccaagatcctcaatgatgtgcaggatcgctttgaggtcaatattagtgagctgcctgatgagatagacatctcctcctacattgaacagacacggtagaagactcgcccattttggaatgtgaccgtctgtccttcaggagaggacaccagggtgggggtgaaggagacactactgcccccacccctgacagcccccaccccatggcttccatcttttgcatcaccaccactcctgaacccccatttctgatttgtcagaatttttttttaacaaaactaaaaatgaaacacatgtgtctgtggtatctataaaaaaaaaaaaaaaaaa

SEQ ID NO: 120 - DNA, 1898 bp, Homo sapiens
agctgctggctgggctgcctgttgagtcagccttcttccctcacggctcttctcccggtccctgaaactcggctgccaggggagctggagccacctgcgaaggtgtcctcccatactggacccctacaggaagctccgtgtgcccagctggggcacagccccagctgatgccccagaggggccacccatcgcaagaggggctttgggctctgccctccctccccatggcgcatgggccaaagcctgagactgaaggactgttggacctcagcttcctgacagaggaggagcaggaggccattgctggcgtcctccaacgagatgcccgcctgcgccagctggaggaggggcgggtcagcaagctccgggcctcagtggcagaccctgggcagctgaagatcctgacaggggactggttccaggaagcacgctcccagcggcaccacaatgcccacttcggctctgaccttgtccgagcgtctatgcgcaggaagaagagcaccaggggagaccaggctccaggccacgacagggaggctgaggctgctgtgaaagagaaggaagaggggccagagcccaggctcaccattgatgaggcccctcaggagaggctcagggagactgaggcttcagatcctgaggaggcgtcccaggcccaggaagatcctggccaaggagaccaacaggtctgtgccgaggaggctgacccggagctggagcccgcgtcggggggagagcaggagccgcggccccagcaagcccagaccaaggccgcgtcccagatcctggagaatggggaggaggccccggggcccgacccctctctcgaccgcatgctcagcagcagctcctcggtgtccagccttaactcctccacgctgagcggcagccagatgagcctgtcaggcgacgcggaggcggtgcaggtccgcggctccgtgcacttcgcgctgcactacgagccgggcgccgccgagctgcgcgtgcacgtgatccagtgccagggcctggccgccgcccggcgccgccgctcggacccctacgtcaaaagctacctcctcccggataagcagagcaagcgcaagacggcggtgaagaaacggaatctgaatccggttttcaacgagactctccggtactccgtcccgcaggccgagcttcagggccgcgtgctgagcctgtctgtgtggcaccgcgaaagcctgggtcgcaacatctttctgggcgaagttgaagtgcccctggacacgtgggactggggctctgagcccacctggctccccctgcagccccgggtcccaccctctcccgacgaccttccgagccgcgggttactcgccctgtccctcaagtacgtccccgccggctccgagggcgcaggactgcccccgagcggggagctgcacttctgggtgaaggaggctcgggacctcctgccgctgcgggcaggatccctggacacttacgtacaatgcttcgtgctgcctgatgacagccaggccagccgccagcgtacaagggttgtgcgacgcagcctcagccctgtgttcaatcacaccatggtgtacgatggctttgggcctgctgacctgcgccaggcttgtgccgagctctccctctgggaccatggggccctggccaaccgccagctggggggcacacgcctcagcctgggcaccggcagcagctatgggctgcaggtgccctggatggattccacacctgaggagaagcagctgtggcaagccctcctggagcagccgtgcgaatgggtggatggccttctacccctcagaaccaacctggcccccaggacgtagccccaccaagcctctctctctggacccccatctcagggcctgcccttggctaaagtcaataaagtctattctaagagc

SEQ ID NO: 121 - DNA, 4324 bp, Homo sapiens
atggaggccaaggaggaggaggtcatcgacggcttcgccatcgccagcttcagcaccctggaggccctggagaaggatatggccctgaagccacatgagcggaaggagaagtgggagcgtcgtctcatcaagaagccccgggagtcggaaacctgcccccctgcggagcccagtgagaacaggcggcccctggaggcaggcagccccgggcaggacctcgaacccgcctgcgatggggcgagaaaggtcccactgcagccctccaagcagatgaaggtcaccgtgtccaaagggggcgaccgggacagtgacgacgacagcgtcctcgaagccaccagctcccgggacccgctcagcgatagctctgcgcatgcggtctcggggagaggctactcttgtgacagcgagagcggcccggacgacaaggcatccgtgggctctgagaagctctttgcgccgggaaccgataaaggcccagcgcttgagaagtcggaggccaaggccgggccggtgcccaaggtgtcaggcctggagcgcagccgcgagctcagcgccgagagcttcctgcccactgccagccccgcgccccatgccgcgccctgcccggggcccccgcccggctcccgcgccaatcccttggtgaagaaggaaccccccgccccgcaccgccacaccccgcagccgccacccccgcagccccgcggcctgctcccgacacacgtgcctgcatccctgggcgccttcgcgggccacagccaggcggcagccaacggcctgcacggcctcagcaggagcagcagcgcccccctgggcctggggaagcacgtgtcgctgtcgccacacgggccgggcccccacctgtctacctcacacctggcgctccggtcccaggcgcagcaccagctccacgcggccatgtttgccgcacccccgacactgcccccgcccccggcgctgccggccagcagcctggtcctcccaggacacccggccgatcacgagctgctcaggcaagagctgaacacgcggtttctggtgcagagcgccgagcggcctggcgcctccctgggcccgggggctctgctgcgggcggagttccatcagcaccagcacacacaccagcacacgcaccaacacacacaccagcaccaacacacattcgcccccttccccgcagggctgcccccgacgccgcccgccgcacccccgccgtttgacaagtatgcgcccaagctggacagcccctacttccgacattccagcgtgagtttcttcccgtccttccctcctgccatcccgggactgcccaccctgctcccacaccccggccccttcgggtccctgcagggcgcttttcagcctaaggtgtctgacccgtaccgggcggtggtcaaggtgagcacgtgttgggaaggcccgtggcaagggaggactctggtgcccccggggcggcctcggggggcccgtgacagcaggagtctgcagaaaacatgggtgggggtggcaccagccccactgagcgcttccatcctgtcgcagaagccggggaggtggtgtgccgtgcacgtgcagatcgcctggcagatctaccgtcaccagcagaagataaaggagatgcagctggacccccacaagctggaggtgggtgcaaagctggacctgttcggcagaccccctgccccgggcgtgtttgcaggcttccactacccacaggacctggcccggcccctcttccccagcacaggtgccgcccatcctgcctccaacccatttggaccctcagcccatcctggcagcttcctgcccactggccccctgacagaccctttcagcagaccgagcacctttgggggcctgggcagcctgagcagccacgcctttgggggcctgggcagccatgcactggctcccggtggcagcatctttgcccccaaggagggctcctccgtgcacggcctgcccagcccccatgaggcctggaaccgactgcaccgggcaccgccctccttcccggctccgcccccgtggcccaagtccgtggacgcggagcgggtgtcagccctgaccaaccatgaccgagagccggacaatggcaaggaggagcaggaacgggacctcctggagaagacgcgcctgctgagccgggcctcgcccgccacccccgctggccaccccgtcagcggcctcctgctccgggcccagagcgagctgggccggtccggggcccccgcggagcgcgaggccgaacctcgggtcaaggagagccgctccccggccaaggaggaggccgccaagatgcccgcgcgcgcatccccgccccacagcaaggcggcccctggagacgtgaaggtcaaggaggagcgcggggaggacgaggcctccgagcccccggcgggcggcctgcaccccgcgcccctgcagctcggcctgggccgcgagcgcctgggcgcgccgggcttcgcgtgggagcctttccgcggcctggagctgccacgtcgcgccttccccgctgccgcccccgccccgggctccgccgccctcttggagcccccggagcgcccctaccgcgaccgcgagccccacggctacagccccgagcgcctgcgcggggagctggagcgcgcgcgggccccgcacctgccgcccgccgcccccgccttggacggcgcgctgctgccctcgctgggagccctgcacttcccgcgcctctcgcccgccgcgctgcacaatgggctcctggcgcggaccccgcccgccgccgccgccctcggcgcaccgccccccctggtgacggcggccgggccccccacgccccccgggccgccgcggagccggactactccgctggggggcctcgggccgggcgaggcgcgcgactactccccgtcccgaaatcccccggaggtggaggcgcggtagccccggggccgcagacgcctctccgagcggagcgcaccgctgtccgtctctccatcagttcctagaactcaagcacagctcccgccgatcctggggcggcgccgcctctccacccgcagcctgcggaggcggggacttgggtgtcggcttttctgagggtgatcttttgttttccgagtttgggattcggctgttgggaaaaaaaaatcgcgtttgtaccttttccccccacagatgagaagtgtttgtaatggatttgtatttttcttaattttatgctctttagacgtttaaaagaaccaaaaaagaaacttttgcttcttcgttttcggttgggatttgcagtttaatggcctcagatccttctccagatccccagggtttctttgtcttatttatggagaaaaaccggtcactttgtccagcgcactgtgaggcccccactcaggccagccctggcccccccttggtacttggaaccgaagttacagattatattaaaataataatgtacaaaactttgtttttttgccttattatgcagaagtgtaatttcttttttggtttgtttttttaaaagcaaacgaaacgtgtaaatagtctgttgatataaatatatgacgttactaaattcttaatctagatagactttataaaaaccgtttccagaaacccctctggttgtttgtctaacatggtcacaaaaacccaggcgctgctggctgtaaacattatcagaagtttaatggcagcaactttccttcaactatgcaagcgcttcccggcggctctgctggttgggggaggaaggttccgccagcgacctcccagcccctgggtccgtggaggggttgggtcccccagcagagcccctgggccagcagaacagcactcctgggcggctcctgtgggcttcaggactggccggctccagccgcaagggcgatgctgtggacgtttgtgtggatggtgcagtgttcttggaatctgtagaccagatcggtggaggtatagaagtgcaagagtctaaaggctgattttacacacacacacacacacacacacacacacacaaaatcactgctgtgtgttttcttccgcctgaggcatcagcgtcacctcggtgtggtcgtcgcctcccaggcccttggcctggcctcctctcagtttgggttttgccctcacccacatgagcccccccatgccctgccccccttgcggccttttgtgttccccgatgtctgggctgtgtccctgccgggattcccagccttcggggtcagccgtcgagccacttgctttgctcagttctgtgtttcagccacatttccacggtggaccctgtttgttttaaatattctgttcccatgtcaatcagtgacgataaatacagccttgatttgga

SEQ ID NO: 122 - DNA, 4321 bp, Homo sapiens
atggaggccaaggaggaggaggtcatcgacggcttcgccatcgccagcttcagcaccctggaggccctggagaaggatatggccctgaagccacatgagcggaaggagaagtgggagcgtcgtctcatcaagaagccccgggagtcggaaacctgcccccctgcggagcccagtgagaacaggcggcccctggaggcaggcagccccgggcaggacctcgaacccgcctgcgatggggcgagaaaggtcccactgcagccctccaagcagatgaaggtcaccgtgtccaaagggggcgaccgggacagtgacgacgacagcgtcctcgaagccaccagctcccgggacccgctcagcgatagctctgcgcatgcggtctcggggagaggctactcttgtgacagcgagagcggcccggacgacaaggcatccgtgggctctgagaagctctttgcgccgggaaccgataaaggcccagcgcttgagaagtcggaggccaaggccgggccggtgcccaaggtgtcaggcctggagcgcagccgcgagctcagcgccgagagcttcctgcccactgccagccccgcgccccatgccgcgccctgcccggggcccccgcccggctcccgcgccaatcccttggtgaagaaggaaccccccgccccgcaccgccacaccccgcagccgccacccccgcagccccgcggcctgctcccgacacacgtgcctgcatccctgggcgccttcgcgggccacagccaggcggcagccaacggcctgcacggcctcagcaggagcagcagcgcccccctgggcctggggaagcacgtgtcgctgtcgccacacgggccgggcccccacctgtctacctcacacctggcgctccggtcccaggcgcagcaccagctccacgcggccatgtttgccgcacccccgacactgcccccgcccccggcgctgccggccagcagcctggtcctcccaggacacccggccgatcacgagctgctcaggcaagagctgaacacgcggtttctggtgcagagcgccgagcggcctggcgcctccctgggcccgggggctctgctgcgggcggagttccatcagcaccagcacacacaccagcacacgcaccaacacacacaccagcaccaacacacattcgcccccttccccgcagggctgcccccgacgccgcccgccgcacccccgccgtttgacaagtatgcgcccaagctggacagcccctacttccgacattccagcgtgagtttcttcccgtccttccctcctgccatcccgggactgcccaccctgctcccacaccccggccccttcgggtccctgcagggcgcttttcagcctaaggtgtctgacccgtaccgggcggtggtcaaggtgagcacgtgttgggaaggcccgtggcaagggaggactctggtgcccccggggcggcctcggggggcccgtgacagcaggagtctgcagaaaacatgggtgggggtggcaccagccccactgagcgcttccatcctgtcgcagaagccggggaggtggtgtgccgtgcacgtgcagatcgcctggcagatctaccgtcaccagcagaagataaaggagatgcagctggacccccacaagctggaggtgggtgcaaagctggacctgttcggcagaccccctgccccgggcgtgtttgcaggcttccactacccacaggacctggcccggcccctcttccccagcacaggtgccgcccatcctgcctccaacccatttggaccctcagcccatcctggcagcttcctgcccactggccccctgacagaccctttcagcagaccgagcacctttgggggcctgggcagcctgagcagccacgcctttgggggcctgggcagccatgcactggctcccggtggcagcatctttgcccccaaggagggctcctccgtgcacggcctgcccagcccccatgaggcctggaaccgactgcaccgggcaccgccctccttcccggctccgcccccgtggcccaagtccgtggacgcggagcgggtgtcagccctgaccaaccatgaccgagagccggacaatggcaaggaggagcaggaacgggacctcctggagaagacgcgcctgctgagccgggcctcgcccgccacccccgctggccaccccgtcagcggcctcctgctccgggcccagagcgagctgggccgatccggggcccccgcggagcgcgaggccgaacctcgggtcaaggagagccgctccccggccaaggaggaggccgccaagatgcccgcgcgcgcatccccgccccacagcaaggcggcccctggagacgtgaaggtcaaggaggagcgcggggaggacgaggcctccgagcccccggcgggcggcctgcaccccgcgcccctgcagctcggcctgggccgcgagcgcctgggcgcgccgggcttcgcgtgggagcctttccgcggcctggagctgccacgtcgcgccttccccgctgccgcccccgccccgggctccgccgccctcttggagcccccggagcgcccctaccgcgaccgcgagccccacggctacagccccgagcgcctgcgcggggagctggagcgcgcgcgggccccgcacctgccgcccgccgcccccgccttggacggcgcgctgctgccctcgctgggagccctgcacttcccgcgcctctcgcccgccgcgctgcacaatgggctcctggcgcggaccccgcccgccgccgccgccctcggcgcaccgccccccctggtgaccgcggccgggccccccacgccccccgggccgccgcggagccggactactccgctggggggcctcgggccgggcgaggcgcgcgactactccccgtcccgaaatcccccggaggtggaggcgcggtagccccggggccgcagacgcctctccgagcggagcgcaccgctgtccgtctctccatcagttcctagaactcaagcacagctcccgccgatcctggggcggcgccgcctctccacccgcagcctgcggaggcggggacttgggtgtcggcttttctgagggtgatcttttgttttccgagtttgggattcggctgttgggaaaaaaaaatcgcgtttgtaccttttccccccacagatgagaagtgtttgtaatggatttgtatttttcttaattttatgctctttagacgtttaaaagaaccaaaaaagaaacttttgcttcttcgttttcggttgggatttgcagtttaatggcctcagatccttctccagatccccagggtttctttgtcttatttatggagaaaaaccggtcactttgtccagcgcactgtgaggcccccactcaggccagccctggcccccccttggtacttggaaccgaagttacagattatattaaaataataatgtacaaaactttgtttttttgccttattatgcagaagtgtaatttcttttttggtttgtttttttaaaagcaaacgaaacgtgtaaatagtctgttgatataaatatatgacgttactaaattcttaatctagatagactttataaaaaccgtttccagaaacccctctggttgtttgtctaacatggtcacaaaaacccaggcgctgctggctgtaaacattatcagaagtttaatggcagcaactttccttcaactatgcaagcgcttcccggcggctctgctggttgggggaggaaggttccgccagcgacctcccagcccctgggtccgtggaggggttgggtccccccagcagagcccctgggccagcagaacagcactcctgggcggctcctgtgggcttcaggactggccggctccagccgcaagggcgatgctgtggacgtttgtgtggatggtgcagtgttctcggaatctgtagaccagatcggtggaggtatagaagtgcaagagtctaaaggctgattttacacacacacacacacacacacacacaaaatcactgctgtgtgttttcttccgcctgaggcatcagcgtcacctcggtgtggtcgtcgcctcccaggcccttggcctggcctcctctcagtttgggttttgccctcacccacatgagcccccccatgccctgccccccttgcggccttttgtgttccccgatgtctgggctgtgtccctgccgggattcccagccttcggggtcagccgtcgagccacttgctttgctcagttctgtgtttcagccacatttccacggtggaccctgtttgttttaaatattctgttcccatgtcaatcagtgacgataaatacagccttgatttggatg

SEQ ID NO: 123 - DNA, 13147 bp, Homo sapiens
ccggagcccgagccgaagggcgagccgcaaacgctaagtcgctggccattggtggacatggcgcaggcgcgtttgctccgacgggccgaatgttttggggcagtgttttgagcgcggagaccgcgtgatactggatgcgcatgggcataccgtgctctgcggctgcttggcgttgcttcttcctccagaagtgggcgctgggcagtcacgcagggtttgaaccggaagcgggagtaggtagctgcgtggctaacggagaaaagaagccgtggccgcgggaggaggcgagaggagtcgggatctgcgctgcagccaccgccgcggttgatactactttgaccttccgagtgcagtgacagtgatgtgtgttctgaaattgtgaaccatgagtctagtacttaatgatctgcttatctgctgccgtcaactagaacatgatagagctacagaacgaaagaaagaagttgagaaatttaagcgcctgattcgagatcctgaaacaattaaacatctagatcggcattcagattccaaacaaggaaaatatttgaattgggatgctgtttttagatttttacagaaatatattcagaaagaaacagaatgtctgagaatagcaaaaccaaatgtatcagcctcaacacaagcctccaggcagaaaaagatgcaggaaatcagtagtttggtcaaatacttcatcaaatgtgcaaacagaagagcacctaggctaaaatgtcaagaactcttaaattatatcatggatacagtgaaagattcatctaatggtgctatttacggagctgattgtagcaacatactactcaaagacattctttctgtgagaaaatactggtgtgaaatatctcagcaacagtggttagaattgttctctgtgtacttcaggctctatctgaaaccttcacaagatgttcatagagttttagtggctagaataattcatgctgttaccaaaggatgctgttctcagactgacggattaaattccaaatttttggactttttttccaaggctattcagtgtgcgagacaagaaaagagctcttcaggtctaaatcatatcttagcagctcttactatcttcctcaagactttggctgtcaactttcgaattcgagtgtgtgaattaggagatgaaattcttcccactttgctttatatttggactcaacataggcttaatgattctttaaaagaagtcattattgaattatttcaactgcaaatttatatccatcatccgaaaggagccaaaacccaagaaaaaggtgcttatgaatcaacaaaatggagaagtattttatacaacttatatgatctgctagtgaatgagataagtcatataggaagtagaggaaagtattcttcaggatttcgtaatattgccgtcaaagaaaatttgattgaattgatggcagatatctgtcaccaggtttttaatgaagataccagatccttggagatttctcaatcttacactactacacaaagagaatctagtgattacagtgtcccttgcaaaaggaagaaaatagaactaggctgggaagtaataaaagatcaccttcagaagtcacagaatgattttgatcttgtgccttggctacagattgcaacccaattaatatcaaagtatcctgcaagtttacctaactgtgagctgtctccattactgatgatactatctcagcttctaccccaacagcgacatggggaacgtacaccatatgtgttacgatgccttacggaagttgcattgtgtcaagacaagaggtcaaacctagaaagctcacaaaagtcagatttattaaaactctggaataaaatttggtgtattacctttcgtggtataagttctgagcaaatacaagctgaaaactttggcttacttggagccataattcagggtagtttagttgaggttgacagagaattctggaagttatttactgggtcagcctgcagaccttcatgtcctgcagtatgctgtttgactttggcactgaccaccagtatagttccaggaacggtaaaaatgggaatagagcaaaatatgtgtgaagtaaatagaagcttttctttaaaggaatcaataatgaaatggctcttattctatcagttagagggtgacttagaaaatagcacagaagtgcctccaattcttcacagtaattttcctcatcttgtactggagaaaattcttgtgagtctcactatgaaaaactgtaaagctgcaatgaattttttccaaagcgtgccagaatgtgaacaccaccaaaaagataaagaagaactttcattctcagaagtagaagaactatttcttcagacaacttttgacaagatggactttttaaccattgtgagagaatgtggtatagaaaagcaccagtccagtattggcttctctgtccaccagaatctcaaggaatcactggatcgctgtcttctgggattatcagaacagcttctgaataattactcatctgagattacaaattcagaaactcttgtccggtgttcacgtcttttggtgggtgtccttggctgctactgttacatgggtgtaatagctgaagaggaagcatataagtcagaattattccagaaagccaagtctctaatgcaatgtgcaggagaaagtatcactctgtttaaaaataagacaaatgaggaattcagaattggttccttgagaaatatgatgcagctatgtacacgttgcttgagcaactgtaccaagaagagtccaaataagattgcatctggctttttcctgcgattgttaacatcaaagctaatgaatgacattgcagatatttgtaaaagtttagcatccttcatcaaaaagccatttgaccgtggagaagtagaatcaatggaagatgatactaatggaaatctaatggaggtggaggatcagtcatccatgaatctatttaacgattaccctgatagtagtgttagtgatgcaaacgaacctggagagagccaaagtaccataggtgccattaatcctttagctgaagaatatctgtcaaagcaagatctacttttcttagacatgctcaagttcttgtgtttgtgtgtaactactgctcagaccaatactgtgtcctttagggcagctgatattcggaggaaattgttaatgttaattgattctagcacgctagaacctaccaaatccctccacctgcatatgtatctaatgcttttaaaggagcttcctggagaagagtaccccttgccaatggaagatgttcttgaacttctgaaaccactatccaatgtgtgttctttgtatcgtcgtgaccaagatgtttgtaaaactattttaaaccatgtccttcatgtagtgaaaaacctaggtcaaagcaatatggactctgagaacacaagggatgctcaaggacagtttcttacagtaattggagcattttggcatctaacaaaggagaggaaatatatattctctgtaagaatggccctagtaaattgccttaaaactttgcttgaggctgatccttattcaaaatgggccattcttaatgtaatgggaaaagactttcctgtaaatgaagtatttacacaatttcttgctgacaatcatcaccaagttcgcatgttggctgcagagtcaatcaatagattgttccaggacacgaagggagattcttccaggttactgaaagcacttcctttgaagcttcagcaaacagcttttgaaaatgcatacttgaaagctcaggaaggaatgagagaaatgtcccatagtgctgagaaccctgaaactttggatgaaatttataatagaaaatctgttttactgacgttgatagctgtggttttatcctgtagccctatctgcgaaaaacaggctttgtttgccctgtgtaaatctgtgaaagagaatggattagaacctcaccttgtgaaaaaggttttagagaaagtttctgaaacttttggatatagacgtttagaagactttatggcatctcatttagattatctggttttggaatggctaaatcttcaagatactgaatacaacttatcttcttttccttttattttattaaactacacaaatattgaggatttctatagatcttgttataaggttttgattccacatctggtgattagaagtcattttgatgaggtgaagtccattgctaatcagattcaagaggactggaaaagtcttctaacagactgctttccaaagattcttgtaaatattcttccttattttgcctatgagggtaccagagacagtgggatggcacagcaaagagagactgctaccaaggtctatgatatgcttaaaagtgaaaacttattgggaaaacagattgatcacttattcattagtaatttaccagagattgtggtggagttattgatgacgttacatgagccagcaaattctagtgccagtcagagcactgacctctgtgacttttcaggggatttggatcctgctcctaatccacctcattttccatcgcatgtgattaaagcaacatttgcctatatcagcaattgtcataaaaccaagttaaaaagcattttagaaattctttccaaaagccctgattcctatcagaaaattcttcttgccatatgtgagcaagcagctgaaacaaataatgtttataagaagcacagaattcttaaaatatatcacctgtttgttagtttattactgaaagatataaaaagtggcttaggaggagcttgggcctttgttcttcgagacgttatttatactttgattcactatatcaaccaaaggccttcttgtatcatggatgtgtcattacgtagcttctccctttgttgtgacttattaagtcaggtttgccagacagccgtgacttactgtaaggatgctctagaaaaccatcttcatgttattgttggtacacttataccccttgtgtatgagcaggtggaggttcagaaacaggtattggacttgttgaaatacttagtgatagataacaaggataatgaaaacctctatatcacgattaagcttttagatccttttcctgaccatgttgtttttaaggatttgcgtattactcagcaaaaaatcaaatacagtagaggacccttttcactcttggaggaaattaaccattttctctcagtaagtgtttatgatgcacttccattgacaagacttgaaggactaaaggatcttcgaagacaactggaactacataaagatcagatggtggacattatgagagcttctcaggataatccgcaagatgggattatggtgaaactagttgtcaatttgttgcagttatccaagatggcaataaaccacactggtgaaaaagaagttctagaggctgttggaagctgcttgggagaagtgggtcctatagatttctctaccatagctatacaacatagtaaagatgcatcttataccaaggcccttaagttatttgaagataaagaacttcagtggaccttcataatgctgacctacctgaataacacactggtagaagattgtgtcaaagttcgatcagcagctgttacctgtttgaaaaacattttagccacaaagactggacatagtttctgggagatttataagatgacaacagatccaatgctggcctatctacagccttttagaacatcaagaaaaaagtttttagaagtacccagatttgacaaagaaaacccttttgaaggcctggatgatataaatctgtggattcctctaagtgaaaatcatgacatttggataaagacactgacttgtgcttttttggacagtggaggcacaaaatgtgaaattcttcaattattaaagccaatgtgtgaagtgaaaactgacttttgtcagactgtacttccatacttgattcatgatattttactccaagatacaaatgaatcatggagaaatctgctttctacacatgttcagggatttttcaccagctgtcttcgacacttctcgcaaacgagccgatccacaacccctgcaaacttggattcagagtcagagcactttttccgatgctgtttggataaaaaatcacaaagaacaatgcttgctgttgtggactacatgagaagacaaaagagaccttcttcaggaacaatttttaatgatgctttctggctggatttaaattatctagaagttgccaaggtagctcagtcttgtgctgctcactttacagctttactctatgcagaaatctatgcagataagaaaagtatggatgatcaagagaaaagaagtcttgcatttgaagaaggaagccagagtacaactatttctagcttgagtgaaaaaagtaaagaagaaactggaataagtttacaggatcttctcttagaaatctacagaagtataggggagccagatagtttgtatggctgtggtggagggaagatgttacaacccattactagactacgaacatatgaacacgaagcaatgtggggcaaagccctagtaacatatgacctcgaaacagcaatcccctcatcaacacgccaggcaggaatcattcaggccttgcagaatttgggactctgccatattctttccgtctatttaaaaggattggattatgaaaataaagactggtgtcctgaactagaagaacttcattaccaagcagcatggaggaatatgcagtgggaccattgcacttccgtcagcaaagaagtagaaggaaccagttaccatgaatcattgtacaatgctctacaatctctaagagacagagaattctctacattttatgaaagtctcaaatatgccagagtaaaagaagtggaagagatgtgtaagcgcagccttgagtctgtgtattcgctctatcccacacttagcaggttgcaggccattggagagctggaaagcattggggagcttttctcaagatcagtcacacatagacaactctctgaagtatatattaagtggcagaaacactcccagcttctcaaggacagtgattttagttttcaggagcctatcatggctctacgcacagtcattttggagatcctgatggaaaaggaaatggacaactcacaaagagaatgtattaaggacattctcaccaaacaccttgtagaactctctatactggccagaactttcaagaacactcagctccctgaaagggcaatatttcaaattaaacagtacaattcagttagctgtggagtctctgagtggcagctggaagaagcacaagtattctgggcaaaaaaggagcagagtcttgccctgagtattctcaagcaaatgatcaagaagttggatgccagctgtgcagcgaacaatcccagcctaaaacttacatacacagaatgtctgagggtttgtggcaactggttagcagaaacgtgcttagaaaatcctgcggtcatcatgcagacctatctagaaaaggcagtagaagttgctggaaattatgatggagaaagtagtgatgagctaagaaatggaaaaatgaaggcatttctctcattagcccggttttcagatactcaataccaaagaattgaaaactacatgaaatcatcggaatttgaaaacaagcaagctctcctgaaaagagccaaagaggaagtaggtctccttagggaacataaaattcagacaaacagatacacagtaaaggttcagcgagagctggagttggatgaattagccctgcgtgcactgaaagaggatcgtaaacgcttcttatgtaaagcagttgaaaattatatcaactgcttattaagtggagaagaacatgatatgtgggtattccgactttgttccctctggcttgaaaattctggagtttctgaagtcaatggcatgatgaagagagacggaatgaagattccaacatataaatttttgcctcttatgtaccaattggctgctagaatggggaccaagatgatgggaggcctaggatttcatgaagtcctcaataatctaatctctagaatttcaatggatcacccccatcacactttgtttattatactggccttagcaaatgcaaacagagatgaatttctgactaaaccagaggtagccagaagaagcagaataactaaaaatgtgcctaaacaaagctctcagcttgatgaggatcgaacagaggctgcaaatagaataatatgtactatcagaagtaggagacctcagatggtcagaagtgttgaggcactttgtgatgcttatattatattagcaaacttagatgccactcagtggaagactcagagaaaaggcataaatattccagcagaccagccaattactaaacttaagaatttagaagatgttgttgtccctactatggaaattaaggtggaccacacaggagaatatggaaatctggtgactatacagtcatttaaagcagaatttcgcttagcaggaggtgtaaatttaccaaaaataatagattgtgtaggttccgatggcaaggagaggagacagcttgttaagggccgtgatgacctgagacaagatgctgtcatgcaacaggtcttccagatgtgtaatacattactgcagagaaacacggaaactaggaagaggaaattaactatctgtacttataaggtggttcccctctctcagcgaagtggtgttcttgaatggtgcacaggaactgtccccattggtgaatttcttgttaacaatgaagatggtgctcataaaagatacaggccaaatgatttcagtgcctttcagtgccaaaagaaaatgatggaggtgcaaaaaaagtcttttgaagagaaatatgaagtcttcatggatgtttgccaaaattttcaaccagttttccgttacttctgcatggaaaaattcttggatccagctatttggtttgagaagcgattggcttatacgcgcagtgtagctacttcttctattgttggttacatacttggacttggtgatagacatgtacagaatatcttgataaatgagcagtcagcagaacttgtacatatagatctaggtgttgcttttgaacagggcaaaatccttcctactcctgagacagttccttttagactcaccagagatattgtggatggcatgggcattacgggtgttgaaggtgtcttcagaagatgctgtgagaaaaccatggaagtgatgagaaactctcaggaaactctgttaaccattgtagaggtccttctatatgatccactctttgactggaccatgaatcctttgaaagctttgtatttacagcagaggccggaagatgaaactgagcttcaccctactctgaatgcagatgaccaagaatgcaaacgaaatctcagtgatattgaccagagtttcaacaaagtagctgaacgtgtcttaatgagactacaagagaaactgaaaggagtggaagaaggcactgtgctcagtgttggtggacaagtgaatttgctcatacagcaggccatagaccccaaaaatctcagccgacttttcccaggatggaaagcttgggtgtgatcttcagtatatgaattaccctttcattcagcctttagaaattatattttagcctttatttttaacctgccaacatactttaagtagggattaatatttaagtgaactattgtgggtttttttgaatgttggttttaatacttgatttaatcaccactcaaaaatgttttgatggtcttaaggaacatctctgctttcactctttagaaataatggtcattcgggctgggcgcagcggctcacgcctgtaatcccagcactttgggaggccgaggtgagcggatcacaaggtcaggagttcgagaccagcctggccaagagaccagcctggccagtatggtgaaaccctgtctctactaaaaatacaaaaattagccgagcatggtggcgggcacctgtaatcccagctactcgagaggctgaggcaggagaatctcttgaacctgggaggtgaaggttgctgtgggccaaaatcatgccattgcactccagcctgggtgacaagagcgaaactccatctcaaaaaaaaaaaaaaaaaaacagaaacgtatttggatttttcctagtaagatcactcagtgttactaaataatgaagttgttatggagaacaaatttcaaagacacagttagtgtagttactatttttttaagtgtgtattaaaacttctcattctattctctttatcttttaagcccttctgtactgtccatgtatgttatctttctgtgataacttcatagattgccttctagttcatgaattctcttgtcagatgtatataatctcttttaccctatccattgggcttcttctttcagaaattgtttttcatttctaattatgcatcatttttcagatctctgtttcttgatgtcatttttaatgtttttttaatgttttttatgtcactaattattttaaatgtctgtacttgatagacactgtaatagttctattaaatttagttcctgctgtttatatctgttgatttttgtatttgataggctgttcatccagttttgtctttttgaaaagtgagtttattttcagcaaggctttatctatgggaatcttgagtgtctgtttatgtcatattcccagggctgttgctgcacacaagcccattcttattttaatttcttggctttagggtttccatacctgaagtgtagcataaatactgataggagatttcccaggccaaggcaaacacacttcctcctcatctccttgtgctagtgggcagaatatttgattgatgcctttttcactgagagtataagcttccatgtgtcccacctttatggcaggggtggaaggaggtacatttaattcccactgcctgcctttggcaagccctgggttctttgctccccatatagatgtctaagctaaaagccgtgggttaatgagactggcaaattgttccaggacagctacagcatcagctcacatattcacctctctggtttttcattcccctcatttttttctgagacagagtcttgctctgtcacccaggctggagtgcagtggcatgatctcagctcactgaaacctctgcctcctgggttcaagcaattctcctgcctcagcctcccgagtagctgggactacaggcgtgtgccaacacgcccggctaattttttgtatttttattagagacggagtttcaccgtgttagccaggatggtctcgatcgcttgacctcgtgatccaccctcctcggcctcccaaagtgctgggattacaggtgtgagccaccgcgcccggcctcattcccctcatttttgaccgtaaggatttcccctttcttgtaagttctgctatgtatttaaaagaatgttttctacattttatccagcatttctctgtgttctgttggaagggaagggcttaggtatctagtttgatacataggtagaagtggaacatttctctgtcccccagctgtcatcatataagataaacatcagataaaaagccacctgaaagtaaaactactgactcgtgtattagtgagtataatctcttctccatccttaggaaaatgttcatcccagctgcggagattaacaaatgggtgattgagctttctcctcgtatttggaccttgaaggttatataaatttttttcttatgaagagttggcatttctttttattgccaatggcaggcactcattcatatttgatctcctcaccttcccctcccctaaaaccaatctccagaactttttggactataaatttcttggtttgacttctggagaactgttcagaatattactttgcatttcaaattacaaacttaccttggtgtatctttttcttacaagctgcctaaatgaatatttggtatatattggtagttttattactatagtaaatcaaggaaatgcagtaaacttaaaatgtctttaagaaagccctgaaatcttcatgggtgaaattagaaattatcaactagataatagtatagataaatgaatttgtagctaattcttgctagttgttgcatccagagagctttgaataacatcattaatctactctttagccttgcatggtatgctatgaggctcctgttctgttcaagtattctaatcaatggctttgaaaagtttatcaaatttacatacagatcacaagcctaggagaaataactaattcacagatgacagaattaagattataaaagattttttttttgtaattttagtagagacagggttgccattgtattccagccttggcgacagagcaagactctgcctcaaaaaaaaaaaaaaaaaggttttggcaagctggaactctttctgcaaatgactaagatagaaaactgccaaggacaaatgaggagtagttagattttgaaaatattaatcatagaatagttgttgtatgctaagtcactgacccatattatgtacagcatttctgatctttactttgcaagattagtgatactatcccaatacactgctggagaaatcagaatttggagaaataagttgtccaaggcaagaagatagtaaattataagtacaagtgtaatatggacagtatctaacttgaaaagatttcaggcgaaaagaatctggggtttgccagtcagttgctcaaaaggtcaatgaaaaccaaatagtgaagctatcagagaagctaataaattatagactgcttgaacagttgtgtccagattaagggagataatagctttcccaccctactttgtgcaggtcatacctccccaaagtgtttacctaatcagtaggttcacaaactcttggtcattatagtatatgcctaaaatgtatgcacttaggaatgctaaaaatttaaatatggtctaaagcaaataaaagcaaagaggaaaaactttggacagcgtaaagactagaatagtcttttaaaaagaaagccagtatattggtttgaaatatagagatgtgtcccaatttcaagtattttaattgcaccttaatgaaattatctattttctatagattttagtactattgaatgtattactttactgttacctgaatttattataaagtgtttttgaataaataattctaaaagc

SEQ ID NO: 124 - DNA, 8977 bp, Homo sapiens
catactttttcctcttagtctacaggttggctgcatagaagaaaaaggtagagttatttataatcttgtaaatcttggactttgagtcatctattttcttttacagtcatcgaatacttttggaaataaggtaatatatgccttttgagctgtcttgacgttcacagatataaaatattaaatatattttaattttgtgcccttgcagattgatcacttattcattagtaatttaccagagattgtggtggagttattgatgacgttacatgagccagcaaattctagtgccagtcagagcactgacctctgtgacttttcaggggatttggatcctgctcctaatccacctcattttccatcgcatgtgattaaagcaacatttgcctatatcagcaattgtcataaaaccaagttaaaaagcattttagaaattctttccaaaagccctgattcctatcagaaaattcttcttgccatatgtgagcaagcagctgaaacaaataatgtttataagaagcacagaattcttaaaatatatcacctgtttgttagtttattactgaaagatataaaaagtggcttaggaggagcttgggcctttgttcttcgagacgttatttatactttgattcactatatcaaccaaaggccttcttgtatcatggatgtgtcattacgtagcttctccctttgttgtgacttattaagtcaggtttgccagacagccgtgacttactgtaaggatgctctagaaaaccatcttcatgttattgttggtacacttataccccttgtgtatgagcaggtggaggttcagaaacaggtattggacttgttgaaatacttagtgatagataacaaggataatgaaaacctctatatcacgattaagcttttagatccttttcctgaccatgttgtttttaaggatttgcgtattactcagcaaaaaatcaaatacagtagaggacccttttcactcttggaggaaattaaccattttctctcagtaagtgtttatgatgcacttccattgacaagacttgaaggactaaaggatcttcgaagacaactggaactacataaagatcagatggtggacattatgagagcttctcaggataatccgcaagatgggattatggtgaaactagttgtcaatttgttgcagttatccaagatggcaataaaccacactggtgaaaaagaagttctagaggctgttggaagctgcttgggagaagtgggtcctatagatttctctaccatagctatacaacatagtaaagatgcatcttataccaaggcccttaagttatttgaagataaagaacttcagtggaccttcataatgctgacctacctgaataacacactggtagaagattgtgtcaaagttcgatcagcagctgttacctgtttgaaaaacattttagccacaaagactggacatagtttctgggagatttataagatgacaacagatccaatgctggcctatctacagccttttagaacatcaagaaaaaagtttttagaagtacccagatttgacaaagaaaacccttttgaaggcctggatgatataaatctgtggattcctctaagtgaaaatcatgacatttggataaagacactgacttgtgcttttttggacagtggaggcacaaaatgtgaaattcttcaattattaaagccaatgtgtgaagtgaaaactgacttttgtcagactgtacttccatacttgattcatgatattttactccaagatacaaatgaatcatggagaaatctgctttctacacatgttcagggatttttcaccagctgtcttcgacacttctcgcaaacgagccgatccacaacccctgcaaacttggattcagagtcagagcactttttccgatgctgtttggataaaaaatcacaaagaacaatgcttgctgttgtggactacatgagaagacaaaagagaccttcttcaggaacaatttttaatgatgctttctggctggatttaaattatctagaagttgccaaggtagctcagtcttgtgctgctcactttacagctttactctatgcagaaatctatgcagataagaaaagtatggatgatcaagagaaaagaagtcttgcatttgaagaaggaagccagagtacaactatttctagcttgagtgaaaaaagtaaagaagaaactggaataagtttacaggatcttctcttagaaatctacagaagtataggggagccagatagtttgtatggctgtggtggagggaagatgttacaacccattactagactacgaacatatgaacacgaagcaatgtggggcaaagccctagtaacatatgacctcgaaacagcaatcccctcatcaacacgccaggcaggaatcattcaggccttgcagaatttgggactctgccatattctttccgtctatttaaaaggattggattatgaaaataaagactggtgtcctgaactagaagaacttcattaccaagcagcatggaggaatatgcagtgggaccattgcacttccgtcagcaaagaagtagaaggaaccagttaccatgaatcattgtacaatgctctacaatctctaagagacagagaattctctacattttatgaaagtctcaaatatgccagagtaaaagaagtggaagagatgtgtaagcgcagccttgagtctgtgtattcgctctatcccacacttagcaggttgcaggccattggagagctggaaagcattggggagcttttctcaagatcagtcacacatagacaactctctgaagtatatattaagtggcagaaacactcccagcttctcaaggacagtgattttagttttcaggagcctatcatggctctacgcacagtcattttggagatcctgatggaaaaggaaatggacaactcacaaagagaatgtattaaggacattctcaccaaacaccttgtagaactctctatactggccagaactttcaagaacactcagctccctgaaagggcaatatttcaaattaaacagtacaattcagttagctgtggagtctctgagtggcagctggaagaagcacaagtattctgggcaaaaaaggagcagagtcttgccctgagtattctcaagcaaatgatcaagaagttggatgccagctgtgcagcgaacaatcccagcctaaaacttacatacacagaatgtctgagggtttgtggcaactggttagcagaaacgtgcttagaaaatcctgcggtcatcatgcagacctatctagaaaaggcagtagaagttgctggaaattatgatggagaaagtagtgatgagctaagaaatggaaaaatgaaggcatttctctcattagcccggttttcagatactcaataccaaagaattgaaaactacatgaaatcatcggaatttgaaaacaagcaagctctcctgaaaagagccaaagaggaagtaggtctccttagggaacataaaattcagacaaacagatacacagtaaaggttcagcgagagctggagttggatgaattagccctgcgtgcactgaaagaggatcgtaaacgcttcttatgtaaagcagttgaaaattatatcaactgcttattaagtggagaagaacatgatatgtgggtattccgactttgttccctctggcttgaaaattctggagtttctgaagtcaatggcatgatgaagagagacggaatgaagattccaacatataaatttttgcctcttatgtaccaattggctgctagaatggggaccaagatgatgggaggcctaggatttcatgaagtcctcaataatctaatctctagaatttcaatggatcacccccatcacactttgtttattatactggccttagcaaatgcaaacagagatgaatttctgactaaaccagaggtagccagaagaagcagaataactaaaaatgtgcctaaacaaagctctcagcttgatgaggatcgaacagaggctgcaaatagaataatatgtactatcagaagtaggagacctcagatggtcagaagtgttgaggcactttgtgatgcttatattatattagcaaacttagatgccactcagtggaagactcagagaaaaggcataaatattccagcagaccagccaattactaaacttaagaatttagaagatgttgttgtccctactatggaaattaaggtggaccacacaggagaatatggaaatctggtgactatacagtcatttaaagcagaatttcgcttagcaggaggtgtaaatttaccaaaaataatagattgtgtaggttccgatggcaaggagaggagacagcttgttaagggccgtgatgacctgagacaagatgctgtcatgcaacaggtcttccagatgtgtaatacattactgcagagaaacacggaaactaggaagaggaaattaactatctgtacttataaggtggttcccctctctcagcgaagtggtgttcttgaatggtgcacaggaactgtccccattggtgaatttcttgttaacaatgaagatggtgctcataaaagatacaggccaaatgatttcagtgcctttcagtgccaaaagaaaatgatggaggtgcaaaaaaagtcttttgaagagaaatatgaagtcttcatggatgtttgccaaaattttcaaccagttttccgttacttctgcatggaaaaattcttggatccagctatttggtttgagaagcgattggcttatacgcgcagtgtagctacttcttctattgttggttacatacttggacttggtgatagacatgtacagaatatcttgataaatgagcagtcagcagaacttgtacatatagatctaggtgttgcttttgaacagggcaaaatccttcctactcctgagacagttccttttagactcaccagagatattgtggatggcatgggcattacgggtgttgaaggtgtcttcagaagatgctgtgagaaaaccatggaagtgatgagaaactctcaggaaactctgttaaccattgtagaggtccttctatatgatccactctttgactggaccatgaatcctttgaaagctttgtatttacagcagaggccggaagatgaaactgagcttcaccctactctgaatgcagatgaccaagaatgcaaacgaaatctcagtgatattgaccagagtttcaacaaagtagctgaacgtgtcttaatgagactacaagagaaactgaaaggagtggaagaaggcactgtgctcagtgttggtggacaagtgaatttgctcatacagcaggccatagaccccaaaaatctcagccgacttttcccaggatggaaagcttgggtgtgatcttcagtatatgaattaccctttcattcagcctttagaaattatattttagcctttatttttaacctgccaacatactttaagtagggattaatatttaagtgaactattgtgggtttttttgaatgttggttttaatacttgatttaatcaccactcaaaaatgttttgatggtcttaaggaacatctctgctttcactctttagaaataatggtcattcgggctgggcgcagcggctcacgcctgtaatcccagcactttgggaggccgaggtgagcggatcacaaggtcaggagttcgagaccagcctggccaagagaccagcctggccagtatggtgaaaccctgtctctactaaaaatacaaaaattagccgagcatggtggcgggcacctgtaatcccagctactcgagaggctgaggcaggagaatctcttgaacctgggaggtgaaggttgctgtgggccaaaatcatgccattgcactccagcctgggtgacaagagcgaaactccatctcaaaaaaaaaaaaaaaaaaacagaaacgtatttggatttttcctagtaagatcactcagtgttactaaataatgaagttgttatggagaacaaatttcaaagacacagttagtgtagttactatttttttaagtgtgtattaaaacttctcattctattctctttatcttttaagcccttctgtactgtccatgtatgttatctttctgtgataacttcatagattgccttctagttcatgaattctcttgtcagatgtatataatctcttttaccctatccattgggcttcttctttcagaaattgtttttcatttctaattatgcatcatttttcagatctctgtttcttgatgtcatttttaatgtttttttaatgttttttatgtcactaattattttaaatgtctgtacttgatagacactgtaatagttctattaaatttagttcctgctgtttatatctgttgatttttgtatttgataggctgttcatccagttttgtctttttgaaaagtgagtttattttcagcaaggctttatctatgggaatcttgagtgtctgtttatgtcatattcccagggctgttgctgcacacaagcccattcttattttaatttcttggctttagggtttccatacctgaagtgtagcataaatactgataggagatttcccaggccaaggcaaacacacttcctcctcatctccttgtgctagtgggcagaatatttgattgatgcctttttcactgagagtataagcttccatgtgtcccacctttatggcaggggtggaaggaggtacatttaattcccactgcctgcctttggcaagccctgggttctttgctccccatatagatgtctaagctaaaagccgtgggttaatgagactggcaaattgttccaggacagctacagcatcagctcacatattcacctctctggtttttcattcccctcatttttttctgagacagagtcttgctctgtcacccaggctggagtgcagtggcatgatctcagctcactgaaacctctgcctcctgggttcaagcaattctcctgcctcagcctcccgagtagctgggactacaggcgtgtgccaacacgcccggctaattttttgtatttttattagagacggagtttcaccgtgttagccaggatggtctcgatcgcttgacctcgtgatccaccctcctcggcctcccaaagtgctgggattacaggtgtgagccaccgcgcccggcctcattcccctcatttttgaccgtaaggatttcccctttcttgtaagttctgctatgtatttaaaagaatgttttctacattttatccagcatttctctgtgttctgttggaagggaagggcttaggtatctagtttgatacataggtagaagtggaacatttctctgtcccccagctgtcatcatataagataaacatcagataaaaagccacctgaaagtaaaactactgactcgtgtattagtgagtataatctcttctccatccttaggaaaatgttcatcccagctgcggagattaacaaatgggtgattgagctttctcctcgtatttggaccttgaaggttatataaatttttttcttatgaagagttggcatttctttttattgccaatggcaggcactcattcatatttgatctcctcaccttcccctcccctaaaaccaatctccagaactttttggactataaatttcttggtttgacttctggagaactgttcagaatattactttgcatttcaaattacaaacttaccttggtgtatctttttcttacaagctgcctaaatgaatatttggtatatattggtagttttattactatagtaaatcaaggaaatgcagtaaacttaaaatgtctttaagaaagccctgaaatcttcatgggtgaaattagaaattatcaactagataatagtatagataaatgaatttgtagctaattcttgctagttgttgcatccagagagctttgaataacatcattaatctactctttagccttgcatggtatgctatgaggctcctgttctgttcaagtattctaatcaatggctttgaaaagtttatcaaatttacatacagatcacaagcctaggagaaataactaattcacagatgacagaattaagattataaaagattttttttttgtaattttagtagagacagggttgccattgtattccagccttggcgacagagcaagactctgcctcaaaaaaaaaaaaaaaaaggttttggcaagctggaactctttctgcaaatgactaagatagaaaactgccaaggacaaatgaggagtagttagattttgaaaatattaatcatagaatagttgttgtatgctaagtcactgacccatattatgtacagcatttctgatctttactttgcaagattagtgatactatcccaatacactgctggagaaatcagaatttggagaaataagttgtccaaggcaagaagatagtaaattataagtacaagtgtaatatggacagtatctaacttgaaaagatttcaggcgaaaagaatctggggtttgccagtcagttgctcaaaaggtcaatgaaaaccaaatagtgaagctatcagagaagctaataaattatagactgcttgaacagttgtgtccagattaagggagataatagctttcccaccctactttgtgcaggtcatacctccccaaagtgtttacctaatcagtaggttcacaaactcttggtcattatagtatatgcctaaaatgtatgcacttaggaatgctaaaaatttaaatatggtctaaagcaaataaaagcaaagaggaaaaactttggacagcgtaaagactagaatagtcttttaaaaagaaagccagtatattggtttgaaatatagagatgtgtcccaatttcaagtattttaattgcaccttaatgaaattatctattttctatagattttagtactattgaatgtattactttactgttacctgaatttattataaagtgtttttgaataaataattctaaaagc

SEQ ID NO: 125 - DNA, 2198 bp, Homo sapiens
gcgacgccgagcaccgccctcgccgtcgcctccgggctttctccggtcgctgccgccaccaccgttgcttcgcgggctgggaggcccggggtccccgggcgaacagaggctgcggtggactgacgccgcaggggcgagctagccggctccgcgcctctccgcgggatccagacgcctcctggggctgctggcggagggtctgaggcggcgcggccatggctcacctccggggatttgccaaccagcactctcgagtggaccctgaggagctcttcaccaagctcgaccgcattggcaagggctcgtttggggaggtctacaagggcatcgataaccacacaaaggaggtggtggccatcaagatcatcgacctggaggaggccgaggatgagatcgaggacatccagcaggagatcactgtcctcagtcagtgcgacagcccctacatcacccgctactttggctcctacctaaagagcaccaagctatggatcatcatggagtacctgggcggcggctcagcactggacttgcttaaaccaggtcccctggaggagacatacattgccacgatcctgcgggagattctgaagggcctggattatctgcactccgaacgcaagatccaccgagacatcaaagctgccaacgtgctactctcggagcagggtgacgtgaagctggcggactttggggtagcagggcagctcacagacacgcagattaagaggaacacattcgtgggcacccccttctggatggcacctgaggtcatcaagcagtcggcctacgacttcaaggctgacatctggtccctggggatcacagccatcgagctggccaagggggagcctccaaactctgacctccaccccatgcgcgtcctgttcctgattcccaagaacagcccacccacactggagggccagcacagcaagcccttcaaggagttcgtggaggcctgcctcaacaaagacccccgattccggcccacggccaaggagctcctgaagcacaagttcatcacacgctacaccaagaagacctccttcctcacggagctcatcgaccgctataagcgctggaagtcagaggggcatggcgaggagtccagctctgaggactctgacattgatggcgaggcggaggacggggagcagggccccatctggacgttcccccctaccatccggccgagtccacacagcaagcttcacaaggggacggccctgcacagttcacagaagcctgcggagcccgtcaagaggcagccgaggtcccagtgcctgtccacgctggtccggcccgtcttcggagagctcaaagagaagcacaagcagagcggcgggagcgtgggtgcgctggaggagctggagaacgccttcagcctggccgaggagtcctgccccggcatctcagacaagctgatggtgcacctggtggagcgagtgcagaggttttcacacaacagaaaccacctgacatccacccgctgaagcgcactgctgttcagataggggacggaaggtcgtttgtttttgttctgagctccataagaactgtgctgacttggaaggtgccctgtgctatgtcgtgcctgcagggacacgtcggatcccgtgggcctcacatgccaggtcaccaggtcaccgtctccttccacccctgcagtgtgctgttgtgcacgtcagggacgctgttctctatgcccactgccctcctccctctcctggcccagcagtattgctcacgggggctccagccgccggcgtggccctcatgagctacgcctgggtcttctgcagactcatgcagccctatggccgctcagaccaaggcgcagagcaactatcagggcagctctgcctcctcctcccatgaggtggggagaggcaacagggcagcccccagaggagtgtcctggccgctgtcctcccggggcccatgatggccatagatttgccttgtggtgttggatcaggtactgtgtctgctcataagtacttgtgtcatccagaatgttttgttttttaagaaaattgaattacttgtttcctgaaatattctgaggttaatatgttagttttcatagaacattgagaggcccctgccactttcaataaagacctgacttggagacaaaaaaaaaaaaaaaaaaaaaaaaaaaaaaaaaaaaaaaaaaaaaaaaaaaaaaaaaa

SEQ ID NO: 126 - DNA, 2941 bp, Homo sapiens
gtctctgggcggctgctgccgctgccgctgctgctgctgcgggggtcgggcggcggccaggggatttgggcaggcaccgtggatccccgggaaggggacgagttgacagatgtgcgtgaggaggtctctggtcggcctcaccttttgtacctgctacctggcttcttacctcacgaacaagtatgtgctgtctgtcttgaaatttacctaccctacattattccaagggtggcagacgctcattggtggacttttgcttcatgtgtcctggaaactgggctgggtagagatcaacagcagttcaagatctcatgttcttgtgtggcttcctgcttcagtgctgtttgtgggtataatctatgctgggtccagagcattgtccagactggccattcctgtgtttctcactttgcataatgtagctgaagttatcatctgtgggtaccagaagtgttttcagaaagagaaaacatctcctgcaaagatctgtagtgccctcttcctcctggccgcagcaggatgccttcccttcaatgactcccaggggcttataaaattctacagaagtcccagaaacccagtgcattaagtgacattgaccagcaatacttaaactatatattcagtgtggtgctcctggcatttgcatctcatcccacaggtgatctcttcagcgtcctggacttcccattcctgtacttctacagattccatggtagctgctgtgccagtggatttttgggattctttctcatgttcagtacagtgaagctaaaaaaccttctggccccagggcagtgtgcagcctggattttctttgctaagataatcacagctggcttatcaatattgctgtttgatgcgatcctgaccagtgcaaccacgggatgcctcctgctcggtgcgcttggagaggccttgctggttttctcagagcggaagagctcctgaacaagacggtcaagagaaagactcacaggctgctgcgggagaacagcttgtacacctgtgtacgagcccctggtctcatagctccctgttggatgtgtcagaaagaggaatgcaaggacagtgaggccaggtgggcagtgccatcaccctcacccaagtgaatgtggtggtggctgatgaggccgaggcccttgtgcttcaaggagcaccctttctgggggtctgcaggtcactgcagaggagcggtctgttacatcttcccatttggagaacctctctcaaccgtgctgtagctggttctgcagaaacaggaagtacaggatttcatgggctggctctgctcgcctcgactgagcttcacacctctggatgccacatgctctctcccaaacactgctttcagtgcaaggtagtgggcctaaggggtttggttgtcttttttttttttcatttttaaaattttaaatttttatttattattattttttagagacaaggcctcgctctgtcgcctaggctgaagcacagtggtgcgatcacagctcgctgcagccttgacctcctaggatcaggccatcctcctgcctcagcatccacagtagctgatgtgcaccaccagacccgtctcattttttctatttttattattttagagatggggatctcactgtgttggccgggctggtctcaaactcctgggctcaagcgatcctcccaccttggcctcaaagtattgagattacaggcatgagccactgcacccggcctttctcatttttatttttaaattgacagacgtaacagtgcgcatttatcacgcacaacacaatgctttgggaatggttaaatctagctcacaaatgcattacctcacacggttgtcatttttgtggtgaggcttggttgtatgttttgtttcattcatgtttttacatccttggagtctcctctgggtccgtcctttctttgctgtcatgctggcttgcctaaggcccaccgccacctgcgtacgagcattttaaactctagagtgagtgacagcctttttatggttggtgttactatttatttcctgcctctaaacttctcgtggtccttataaacttgtcaggatgtgtgttgcgttgaattctgcatgtcctttttttgcccaccctcaggttaagctggtactaacttatccccagaggaaacagggtttatgagcactgacagatgtcttccctgggcaaaaaaaaaaaaaatagtatatgtatacacacacacatacacatttatatttatatttcttaaagcttttaatccctttcattccctgatatctcagagatttcaaatcattgaacactgaagtatatttttcaggccagatgaaaaattgtattaaaaccctattcctggtcgggcgcagtggctcacgcctgtaatcccagcactttggggggccgaagtaagcagatcgcctggggtcgggagttcaggacaaacctggccaacatggtgaaaccctgtctctactaaaactacaaaaaaattagcctgatgtggtgttgtgtgcctgtagtcccagctacttgggaggctgaggtaggagaattgcttgaacctgggaggcggaggttgcggtgagccaaaattacgccactgcgctccagcctgggcaacagagcgagacagtctcaaaaacaacaacaacaacaaaaaccctattccttgcctttgtaggagtcaaaataaatgaacttcttttttcttttttttattattatactttaagttctggggtacacgtgcagaatgtgcaggtttgttacataggtatgcacgtgccatggtggtttgctgcacccatcaacctgtcacctacattaggtatttcccctaatgttatccctcccctagccctccatcccctgacaggccctggtgtgtgatgttcccctccctatgtccatgtgttctcattgctccaaaataaatgaatttacac

SEQ ID NO: 127 - DNA, 2642 bp, Homo sapiens
cacacagatggcacatggcagagcccaagccctctccatgagatctgcagcgtttgtccacacggcagggcaaattaccttgtagagtcagcatggaggtttgctaactctgccggacttggtgcagaaaaaataccagccgtgctgttaaaccaaaaccccaggagaaaactttctggtgacagaagggcattgtgacccacgttgcccagggccagggacagggcagctgctcatggtccttcctcacgagttttcctggagcagagggatacccccaaacccagggagcccacaggagcttcagaagggctcggctggagggcggggcccctgttgcacttgctcactggggactggggaggctctgatcgcagaccgggggtgctgccacctctgtctgctgccggcagaaagccacaagccatgaaaactgattgagatgagaagaattcatctgggactggcttttgctttaggatggtgttggaagttgctcgttgtcgctaggagcctgctccactgtaagggtgtcaggatctgaagagctatggtgaaacaccactgaagcattgccaaggatggggctggtaagtagcaaaaagccggacaaggaaaagccgatcaaagagaaggacaagggccaatggagccccctgaaggtcagcgcccaagacaaggacgccccgccactgccgcccctggttgtcttcaaccaccttactcctccaccgcccgatgaacacctggatgaagacaagcatttcgtggtggctctgtatgactacaccgctatgaatgatcgggacctgcagatgctgaagggggagaagctacaggtcctgaagggaactggagactggtggctggccaggtcactcgtcacaggaagagaaggctatgtgcccagtaactttgtggcccgagtggagagcctggaaatggaaaggtggttctttagatcacagggtcggaaggaggctgagaggcagcttcttgctccaatcaacaaggccggctcctttcttatcagagagagtgaaaccaacaaaggtgccttctccctgtctgtgaaggatgtcaccacccagggggagctgatcaagcactataagatccgctgcctggatgaagggggctactacatctccccccggatcaccttcccctcgctccaggccctggtgcagcactattctaagaagggggatggtctatgccagaggctgaccctgccctgtgtgcgcccggccccgcagaatccctgggcccaggatgaatgggagatcccccggcagtctctcaggctggtcaggaaactcgggtctggacaattcggcgaagtctggatgggttactacaaaaacaacatgaaggtggccattaagacgctgaaggagggaaccatgtctccagaagcctttctgggtgaggccaacgtgatgaaggctctgcagcacgagcggctggtccgactctacgcagtggtcaccaaggagcccatctacattgtcaccgagtacatggccagaggatgcctgctggatttcctgaagacagatgaagggagcagattgtcactcccaaggctgattgacatgtcggcgcagattgctgaagggatggcatacattgagcgcatgaattccatccaccgcgacctgcgggcggccaacatcctggtgtctgaggccttgtgctgcaaaattgctgattttggcttggctcgaatcatcgacagtgaatacacggcccaagagggggccaagttccccatcaagtggacagccccggaagccatccacttcggggtcttcaccatcaaagcagacgtgtggtcgtttggagtcctcctgatggaagttgtcacttatgggcgggtgccatacccagggatgagcaaccccgaggtcatccgcaacctggagcgcggctaccgcatgccgcgccccgacacctgcccgcccgagctgtaccgcggcgtcatcgccgagtgctggcgcagccggcccgaggagcggcccaccttcgagttcctgcagtcggtgctggaggacttctacacggccaccgagcggcagtacgagctgcagccctagccggccgcgcccgcctgcgccccgtgcccacctctgcgcggacgaccccgacttccgtgccatcccagacgggccgcgaaggcggggtgtcgcctgtgcccttttctcagacccggaatccagtgggcagaggcagcttcgcagggggtccccggacggactccttcaccgactgcacccccgggcgagttacgcggcctctctgtgccgcttcatttgtagagggctgtaacagtgacctcgcacggtcatccggagtactaagccccagtaaggtgttcaggactggtaagcgactgtcatcaagtaaggcccccgtgctgggcaccccccgtgctggccgcgtccccgcctctgcgccctgcgtggaccccgccctgccccgctacagaagccagactgggtcccgcggacgccagcaggggcagccccagcctaggctgcgctccagcactgcggggcttttctgcaataaagtcacgagcgttcgaaaaaaaaaaaaaaaaaaaaaaaaaaaaaaaaaaaaaaaaaaaaaaaaaaaaa

SEQ ID NO: 128 - DNA, 1817 bp, Homo sapiens
aaaaatcagaataagaagtacctgacatactttctacatctgtagttgcggaagacattttaataggtcttctcatagcctttctttgctaaggacattgtgactctccagagagcaacagtgatggctctagaatgtctaggaaaaagaagggcttaatgtcaggagtctgcttggggcacacaacactagaagatgtccttctgcacattgtttcatatcgagtatggaacccttcagatcaaagcttaccaataaattcagtatgtagaacagattaacgtagttgaaatgaggaagaatgagagttatctcaaccagccagcaccccctatccccattcccacactttccctcatgggaggctgtcgggagcacttcgaaaaccactggaaaggccgggcacggtggctcatgcctgtaatcccagcactttgggaggccaaggcaggcagatcacctgaggtcaggagttcgaaaccagcctggccaacatggcgaaaccccatctttactaaaaatacgaaaattagccaggtattagaattatttctgaattatcagtctctcatttgtgctttggagaagcagaaaaggcaaaaggggtctttggccatcttctgctggagcttccagggaggatgtgtctccaagagaccagatgtaccgagtttgaaatcccagaagcccaagaggaaaagaatcacagggaggaaaagactgtccaaaggcttctggagtcttctgttctctaaccttggaaggttttgaacaatatttctcagaggatagcctttcacttattcatctgtccagcatgactcatccccgggagtgttgagtaagtgaaattttgctgtattcatgtttttgtgacttataaaataggatgataaggagagaacatgaactctggagtcagacctgttacctcggacatgatactcttagctttgtcatttagtatttgagtaattttgggcaagctaacatctctggtcgttctcatctgtaaaatgagaataaatgaaacccactaaccagaattggtatgaaaatgaaatgtggcagaaaaaaaatgaaagtgaatagtatcaccactgacacacaagcactaaaggcccttcctgtctccatcaggtatggatttggggcaacatttggccagatcttgtttatctttctgttcatctattctgtctaattcagtgctttgtttacaacgaatgtcttacaaatgctgactgaacactagcatacctgcatgaacaacaggtaaataaattttagatgtgttttaatgtttattaatctatcctgtcagagaagaactgccagttatagataaatatgatgccaggtcagggctgaagagttgggcaggttgttatctgcatggggtcactaggttccagtggagaggtgggggctaagctctcacccgctctgcagccacctggcacccggtttcagtttcctgaaagggagccttctacttgctgacgactgcctcatctcttctgaggtttcctctgataaacaattttctctgctttttttttttaattatgaaatacttaaaatgtaaaggagataatgtgacacacatttacccataattgagattgccataattgctataactttttcaaaattttgacttaatttcagacttttagaaaaattggccaggtgtgatggctcatgcctgtaatcccagcactttgggaggccaaggtgggtaaattacttgaacccagcagttcgagacttgcctgggcggcatagtgagaccttgtctctactgaaaacaaact

SEQ ID NO: 129 - DNA, 3234 bp, Homo sapiens
gctgctaggatggagcaggttgcggagggagcaagggtgaccgcagtccctgtgtcagctgccgacagcactgaggagttggccgaagtcgaagaaggagttggagtagtgggcgaagataatgacgcagccgcgagaggagcggaggcctttggcgacagtgaggaggacggagaggatgtgttcgaggtggagaagatcctggacatgaagaccgaggggggtaaagttctttacaaagttcgctggaaaggctatacatcggatgatgatacctgggagcccgagattcacctggaggactgtaaagaagtgcttcttgaatttaggaagaaaattgcagagaacaaagccaaagcagtcaggaaggatattcagagactatccttaaataacgacatatttgaggcgaactctgatagcgatcagcaaagtgagacaaaagaagatacttccccaaagaagaaaaagaaaaaattgaggcagagagaagagaaaagcccagatgatctgaaaaagaaaaaagcaaaggccgggaagctaaaagacaagtccaaaccagacctggagagctccttggaaagtttagtttttgatttaaggacaaagaaaagaatttctgaagccaaagaagaactaaaggagtccaaaaagcccaaaaaagatgaagtaaaagaaacaaaagaattaaagaaagttaaaaagggtgaaataagagatttaaagacgaaaacaagagaagatcccaaagaaaatagaaaaacaaaaaaagaaaaatttgtcgaatcccaggtggaatctgaatcaagtgtacttaatgattctccctttccagaggatgacagtgaagggctacattccgacagcagagaagagaaacaaaacactaaaagtgcaagagagagagcagggcaggacatggggctggagcatggctttgagaagcccctagacagtgccatgagtgctgaggaggataccgatgtcagaggcaggaggaaaaagaagaccccgagaaaggctgaggacactagagagaacaggaagctagagaacaagaacgctttcttagagaagaaaactgtgcctaaaaagcagaggaatcaagacagaagcaaaagtgctgcagagttagagaagctgatgcctgtatctgcccaaacgccaaagggccggaggttgagcggggaagagagaggcctctggtccacggactcagccgaggaggacaaagaaaccaaaagaaatgaatccaaagaaaaatatcagaaaaggcatgattctgacaaggaagaaaaaggcagaaaagagccaaaaggattaaagacacttaaggaaatcagaaatgcatttgatttatttaaattaactccagaagaaaaaaatgatgtttctgagaataatcggaaaagggaagaaataccactggattttaaaaccatagacgatcacaaaaccaaggaaaacaaacagtcacttaaagaaaggagaaacaccagagacgaaacggatacttgggcatacattgctgcagaaggtgatcaggaggttttagacagcgtgtgccaagcagatgagaattcagatggcaggcagcagattctgagtttgggcatggacctgcagttggaatggatgaagttggaagatttccaaaagcaccttgatgggaaagatgagaattttgctgcaacagatgcaattccaagtaatgtgttaagggatgctgtgaaaaatggggattatattactgtaaaagttgcacttaattcaaatgaagaatataacctggaccaagaggattccagtggaatgacactggtgatgcttgccgccgccggagggcaggacgacctcctgcgactcctcatcacaaaaggcgcgaaagtgaacggtcggcagaagaacgggaccaccgccctcattcatgctgcagagaagaactttttaacaacagtggctattcttttggaagcaggagcttttgtaaatgtccagcaaagcaatggtgagactgcactgatgaaggcctgtaaaagaggaaattcagacatcgtacgactcgtaattgaatgtggagctgactgcaatattttgtcaaagcaccagaatagtgccctgcactttgcgaagcagtctaacaatgtgcttgtgtacgacttgctgaagaaccatttagagacactttcaagagtagcagaagagacaataaaggattactttgaagctcgccttgctctgctagaaccagtttttccaatcgcatgtcatcgactctgtgagggtccagatttttcaacagatttcaattacaaacccccacagaacataccagaaggctctggcatcctgctgtttatcttccatgcaaactttttgggtaaagaagttattgctcggctctgtggaccgtgtagtgtacaagctgtagttctgaatgataaatttcagcttcctgtttttctggacagtcattttgtttactcattcagccctgttgcaggtcccaataaactcttcataaggttgacagaagcaccctctgccaaggttaagttgctaataggtgcatacagagtgcagctgcagtgaccaaacagaagggactgggcggagttctcttcagaccgattcctatactctctttgacagcagtttggaattcttctagcacatctatgtaaagttttgtctgtaaacctcttgcagttaagcctgttgtctgttgtagtctgtaagatgcgacatagctgtgtctgtgccagtatgccggaatctcagtgcagtgtccagactgcgtatttcagtttttccacaatgtggatagtacatatgaggattatttaagaaaattaaagacttcactttcttttttctggagacggagtttcgctcttgttgcccaggctggagtgcaatggtgcgatctcggctcgctgcaagctctgcctcctgggttcaagtgattctcctgcctcagcctcctgagtagctgggattacagacacccgccatggcacccagctaattttgtatttttagtagagatggggtttatccatgttggtcaggctggtcttgaactcctgacctcaggtgatccgcccgcctcggcctcccaaagtgcttggattacaggcatgagccaccgcacccagcaagagttattttcttaacttgaaattttctactagccctggtgaacttctgtgcttaaaaaaaaaaaaaaaaaaa

SEQ ID NO: 130 - DNA, 2238 bp, Homo sapiens
gcttactccttccggtcaccatggcgaccaggcgccttggggtcggggagacgctgggggccctcaacgcggccctggggccaggcggtccggtgtggatcaaggagacgcgcacccgccacctgcgttcccgagactttctggcaccgcaccgcgcgctgcaggcgcgcttcgatgacggccaggttccggagcatttgctccatgccctcgcctgcctgcagggccccggtgtggccccggtgctgcgctgcgcgccgacccccgcgggtctgtctctccaactgcagcggtccgccgtcttcgagcgcgtcctcagcgccgtggccgcctatgccacgcccgcctcgcctgcctcgctgggccagcgcgtcttactacactgcccagcactgcgcagctccccctgcgcactccgcttgagccagctgcgtacggtgctcgtggccgatcacctggcgcgagccctgcgcgctcacggggtgtgcgtgcgcctagtgccagctgtgcgggatccgcacatgctgaccttcctgcagcaactgcgggtggactggcccgctgcctcggagagagcttcctcccacaccctgaggagccacgcccttgaagaacttacctctgctaatgacgggaggacactgtcccctggcatcctaggcagactgtgtctgaaggagctggtggaagaacagggccgcacagctggctatgaccccaacctggacaactgtctggtgactgaggatctcctctctgtgctggctgagctgcaagaggctctatggcattggcccgaggacagccacccaggcctggctggggcctcagatactggtacaggcggctgcctggttgtacatgttgttagctgtgaggaggagttccagcaacagaagttggacctgctttggcagaagttggttgacaaggctccactcagacagaagcacctcatctgtggccctgtgaaagtagctggtgcacctggcactctgatgactgcccctgagtactacgagttccggcatacccaggtgtgcaaggcctcagcactgaagcatggtggggatctggcacaagacccagcctggacagagatctttggtgttctctctgtggccaccatcaagtttgagatgctgagcacagccccacagagtcagctcttcctggctctggctgacagcagtatctccacgaagggcacaaagagtggcacctttgtcatgtataattgtgcccgtcttgccacactctttgagagttacaagtgtagtatggaacaaggtctgtaccccacttttcctcctgtgagcagtctggacttctcactgctacatgatgagggtgagtggttgttgctcttcaacagtatcctcccctttccggatctgctgagccggacagcagtgctggactgcacagccccggggctccacattgctgtacgcacagagatgatatgcaagttcctggtacagctcagcatggatttcagctcctactacaaccgggtacacatcctgggggagcctcgaccacacctctttggtcagatgttcgtccgcctgcagcttctgagagctgtgcgtgaggtgctccatactggcctggctatgctgggtctccctccactgagccacatttaaggccacagaggctccaatacctgggaatgttcacaaagtcatcaactggaaaaaaagcaaaaacccacggccaaaataaattggtactgtttgttacaaagttctgtcttgtcatggggagtcgggcatattcttggcagcactccactcaccttcagctcctgcaccgacatcaggaacccacggccaccacctcctcccctcaaggcatgctgagcatgggcacagacagcccatccctgctccatgctgtctgtgagcaggccccatgcccagcacgccagccaccgcaggatacctcagtcataccagttgtaaacctcaagcccctgacccccaagggcacaacggtggccaaactcagggctcacaggccagcagtccatgtcagccacatcaggcacatggaacacagtgctattcatgaaggtgggttcaccatgccccagacgccagaaggtcagccgttgatcaatggaggctgagaccatgatgcttgggcttaggatcttgaggcctgtcacatgggcagcatgtgcacaggggacagagtattcctctagcacacgcagctggggtaccagcc

SEQ ID NO: 131 - DNA, 2242 bp, Homo sapiens
ttcctctccggccccacgggcgcgcttccctcctgacggattccgaagcccgccccaccaccgtcaccgcaccagtggcccaggcttcgtgggaccaacagggctaatcctgccccacggatctaatccggatcgggacccggtcccaggggaggcccccacctccccttctattgttctgtggcccaggttccggagcatttgctccatgccctcgcctgcctgcagggccccggtgtggccccggtgctgcgctgcgcgccgacccccgcgggtctgtctctccaactgcagcggtccgccgtcttcgagcgcgtcctcagcgccgtggccgcctatgccacgcccgcctcgcctgcctcgctgggccagcgcgtcttactacactgcccagcactgcgcagctccccctgcgcactccgcttgagccagctgcgtacggtgctcgtggccgatcacctggcgcgagccctgcgcgctcacggggtgtgcgtgcgcctagtgccagctgtgcgggatccgcacatgctgaccttcctgcagcaactgcgggtggactggcccgctgcctcggagagagcttcctcccacaccctgaggagccacgcccttgaagaacttacctctgctaatgacgggaggacactgtcccctggcatcctaggcagactgtgtctgaaggagctggtggaagaacagggccgcacagctggctatgaccccaacctggacaactgtctggtgactgaggatctcctctctgtgctggctgagctgcaagaggctctatggcattggcccgaggacagccacccaggcctggctggggcctcagatactggtacaggcggctgcctggttgtacatgttgttagctgtgaggaggagttccagcaacagaagttggacctgctttggcagaagttggttgacaaggctccactcagacagaagcacctcatctgtggccctgtgaaagtagctggtgcacctggcactctgatgactgcccctgagtactacgagttccggcatacccaggtgtgcaaggcctcagcactgaagcatggtggggatctggcacaagacccagcctggacagagatctttggtgttctctctgtggccaccatcaagtttgagatgctgagcacagccccacagagtcagctcttcctggctctggctgacagcagtatctccacgaagggcacaaagagtggcacctttgtcatgtataattgtgcccgtcttgccacactctttgagagttacaagtgtagtatggaacaaggtctgtaccccacttttcctcctgtgagcagtctggacttctcactgctacatgatgagggtgagtggttgttgctcttcaacagtatcctcccctttccggatctgctgagccggacagcagtgctggactgcacagccccggggctccacattgctgtacgcacagagatgatatgcaagttcctggtacagctcagcatggatttcagctcctactacaaccgggtacacatcctgggggagcctcgaccacacctctttggtcagatgttcgtccgcctgcagcttctgagagctgtgcgtgaggtgctccatactggcctggctatgctgggtctccctccactgagccacatttaaggccacagaggctccaatacctgggaatgttcacaaagtcatcaactggaaaaaaagcaaaaacccacggccaaaataaattggtactgtttgttacaaagttctgtcttgtcatggggagtcgggcatattcttggcagcactccactcaccttcagctcctgcaccgacatcaggaacccacggccaccacctcctcccctcaaggcatgctgagcatgggcacagacagcccatccctgctccatgctgtctgtgagcaggccccatgcccagcacgccagccaccgcaggatacctcagtcataccagttgtaaacctcaagcccctgacccccaagggcacaacggtggccaaactcagggctcacaggccagcagtccatgtcagccacatcaggcacatggaacacagtgctattcatgaaggtgggttcaccatgccccagacgccagaaggtcagccgttgatcaatggaggctgagaccatgatgcttgggcttaggatcttgaggcctgtcacatgggcagcatgtgcacaggggacagagtattcctctagcacacgcagctggggtaccagcc

SEQ ID NO: 132 - DNA, 2727 bp, Homo sapiens
ctaggcgcgtttcctgaaggtcgatggccaggtggtcttcataaactatactgccttgtgatgcctccctagaaatgagaggtctcaataccagctcagaccatgtggaccgcggatgagattgctcagctatgctatgaacactatgggatcaggctgcccaagaaggggaagcctgagccaaaccatgagtggacattattggcagcggtggtgaagatacaatctccagctgacaaggcctgcgacacccctgataagccggtgcaagtgacaaaggaaattgtgtcaatgggaacaggaacaaaatgcataggacagtccaaaatgaggaagaacggagacatcctcaatgatagccatgctgaggtcatagccagaaggagtttccaaaggtaccttctccaccaactccagttggcagccaccctgaaagaggatagcatctttgtcccaggaactcaaaaaggagtgtggaaacttagacgagacctcatttttgtgtttttctccagccatacaccctgtggggatgcctccatcattccgatgcttgagtttgaagatcagccttgctgtcctgtcttcagaaattgggccaacaactcatcagtagaagccagtagtaacctggaagctcctggaaatgaaagaaaatgtgaagaccctgacagtcctgtaaccaaaaagatgaggcttgagcctgggactgcagccagggaggtcaccaacggagcagctcaccatcagagttttggcaagcagaaaagtggcccaatctcaccaggcatccacagctgtgatctcactgtagagggactggctactgtcaccagaatagcccctggtagtgccaaagtgacagacgtttatagaactggagccaagtgtgtacctggagaagctggagactccggaaagccgggtgctgcgtttcaccaggtggggctgctccgagtgaagccaggccgtggagacagaacacgctccatgtcctgtagtgacaagatggcccgatggaacgtcctcggatgccaaggggcactgttgatgcacttgctggaagagcccatctacctgtcagctgtggtcattgggaagtgcccatacagccaggaagccatgcagagagcactgattggaaggtgtcagaatgtgtctgctttaccaaaaggcttcggagttcaagaattaaaaatactgcagtcagatttactatttgaacagagccgcagtgcggtgcaggcaaaaagggctgatagcccaggtcgacttgttccttgtggggcagccatcagctggagtgcagttcctgagcagcctttggatgttactgccaatggctttccacagggaacaacaaagaaaacaattggaagccttcaggcaagatcccaaatcagcaaagtggaactcttcagatcattccagaagctgctaagcagaattgcaagggacaagtggccacactccctcagggtgcagaagctggatacctaccaggagtacaaggaggctgcgtcctcttaccaggaagcctggagcacactccggaagcaggtgtttggatcctggatcagaaacccaccggattatcaccagttcaagtgagaaggaaatgtttgctctggtagcaggacccttcatcctgaactgccttcctccacgcaggacaagtcttagcttttttggtagttaaatcagggaacattctttctgagctttgcatctctgttgtgtaatacagatggaatctggaacttagagcaagctatacttgattgaagtagctctctgctaaaatggcatctcactaatgacctcactatctgacttccattgtgttttattgcttctctaaaatatgaaatcagagtttggaacatgatgctttgaaagtactctgcagcagctctgttttatgggttcctacattgattcagcaaatatttattgagctgaaatgatgtttgacgctctgcaagttttacagctttgcctagcatagcgaatatatattttgtattcccagcctttctttcttcagggagccattcttttcccattcttcagtggtcctgctctgtgcctcagacttggctgaagctaaccttactccctggctctaggaatagcctgtgagccagccctggactgccctggacttgttctcagaggtatcaggaaaggctttctgttttgatctggagctgtaagggtcacataatcatgggactgccggtggccatcttttcctactacctagagaaagccagcaaagaatgaaggcaacaaaggaaacagccaagagaatcaaagatctagtaacactgtttagatgtctcaattatgtgagacagattcctgttgttattttgattaagcctgtttgtgttggttttctgacttacaattgaaagagttctgtccaaaaagccaaaaggtggccaggcttggtggctcaggcctgtaatcccagcactttgggaagcccaggcaggcagatcacttgaggtcaggagttcaagaccagcctggccaacctggtgaaaccctgtctctactaaaaatgcaaaaactagccgggcatggtggcgcacacctgtaatcctagctactcgggaggctgaggcaggagaattgcttgaacccaggaggcggaggtagtggtgagcaaagatcgtaccgctgcactccagcctgggtgatagagcaagaccctatctc

SEQ ID NO: 133 - DNA, 7368 bp, Homo sapiens
gtggcattgggaggcccggcctgggggaggagacggcgttccgttagcggcgttggggtttggctgcagtggcagtgctttctcttctgctcacggggacccgctcaggctggaggccagccagctcttgccgccacctcggtcgcgatgggggcgcaggaccggccgcagtgccacttcgacatcgagatcaaccgggagccggttggtcgcattatgtttcagctcttctcagacatatgtccaaaaacatgcaaaaacttcctttgcttgtgctcaggagagaaaggccttgggaaaacaactgggaagaagttatgttataaaggttctacgttccatcgtgtggttaaaaactttatgattcagggtggggacttcagtgaaggtaatggaaaaggtggagaatcaatttatggtggatattttaaagagaatgtggtcttttgcaaaatgaaaagatgaaaactttattctcaaacatgacagagcgttccttttatcaatggcaaatcgagggaaacataccaatggttcccagtttttcataaagagtgttacaccgtgcgctccaaagtaccacaaagcctgctccacacctggatggggtgcatgtagtctttggactggttatttctggttttgaagtaatcgaacaaattgaaaatctgaagaccgatgctgcaagcagaccatatgcagatgtgcgagttattgactgtggagtacttgccacaaaatcaataaaagatgtttttgagaaaaaaaggaagaaaccaactcattcagaaggctcggattcctcttccaattcctcctcttcttcagaatcatcttcagaaagtgaacttgaacatgagagaagcagaaggaggaaacataagaggaggccaaaagttaaacgttctaaaaagaggcgaaaggaagcaagcagttcagaagagccaaggaataaacatgcaatgaacccaaaaggtcactctgagaggagtgataccaatgaaaaaaggtcagttgattccagtgctaaaagggaaaaacctgtggtccgcccagaagagattcctccagtgcctgagaaccgatttttactgagaagagatatgcctgttgttactgcagaacctgaaccgaagattcctgatgttgcacccattgtaagtgatcagaaaccatctgtatcaaagtctggacggaagattaaaggaaggggcacaattcgctatcacacacctccaagatcaagatcctgttctgagtcagatgatgatgacagcagtgaaactcctcctcactggaaagaggaaatgcagagattaagagcatatagaccacctagtggagaaaaatggagtaaaggagataagttaagtgacccctgttcaagccgatgggatgaaagaagcttgtctcagagatccagatcatggtcctataatggatattattcagaccttagtacagcaagacactctggccaccataaaaaacgcagaaaagaaaaaaaggttaagcataaaaagaaagggaaaaagcagaaacactgcagaagacacaaacaaacaaagaagagaaggattcttataccgtctgacatagaatcctcaaaatcttccactcgaagaatgaaatcctcttgtgatagagaaaggagttctcgttcttcctcattgtcatctcatcactcatcaaagagagactggtctaaatctgataaggatgtccagagctctttaacccattccagcagagactcatacagatcaaaatctcactcacagtcttattctagaggaagctcaagatcaaggactgcgtcaaagtcctcatcacattctcgaagtagatcaaagtccagatctagttccaagtctgggcaccgaaagagagcatcaaaatcaccaagaaaaacagcttctcagttaagtgaaaataaaccagttaaaacagaacctttaagagcaaccatggcacaaaatgaaaatgtagtagtacaaccagttgtagcagaaaatattcctgtaataccactgagtgacagtccccccccttcaagatggaagcctggacagaaaccttggaagccctcttatgagcgaattcaggaaatgaaagctaaaacaacccatttgctacccatccaaagcacttacagtttagcaaatattaaagagactggtagctcatcatcctaccataaaagagaaaaaaattcggaaagtgatcagagcacttattcaaaatacagtgatagaagttcagaaagctcaccaaggtcaaggagcagatcttctaggagtagatcttattccagatcatatacaagatcacgtagtctagctagttcacattcaaggtctaggtctccatcatctagatctcattcacgaaataaatacagtgatcattcacagtgtagtagatcatcttcatatacttctattagcagtgatgatggaaggcgagctaagaggagacttagatccagtgggaaaaaaaatagcgtttcacataaaaagcatagcagcagctctgaaaagacacttcacagtaaatatgtcaaaggtagagacaggtcttcatgtgtgagaaagtatagcgagagcagatcatctttagattattcttcagacagtgagcagtcaagtgttcaggccacacagtcagcccaggaaaaagagaagcagggccaaatggaaagaacacataataaacaagaaaaaaacagaggtgaagaaaaatccaagtctgaacgggaatgccctcattcaaaaaaaagaactttgaaagagaatctttctgatcaccttagaaatggcagtaagcccaaaaggaagaattatgctggtagtaaatgggactctgagtcaaattcagaacgagatgtcactaaaaacagtaaaaatgactcccatccatcctctgacaaggaagaaggtgaggccacatccgattctgaatcagaggttagtgaaattcacatcaaagtcaaacccacaaccaagtcgtccacaaatacttcactgcctgatgataatggtgcttggaaatcaagcaaacagcgcacatcaacttctgactctgaggggtcctgttccaattcggaaaacaataggggaaagccacaaaagcacaaacatgggtcaaaggaaaatcttaaaagagaacacaccaaaaaagtgaaagagaaattgaaagggaaaaaagacaaaaagcataaggctccaaaacgaaagcaagcatttcactggcagcctccactagaatttggtgaagaggaggaggaggagattgatgacaagcaagttactcaggaatcaaaagagaaaaaagtttctgaaaacaatgaaaccataaaagataatattctaaaaactgagaaatccagtgaagaggacctttcaggtaaacatgatacagtgactgtttcatcagatcttgatcagtttactaaagatgatagtaaactcagtatttctcccacagctttaaatactgaggaaaatgtggcctgtttacaaaacattcagcacgttgaagaaagtgttcccaatggagtggaagatgtgcttcaaacagatgacaacatggagatctgcactcctgataggagttccccagcaaaagtagaggagacttcccctctaggaaatgcacggcttgataccccagatataaacattgttttgaagcaggatatggcaacggaacatcctcaagcagaggtagtaaaacaggaaagcagcatgtccgaaagtaaagtgttgggtgaagtggggaaacaggacagcagctctgctagcttggctagtgctggagaaagtaccgggaagaaggaggtggctgagaagagccagatcaacctcattgataagaaatggaagcccctgcaaggtgtggggaacctggcagcacctaatgctgccacatccagtgctgtggaagttaaggtgttgaccactgtgcctgaaatgaaaccacaaggcttgagaatagaaattaaaagcaaaaataaagttcggcctgggtctctctttgatgaagtaagaaagacagcacgcttaaaccgtagaccaagaaatcaggagagttcaagtgatgagcagacgcctagtcgggatgatgatagccagtccaggagtccaagtagatctcgaagtaaatctgaaaccaaatcaagacacagaacaaggtctgtctcctatagtcactcaagaagtcgatcgagaagttccacatcatcttatcgatcaagaagctactctagaagtcggagcagaggatggtacagcagaggccgaaccagaagccggagcagttcctaccggagttacaaaagtcacaggacgtccagcaggagcagatccaggagcagctcatatgatccccacagtcgatccaggtcctacacctacgatagctactatagcaggagtcggagtcgaagtagaagccagagaagtgacagttaccaccgaggcagaagttataatcggcggtccaggagttgtagatcttatggctctgacagtgaaagtgaccgaagttactctcatcaccggagccccagtgagagcagcagatacagttgaaaacgtccggatacaaattatatcttatttgtaaatatctggcaacttagcttaagaaatgtaatgacagtctgttgttctatttcaatatcagaggtgaatttcaaaaatagacacttcttaattgttactggttcatttacatgtggggagaagaatttaaaatacagatatgtctcctaaaaatatttttatgccacattttacagtagccaactatggaaatgaatttcattttcttgaatcaagaaatcgtgaaatttatctatgtataatttgcaatattattttaagtctatttcactctatcttacgtatcccttagaatacagattctttttgcctgtttttccagttttagcatatatgctgccaagcatagaactgtgaaggagaactgttaaaggcggccaaatatttatatactgattacatagagtcttgtacatatgtgctctaaaaacaaaccacccagaattgatactgttggtaaccaggagtataaggcagtggctctggggttcttaattcattcctaacttctttgatacttcacaggattaggaaagtggtcatcatacatcccacacagtctgtattacttcaggcttgtgggcaaggttaggaagaatcaatcagccttaactataaatacctgcactgtctctgaggacttactattttatgttctttttaatcaataccgatcagaagtttaggttataaaaacaattctacttcatgctttggtgcttggtaatttttggtgcgtctttaagcattactcttatatatcatatattaaaataccataaaaatgaaattcagacaaaatcactggcaccaaaaatggtttattctgagctgtcttcactttgactatttggggggcttctctcaagtacagatgtgggttggggtcccctggagcaggcaggattggcagtaagagatattggccactcaagtctactgtgtgtgtgtgcctctggaagagtgaagaatggacttcaaaagtaacatcaaaaatctaactgccaccatcctggagacattttgcagggctttcctttcaagtctttcaagtacaggatattaccacaacagcagctgaactgttgtaaccagcatgtttttcctatttccactgtgacctgcagctgactcaaagccttgcgtgacctgacccaggtgcaagagacaggggaagagggatagagggtatagcataaattacatattttcatggctttgggtggttcctccaaaaataattggacctgtaaaaactagtgtgtgtgtgtgtgtgtgtgtgtgtgtgtgtgtggtttttttttttaatctttactttgaatttgttccccaagtgtacttaatcaccttagtgccagtttaatccagttatgcagaagaaattcatattggttgcctgatgtagagctcagcaccaccctaccacaggccttgtctggtgtatttgggaagtggaaaagagccctcagttggagggagctgacaacccttggtggagggagggtgcccttgaatgtattaaaactatcacccaaagaaggtatgaaaacagggtaaggtggtcagttgtttgccaggtcaatagacagaaagtacattagaaaacaggacttaggccaaacaaacaatactggatactgaatacaaaacagtatgatttatattaaaggtttccaaaggttgcctgcaaaggagaatattactactagtcagcaggaaaaaaatgcattcagaacccaagcagaaactgccaaatgtaattaggttaagaaaagttacccttgggcagtgtattagttttctattgctgtgtgacaaattaccccaaatttagcagtttaaaaaacaatacccatagcagttctgtagctcatgagtctggcacagtgtggctggattctctgctcagggtcttaaaggctgaaataagggttggcaggacaacattccttcatggaggctctggggaagaatctgcttctaagttcattcaggttgttggcggaattcagttctttgctggctctcagctggaggcccctctctcacctcaaggctgcctgcattccttcttatgtggtcccctccagcttcaaaccagccttcctgctctttctcatgcttcatatctctctcccgtcctcctgttttaggggcatatgattagctcaagcccacagatatattttaaggttgattgtgcgatagaacataattgcaggagtactgtctcatctcatcatattcacgggttctggagattagctcattgaaagtgggaggggcattttcaaattctgcctaccacaggcaataactgcccatctcagctgtaggtggaatttttacccagaaaagataggccctagaagcctcatttcttttctccatggaaaaggacagccctctgctgcagcgttcaacttgtgtgtttactgacagagtgaactacagaaatagcttttcttcctaaaggggattgttctacattttgaagttattttttaataaaattgaattatgttgtgtattgtgcttcttaataggaaatgcattattggactgtttttgtaacatcctgtttattgcaaatagctagtatcgttcaaaaactgtataaaatacttttgtacatattagcaatgtctaatttgtatacacttcagttaaatttccctaaaacttgaaaggggaccttgtagaaattaaaatatatacttagtctaagtctgaaaaaaaaaaa

SEQ ID NO: 134 - DNA, 7312 bp, Homo sapiens
gtggcattgggaggcccggcctgggggaggagacggcgttccgttagcggcgttggggtttggctgcagtggcagtgctttctcttctgctcacggggacccgctcaggctggaggccagccagctcttgccgccacctcggtcgcgatgggggcgcaggaccggccgcagtgccacttcgacatcgagatcaaccgggagccggttggtcgcattatgtttcagctcttctcagacatatgtccaaaaacatgcaaaaacttcctttgcttgtgctcaggagagaaaggccttgggaaaacaactgggaagaagttatgttataaaggttctacgttccatcgtgtggttaaaaactttatgattcagggtggggacttcagtgaaggtaatggaaaaggtggagaatcaatttatggtggatattttaaagatgaaaactttattctcaaacatgacagagcgttccttttatcaatggcaaatcgagggaaacataccaatggttcccagtttttcattaccacaaagcctgctccacacctggatggggtgcatgtagtctttggactggttatttctggttttgaagtaatcgaacaaattgaaaatctgaagaccgatgctgcaagcagaccatatgcagatgtgcgagttattgactgtggagtacttgccacaaaatcaataaaagatgtttttgagaaaaaaaggaagaaaccaactcattcagaaggctcggattcctcttccaattcctcctcttcttcagaatcatcttcagaaagtgaacttgaacatgagagaagcagaaggaggaaacataagaggaggccaaaagttaaacgttctaaaaagaggcgaaaggaagcaagcagttcagaagagccaaggaataaacatgcaatgaacccaaaaggtcactctgagaggagtgataccaatgaaaaaaggtcagttgattccagtgctaaaagggaaaaacctgtggtccgcccagaagagattcctccagtgcctgagaaccgatttttactgagaagagatatgcctgttgttactgcagaacctgaaccgaagattcctgatgttgcacccattgtaagtgatcagaaaccatctgtatcaaagtctggacggaagattaaaggaaggggcacaattcgctatcacacacctccaagatcaagatcctgttctgagtcagatgatgatgacagcagtgaaactcctcctcactggaaagaggaaatgcagagattaagagcatatagaccacctagtggagaaaaatggagtaaaggagataagttaagtgacccctgttcaagccgatgggatgaaagaagcttgtctcagagatccagatcatggtcctataatggatattattcagaccttagtacagcaagacactctggccaccataaaaaacgcagaaaagaaaaaaaggttaagcataaaaagaaagggaaaaagcagaaacactgcagaagacacaaacaaacaaagaagagaaggattcttataccgtctgacatagaatcctcaaaatcttccactcgaagaatgaaatcctcttgtgatagagaaaggagttctcgttcttcctcattgtcatctcatcactcatcaaagagagactggtctaaatctgataaggatgtccagagctctttaacccattccagcagagactcatacagatcaaaatctcactcacagtcttattctagaggaagctcaagatcaaggactgcgtcaaagtcctcatcacattctcgaagtagatcaaagtccagatctagttccaagtctgggcaccgaaagagagcatcaaaatcaccaagaaaaacagcttctcagttaagtgaaaataaaccagttaaaacagaacctttaagagcaaccatggcacaaaatgaaaatgtagtagtacaaccagttgtagcagaaaatattcctgtaataccactgagtgacagtccccccccttcaagatggaagcctggacagaaaccttggaagccctcttatgagcgaattcaggaaatgaaagctaaaacaacccatttgctacccatccaaagcacttacagtttagcaaatattaaagagactggtagctcatcatcctaccataaaagagaaaaaaattcggaaagtgatcagagcacttattcaaaatacagtgatagaagttcagaaagctcaccaaggtcaaggagcagatcttctaggagtagatcttattccagatcatatacaagatcacgtagtctagctagttcacattcaaggtctaggtctccatcatctagatctcattcacgaaataaatacagtgatcattcacagtgtagtagatcatcttcatatacttctattagcagtgatgatggaaggcgagctaagaggagacttagatccagtgggaaaaaaaatagcgtttcacataaaaagcatagcagcagctctgaaaagacacttcacagtaaatatgtcaaaggtagagacaggtcttcatgtgtgagaaagtatagcgagagcagatcatctttagattattcttcagacagtgagcagtcaagtgttcaggccacacagtcagcccaggaaaaagagaagcagggccaaatggaaagaacacataataaacaagaaaaaaacagaggtgaagaaaaatccaagtctgaacgggaatgccctcattcaaaaaaaagaactttgaaagagaatctttctgatcaccttagaaatggcagtaagcccaaaaggaagaattatgctggtagtaaatgggactctgagtcaaattcagaacgagatgtcactaaaaacagtaaaaatgactcccatccatcctctgacaaggaagaaggtgaggccacatccgattctgaatcagaggttagtgaaattcacatcaaagtcaaacccacaaccaagtcgtccacaaatacttcactgcctgatgataatggtgcttggaaatcaagcaaacagcgcacatcaacttctgactctgaggggtcctgttccaattcggaaaacaataggggaaagccacaaaagcacaaacatgggtcaaaggaaaatcttaaaagagaacacaccaaaaaagtgaaagagaaattgaaagggaaaaaagacaaaaagcataaggctccaaaacgaaagcaagcatttcactggcagcctccactagaatttggtgaagaggaggaggaggagattgatgacaagcaagttactcaggaatcaaaagagaaaaaagtttctgaaaacaatgaaaccataaaagataatattctaaaaactgagaaatccagtgaagaggacctttcaggtaaacatgatacagtgactgtttcatcagatcttgatcagtttactaaagatgatagtaaactcagtatttctcccacagctttaaatactgaggaaaatgtggcctgtttacaaaacattcagcacgttgaagaaagtgttcccaatggagtggaagatgtgcttcaaacagatgacaacatggagatctgcactcctgataggagttccccagcaaaagtagaggagacttcccctctaggaaatgcacggcttgataccccagatataaacattgttttgaagcaggatatggcaacggaacatcctcaagcagaggtagtaaaacaggaaagcagcatgtccgaaagtaaagtgttgggtgaagtggggaaacaggacagcagctctgctagcttggctagtgctggagaaagtaccgggaagaaggaggtggctgagaagagccagatcaacctcattgataagaaatggaagcccctgcaaggtgtggggaacctggcagcacctaatgctgccacatccagtgctgtggaagttaaggtgttgaccactgtgcctgaaatgaaaccacaaggcttgagaatagaaattaaaagcaaaaataaagttcggcctgggtctctctttgatgaagtaagaaagacagcacgcttaaaccgtagaccaagaaatcaggagagttcaagtgatgagcagacgcctagtcgggatgatgatagccagtccaggagtccaagtagatctcgaagtaaatctgaaaccaaatcaagacacagaacaaggtctgtctcctatagtcactcaagaagtcgatcgagaagttccacatcatcttatcgatcaagaagctactctagaagtcggagcagaggatggtacagcagaggccgaaccagaagccggagcagttcctaccggagttacaaaagtcacaggacgtccagcaggagcagatccaggagcagctcatatgatccccacagtcgatccaggtcctacacctacgatagctactatagcaggagtcggagtcgaagtagaagccagagaagtgacagttaccaccgaggcagaagttataatcggcggtccaggagttgtagatcttatggctctgacagtgaaagtgaccgaagttactctcatcaccggagccccagtgagagcagcagatacagttgaaaacgtccggatacaaattatatcttatttgtaaatatctggcaacttagcttaagaaatgtaatgacagtctgttgttctatttcaatatcagaggtgaatttcaaaaatagacacttcttaattgttactggttcatttacatgtggggagaagaatttaaaatacagatatgtctcctaaaaatatttttatgccacattttacagtagccaactatggaaatgaatttcattttcttgaatcaagaaatcgtgaaatttatctatgtataatttgcaatattattttaagtctatttcactctatcttacgtatcccttagaatacagattctttttgcctgtttttccagttttagcatatatgctgccaagcatagaactgtgaaggagaactgttaaaggcggccaaatatttatatactgattacatagagtcttgtacatatgtgctctaaaaacaaaccacccagaattgatactgttggtaaccaggagtataaggcagtggctctggggttcttaattcattcctaacttctttgatacttcacaggattaggaaagtggtcatcatacatcccacacagtctgtattacttcaggcttgtgggcaaggttaggaagaatcaatcagccttaactataaatacctgcactgtctctgaggacttactattttatgttctttttaatcaataccgatcagaagtttaggttataaaaacaattctacttcatgctttggtgcttggtaatttttggtgcgtctttaagcattactcttatatatcatatattaaaataccataaaaatgaaattcagacaaaatcactggcaccaaaaatggtttattctgagctgtcttcactttgactatttggggggcttctctcaagtacagatgtgggttggggtcccctggagcaggcaggattggcagtaagagatattggccactcaagtctactgtgtgtgtgtgcctctggaagagtgaagaatggacttcaaaagtaacatcaaaaatctaactgccaccatcctggagacattttgcagggctttcctttcaagtctttcaagtacaggatattaccacaacagcagctgaactgttgtaaccagcatgtttttcctatttccactgtgacctgcagctgactcaaagccttgcgtgacctgacccaggtgcaagagacaggggaagagggatagagggtatagcataaattacatattttcatggctttgggtggttcctccaaaaataattggacctgtaaaaactagtgtgtgtgtgtgtgtgtgtgtgtgtgtgtgtgtggtttttttttttaatctttactttgaatttgttccccaagtgtacttaatcaccttagtgccagtttaatccagttatgcagaagaaattcatattggttgcctgatgtagagctcagcaccaccctaccacaggccttgtctggtgtatttgggaagtggaaaagagccctcagttggagggagctgacaacccttggtggagggagggtgcccttgaatgtattaaaactatcacccaaagaaggtatgaaaacagggtaaggtggtcagttgtttgccaggtcaatagacagaaagtacattagaaaacaggacttaggccaaacaaacaatactggatactgaatacaaaacagtatgatttatattaaaggtttccaaaggttgcctgcaaaggagaatattactactagtcagcaggaaaaaaatgcattcagaacccaagcagaaactgccaaatgtaattaggttaagaaaagttacccttgggcagtgtattagttttctattgctgtgtgacaaattaccccaaatttagcagtttaaaaaacaatacccatagcagttctgtagctcatgagtctggcacagtgtggctggattctctgctcagggtcttaaaggctgaaataagggttggcaggacaacattccttcatggaggctctggggaagaatctgcttctaagttcattcaggttgttggcggaattcagttctttgctggctctcagctggaggcccctctctcacctcaaggctgcctgcattccttcttatgtggtcccctccagcttcaaaccagccttcctgctctttctcatgcttcatatctctctcccgtcctcctgttttaggggcatatgattagctcaagcccacagatatattttaaggttgattgtgcgatagaacataattgcaggagtactgtctcatctcatcatattcacgggttctggagattagctcattgaaagtgggaggggcattttcaaattctgcctaccacaggcaataactgcccatctcagctgtaggtggaatttttacccagaaaagataggccctagaagcctcatttcttttctccatggaaaaggacagccctctgctgcagcgttcaacttgtgtgtttactgacagagtgaactacagaaatagcttttcttcctaaaggggattgttctacattttgaagttattttttaataaaattgaattatgttgtgtattgtgcttcttaataggaaatgcattattggactgtttttgtaacatcctgtttattgcaaatagctagtatcgttcaaaaactgtataaaatacttttgtacatattagcaatgtctaatttgtatacacttcagttaaatttccctaaaacttgaaaggggaccttgtagaaattaaaatatatacttagtctaagtctgaaaaaaaaaaa

SEQ ID NO: 135 - DNA, 2124 bp, Homo sapiens
attccgctcttgctttccggcaggtgatggcgccccccgcggcctagaggtccagcgcccgccgcgagcagcggacagtcctcctgttgtgtccgaccgagagtcctggtgactttgaacatgctggtgccgctagccaagctgtcctgcctggcatatcagtgctttcatgccttaaaaattaagaaaaattatctacctctatgtgctataagatggtcttcaacttctactgtgcctcgaattactacccattatactatttatccccgggataaggacaagagatgggaaggagtgaacatggaaaggtttgcagaagaagcagatgttgtaatagttggtgcaggccctgcagggctctctgcagctgttcgtctaaaacagttggctgtggcacatgaaaaggacatccgtgtgtgtctagtggagaaagctgcccagataggagctcatactctctcaggggcttgccttgatccaggtgcttttaaagaactcttcccagactggaaagagaagggggctccacttaacactcctgtaacagaagacagatttggaattttaacagagaaatacagaattcctgtgccaattcttccagggcttccaatgaataatcatggcaattacattgtacgcttgggacatttagtgagctggatgggcgaacaagcagaagcccttggtgttgaagtataccctggttatgcagctgctgaggtcctttttcatgatgatggtagtgtaaaaggaattgccactaacgatgtagggatacaaaaggatggtgcaccaaaggcaacatttgagagaggactggaactacatgctaaagtcacaatttttgcagaaggttgccatggacatctagccaagcaactatataagaagtttgatttgagagcaaattgtgaacctcaaacctacgggattggactgaaggagttatgggttattgatgaaaagaactggaaacctgggagagtagatcacactgttggttggcccttggacagacatacctatggaggatctttcctctatcatttgaatgaaggtgaacccctagtagctcttggtcttgtggttggtctagactatcagaatccatacctgagtccatttagagagttccaaaggtggaaacaccatcctagcattcggccaaccttggaaggtggaaaaaggattgcatacggagccagagctctcaatgaaggtggctttcagtctataccaaaactcacctttcctggtggtttactaattggttgtagtcctggttttatgaatgttcccaagatcaaaggtactcacacagcaatgaaaagtggaattttagcagcagaatctatttttaatcaactaactagtgaaaatctccaatcaaagacaataggactccatgtaactgaatatgaggacaatttgaagaactcatgggtatggaaagagctatattctgttagaaatataagaccgtcctgccacggagtactgggtgtatatggagggatgatttacactggaatcttttactggatattgagaggaatggagccgtggactctgaaacataaaggttctgactttgaacggctcaagccagccaaggattgcacacctattgagtatccaaaacccgatggacagatcagttttgacctcttgtcatctgtggctctgagtggtactaatcatgaacatgaccagccggcacacttaaccttaagggatgacagtatacctgtaaatagaaatctgtcgatatatgatgggcccgagcagcgattctgtcctgcaggagtttatgaatttgtacctgtggaacaaggtgatggatttcggttacagataaatgctcagaactgtgtacattgtaaaacatgtgatattaaagatccaagtcagaatattaactgggtggtacctgaaggtggaggaggacctgcttacaatggaatgtaaactgcagctagccagtttctttcaagtatggcaagctaacgttaaaatgtttagagattaacagatttcagaatgtctttctgcatattactgaacagaatagtcacaaaatgattatcaaataaaaattttatactataaaaaaaaaaa

SEQ ID NO: 136 - DNA, 5280 bp, Homo sapiens
gttgactaggcgctgttcttgctggctggtgccccagggcctggagaggtctgaagaaacctgggagccagcagcccggggctccactctgggttctgaaagcccattccctgctctgcggctcctcccaccccacctcttctcagccttgcagctcaagggttgatctcaggagtccaggacccaggagagggaagaatctgaggaacacagaacagtgagcgttgcccacaccccatctcccgtcaccacatctcccctcaccctcaccctccctgcctggccctggaccccatcccaggacctccctatcagctgacttcttccagtgtcttgcaggcccctctgggctcctccctcccctggcttttcctaccactccccctctatcggcgtctatctgtaggtgccctgggatttataaaactgggttccgaatgctgaataagagacggtaagagccaaggcaaaggacagcactgttctctgcctgcctgataccctcaccacctgggaacatcccccagacaccctcttaactccgggacagagatggctggcggagcctggggccgcctggcctgttacttggagttcctgaagaaggaggagctgaaggagttccagcttctgctcgccaataaagcgcactccaggagctcttcgggtgagacacccgctcagccagagaagacgagtggcatggaggtggcctcgtacctggtggctcagtatggggagcagcgggcctgggacctagccctccatacctgggagcagatggggctgaggtcactgtgcgcccaagcccaggaaggggcaggccactctccctcattcccctacagcccaagtgaaccccacctggggtctcccagccaacccacctccaccgcagtgctaatgccctggatccatgaattgccggcggggtgcacccagggctcagagagaagggttttgagacagctgcctgacacatctggacgccgctggagagaaatctctgcctcactcctctaccaagctcttccaagctccccagaccatgagtctccaagccaggagtcacccaacgcccccacatccacagcagtgctggggagctggggatccccacctcagcccagcctagcacccagagagcaggaggctcctgggacccaatggcctctggatgaaacgtcaggaatttactacacagaaatcagagaaagagagagagagaaatcagagaaaggcaggcccccatgggcagcggtggtaggaacgcccccacaggcgcacaccagcctacagccccaccaccacccatgggagccttctgtgagagagagcctctgttccacatggccctggaaaaatgaggattttaaccaaaaattcacacagctgctacttctacaaagacctcaccccagaagccaagatcccctggtcaagagaagctggcctgattatgtggaggagaatcgaggacatttaattgagatcagagacttatttggcccaggcctggatacccaagaacctcgcatagtcatactgcagggggctgctggaattgggaagtcaacactggccaggcaggtgaaggaagcctgggggagaggccagctgtatggggaccgcttccagcatgtcttctacttcagctgcagagagctggcccagtccaaggtggtgagtctcgctgagctcatcggaaaagatgggacagccactccggctcccattagacagatcctgtctaggccagagcggctgctcttcatcctcgatggtgtagatgagccaggatgggtcttgcaggagccgagttctgagctctgtctgcactggagccagccacagccggcggatgcactgctgggcagtttgctggggaaaactatacttcccgaggcatccttcctgatcacggctcggaccacagctctgcagaacctcattccttctttggagcaggcacgttgggtagaggtcctggggttctctgagtccagcaggaaggaatatttctacagatatttcacagatgaaaggcaagcaattagagcctttaggttggtcaaatcaaacaaagagctctgggccctgtgtcttgtgccctgggtgtcctggctggcctgcacttgcctgatgcagcagatgaagcggaaggaaaaactcacactgacttccaagaccaccacaaccctctgtctacattaccttgcccaggctctccaagctcagccattgggaccccagctcagagacctctgctctctggctgctgagggcatctggcaaaaaaagacccttttcagtccagatgacctcaggaagcatgggttagatggggccatcatctccaccttcttgaagatgggtattcttcaagagcaccccatccctctgagctacagcttcattcacctctgtttccaagagttctttgcagcaatgtcctatgtcttggaggatgagaaggggagaggtaaacattctaattgcatcatagatttggaaaagacgctagaagcatatggaatacatggcctgtttggggcatcaaccacacgtttcctattgggcctgttaagtgatgagggggagagagagatggagaacatctttcactgccggctgtctcaggggaggaacctgatgcagtgggtcccgtccctgcagctgctgctgcagccacactctctggagtccctccactgcttgtacgagactcggaacaaaacgttcctgacacaagtgatggcccatttcgaagaaatgggcatgtgtgtagaaacagacatggagctcttagtgtgcactttctgcattaaattcagccgccacgtgaagaagcttcagctgattgagggcaggcagcacagatcaacatggagccccaccatggtagtcctgttcaggtgggtcccagtcacagatgcctattggcagattctcttctccgtcctcaaggtcaccagaaacctgaaggagctggacctaagtggaaactcgctgagccactctgcagtgaagagtctttgtaagaccctgagacgccctcgctgcctcctggagaccctgcggttggctggctgtggcctcacagctgaggactgcaaggaccttgcctttgggctgagagccaaccagaccctgaccgagctggacctgagcttcaatgtgctcacggatgctggagccaaacacctttgccagagactgagacagccgagctgcaagctacagcgactgcagctggtcagctgtggcctcacgtctgactgctgccaggacctggcctctgtgcttagtgccagccccagcctgaaggagctagacctgcagcagaacaacctggatgacgttggcgtgcgactgctctgtgaggggctcaggcatcctgcctgcaaactcatacgcctggggctggaccagacaactctgagtgatgagatgaggcaggaactgagggccctggagcaggagaaacctcagctgctcatcttcagcagacggaaaccaagtgtgatgacccctactgagggcctggatacgggagagatgagtaatagcacatcctcactcaagcggcagagactcggatcagagagggcggcttcccatgttgctcaggctaatctcaaactcctggacgtgagcaagatcttcccaattgctgagattgcaggcaagagccacgaggaaagctccccagaggtagtaccggtggaactcttgtgcgtgccttctcctgcctctcaaggggacctgcatacgaagcctttggggactgacgatgacttctggggccccacggggcctgtggctactgaggtagttgacaaagaaaagaacttgtaccgagttcacttccctgtagctggctcctaccgctggcccaacacgggtctctgctttgtgatgagagaagcggtgaccgttgagattgaattctgtgtgtgggaccagttcctgggtgagatcaacccacagcacagctggatggtggcagggcctctgctggacatcaaggctgagcctggagctgtggaagctgtgcacctccctcactttgtggctctccaagggggccatgtggacacatccctgttccaaatggcccactttaaagaggaggggatgctcctggagaagccagccagggtggagctgcatcacatagttctggaaaaccccagcttctcccccttgggagtcctcctgaaaatgatccataatgccctgcgcttcattcccgtcacctctgtggtgttgctttaccaccgcgtccatcctgaggaagtcaccttccacctctacctgatcccaagtgactgctccattcggaaggccatagatgatctagaaatgaaattccagtttgtgcgaatccacaagccacccccgctgaccccactttatatgggctgtcgttacactgtgtctgggtctggttcagggatgctggaaatactccccaaggaactggagctctgctatcgaagccctggagaagaccagctgttctcggagttctacgttggccacttgggatcagggatcaggctgcaagtgaaagacaagaaagatgagactctggtgtgggaggccttggtgaaaccaggaaggaacaccagccagccgtggaacctcaggtgcaacagagacgccaggagatactagtgcccagcagcctgcggcagtaccaatgaagccagagagggcttggtggatgacaaggaggcctgagtagaccgcagactttgttgtcgctgcccggaggagtcgagactggtacccggaggagctgtctcaccaggagaccacgtcctggaagtgtccgggactcgcgggacctgtggctgcagaccccgccggcacgcaggcccagagctggcgcactcctgaggatgagactctgggggccctagccggggtccacgggagggctgtccttggggactctaggatggcttcgttctggcccggctcacttctggagctgtgagacccaagacaaaaggggctgagggatttctcattgacaagagttcgtgcgggaaaaccacctgatccctagggatttgtcatcttaagactcaaaaggcttaataccaggaaccaccttggcaagatatttacccaccggccatctctgtttactcatgaatgttaaatgttaaaacgcagcgctctaaccctgcatattatttacttgcaaatgtctgtaatctgtaattgtgatgcctctgatggaataaattatctttttcagtctcctct

SEQ ID NO: 137 - DNA, 5485 bp, Homo sapiens
gactaggcgctgttcttgctggctggtgccccagggcctggagaggtctgaagaaacctgggagccagcagcccggggctccactctgggttctgaaagcccattccctgctctgcggctcctcccaccccacctcttctcagccttgcagctcaagggttgatctcaggagtccaggacccaggagagggaagaatctgaggaacacagaacagtgagcgttgcccacaccccatctcccgtcaccacatctcccctcaccctcaccctccctgcctggccctggaccccatcccaggacctccctatcagctgacttcttccagtgtcttgcaggcccctctgggctcctccctcccctggcttttcctaccactccccctctatcggcgtctatctgtaggtgccctgggatttataaaactgggttccgaatgctgaataagagacggtaagagccaaggcaaaggacagcactgttctctgcctgcctgataccctcaccacctgggaacatcccccagacaccctcttaactccgggacagagatggctggcggagcctggggccgcctggcctgttacttggagttcctgaagaaggaggagctgaaggagttccagcttctgctcgccaataaagcgcactccaggagctcttcgggtgagacacccgctcagccagagaagacgagtggcatggaggtggcctcgtacctggtggctcagtatggggagcagcgggcctgggacctagccctccatacctgggagcagatggggctgaggtcactgtgcgcccaagcccaggaaggggcaggccactctccctcattcccctacagcccaagtgaaccccacctggggtctcccagccaacccacctccaccgcagtgctaatgccctggatccatgaattgccggcggggtgcacccagggctcagagagaagggttttgagacagctgcctgacacatctggacgccgctggagagaaatctctgcctcactcctctaccaagctcttccaagctccccagaccatgagtctccaagccaggagtcacccaacgcccccacatccacagcagtgctggggagctggggatccccacctcagcccagcctagcacccagagagcaggaggctcctgggacccaatggcctctggatgaaacgtcaggaatttactacacagaaatcagagaaagagagagagagaaatcagagaaaggcaggcccccatgggcagcggtggtaggaacgcccccacaggcgcacaccagcctacagccccaccaccacccatgggagccttctgtgagagagagcctctgttccacatggccctggaaaaatgaggattttaaccaaaaattcacacagctgctacttctacaaagacctcaccccagaagccaagatcccctggtcaagagaagctggcctgattatgtggaggagaatcgaggacatttaattgagatcagagacttatttggcccaggcctggatacccaagaacctcgcatagtcatactgcagggggctgctggaattgggaagtcaacactggccaggcaggtgaaggaagcctgggggagaggccagctgtatggggaccgcttccagcatgtcttctacttcagctgcagagagctggcccagtccaaggtggtgagtctcgctgagctcatcggaaaagatgggacagccactccggctcccattagacagatcctgtctaggccagagcggctgctcttcatcctcgatggtgtagatgagccaggatgggtcttgcaggagccgagttctgagctctgtctgcactggagccagccacagccggcggatgcactgctgggcagtttgctggggaaaactatacttcccgaggcatccttcctgatcacggctcggaccacagctctgcagaacctcattccttctttggagcaggcacgttgggtagaggtcctggggttctctgagtccagcaggaaggaatatttctacagatatttcacagatgaaaggcaagcaattagagcctttaggttggtcaaatcaaacaaagagctctgggccctgtgtcttgtgccctgggtgtcctggctggcctgcacttgcctgatgcagcagatgaagcggaaggaaaaactcacactgacttccaagaccaccacaaccctctgtctacattaccttgcccaggctctccaagctcagccattgggaccccagctcagagacctctgctctctggctgctgagggcatctggcaaaaaaagacccttttcagtccagatgacctcaggaagcatgggttagatggggccatcatctccaccttcttgaagatgggtattcttcaagagcaccccatccctctgagctacagcttcattcacctctgtttccaagagttctttgcagcaatgtcctatgtcttggaggatgagaaggggagaggtaaacattctaattgcatcatagatttggaaaagacgctagaagcatatggaatacatggcctgtttggggcatcaaccacacgtttcctattgggcctgttaagtgatgagggggagagagagatggagaacatctttcactgccggctgtctcaggggaggaacctgatgcagtgggtcccgtccctgcagctgctgctgcagccacactctctggagtccctccactgcttgtacgagactcggaacaaaacgttcctgacacaagtgatggcccatttcgaagaaatgggcatgtgtgtagaaacagacatggagctcttagtgtgcactttctgcattaaattcagccgccacgtgaagaagcttcagctgattgagggcaggcagcacagatcaacatggagccccaccatggtagtcctgttcaggtgggtcccagtcacagatgcctattggcagattctcttctccgtcctcaaggtcaccagaaacctgaaggagctggacctaagtggaaactcgctgagccactctgcagtgaagagtctttgtaagaccctgagacgccctcgctgcctcctggagaccctgcggttggctggctgtggcctcacagctgaggactgcaaggaccttgcctttgggctgagagccaaccagaccctgaccgagctggacctgagcttcaatgtgctcacggatgctggagccaaacacctttgccagagactgagacagccgagctgcaagctacagcgactgcagctggtcagctgtggcctcacgtctgactgctgccaggacctggcctctgtgcttagtgccagccccagcctgaaggagctagacctgcagcagaacaacctggatgacgttggcgtgcgactgctctgtgaggggctcaggcatcctgcctgcaaactcatacgcctggggctggaccagacaactctgagtgatgagatgaggcaggaactgagggccctggagcaggagaaacctcagctgctcatcttcagcagacggaaaccaagtgtgatgacccctactgagggcctggatacgggagagatgagtaatagcacatcctcactcaagcggcagagactcggatcagagagggcggcttcccatgttgctcaggctaatctcaaactcctggacgtgagcaagatcttcccaattgctgagattgcagaggaaagctccccagaggtagtaccggtggaactcttgtgcgtgccttctcctgcctctcaaggggacctgcatacgaagcctttggggactgacgatgacttctggggccccacggggcctgtggctactgaggtagttgacaaagaaaagaacttgtaccgagttcacttccctgtagctggctcctaccgctggcccaacacgggtctctgctttgtgatgagagaagcggtgaccgttgagattgaattctgtgtgtgggaccagttcctgggtgagatcaacccacagcacagctggatggtggcagggcctctgctggacatcaaggctgagcctggagctgtggaagctgtgcacctccctcactttgtggctctccaagggggccatgtggacacatccctgttccaaatggcccactttaaagaggaggggatgctcctggagaagccagccagggtggagctgcatcacatagttctggaaaaccccagcttctcccccttgggagtcctcctgaaaatgatccataatgccctgcgcttcattcccgtcacctctgtggtgttgctttaccaccgcgtccatcctgaggaagtcaccttccacctctacctgatcccaagtgactgctccattcggaaggaactggagctctgctatcgaagccctggagaagaccagctgttctcggagttctacgttggccacttgggatcagggatcaggctgcaagtgaaagacaagaaagatgagactctggtgtgggaggccttggtgaaaccaggagatctcatgcctgcaactactctgatccctccagcccgcatagccgtaccttcacctctggatgccccgcagttgctgcactttgtggaccagtatcgagagcagctgatagcccgagtgacatcggtggaggttgtcttggacaaactgcatggacaggtgctgagccaggagcagtacgagagggtgctggctgagaacacgaggcccagccagatgcggaagctgttcagcttgagccagtcctgggaccggaagtgcaaagatggactctaccaagccctgaaggagacccatcctcacctcattatggaactctgggagaagggcagcaaaaagggactcctgccactcagcagctgaagtatcaacaccagcccttgacccttgagtcctggctttggctgacccttctttgggtctcagtttctttctctgcaaacaagttgccatctggtttgccttccagcactaaagtaatggaactttgatgatgcctttgctgggcattatgtgtccatgccagggatgccacagggggccccagtccaggtggcctaacagcatctcagggaatgtccatctggagctggcaagacccctgcagacctcatagagcctcatctggtggccacagcagccaagcctagagccctccggatcccatccaggcgcaaagaggaataggagggacatggaaccatttgcctctggctgtgtcacagggtgagccccaaaattggggttcagcgtgggaggccacgtggattcttggctttgtacaggaagatctacaagagcaagccaacagagtaaagtggaaggaagtttattcagaaaataaaggagtatcacagctcttttagaatttgtctagcaggctttccagtttttaccagaaaacccctataaattaaaaattttttacttaaatttaagaattaaaaaaatacaaaaaagaaaaaatgaaaataaaggaataagaagttacctactccaaaaaaaaaaa

SEQ ID NO: 138 - DNA, 5617 bp, Homo sapiens
gactaggcgctgttcttgctggctggtgccccagggcctggagaggtctgaagaaacctgggagccagcagcccggggctccactctgggttctgaaagcccattccctgctctgcggctcctcccaccccacctcttctcagccttgcagctcaagggttgatctcaggagtccaggacccaggagagggaagaatctgaggaacacagaacagtgagcgttgcccacaccccatctcccgtcaccacatctcccctcaccctcaccctccctgcctggccctggaccccatcccaggacctccctatcagctgacttcttccagtgtcttgcaggcccctctgggctcctccctcccctggcttttcctaccactccccctctatcggcgtctatctgtaggtgccctgggatttataaaactgggttccgaatgctgaataagagacggtaagagccaaggcaaaggacagcactgttctctgcctgcctgataccctcaccacctgggaacatcccccagacaccctcttaactccgggacagagatggctggcggagcctggggccgcctggcctgttacttggagttcctgaagaaggaggagctgaaggagttccagcttctgctcgccaataaagcgcactccaggagctcttcgggtgagacacccgctcagccagagaagacgagtggcatggaggtggcctcgtacctggtggctcagtatggggagcagcgggcctgggacctagccctccatacctgggagcagatggggctgaggtcactgtgcgcccaagcccaggaaggggcaggccactctccctcattcccctacagcccaagtgaaccccacctggggtctcccagccaacccacctccaccgcagtgctaatgccctggatccatgaattgccggcggggtgcacccagggctcagagagaagggttttgagacagctgcctgacacatctggacgccgctggagagaaatctctgcctcactcctctaccaagctcttccaagctccccagaccatgagtctccaagccaggagtcacccaacgcccccacatccacagcagtgctggggagctggggatccccacctcagcccagcctagcacccagagagcaggaggctcctgggacccaatggcctctggatgaaacgtcaggaatttactacacagaaatcagagaaagagagagagagaaatcagagaaaggcaggcccccatgggcagcggtggtaggaacgcccccacaggcgcacaccagcctacagccccaccaccacccatgggagccttctgtgagagagagcctctgttccacatggccctggaaaaatgaggattttaaccaaaaattcacacagctgctacttctacaaagacctcaccccagaagccaagatcccctggtcaagagaagctggcctgattatgtggaggagaatcgaggacatttaattgagatcagagacttatttggcccaggcctggatacccaagaacctcgcatagtcatactgcagggggctgctggaattgggaagtcaacactggccaggcaggtgaaggaagcctgggggagaggccagctgtatggggaccgcttccagcatgtcttctacttcagctgcagagagctggcccagtccaaggtggtgagtctcgctgagctcatcggaaaagatgggacagccactccggctcccattagacagatcctgtctaggccagagcggctgctcttcatcctcgatggtgtagatgagccaggatgggtcttgcaggagccgagttctgagctctgtctgcactggagccagccacagccggcggatgcactgctgggcagtttgctggggaaaactatacttcccgaggcatccttcctgatcacggctcggaccacagctctgcagaacctcattccttctttggagcaggcacgttgggtagaggtcctggggttctctgagtccagcaggaaggaatatttctacagatatttcacagatgaaaggcaagcaattagagcctttaggttggtcaaatcaaacaaagagctctgggccctgtgtcttgtgccctgggtgtcctggctggcctgcacttgcctgatgcagcagatgaagcggaaggaaaaactcacactgacttccaagaccaccacaaccctctgtctacattaccttgcccaggctctccaagctcagccattgggaccccagctcagagacctctgctctctggctgctgagggcatctggcaaaaaaagacccttttcagtccagatgacctcaggaagcatgggttagatggggccatcatctccaccttcttgaagatgggtattcttcaagagcaccccatccctctgagctacagcttcattcacctctgtttccaagagttctttgcagcaatgtcctatgtcttggaggatgagaaggggagaggtaaacattctaattgcatcatagatttggaaaagacgctagaagcatatggaatacatggcctgtttggggcatcaaccacacgtttcctattgggcctgttaagtgatgagggggagagagagatggagaacatctttcactgccggctgtctcaggggaggaacctgatgcagtgggtcccgtccctgcagctgctgctgcagccacactctctggagtccctccactgcttgtacgagactcggaacaaaacgttcctgacacaagtgatggcccatttcgaagaaatgggcatgtgtgtagaaacagacatggagctcttagtgtgcactttctgcattaaattcagccgccacgtgaagaagcttcagctgattgagggcaggcagcacagatcaacatggagccccaccatggtagtcctgttcaggtgggtcccagtcacagatgcctattggcagattctcttctccgtcctcaaggtcaccagaaacctgaaggagctggacctaagtggaaactcgctgagccactctgcagtgaagagtctttgtaagaccctgagacgccctcgctgcctcctggagaccctgcggttggctggctgtggcctcacagctgaggactgcaaggaccttgcctttgggctgagagccaaccagaccctgaccgagctggacctgagcttcaatgtgctcacggatgctggagccaaacacctttgccagagactgagacagccgagctgcaagctacagcgactgcagctggtcagctgtggcctcacgtctgactgctgccaggacctggcctctgtgcttagtgccagccccagcctgaaggagctagacctgcagcagaacaacctggatgacgttggcgtgcgactgctctgtgaggggctcaggcatcctgcctgcaaactcatacgcctggggctggaccagacaactctgagtgatgagatgaggcaggaactgagggccctggagcaggagaaacctcagctgctcatcttcagcagacggaaaccaagtgtgatgacccctactgagggcctggatacgggagagatgagtaatagcacatcctcactcaagcggcagagactcggatcagagagggcggcttcccatgttgctcaggctaatctcaaactcctggacgtgagcaagatcttcccaattgctgagattgcagaggaaagctccccagaggtagtaccggtggaactcttgtgcgtgccttctcctgcctctcaaggggacctgcatacgaagcctttggggactgacgatgacttctggggccccacggggcctgtggctactgaggtagttgacaaagaaaagaacttgtaccgagttcacttccctgtagctggctcctaccgctggcccaacacgggtctctgctttgtgatgagagaagcggtgaccgttgagattgaattctgtgtgtgggaccagttcctgggtgagatcaacccacagcacagctggatggtggcagggcctctgctggacatcaaggctgagcctggagctgtggaagctgtgcacctccctcactttgtggctctccaagggggccatgtggacacatccctgttccaaatggcccactttaaagaggaggggatgctcctggagaagccagccagggtggagctgcatcacatagttctggaaaaccccagcttctcccccttgggagtcctcctgaaaatgatccataatgccctgcgcttcattcccgtcacctctgtggtgttgctttaccaccgcgtccatcctgaggaagtcaccttccacctctacctgatcccaagtgactgctccattcggaaggccatagatgatctagaaatgaaattccagtttgtgcgaatccacaagccacccccgctgaccccactttatatgggctgtcgttacactgtgtctgggtctggttcagggatgctggaaatactccccaaggaactggagctctgctatcgaagccctggagaagaccagctgttctcggagttctacgttggccacttgggatcagggatcaggctgcaagtgaaagacaagaaagatgagactctggtgtgggaggccttggtgaaaccaggagatctcatgcctgcaactactctgatccctccagcccgcatagccgtaccttcacctctggatgccccgcagttgctgcactttgtggaccagtatcgagagcagctgatagcccgagtgacatcggtggaggttgtcttggacaaactgcatggacaggtgctgagccaggagcagtacgagagggtgctggctgagaacacgaggcccagccagatgcggaagctgttcagcttgagccagtcctgggaccggaagtgcaaagatggactctaccaagccctgaaggagacccatcctcacctcattatggaactctgggagaagggcagcaaaaagggactcctgccactcagcagctgaagtatcaacaccagcccttgacccttgagtcctggctttggctgacccttctttgggtctcagtttctttctctgcaaacaagttgccatctggtttgccttccagcactaaagtaatggaactttgatgatgcctttgctgggcattatgtgtccatgccagggatgccacagggggccccagtccaggtggcctaacagcatctcagggaatgtccatctggagctggcaagacccctgcagacctcatagagcctcatctggtggccacagcagccaagcctagagccctccggatcccatccaggcgcaaagaggaataggagggacatggaaccatttgcctctggctgtgtcacagggtgagccccaaaattggggttcagcgtgggaggccacgtggattcttggctttgtacaggaagatctacaagagcaagccaacagagtaaagtggaaggaagtttattcagaaaataaaggagtatcacagctcttttagaatttgtctagcaggctttccagtttttaccagaaaacccctataaattaaaaattttttacttaaatttaagaattaaaaaaatacaaaaaagaaaaaatgaaaataaaggaataagaagttacctactccaaaaaaaaaaa

SEQ ID NO: 139 - DNA, 5527 bp, Homo sapiens
gactaggcgctgttcttgctggctggtgccccagggcctggagaggtctgaagaaacctgggagccagcagcccggggctccactctgggttctgaaagcccattccctgctctgcggctcctcccaccccacctcttctcagccttgcagctcaagggttgatctcaggagtccaggacccaggagagggaagaatctgaggaacacagaacagtgagcgttgcccacaccccatctcccgtcaccacatctcccctcaccctcaccctccctgcctggccctggaccccatcccaggacctccctatcagctgacttcttccagtgtcttgcaggcccctctgggctcctccctcccctggcttttcctaccactccccctctatcggcgtctatctgtaggtgccctgggatttataaaactgggttccgaatgctgaataagagacggtaagagccaaggcaaaggacagcactgttctctgcctgcctgataccctcaccacctgggaacatcccccagacaccctcttaactccgggacagagatggctggcggagcctggggccgcctggcctgttacttggagttcctgaagaaggaggagctgaaggagttccagcttctgctcgccaataaagcgcactccaggagctcttcgggtgagacacccgctcagccagagaagacgagtggcatggaggtggcctcgtacctggtggctcagtatggggagcagcgggcctgggacctagccctccatacctgggagcagatggggctgaggtcactgtgcgcccaagcccaggaaggggcaggccactctccctcattcccctacagcccaagtgaaccccacctggggtctcccagccaacccacctccaccgcagtgctaatgccctggatccatgaattgccggcggggtgcacccagggctcagagagaagggttttgagacagctgcctgacacatctggacgccgctggagagaaatctctgcctcactcctctaccaagctcttccaagctccccagaccatgagtctccaagccaggagtcacccaacgcccccacatccacagcagtgctggggagctggggatccccacctcagcccagcctagcacccagagagcaggaggctcctgggacccaatggcctctggatgaaacgtcaggaatttactacacagaaatcagagaaagagagagagagaaatcagagaaaggcaggcccccatgggcagcggtggtaggaacgcccccacaggcgcacaccagcctacagccccaccaccacccatgggagccttctgtgagagagagcctctgttccacatggccctggaaaaatgaggattttaaccaaaaattcacacagctgctacttctacaaagacctcaccccagaagccaagatcccctggtcaagagaagctggcctgattatgtggaggagaatcgaggacatttaattgagatcagagacttatttggcccaggcctggatacccaagaacctcgcatagtcatactgcagggggctgctggaattgggaagtcaacactggccaggcaggtgaaggaagcctgggggagaggccagctgtatggggaccgcttccagcatgtcttctacttcagctgcagagagctggcccagtccaaggtggtgagtctcgctgagctcatcggaaaagatgggacagccactccggctcccattagacagatcctgtctaggccagagcggctgctcttcatcctcgatggtgtagatgagccaggatgggtcttgcaggagccgagttctgagctctgtctgcactggagccagccacagccggcggatgcactgctgggcagtttgctggggaaaactatacttcccgaggcatccttcctgatcacggctcggaccacagctctgcagaacctcattccttctttggagcaggcacgttgggtagaggtcctggggttctctgagtccagcaggaaggaatatttctacagatatttcacagatgaaaggcaagcaattagagcctttaggttggtcaaatcaaacaaagagctctgggccctgtgtcttgtgccctgggtgtcctggctggcctgcacttgcctgatgcagcagatgaagcggaaggaaaaactcacactgacttccaagaccaccacaaccctctgtctacattaccttgcccaggctctccaagctcagccattgggaccccagctcagagacctctgctctctggctgctgagggcatctggcaaaaaaagacccttttcagtccagatgacctcaggaagcatgggttagatggggccatcatctccaccttcttgaagatgggtattcttcaagagcaccccatccctctgagctacagcttcattcacctctgtttccaagagttctttgcagcaatgtcctatgtcttggaggatgagaaggggagaggtaaacattctaattgcatcatagatttggaaaagacgctagaagcatatggaatacatggcctgtttggggcatcaaccacacgtttcctattgggcctgttaagtgatgagggggagagagagatggagaacatctttcactgccggctgtctcaggggaggaacctgatgcagtgggtcccgtccctgcagctgctgctgcagccacactctctggagtccctccactgcttgtacgagactcggaacaaaacgttcctgacacaagtgatggcccatttcgaagaaatgggcatgtgtgtagaaacagacatggagctcttagtgtgcactttctgcattaaattcagccgccacgtgaagaagcttcagctgattgagggcaggcagcacagatcaacatggagccccaccatggtagtcctgttcaggtgggtcccagtcacagatgcctattggcagattctcttctccgtcctcaaggtcaccagaaacctgaaggagctggacctaagtggaaactcgctgagccactctgcagtgaagagtctttgtaagaccctgagacgccctcgctgcctcctggagaccctgcggttggctggctgtggcctcacagctgaggactgcaaggaccttgcctttgggctgagagccaaccagaccctgaccgagctggacctgagcttcaatgtgctcacggatgctggagccaaacacctttgccagagactgagacagccgagctgcaagctacagcgactgcagctggtcagctgtggcctcacgtctgactgctgccaggacctggcctctgtgcttagtgccagccccagcctgaaggagctagacctgcagcagaacaacctggatgacgttggcgtgcgactgctctgtgaggggctcaggcatcctgcctgcaaactcatacgcctggggaaaccaagtgtgatgacccctactgagggcctggatacgggagagatgagtaatagcacatcctcactcaagcggcagagactcggatcagagagggcggcttcccatgttgctcaggctaatctcaaactcctggacgtgagcaagatcttcccaattgctgagattgcagaggaaagctccccagaggtagtaccggtggaactcttgtgcgtgccttctcctgcctctcaaggggacctgcatacgaagcctttggggactgacgatgacttctggggccccacggggcctgtggctactgaggtagttgacaaagaaaagaacttgtaccgagttcacttccctgtagctggctcctaccgctggcccaacacgggtctctgctttgtgatgagagaagcggtgaccgttgagattgaattctgtgtgtgggaccagttcctgggtgagatcaacccacagcacagctggatggtggcagggcctctgctggacatcaaggctgagcctggagctgtggaagctgtgcacctccctcactttgtggctctccaagggggccatgtggacacatccctgttccaaatggcccactttaaagaggaggggatgctcctggagaagccagccagggtggagctgcatcacatagttctggaaaaccccagcttctcccccttgggagtcctcctgaaaatgatccataatgccctgcgcttcattcccgtcacctctgtggtgttgctttaccaccgcgtccatcctgaggaagtcaccttccacctctacctgatcccaagtgactgctccattcggaaggccatagatgatctagaaatgaaattccagtttgtgcgaatccacaagccacccccgctgaccccactttatatgggctgtcgttacactgtgtctgggtctggttcagggatgctggaaatactccccaaggaactggagctctgctatcgaagccctggagaagaccagctgttctcggagttctacgttggccacttgggatcagggatcaggctgcaagtgaaagacaagaaagatgagactctggtgtgggaggccttggtgaaaccaggagatctcatgcctgcaactactctgatccctccagcccgcatagccgtaccttcacctctggatgccccgcagttgctgcactttgtggaccagtatcgagagcagctgatagcccgagtgacatcggtggaggttgtcttggacaaactgcatggacaggtgctgagccaggagcagtacgagagggtgctggctgagaacacgaggcccagccagatgcggaagctgttcagcttgagccagtcctgggaccggaagtgcaaagatggactctaccaagccctgaaggagacccatcctcacctcattatggaactctgggagaagggcagcaaaaagggactcctgccactcagcagctgaagtatcaacaccagcccttgacccttgagtcctggctttggctgacccttctttgggtctcagtttctttctctgcaaacaagttgccatctggtttgccttccagcactaaagtaatggaactttgatgatgcctttgctgggcattatgtgtccatgccagggatgccacagggggccccagtccaggtggcctaacagcatctcagggaatgtccatctggagctggcaagacccctgcagacctcatagagcctcatctggtggccacagcagccaagcctagagccctccggatcccatccaggcgcaaagaggaataggagggacatggaaccatttgcctctggctgtgtcacagggtgagccccaaaattggggttcagcgtgggaggccacgtggattcttggctttgtacaggaagatctacaagagcaagccaacagagtaaagtggaaggaagtttattcagaaaataaaggagtatcacagctcttttagaatttgtctagcaggctttccagtttttaccagaaaacccctataaattaaaaattttttacttaaatttaagaattaaaaaaatacaaaaaagaaaaaatgaaaataaaggaataagaagttacctactccaaaaaaaaaaa

SEQ ID NO: 140 - DNA, 5395 bp, Homo sapiens
gactaggcgctgttcttgctggctggtgccccagggcctggagaggtctgaagaaacctgggagccagcagcccggggctccactctgggttctgaaagcccattccctgctctgcggctcctcccaccccacctcttctcagccttgcagctcaagggttgatctcaggagtccaggacccaggagagggaagaatctgaggaacacagaacagtgagcgttgcccacaccccatctcccgtcaccacatctcccctcaccctcaccctccctgcctggccctggaccccatcccaggacctccctatcagctgacttcttccagtgtcttgcaggcccctctgggctcctccctcccctggcttttcctaccactccccctctatcggcgtctatctgtaggtgccctgggatttataaaactgggttccgaatgctgaataagagacggtaagagccaaggcaaaggacagcactgttctctgcctgcctgataccctcaccacctgggaacatcccccagacaccctcttaactccgggacagagatggctggcggagcctggggccgcctggcctgttacttggagttcctgaagaaggaggagctgaaggagttccagcttctgctcgccaataaagcgcactccaggagctcttcgggtgagacacccgctcagccagagaagacgagtggcatggaggtggcctcgtacctggtggctcagtatggggagcagcgggcctgggacctagccctccatacctgggagcagatggggctgaggtcactgtgcgcccaagcccaggaaggggcaggccactctccctcattcccctacagcccaagtgaaccccacctggggtctcccagccaacccacctccaccgcagtgctaatgccctggatccatgaattgccggcggggtgcacccagggctcagagagaagggttttgagacagctgcctgacacatctggacgccgctggagagaaatctctgcctcactcctctaccaagctcttccaagctccccagaccatgagtctccaagccaggagtcacccaacgcccccacatccacagcagtgctggggagctggggatccccacctcagcccagcctagcacccagagagcaggaggctcctgggacccaatggcctctggatgaaacgtcaggaatttactacacagaaatcagagaaagagagagagagaaatcagagaaaggcaggcccccatgggcagcggtggtaggaacgcccccacaggcgcacaccagcctacagccccaccaccacccatgggagccttctgtgagagagagcctctgttccacatggccctggaaaaatgaggattttaaccaaaaattcacacagctgctacttctacaaagacctcaccccagaagccaagatcccctggtcaagagaagctggcctgattatgtggaggagaatcgaggacatttaattgagatcagagacttatttggcccaggcctggatacccaagaacctcgcatagtcatactgcagggggctgctggaattgggaagtcaacactggccaggcaggtgaaggaagcctgggggagaggccagctgtatggggaccgcttccagcatgtcttctacttcagctgcagagagctggcccagtccaaggtggtgagtctcgctgagctcatcggaaaagatgggacagccactccggctcccattagacagatcctgtctaggccagagcggctgctcttcatcctcgatggtgtagatgagccaggatgggtcttgcaggagccgagttctgagctctgtctgcactggagccagccacagccggcggatgcactgctgggcagtttgctggggaaaactatacttcccgaggcatccttcctgatcacggctcggaccacagctctgcagaacctcattccttctttggagcaggcacgttgggtagaggtcctggggttctctgagtccagcaggaaggaatatttctacagatatttcacagatgaaaggcaagcaattagagcctttaggttggtcaaatcaaacaaagagctctgggccctgtgtcttgtgccctgggtgtcctggctggcctgcacttgcctgatgcagcagatgaagcggaaggaaaaactcacactgacttccaagaccaccacaaccctctgtctacattaccttgcccaggctctccaagctcagccattgggaccccagctcagagacctctgctctctggctgctgagggcatctggcaaaaaaagacccttttcagtccagatgacctcaggaagcatgggttagatggggccatcatctccaccttcttgaagatgggtattcttcaagagcaccccatccctctgagctacagcttcattcacctctgtttccaagagttctttgcagcaatgtcctatgtcttggaggatgagaaggggagaggtaaacattctaattgcatcatagatttggaaaagacgctagaagcatatggaatacatggcctgtttggggcatcaaccacacgtttcctattgggcctgttaagtgatgagggggagagagagatggagaacatctttcactgccggctgtctcaggggaggaacctgatgcagtgggtcccgtccctgcagctgctgctgcagccacactctctggagtccctccactgcttgtacgagactcggaacaaaacgttcctgacacaagtgatggcccatttcgaagaaatgggcatgtgtgtagaaacagacatggagctcttagtgtgcactttctgcattaaattcagccgccacgtgaagaagcttcagctgattgagggcaggcagcacagatcaacatggagccccaccatggtagtcctgttcaggtgggtcccagtcacagatgcctattggcagattctcttctccgtcctcaaggtcaccagaaacctgaaggagctggacctaagtggaaactcgctgagccactctgcagtgaagagtctttgtaagaccctgagacgccctcgctgcctcctggagaccctgcggttggctggctgtggcctcacagctgaggactgcaaggaccttgcctttgggctgagagccaaccagaccctgaccgagctggacctgagcttcaatgtgctcacggatgctggagccaaacacctttgccagagactgagacagccgagctgcaagctacagcgactgcagctggtcagctgtggcctcacgtctgactgctgccaggacctggcctctgtgcttagtgccagccccagcctgaaggagctagacctgcagcagaacaacctggatgacgttggcgtgcgactgctctgtgaggggctcaggcatcctgcctgcaaactcatacgcctggggaaaccaagtgtgatgacccctactgagggcctggatacgggagagatgagtaatagcacatcctcactcaagcggcagagactcggatcagagagggcggcttcccatgttgctcaggctaatctcaaactcctggacgtgagcaagatcttcccaattgctgagattgcagaggaaagctccccagaggtagtaccggtggaactcttgtgcgtgccttctcctgcctctcaaggggacctgcatacgaagcctttggggactgacgatgacttctggggccccacggggcctgtggctactgaggtagttgacaaagaaaagaacttgtaccgagttcacttccctgtagctggctcctaccgctggcccaacacgggtctctgctttgtgatgagagaagcggtgaccgttgagattgaattctgtgtgtgggaccagttcctgggtgagatcaacccacagcacagctggatggtggcagggcctctgctggacatcaaggctgagcctggagctgtggaagctgtgcacctccctcactttgtggctctccaagggggccatgtggacacatccctgttccaaatggcccactttaaagaggaggggatgctcctggagaagccagccagggtggagctgcatcacatagttctggaaaaccccagcttctcccccttgggagtcctcctgaaaatgatccataatgccctgcgcttcattcccgtcacctctgtggtgttgctttaccaccgcgtccatcctgaggaagtcaccttccacctctacctgatcccaagtgactgctccattcggaaggaactggagctctgctatcgaagccctggagaagaccagctgttctcggagttctacgttggccacttgggatcagggatcaggctgcaagtgaaagacaagaaagatgagactctggtgtgggaggccttggtgaaaccaggagatctcatgcctgcaactactctgatccctccagcccgcatagccgtaccttcacctctggatgccccgcagttgctgcactttgtggaccagtatcgagagcagctgatagcccgagtgacatcggtggaggttgtcttggacaaactgcatggacaggtgctgagccaggagcagtacgagagggtgctggctgagaacacgaggcccagccagatgcggaagctgttcagcttgagccagtcctgggaccggaagtgcaaagatggactctaccaagccctgaaggagacccatcctcacctcattatggaactctgggagaagggcagcaaaaagggactcctgccactcagcagctgaagtatcaacaccagcccttgacccttgagtcctggctttggctgacccttctttgggtctcagtttctttctctgcaaacaagttgccatctggtttgccttccagcactaaagtaatggaactttgatgatgcctttgctgggcattatgtgtccatgccagggatgccacagggggccccagtccaggtggcctaacagcatctcagggaatgtccatctggagctggcaagacccctgcagacctcatagagcctcatctggtggccacagcagccaagcctagagccctccggatcccatccaggcgcaaagaggaataggagggacatggaaccatttgcctctggctgtgtcacagggtgagccccaaaattggggttcagcgtgggaggccacgtggattcttggctttgtacaggaagatctacaagagcaagccaacagagtaaagtggaaggaagtttattcagaaaataaaggagtatcacagctcttttagaatttgtctagcaggctttccagtttttaccagaaaacccctataaattaaaaattttttacttaaatttaagaattaaaaaaatacaaaaaagaaaaaatgaaaataaaggaataagaagttacctactccaaaaaaaaaaa

SEQ ID NO: 141 - DNA, 2754 bp, Homo sapiens
cgagtccggaggactcctcggactgcgcggaacatggcgttctggggttggcgcgccgcggcagccctccggctgtggggccgggtagttgaacgggtcgaggccgggggaggcgtggggccgtttcaggcctgcggctgtcggctggtgcttggcggcagggacgattattaaaggtggaagaaggtccatatctttttctgtgggtgcttcaagtgttgttggaagtggaggcagcagtgacaaggggaagctttccctgcaggatgtagctgagctgattcgggccagagcctgccagagggtggtggtcatggtgggggccggcatcagcacacccagtggcattccagacttcagatcgccggggagtggcctgtacagcaacctccagcagtacgatctcccgtaccccgaggccatttttgaactcccattcttctttcacaaccccaagccctttttcactttggccaaggagctgtaccctggaaactacaagcccaacgtcactcactactttctccggctgcttcatgacaaggggctgcttctgcggctctacacgcagaacatcgatgggcttgagagagtgtcgggcatccctgcctcaaagctggttgaagctcatggaacctttgcctctgccacctgcacagtctgccaaagacccttcccaggggaggacattcgggctgacgtgatggcagacagggttccccgctgcccggtctgcaccggcgttgtgaagcccgacattgtgttctttggggagccgctgccccagaggttcttgctgcatgtggttgatttccccatggcagatctgctgctcatccttgggacctccctggaggtggagccttttgccagcttgaccgaggccgtgcggagctcagttccccgactgctcatcaaccgggacttggtggggcccttggcttggcatcctcgcagcagggacgtggcccagctgggggacgtggttcacggcgtggaaagcctagtggagcttctgggctggacagaagagatgcgggaccttgtgcagcgggaaactgggaagcttgatggaccagacaaataggatgatggctgcccccacacaataaatggtaacataggagacatccacatcccaattctgacaagacctcatgcctgaagacagcttgggcaggtgaaaccagaatatgtgaactgagtggacacccgaggctgccactggaatgtcttctcaggccatgagctgcagtgactggtagggctgtgtttacagtcagggccaccccgtcacatatacaaaggagctgcctgcctgtttgctgtgttgaactcttcactctgctgaagctcctaatggaaaaagctttcttctgactgtgaccctcttgaactgaatcagaccaactggaatcccagaccgagtctgctttctgtgcctagttgaacggcaagctcggcatctgttggttacaagatccagacttgggccgagcggtccccagccctcttcatgttccgaagtgtagtcttgaggccctggtgccgcacttctagcatgttggtctcctttagtggggctatttttaatgagagaaaatctgttctttccagcatgaaatacatttagtctcctcaaagggactgcaggtgttgacatgagttggaaagggaaccctgggatacgtggcgtcccctctattggaacagtctgaggactgaaggcatttgtccctggatttattggagacggcccagctcctccctctgaaggtggtcacattctgttgactctccatactcagcctctcctccagaaacagatctgttccagaacattccagcactttctatctggcctccttgtccccacactacgcccccccaccctcgccagggcttcctctagtgacactgttagagctaatctctgagacagggaaggcattactcacttaaaacccaggctgagtcctggccacctgctggattgtgacataggaggtggaatccactgaactgctacttctgcacaggctccttctcctggggctgtacccaggcccagccctgatggctcaccctgtcaggcaccagctgctccctcctgggctctcacccacctgcacatcctccttcctagcatcacattacctgcgtgtttccccagacaaaagcacttcccattcttgaaccttgcctaccctgggctgagctgacggcaatagatttaatgacagtgactcccaggaagggggtcctgtgactttgcgccttaataagaacaaaaggtggaattggtgacctaggaaaactgttgaattctaaaaagaatgaagttagtttctaaccctagttaatgttccttttttattttttgagtcttgccctgtcactcagggtggagtgcggtgttatgatctcagctcactgcaacttccgcctcccgggtttaagcgattctcctgggtagctgggattacaggtgtgtcccaccacacctagcacatgggcatatttgtaatagagacaaggttttgctatgttggccaggctggtctcgaactcctggcttcaagtgatccacccacctcggcctcccaaagtgctgggattacaggcatgagccactgtgcctggcccctttatttgataatttacacatacatttttgtccaaaactcttctttatttcaagatgatgtttctgtggctatgtgtggtatgtggtataaatctcaatctatggtc

SEQ ID NO: 142 - DNA, 2900 bp, Homo sapiens
cgagtccggaggactcctcggactgcgcggaacatggcgttctggggttggcgcgccgcggcagccctccggctgtggggccgggtagttgaacgggtcgaggccgggggaggcgtggggccgtttcaggcctgcggctgtcggctggtgcttggcggcagggacgatgtgagtgcggggctgagaggcagccatggggcccgcggtgagcccttggacccggcgcgccccttgcagaggcctcccagacccgaggtgcccagggcattccggaggcagccgagggcagcagctcccagtttcttcttttcgagtattaaaggtggaagaaggtccatatctttttctgtgggtgcttcaagtgttgttggaagtggaggcagcagtgacaaggggaagctttccctgcaggatgtagctgagctgattcgggccagagcctgccagagggtggtggtcatggtgggggccggcatcagcacacccagtggcattccagacttcagatcgccggggagtggcctgtacagcaacctccagcagtacgatctcccgtaccccgaggccatttttgaactcccattcttctttcacaaccccaagccctttttcactttggccaaggagctgtaccctggaaactacaagcccaacgtcactcactactttctccggctgcttcatgacaaggggctgcttctgcggctctacacgcagaacatcgatgggcttgagagagtgtcgggcatccctgcctcaaagctggttgaagctcatggaacctttgcctctgccacctgcacagtctgccaaagacccttcccaggggaggacattcgggctgacgtgatggcagacagggttccccgctgcccggtctgcaccggcgttgtgaagcccgacattgtgttctttggggagccgctgccccagaggttcttgctgcatgtggttgatttccccatggcagatctgctgctcatccttgggacctccctggaggtggagccttttgccagcttgaccgaggccgtgcggagctcagttccccgactgctcatcaaccgggacttggtggggcccttggcttggcatcctcgcagcagggacgtggcccagctgggggacgtggttcacggcgtggaaagcctagtggagcttctgggctggacagaagagatgcgggaccttgtgcagcgggaaactgggaagcttgatggaccagacaaataggatgatggctgcccccacacaataaatggtaacataggagacatccacatcccaattctgacaagacctcatgcctgaagacagcttgggcaggtgaaaccagaatatgtgaactgagtggacacccgaggctgccactggaatgtcttctcaggccatgagctgcagtgactggtagggctgtgtttacagtcagggccaccccgtcacatatacaaaggagctgcctgcctgtttgctgtgttgaactcttcactctgctgaagctcctaatggaaaaagctttcttctgactgtgaccctcttgaactgaatcagaccaactggaatcccagaccgagtctgctttctgtgcctagttgaacggcaagctcggcatctgttggttacaagatccagacttgggccgagcggtccccagccctcttcatgttccgaagtgtagtcttgaggccctggtgccgcacttctagcatgttggtctcctttagtggggctatttttaatgagagaaaatctgttctttccagcatgaaatacatttagtctcctcaaagggactgcaggtgttgacatgagttggaaagggaaccctgggatacgtggcgtcccctctattggaacagtctgaggactgaaggcatttgtccctggatttattggagacggcccagctcctccctctgaaggtggtcacattctgttgactctccatactcagcctctcctccagaaacagatctgttccagaacattccagcactttctatctggcctccttgtccccacactacgcccccccaccctcgccagggcttcctctagtgacactgttagagctaatctctgagacagggaaggcattactcacttaaaacccaggctgagtcctggccacctgctggattgtgacataggaggtggaatccactgaactgctacttctgcacaggctccttctcctggggctgtacccaggcccagccctgatggctcaccctgtcaggcaccagctgctccctcctgggctctcacccacctgcacatcctccttcctagcatcacattacctgcgtgtttccccagacaaaagcacttcccattcttgaaccttgcctaccctgggctgagctgacggcaatagatttaatgacagtgactcccaggaagggggtcctgtgactttgcgccttaataagaacaaaaggtggaattggtgacctaggaaaactgttgaattctaaaaagaatgaagttagtttctaaccctagttaatgttccttttttattttttgagtcttgccctgtcactcagggtggagtgcggtgttatgatctcagctcactgcaacttccgcctcccgggtttaagcgattctcctgggtagctgggattacaggtgtgtcccaccacacctagcacatgggcatatttgtaatagagacaaggttttgctatgttggccaggctggtctcgaactcctggcttcaagtgatccacccacctcggcctcccaaagtgctgggattacaggcatgagccactgtgcctggcccctttatttgataatttacacatacatttttgtccaaaactcttctttatttcaagatgatgtttctgtggctatgtgtggtatgtggtataaatctcaatctatggtc

SEQ ID NO: 143 - DNA, 1617 bp, Homo sapiens
atggcggggcccccggccctacccccgccggagacggcggcggccgccaccacggcggccgccgcctcgtcgtccgccgcttccccgcactaccaagagtggatcctggacaccatcgactcgctgcgctcgcgcaaggcgcggccggacctggagcgcatctgccggatggtgcggcggcggcacggcccggagccggagcgcacgcgcgccgagctcgagaaactgatccagcagcgcgccgtgctccgggtcagctacaaggggagcatctcgtaccgcaacgcggcgcgcgtccagccgccccggcgcggagccaccccgccggccccgccgcgcgccccccgcggggcccccgccgccgccgccgccgccgcgccgccgcccacgcccgccccgccgccaccgcccgcgcccgtcgccgccgccgccccggcccgggcgccccgcgcggccgccgccgccgccacagcgcccccctcgcctggccccgcgcagccgggcccccgcgcgcagcgggccgcgcccctggccgcgccgccgcccgcgccagccgctcccccggcggtggcgcccccggccggcccgcgccgcgcccccccgcccgccgtcgccgcccgggagccgccgctgccgccgccgccacagccgccggcgccgccacagcagcagcagccgccgccgccgcagccacagccgccgccggaggggggcgcggtgcgggccggcggcgcggcgcggcccgtgagcctgcgggaagtcgtgcgctacctcgggggcagcggcggcgccggcggtcgcctaacccgcggccgcgtgcaggggctgctggaggaggaggcggcggctcgaggccgtctggagcgcacccgtctcggagcgcttgcgctgccccgcggggacaggcccggacgggcgccgccggccgccagcgcccgcccgtctcgcagcaagagaggtggagaagagcgagtacttgagaaagaagaggaagaagatgatgatgaagatgaagatgaagaagatgatgtgtcagagggctctgaagtgcccgagagtgaccgtcctgcaggtgcccagcaccaccagcttaacggcgagcggggacctcagagtgccaaggagagggtcaaggagtggaccccctgcggaccgcaccagggccaggatgaagggcgggggccagccccgggcagcggcacccgccaggtgttctccatggcagccatgaacaaggaagggggaacagcttctgttgccaccgggccagactccccgtcccccgtgcctttgcccccaggcaaaccagccctacctggggccgacgggaccccctttggctgtccgcccgggcgcaaagagaagccatctgatcccgtcgagtggaccgtgatggatgtcgtcgaatattttactgaggctggattcccggagcaggcgacagctttccaagagcaggaaattgatggcaaatctttgctgctcatgcagcgcacagatgtgctcaccggcctgtccatccgcctcgggccagccctgaaaatctacgagcaccacatcaaggtgcttcagcaaggccactttgaggatgatgaccccgatggcttcttaggctga

SEQ ID NO: 144 - DNA, 1340 bp, Homo sapiens
ctcttcccattggctgagaagggtcatgaggatgaactgtgcagtcacctggcaggaaccggaacccgcggttataaagtaaaggaacccgagatctgcgcaggggttccctttgccgatttctctcacctcacctttcaaacctaaactcgagcctactgttcaccggcctagcattgctctcgccatggctctcagcgatgctgacgtgcaaaagcaggcagaagaagagttcaacatagagaaaggtcggcttgtgcaaacccaaagactaaagattatggaatattatgagaagaaagagaaacagattgagcagcagaagaaaattcagatgtccaatttgatgaatcaagcgagactcaaagtcctcagagcaagagatgaccttatcacagacctactaaatgaagcaaaacagagactcagcaaggtggtaaaagatacaaccaggtaccaagtgctgctggatggactggttctccagggtttgtaccagttgctggagccccgaatgattgttcgttgcaggaaacaagatttccctctggtaaaggctgcagtgcagaaggcaattcctatgtacaaaattgccaccaaaaacgatgttgatgtccaaattgaccaggagtcctacctgcctgaagacatagctggtggagttgagatctataatggagatcgtaaaataaaggtttccaacaccctggaaagccggctggatctcatagcccagcagatgatgccagaagtccggggagccttgtttggtgcaaatgccaacaggaagtttttggactaagccttcaggaggtggagctcgtcgtcagctctcctgctgtgatgtggaagcttctgatatttgaagaaacacgaatgtctctgtagcttcctcttcactgccccagtattgctctgtatttatcagcgatgcccctctgtcactcatgccttgcctaattgttcacaatggtggaaagcttcatgtaatatgatcaggacccacctccagttcttctgaaagtgtgacagtgtccagccggttctgcagcactaggggagggggcagatggtggttgcatgggcttcctgggtctccactctccgtctggcctaaaggtgatgtatttggtgtttggccctgcagtccccactcttgaggcttaaggcgcatgtggcacaccactccttccagcagtagtcgctttactgttacctgtttaggcctagaagttttccctcatctgtaaatgtgatttaaaatctaagccatgaatatgctttatttattaaaagagttatgcggatttaatgtgatttctagtgtaaggcactacaaa

SEQ ID NO: 145 - DNA, 1316 bp, Homo sapiens
ctcttcccattggctgagaagggtcatgaggatgaactgtgcagtcacctggcaggaaccggaacccgcggttataaagtaaaggaacccgagatctgcgcaggggttccctttgccgatttctctcacctcacctttcaaacctaaactcgagcctactgttcaccggcctagcattgctctcgccatggctctcagcgatgctgacgtgcaaaagcagataaagcatatgatggctttcattgaacaagaagccaatgagaaagcagaagaaatagatgcaaaggcagaagaagagttcaacatagagaaaggtcggcttgtgcaaacccaaagactaaagattatggaatattatgagaagaaagagaaacagattgagcagcagaagaaaattcagatgtccaatttgatgaatcaagcgagactcaaagtcctcagagcaagagatgaccttatcacaggtttgtaccagttgctggagccccgaatgattgttcgttgcaggaaacaagatttccctctggtaaaggctgcagtgcagaaggcaattcctatgtacaaaattgccaccaaaaacgatgttgatgtccaaattgaccaggagtcctacctgcctgaagacatagctggtggagttgagatctataatggagatcgtaaaataaaggtttccaacaccctggaaagccggctggatctcatagcccagcagatgatgccagaagtccggggagccttgtttggtgcaaatgccaacaggaagtttttggactaagccttcaggaggtggagctcgtcgtcagctctcctgctgtgatgtggaagcttctgatatttgaagaaacacgaatgtctctgtagcttcctcttcactgccccagtattgctctgtatttatcagcgatgcccctctgtcactcatgccttgcctaattgttcacaatggtggaaagcttcatgtaatatgatcaggacccacctccagttcttctgaaagtgtgacagtgtccagccggttctgcagcactaggggagggggcagatggtggttgcatgggcttcctgggtctccactctccgtctggcctaaaggtgatgtatttggtgtttggccctgcagtccccactcttgaggcttaaggcgcatgtggcacaccactccttccagcagtagtcgctttactgttacctgtttaggcctagaagttttccctcatctgtaaatgtgatttaaaatctaagccatgaatatgctttatttattaaaagagttatgcggatttaatgtgatttctagtgtaaggcactacaaa

SEQ ID NO: 146 - DNA, 1406 bp, Homo sapiens
ctcttcccattggctgagaagggtcatgaggatgaactgtgcagtcacctggcaggaaccggaacccgcggttataaagtaaaggaacccgagatctgcgcaggggttccctttgccgatttctctcacctcacctttcaaacctaaactcgagcctactgttcaccggcctagcattgctctcgccatggctctcagcgatgctgacgtgcaaaagcagataaagcatatgatggctttcattgaacaagaagccaatgagaaagcagaagaaatagatgcaaaggcagaagaagagttcaacatagagaaaggtcggcttgtgcaaacccaaagactaaagattatggaatattatgagaagaaagagaaacagattgagcagcagaagaaaattcagatgtccaatttgatgaatcaagcgagactcaaagtcctcagagcaagagatgaccttatcacagacctactaaatgaagcaaaacagagactcagcaaggtggtaaaagatacaaccaggtaccaagtgctgctggatggactggttctccagggtttgtaccagttgctggagccccgaatgattgttcgttgcaggaaacaagatttccctctggtaaaggctgcagtgcagaaggcaattcctatgtacaaaattgccaccaaaaacgatgttgatgtccaaattgaccaggagtcctacctgcctgaagacatagctggtggagttgagatctataatggagatcgtaaaataaaggtttccaacaccctggaaagccggctggatctcatagcccagcagatgatgccagaagtccggggagccttgtttggtgcaaatgccaacaggaagtttttggactaagccttcaggaggtggagctcgtcgtcagctctcctgctgtgatgtggaagcttctgatatttgaagaaacacgaatgtctctgtagcttcctcttcactgccccagtattgctctgtatttatcagcgatgcccctctgtcactcatgccttgcctaattgttcacaatggtggaaagcttcatgtaatatgatcaggacccacctccagttcttctgaaagtgtgacagtgtccagccggttctgcagcactaggggagggggcagatggtggttgcatgggcttcctgggtctccactctccgtctggcctaaaggtgatgtatttggtgtttggccctgcagtccccactcttgaggcttaaggcgcatgtggcacaccactccttccagcagtagtcgctttactgttacctgtttaggcctagaagttttccctcatctgtaaatgtgatttaaaatctaagccatgaatatgctttatttattaaaagagttatgcggatttaatgtgatttctagtgtaaggcactacaaa

SEQ ID NO: 147 - DNA, 2482 bp, Homo sapiens
gacttccggccgcgcagcggtgggctgagctaaaatggctgaggagagagtcgcgacgagaactcaatttcctgtatctactgagtctcaaaaaccccggcagaaaaaagctccagagtttcctattttggagaagcagaactggttgattcatcttcattatatccggaaagattatgaagcctgcaaggctgttatcaaagaacagcttcaagagactcagggattgtgtgaatatgctatctatgtccaagcattgatatttcgcctagaaggaaatatccaagaatccctagaactcttccagacatgtgcagttcttagtcctcagagtgctgataacctcaagcaggtggccagatctttatttcttttgggaaaacataaagctgccattgaagtatataatgaagcagctaaactcaaccagaaagattgggagatcagccataacctaggagtttgctacatatacctgaagcagttcaacaaggcacaagaccagttgcacaatgccctgaatcttaataggcacgatctgacttatataatgctggggaagatccacttgctggagggagacttggacaaggccattgaagtctacaagaaagcagtggagttctcaccagaaaatacagagcttcttacaactttaggattactctacttacagctcggcatttaccagaaggcatttgaacatcttggcaatgcactgacttatgaccctaccaactacaaggccatcttggcagcaggcagcatgatgcagacccacggggactttgatgttgccctcaccaaatacagagttgtggcttgtgctgttccagaaagtcctccactctggaataacattggaatgtgtttctttggcaagaagaaatatgtggcggccatcagctgcctgaaacgagccaactacttggcacccttcgattggaagattctgtataatttgggccttgtccatttgaccatgcagcagtatgcatcagcttttcattttctcagtgcggccatcaacttccagccaaagatgggggagctctacatgctcttggcagtggctctgaccaatctggaagatatagaaaatgccaagagagcctacgcagaagcagtccacctggataagtgtaaccctttagtaaacctgaactatgctgtgctgctgtacaaccagggcgagaagaagaacgccctggcccaatatcaggagatggagaagaaagtcagcctactcaaggacaatagctctctggaatttgactctgagatggtggagatggctcagaagttgggagctgctctccaggttggggaggcactggtctggaccaaaccagttaaagatcccaaatcaaagcaccagaccacttcaaccagcaaacctgccagtttccagcagcctctgggctctaatcaagctctaggacaggcaatgtcttcagcagctgcatacaggacgctcccctcaggtgctggaggaacatcccagttcacaaagcccccatctcttcctctggagccagagcctgcggtggaatcaagtccaactgaaacatcagaacaaataagagagaaataagaatagaatgaatgaccccaaaatagggttttcttgggcgaggatgtgctggattaggaaaggtgacatgacacaggcagagcagagtggcacccaccacagaatacagtgtgtgttattacgaggagccagcagttgagcctaaggtccttctacctacctggtattggcatttgaggtcggaaaccctctactgccccataagccaggaaaagtgaaaagagaacacagttcctttaagaactggcagcaaggcttgaggccttatgtatgtagctgagtcagcaaggtacatgatgctgtctgctttcaaaaggacttttctctcctagctgactgactccttccttagttcaaggaacagctgagacagacctctgctgagtagctctgtgatgacaaagccttggtttaactgaggtgatcctcaggttgtgaggtttattagtccccaaggcaaacacaaatattagattaataatccaactttaatagtatacatttaaaagaaaaaaaacaaaagccctggaagttgaggccaagcctgctgagtattgcagctgcatttgcccaaagggaatccagaacaagtccctccctgtattttgttcttgagaggggtcagtctagaagctagatcctatcaggatgaggagcagcagcccagggcttgtctggatcagcaccaacgattttaaagaaaaaaggaagagtttcttagatgagtaattgttattgaagatagtcagtgataaccactgaccagatgctatcaatacactatgtgtcctttttagaataaagattacatatcatcattcctttggggaaaattgttattcaggtataaaaacaagagatcataataaaaacctaaaagaacctatg

SEQ ID NO: 148 - DNA, 303 bp, Homo sapiens
atgcgttcccaagtctccgccctcctgaccgcagcggctagaggttccattgcagacccggaggccgtggctgtggttcgcggcggtgctgtcgcgggcgccctggcgcagcccacgcaggggctcctgagggtccgcgaggccgggaggtccgggggtcgggaggtcccggggtcgggaagtcggtggaccctgcaggccagtggggaggggagacataagacatcagtcagtacatgtgaggtgtgcattggattgatccagaaagtcaggacgactccaagtggaaaggcctccaggtaa

SEQ ID NO: 149 - DNA, 2158 bp, Homo sapiens
cgcggatagaggagcgggcgccgggaccgggaatccccgagctgcgccttctggggacgcggcccgggctacgtcggggccgtccgtggggagcggggtcctggaggctgcgcggggctgaggcggcctcgatttgggaactgcctgaagatgccggcctaagcctggagtccaggcatggacttccccacaatttcccgatccccttcggggcctccagccatggacttggaggggcccagggacattcttgtgccttcggaggacctcacccctgacagccagtgggaccctatgccaggaggccccggcagcctcagtcggatggaacttgatgagtcaagccttcaggagctggtgcagcagtttgaagctctgccaggcgatctggtgggcccatccccaggtggagccccctgtcccctacacattgccacaggccatggcctggcctcccaggagattgctgatgcccacgggctcctgtctgccgaagctggccgggatgacctgctgggcctcttgcactgcgaggaatgcccgccttcccagactggtcctgaagagcctctagagcctgccccccgactgttgcagccccctgaggacccagatgaggattctgactccccagaatgggtggagggggcctctgctgagcaggagggcagcaggagctcaagcagttccccggaaccctggctggagacggtgcctctagtcacacctgaagagccacccgctggtgcccagagccccgagaccctggcttcctaccctgccccccaggaggtgcctggtccctgtgaccatgaagacctcctggacggtgtcatatttggggccaggtacctggggtccacccagctggtgtcggaacggaacccgcccaccagcacgcgcatggcccaggcccgggaggccatggaccgcgtcaaggcccccgatggggagacccagcccatgacggaggtggacctgttcgtctccaccaagaggatcaaggtcttgacagcggactcccaggaggccatgatggaccacgccctgcataccatctcctacacagccgacatcggctgcgtgctggtgctgatggcgcggcggcggctggcacggaggccggcaccccaggaccacggccgccgcctctacaagatgctctgccacgtattctacgcggaggacgcccagctcatcgcccaggccattggccaggccttcgccgccgcctacagccagttcctacgggaaagcggtattgaccccagccaggtgggcgtgcacccgagcccaggcgcctgccacctccataatggggacctggaccacttctccaacagtgacaactgccgggaggtgcacctcgagaagcggcgaggggagggcctgggcgtggccctggtggagtcgggctggggctccctgctgcccacagccgtcatcgccaacctgctgcacggggggcctgctgagcgctcgggggccctcagcatcggggaccgcctgaccgccatcaacgggaccagcctggtggggctgcccctggctgcgtgccaggccgctgtccgcgagacgaagtcgcagacgtcggtgacactcagcatcgtccactgccctcccgtcaccaccgccatcatccaccggccccacgcccgcgagcagctgggcttctgcgtggaggacggcatcatctgcagcctcctccgtggtggcatcgccgagcgtgggggcatccgcgtcggccaccgcatcattgagatcaatgggcagagtgtggtggccacgccacacgcccgcatcatcgagctgctcaccgaggcctatggcgaggtgcatatcaagacgatgccagctgccacatatcgcctccttacaggccaggagcagcccgtgtacctgtgaccacctcatcccttgcctgccactgtgccttcgcctccatggccccggagccccatcctgggcctgccctggctggccaggaccccagcggttcttggtcctgtatgatttcctaatataaaaacagtaaaagcttatgcatttggcaaagtctcggatcagggtctacgggaccgaggaccttgtccttcctggaagccactagaagccggtgctgtgaaaatactctgtttattaaagaccaggcggaggg

SEQ ID NO: 150 - DNA, 2919 bp, Homo sapiens
agcagtccccggtgtcggggcaggaggcacgcgcgcggctgaggcgaggtcgctcggcgcagctgttgcggggccatggcggggaccgcgctcaagaggctgatggccgagtacaaacaattaacactgaatcctccggaaggaattgtagcaggccccatgaatgaagagaacttttttgaatgggaggcattgatcatgggcccagaagacacctgctttgagtttggtgtttttcctgccatcctgagtttcccacttgattacccgttaagtcccccaaagatgagatttacctgtgagatgtttcatcccaacatctaccctgatgggagagtctgcatttccatcctccacgcgccaggcgatgaccccatgggctacgagagcagcgcggagcggtggagtcctgtgcagagtgtggagaagatcctgctgtcggtggtgagcatgctggcagagcccaatgacgaaagtggagctaacgtggatgcgtccaaaatgtggcgcgatgaccgggagcagttctataagattgccaagcagatcgtccagaagtctctgggactgtgagacctggcctcgcacaggcgcgcacacaccgccaagcagctcagcattctcccccggcacacttagtgacagtgatgctctgtgctggtaccaaacaaggcagacttgcaagaaccatggcatcttttttttttttcaaacctttcctacttcaaacaggcttctcttctgaaatgatgacttaatgtcgaatattgacagcttactgcagttttacagtattcctcacaaagggcttcaggtagattatcagagctgtcagcactacctctccccgctgaaaccagcagttcatggcttcctgtggattccctccctccctggagtgttgagggggttgtacctgccagacttccaggggacgatggaatacccagaacgctccttctgaagaaatggggccctgtagctgcagcacaggggaagggcccggcaccctttctgggtccttcctggttccctgtgggccccatgaggagtccattacttcctttcttccttcatattttacaggcagatgcttttcttataatctaattacatcttttcatttgttatatattacaaaccatcacacttagaaatacttccaggaaatgcttttttgaagtgtgaattaataagaaatggggtaaatagaaaagaaatttattgctgattggccaggtgcggtggttcgtgcctgtaatcccagctctttgggaggccaaggcaggtagatcacaaggtcaggaaattgagaccatcctggctaatacagtgaaaccccatgtctgctaaaattacaaaaaattagctgggcgtggtggtgcacgcctgtagtctcagctactcaggaggctgaggcaggagaatcgcttgaacccgggaggcagaggtagcagtgagctgaagtcccgccactgcactccagcctgggcaacagagcgagactcagtctcaaaaagaaaaaagaaatttattgctgatcacaaggacagacagttttttcccgaccatactcatcaaagatttacgtttgtatattagtaactagtgcattactagagcaggtgcaggtgaggtctttaaagtttcaatgaaagtttcttctggatctacagaaaaaatttttttttttcaatctaaaaactggaaattctagggtttttgtacattttggatgcactgggaatttattagcacaaaatcattctttgcaactcaaaattcagaagggactctaccatatcttagctcagagcacagaggagtgccttatccccacacttgactgggctgtggaggtgggcatgtgggcccctgggcccaggctggggacagagcccttgttttgtgacttaggattttgatgtggttcccatgttctctaacagggccagctgagcagcacaggccaggaggccacagtgtaagcaataacagatctgccacatgcagaagcaaatatcaggcctgtcgcacacgggcggcatttaaataggaatttctatttttgaaataagggatggtctatgaggcatacagtagatttgatgtgatccttttctccctcccttccataatggatcgtggtctgtgtgactgaacccacacagagtgtcatgggtgacagtttctggttgaagtagctccacgcctggcttctgtggacagcagattcttttccttctcacaaggggctcatttaaaatttggaggctgggtgctgtggctcacgcctgcaatcccagcactttgggagactgaggcgggcggatcatgaggtcaggagatcgcgaccatcctggctaacagtgaaaccctgtctccactaaaaatacaaaaaattagccgggcgtggtggcgggcgcctgtagtcccagctactctgaagactgaggcaggagaatggcgtgaacccaggaggcggagcttgcagtgagctgagatcacgccactgcactccagcctgggcaacagagtgagactctgtctcaaaaaaaaaaaaaaaaaaaatggaacgcagggcaagaactcgtatttggaaggagatgggggaaaggagcggtattatacctatgttgtatttgcaggcaaatgagatggagccctctctgtaaagaagagtcatttgtgcaagtagacggggtctgtgggtgcaggccctggaggggcacacaattgcctggaggcttctgtgagatcgggagagggaggagaggcagtctcttgacaaaataaagtatttttattcatttgtatttattaaatgaaaaaacaatcccatggtgtccctgttgtgtggtggaacctaatgactgttgaaataaagttctgtgttttccctgccctgcaaaaaaaaaa

SEQ ID NO: 151 - DNA, 3034 bp, Homo sapiens
agcagtccccggtgtcggggcaggaggcacgcgcgcggctgaggcgaggtcgctcggcgcagctgttgcggggccatggcggggaccgcgctcaagaggctgatggccgagtacaaacccttgagaacgtgcagtgagagcttgaggaagaaggcctgacttgctgctgcggaattaggagggaaaagtgtatgcgttaaaaggggaaaggctcgttggtggagctttgaaagaattaacactgaatcctccggaaggaattgtagcaggccccatgaatgaagagaacttttttgaatgggaggcattgatcatgggcccagaagacacctgctttgagtttggtgtttttcctgccatcctgagtttcccacttgattacccgttaagtcccccaaagatgagatttacctgtgagatgtttcatcccaacatctaccctgatgggagagtctgcatttccatcctccacgcgccaggcgatgaccccatgggctacgagagcagcgcggagcggtggagtcctgtgcagagtgtggagaagatcctgctgtcggtggtgagcatgctggcagagcccaatgacgaaagtggagctaacgtggatgcgtccaaaatgtggcgcgatgaccgggagcagttctataagattgccaagcagatcgtccagaagtctctgggactgtgagacctggcctcgcacaggcgcgcacacaccgccaagcagctcagcattctcccccggcacacttagtgacagtgatgctctgtgctggtaccaaacaaggcagacttgcaagaaccatggcatcttttttttttttcaaacctttcctacttcaaacaggcttctcttctgaaatgatgacttaatgtcgaatattgacagcttactgcagttttacagtattcctcacaaagggcttcaggtagattatcagagctgtcagcactacctctccccgctgaaaccagcagttcatggcttcctgtggattccctccctccctggagtgttgagggggttgtacctgccagacttccaggggacgatggaatacccagaacgctccttctgaagaaatggggccctgtagctgcagcacaggggaagggcccggcaccctttctgggtccttcctggttccctgtgggccccatgaggagtccattacttcctttcttccttcatattttacaggcagatgcttttcttataatctaattacatcttttcatttgttatatattacaaaccatcacacttagaaatacttccaggaaatgcttttttgaagtgtgaattaataagaaatggggtaaatagaaaagaaatttattgctgattggccaggtgcggtggttcgtgcctgtaatcccagctctttgggaggccaaggcaggtagatcacaaggtcaggaaattgagaccatcctggctaatacagtgaaaccccatgtctgctaaaattacaaaaaattagctgggcgtggtggtgcacgcctgtagtctcagctactcaggaggctgaggcaggagaatcgcttgaacccgggaggcagaggtagcagtgagctgaagtcccgccactgcactccagcctgggcaacagagcgagactcagtctcaaaaagaaaaaagaaatttattgctgatcacaaggacagacagttttttcccgaccatactcatcaaagatttacgtttgtatattagtaactagtgcattactagagcaggtgcaggtgaggtctttaaagtttcaatgaaagtttcttctggatctacagaaaaaatttttttttttcaatctaaaaactggaaattctagggtttttgtacattttggatgcactgggaatttattagcacaaaatcattctttgcaactcaaaattcagaagggactctaccatatcttagctcagagcacagaggagtgccttatccccacacttgactgggctgtggaggtgggcatgtgggcccctgggcccaggctggggacagagcccttgttttgtgacttaggattttgatgtggttcccatgttctctaacagggccagctgagcagcacaggccaggaggccacagtgtaagcaataacagatctgccacatgcagaagcaaatatcaggcctgtcgcacacgggcggcatttaaataggaatttctatttttgaaataagggatggtctatgaggcatacagtagatttgatgtgatccttttctccctcccttccataatggatcgtggtctgtgtgactgaacccacacagagtgtcatgggtgacagtttctggttgaagtagctccacgcctggcttctgtggacagcagattcttttccttctcacaaggggctcatttaaaatttggaggctgggtgctgtggctcacgcctgcaatcccagcactttgggagactgaggcgggcggatcatgaggtcaggagatcgcgaccatcctggctaacagtgaaaccctgtctccactaaaaatacaaaaaattagccgggcgtggtggcgggcgcctgtagtcccagctactctgaagactgaggcaggagaatggcgtgaacccaggaggcggagcttgcagtgagctgagatcacgccactgcactccagcctgggcaacagagtgagactctgtctcaaaaaaaaaaaaaaaaaaaatggaacgcagggcaagaactcgtatttggaaggagatgggggaaaggagcggtattatacctatgttgtatttgcaggcaaatgagatggagccctctctgtaaagaagagtcatttgtgcaagtagacggggtctgtgggtgcaggccctggaggggcacacaattgcctggaggcttctgtgagatcgggagagggaggagaggcagtctcttgacaaaataaagtatttttattcatttgtatttattaaatgaaaaaacaatcccatggtgtccctgttgtgtggtggaacctaatgactgttgaaataaagttctgtgttttccctgccctgcaaaaaaaaaa

SEQ ID NO: 152 - DNA, 3045 bp, Homo sapiens
gattcgcgtcccggaagcggcggtggcggccgcggcgtaggcggaggagattttcggacctgcgacttccgaacaaccctggcaggaggagcggcgttcagccgggggaggcctgaagaaacgctccggggcccagtggctctacccctgctcctgcccgaccctgccgcctccctcacggagccagcggccgggatgcagacatcagaacgtgaggggagtgggccggagctgagccccagcgtgatgcccgaggctcccctggagtctccaccttttcctaccaagtccccagcgtttgaccttttcaacttggttctctcctacaagaggctggagatctacctggaacccttgaaggatgcaggtgatggtgttcgatacttgctcaggtggcagatgcctttgtgttccttgctgacctgcctgggcctcaacgtcttgttcctcactttgaatgagggtgcatggtactcagtaggtgccctgatgatttcagtgcccgccctgctgggctaccttcaggaggtttgccgggcacggctgcctgattccgagctgatgcggaggaagtatcatagcgtgaggcaggaggacctgcagagaggtcgcctgtctcgtcccgaggccgtggctgaggtgaagagcttcttgatccagctggaggccttcctgagccgcctgtgctgcacatgtgaagccgcctaccgcgtgctgcactgggagaaccccgtcgtgtcctcacagttctatggggctcttctgggcacagtctgcatgctgtatttgctgccactctgctgggttctcacccttttaaacagcacgctctttctggggaatgtggagttcttccgagttgtgtctgagtacagggcatctctgcagcagaggatgaacccaaagcaggaagagcatgcctttgagagtcctccaccaccagatgttggggggaaggatggtctgatggacagcacgcctgccctcacacccacggagagtctctcttcccaggacctcacaccgggcagcgtggaggaggctgaggaggctgagccagatgaagagtttaaagatgcgattgaggagacccacttggtggtgctggaggatgatgagggcgccccgtgcccagcagaggatgagctggccctgcaggacaacgggttcctgagcaagaatgaggtgctgcgcagcaaggtgtctcggctcacggagcggctccgcaagcgctaccccaccaacaacttcgggaactgcacgggctgctcggccaccttctcagtgctgaagaagaggcggagctgcagtaattgtggaaacagcttctgctctcgatgctgctccttcaaggtgcccaagtcctccatgggggccacagcccctgaagcccagagggagactgtgtttgtgtgtgcctcgtgtaaccagaccttgagcaagtgagaagagaggccagggtccaaccaggcacccgtccttgggaccagcagtagaccccccactctccccacccctggcccactgtggtgtgtgctgggcaaatgtggcctgaatgctaggtaggcttccccttccttcctcactctctccagctggattctggagctgttctccatccatgagagtggctggcaatggctgctctcaatcccttgagggagaagagcccctggagggcctggcatgtttgtcctgctctgcctgggactgagcgagtggacttagggctgggcaggcagtagccaccagagggcagcagcgaactaggccaggcctgactggggtctgaagatcagggtcagtgtggctgtgcctgggaattccagacctgaggttgggaaaagaggtttttctcctgcagggtactgggccaggccctcagcctcagagagcctgcagaagggcttgggagtgccacaccccatctctgctgattgaatgtccctccaggcaccaggatctcatcatttccccatcagagggtgtggccaggcctaacaagaccatgggtgcttctagaaacagggttgaagttcccagattccctgagaggagaatgtgtataggagggtttggctgagtccttcagcgttaagtggaggaaagcttggggaagccccaatagctggacagacctcagcctcccctcgaagacacctcaattcacagactctcagcccacacaatgccccagtgtccccagctccgctggagcagctgcagggcacttggatcacaacttctgcaccctctgtccagagtctagggcagtcctccactggcccagcactccagtttcctttccctgcctcttgtccaatggagtgggaggccaggtgagtggagcagaggtcctgaagcccttgacccctgggggcctgggtagtgtaggatctcgctgggctgggtcctggattccagggctattccctggaggacagtctcagttatgggataaggccccctgggggtctccatttctttccaacagtttcatgttcactactggactcttacgggctcagtatctctcccttagccatgagctggctcaggcatcccttcccttccctggagctgccctgcctttctcaagtatttatttatttattgcatggttcctgggaacatgtggcacaagtaatgggatgaggaggaattgggggtgggggtcttctacctaggactcttccctggagtcatgggctgcctgggacccaggacccatgagggggctgagaggtttctacactcgaggagcaggggtccagagaggcaggctggggaggcaagggacccatcctaggcccgctttcttgccgagccaagcagcttagctggggctgtgcagccaggggcttacccaggccagtggaggtgccacagccctggggagccagacaggctttggtatcgtatcgcctctgtgtccttttaagagaggagagttcagtaccccgtgctttctttacactggagaggaactaaaaggatctctgtgtctatggagaattgtcaataaaaaggcctcaagcttcaaaa

SEQ ID NO: 153 - DNA, 3009 bp, Homo sapiens
gattcgcgtcccggaagcggcggtggcggccgcggcgtaggcggaggagattttcggacctgcgacttccgaacaaccctggcaggaggagcggcgttcagccgggggaggcctgaagaaacgctccggggcccagtggctctacccctgctcctgcccgaccctgccgcctccctcacggagccagcggccgggatgcagacatcagaacgtgaggggagtgggccggagctgagccccagcgtgatgcccgaggctcccctggagtctccaccttttcctaccaagtccccagcgtttgaccttttcaacttggttctctcctacaagaggctggagatctacctggaacccttgaaggatgcaggtgatggtgttcgatacttgctcaggtggcagatgcctttgtgttccttgctgacctgcctgggcctcaacgtcttgttcctcactttgaatgagggtgcatggtactcagtaggtgccctgatgatttcagtgcccgccctgctgggctaccttcaggaggtttgccgggcacggctgcctgattccgagctgatgcggaggaagtatcatagcgtgaggcaggaggacctgcagagaggtcgcctgtctcgtcccgaggccgtggctgaggtgaagagcttcttgatccagctggaggccttcctgagccgcctgtgctgcacatgtgaagccgcctaccgcgtgctgcactgggagaaccccgtcgtgtcctcacagttctatggggctcttctgggcacagtctgcatgctgtatttgctgccactctgctgggttctcacccttttaaacagcacgctctttctggggaatgtggagttcttccgagttgtgtctgagtacagggcatctctgcagcagaggatgaacccaaagcaggaagagcatgcctttgagagtcctccaccaccagatgttggggggaaggatggtctgatggacagcacgcctgccctcacacccacggaggacctcacaccgggcagcgtggaggaggctgaggaggctgagccagatgaagagtttaaagatgcgattgaggaggatgatgagggcgccccgtgcccagcagaggatgagctggccctgcaggacaacgggttcctgagcaagaatgaggtgctgcgcagcaaggtgtctcggctcacggagcggctccgcaagcgctaccccaccaacaacttcgggaactgcacgggctgctcggccaccttctcagtgctgaagaagaggcggagctgcagtaattgtggaaacagcttctgctctcgatgctgctccttcaaggtgcccaagtcctccatgggggccacagcccctgaagcccagagggagactgtgtttgtgtgtgcctcgtgtaaccagaccttgagcaagtgagaagagaggccagggtccaaccaggcacccgtccttgggaccagcagtagaccccccactctccccacccctggcccactgtggtgtgtgctgggcaaatgtggcctgaatgctaggtaggcttccccttccttcctcactctctccagctggattctggagctgttctccatccatgagagtggctggcaatggctgctctcaatcccttgagggagaagagcccctggagggcctggcatgtttgtcctgctctgcctgggactgagcgagtggacttagggctgggcaggcagtagccaccagagggcagcagcgaactaggccaggcctgactggggtctgaagatcagggtcagtgtggctgtgcctgggaattccagacctgaggttgggaaaagaggtttttctcctgcagggtactgggccaggccctcagcctcagagagcctgcagaagggcttgggagtgccacaccccatctctgctgattgaatgtccctccaggcaccaggatctcatcatttccccatcagagggtgtggccaggcctaacaagaccatgggtgcttctagaaacagggttgaagttcccagattccctgagaggagaatgtgtataggagggtttggctgagtccttcagcgttaagtggaggaaagcttggggaagccccaatagctggacagacctcagcctcccctcgaagacacctcaattcacagactctcagcccacacaatgccccagtgtccccagctccgctggagcagctgcagggcacttggatcacaacttctgcaccctctgtccagagtctagggcagtcctccactggcccagcactccagtttcctttccctgcctcttgtccaatggagtgggaggccaggtgagtggagcagaggtcctgaagcccttgacccctgggggcctgggtagtgtaggatctcgctgggctgggtcctggattccagggctattccctggaggacagtctcagttatgggataaggccccctgggggtctccatttctttccaacagtttcatgttcactactggactcttacgggctcagtatctctcccttagccatgagctggctcaggcatcccttcccttccctggagctgccctgcctttctcaagtatttatttatttattgcatggttcctgggaacatgtggcacaagtaatgggatgaggaggaattgggggtgggggtcttctacctaggactcttccctggagtcatgggctgcctgggacccaggacccatgagggggctgagaggtttctacactcgaggagcaggggtccagagaggcaggctggggaggcaagggacccatcctaggcccgctttcttgccgagccaagcagcttagctggggctgtgcagccaggggcttacccaggccagtggaggtgccacagccctggggagccagacaggctttggtatcgtatcgcctctgtgtccttttaagagaggagagttcagtaccccgtgctttctttacactggagaggaactaaaaggatctctgtgtctatggagaattgtcaataaaaaggcctcaagcttcaaaa

SEQ ID NO: 154 - DNA, 3030 bp, Homo sapiens
gattcgcgtcccggaagcggcggtggcggccgcggcgtaggcggaggagattttcggacctgcgacttccgaacaaccctggcaggaggagcggcgttcagccgggggaggcctgaagaaacgctccggggcccagtggctctacccctgctcctgcccgaccctgccgcctccctcacggagccagcggccgggatgcagacatcagaacgtgaggggagtgggccggagctgagccccagcgtgatgcccgaggctcccctggagtctccaccttttcctaccaagtccccagcgtttgaccttttcaacttggttctctcctacaagaggctggagatctacctggaacccttgaaggatgcaggtgatggtgttcgatacttgctcaggtggcagatgcctttgtgttccttgctgacctgcctgggcctcaacgtcttgttcctcactttgaatgagggtgcatggtactcagtaggtgccctgatgatttcagtgcccgccctgctgggctaccttcaggaggtttgccgggcacggctgcctgattccgagctgatgcggaggaagtatcatagcgtgaggcaggaggacctgcagagaggtcgcctgtctcgtcccgaggccgtggctgaggtgaagagcttcttgatccagctggaggccttcctgagccgcctgtgctgcacatgtgaagccgcctaccgcgtgctgcactgggagaaccccgtcgtgtcctcacagttctatggggctcttctgggcacagtctgcatgctgtatttgctgccactctgctgggttctcacccttttaaacagcacgctctttctggggaatgtggagttcttccgagttgtgtctgagtacagggcatctctgcagcagaggatgaacccaaagcaggaagagcatgcctttgagagtcctccaccaccagatgttggggggaaggatggtctgatggacagcacgcctgccctcacacccacggaggacctcacaccgggcagcgtggaggaggctgaggaggctgagccagatgaagagtttaaagatgcgattgaggagacccacttggtggtgctggaggatgatgagggcgccccgtgcccagcagaggatgagctggccctgcaggacaacgggttcctgagcaagaatgaggtgctgcgcagcaaggtgtctcggctcacggagcggctccgcaagcgctaccccaccaacaacttcgggaactgcacgggctgctcggccaccttctcagtgctgaagaagaggcggagctgcagtaattgtggaaacagcttctgctctcgatgctgctccttcaaggtgcccaagtcctccatgggggccacagcccctgaagcccagagggagactgtgtttgtgtgtgcctcgtgtaaccagaccttgagcaagtgagaagagaggccagggtccaaccaggcacccgtccttgggaccagcagtagaccccccactctccccacccctggcccactgtggtgtgtgctgggcaaatgtggcctgaatgctaggtaggcttccccttccttcctcactctctccagctggattctggagctgttctccatccatgagagtggctggcaatggctgctctcaatcccttgagggagaagagcccctggagggcctggcatgtttgtcctgctctgcctgggactgagcgagtggacttagggctgggcaggcagtagccaccagagggcagcagcgaactaggccaggcctgactggggtctgaagatcagggtcagtgtggctgtgcctgggaattccagacctgaggttgggaaaagaggtttttctcctgcagggtactgggccaggccctcagcctcagagagcctgcagaagggcttgggagtgccacaccccatctctgctgattgaatgtccctccaggcaccaggatctcatcatttccccatcagagggtgtggccaggcctaacaagaccatgggtgcttctagaaacagggttgaagttcccagattccctgagaggagaatgtgtataggagggtttggctgagtccttcagcgttaagtggaggaaagcttggggaagccccaatagctggacagacctcagcctcccctcgaagacacctcaattcacagactctcagcccacacaatgccccagtgtccccagctccgctggagcagctgcagggcacttggatcacaacttctgcaccctctgtccagagtctagggcagtcctccactggcccagcactccagtttcctttccctgcctcttgtccaatggagtgggaggccaggtgagtggagcagaggtcctgaagcccttgacccctgggggcctgggtagtgtaggatctcgctgggctgggtcctggattccagggctattccctggaggacagtctcagttatgggataaggccccctgggggtctccatttctttccaacagtttcatgttcactactggactcttacgggctcagtatctctcccttagccatgagctggctcaggcatcccttcccttccctggagctgccctgcctttctcaagtatttatttatttattgcatggttcctgggaacatgtggcacaagtaatgggatgaggaggaattgggggtgggggtcttctacctaggactcttccctggagtcatgggctgcctgggacccaggacccatgagggggctgagaggtttctacactcgaggagcaggggtccagagaggcaggctggggaggcaagggacccatcctaggcccgctttcttgccgagccaagcagcttagctggggctgtgcagccaggggcttacccaggccagtggaggtgccacagccctggggagccagacaggctttggtatcgtatcgcctctgtgtccttttaagagaggagagttcagtaccccgtgctttctttacactggagaggaactaaaaggatctctgtgtctatggagaattgtcaataaaaaggcctcaagcttcaaaa

SEQ ID NO: 155 - DNA, 3248 bp, Homo sapiens
catgcgtgtcggagaggagagagcagagagagacacaggaacaagaacagcaaagggtagagcagacctgcgccaggggcgcacaacggccgtgtccacctcccggccccaagatggtgcttcccacaggcagccacgcgtagcagccagagacagctccagacatgtggctcttcttcgggatcactggattgctgacggcagccctctcaggtcatccatctccagccccacctgaccagctcaacaccagcagtgcagagagtgagctctgggagccaggggagcggcttccggtccgtctgacaaacgggagcagcagctgcagcgggacggtggaggtgcggctcgaggcgtcctgggagcccgcgtgcggggcgctctgggacagccgcgccgccgaggccgtgtgccgagcactgggctgcggcggggcggaggccgcctctcagctcgccccgccgacccctgagctgccgcccccgcctgcagccgggaacaccagcgtagcagctaatgccactctggccggggcgcccgccctcctgtgcagcggcgccgagtggcggctctgcgaggtggtggagcacgcgtgccgcagcgacgggaggcgggcccgtgtcacctgtgcagagaaccgcgcgctgcgcctggtggacggtggcggcgcctgcgccggccgcgtggagatgctggagcatggcgagtggggatcagtgtgcgatgacacttgggacctggaggacgcccacgtggtgtgcaggcaactgggctgcggctgggcagtccaggccctgcccggcttgcacttcatgcccggccgcgggcctatccaccgggaccaggtgaactgctcgggggccgaagcttacctgtgggactgcccggggctgccaggacagcactactgcggccacaaagaggacgcgggcgtggtgtgctcagagcaccagtcctggcgcctgacagggggcgctgaccgctgcgaggggcaggtggaggtacacttccgaggggtctggaacacagtgtgtgacagtgagtggtacccatcggaggccaaggtgctctgccagtccttgggctgtggaactgcggttgagaggcccaaggggctgccccactccttgtccggcaggatgtactactcatgcaatggggaggagctcaccctctccaactgctcctggcggttcaacaactccaacctctgcagccagtcgctggcagccagggtcctctgctcagcttcccggagtttgcacaatctgtccactcccgaagtccctgcaagtgttcagacagtcactatagaatcttctgtgacagtgaaaatagagaacaaggaatctcgggagctaatgctcctcatcccctccatcgttctgggaattctcctccttggctccctcatcttcatagccttcatcctcttgagaattaaaggaaaatatgccctccccgtaatggtgaaccaccagcacctacccaccaccatcccggcagggagcaatagctatcaaccggtccccatcaccatccccaaagaagttttcatgctgcccatccaggtccaggccccgccccctgaggactcagactctggctcggactcagactatgagcactatgacttcagcgcccagcctcctgtggccctgaccaccttctacaattcccagcggcatcgggtcacagatgaggaggtccagcaaagcaggttccagatgccacccttggaggaaggacttgaagagttgcatgcctcccacatcccaactgccaaccctggacactgcattacagacccgccatccctgggccctcagtatcacccgaggagcaacagtgagtcgagcacctcttcgggggaggattactgcaatagtcccaaaagcaagctgcctccatggaacccccaggtgttttcttcagagaggagttccttcctggagcagcccccaaacttggagctggccagcacccagccagccttttcagcagggcccccggctgatgacagctccagcacctcatccggggagtggtaccagaacttccagccaccaccccagcccccttcggaggagcagtttggctgtccagggtcccccagccctcagcctgactccaccgacaacgatgactacgatgacatcagcgcagcctaggccggggccagccgaggctcctggggtggctctgaccctctggcctcctgctctacctactccctttcccctttcccaccctcccagctcacctccccatggagctgagaggcctcccttggagagatggaaggaaacgttataccttgtacccctcggtctccatccatcaagccaaacctgctgccacagccctcccccggccccagatagcagccccagggaggatgctgcctccaagaggtgtgagccctctgtctcggggatgaacaagcagagtctgggctacctcttgacagctggtggaggggagttggggagctggactggatgactctggaggccccttccaaacctcaagtgtccggcgctttgattgcctgagtttctgacacttcagggcccagaggtcctgcgaggggcagaactggacccccatgccagtgctgctgcaggagggcccatatactagggtctgctgagctgttgtcactgatcggtgggcgctgggggggtagggtagcacaccagctgtcccaggctttgctccgggcggtaactgcacttgggcagggaatatagccttcctgggcacaactagctgacaatgacaggttgactgtgtacccccaaccaaggagctggggcccaaggccagtcctgccccagagacactccaagtccgccaggggcacagaccagttctgcagtgactgtccctggacaatgggtctttattctgagtttcctatggtttacaaagagggccccagcccagccccaccacagatcccagagataggggcccagtctccatgggggcaaggagcatagagatgttttccaggaaggggctcagaagctgcactaggccccgagtccccatgtgtctccttgaattgatgaggatgctcctgggagggatgcgtgactatgtggtgttgcacccggggctgcaaacgtctccgtgcagcccccagagagaggcccatgggctcagaccaggctttgttgtcctgctctgagtatcctgagattaaactgaattgctgaatgaaaaaaaaaaaaaaaaaaaaa

SEQ ID NO: 156 - DNA, 1563 bp, Homo sapiens
attttgaggaccgggctggtgcgactatactactgccggatggcaaatccgggatctcggctccgagaggctcatctggcaaaagggcgcggaaaccacgggggccctgagactgagtggtccctatcccacttctctctggggcggcgctgtagccagcggctgacaggcgcagcgaaaggcagccctctgctaagggtcccagcaccatggaggacccgaaccctgaagagaacatgaagcagcaggattcacccaaggagagaagtccccagagcccaggaggcaacatctgccacctgggggccccgaagtgcacccgctgcctcatcaccttcgcagattccaagttccaggagcgtcacatgaagcgggagcacccagcggacttcgtggcccagaagctgcagggggtcctcttcatctgcttcacctgcgcccgctccttcccctcctccaaagccctaatcacccaccagcgcagccacggtccagccgccaagcccaccctgccggttgcaaccactactgcccagcccaccttcccttgtcctgactgtggcaagacctttgggcaggctgtttctctgaggcggcaccgccagatgcatgaggtccgtgcccctcctggcaccttcgcctgcacagagtgcggtcaggactttgctcaggaagcagggctgcatcaacactacattcggcatgcccggggggagctctgagtgcagcttaagcctctccacggtgacgggtggctctgtggctggtaggactcacccatgatatggggtgcaggaactctgggggccctgaaggatttgcttccctcccctgggaaggcagagggctcttaataaagaggacccagaagattcttatttagagcttcagtctttggagcacacagggccttcgtgagacagtgaaatcagataataatgagatcttttgttaaaaaaaaaaaaaatgggaagggagtgcgggagagaaatggtttgtgtctcccttattcccagttaaatacctagctgcagattgtgccatcacccttcattcttcccagatggatgccatgggctatgggagcaaattgccctggacctttgcctgaatgggggcaggaaaggtgaggtgttgctggcctgtaatgccaccaggtgagttccagatgtggagcaacttgggcttttggggatggggcagcaaagttgggagctggaccccaattgagtgggggtagcaattggagtccttgtgtctcttttccaccccctgccatcctcacttagaggggccatggcactagatggcactagtcccccgataatttatgtctcgttgaaataattttgtatatcattctagtcctgaaatatttttttcatatgtgtaggtgaaatggtatgaataagctaacaggaatagtatctaaaaacagaaaacatccatattaaaatgtctaaacagggaaaaaaaaaaaaaaaaaaaaaaaaaaaaaaaaaaaaaaaaaaaaaaaaaaaaaaaaaaaaaaaaaaaaaaaaaaaaaaaaaaaaaaaaaaaaaa

SEQ ID NO: 157 - DNA, 3074 bp, Homo sapiens
ccgctctccgctgcgggggaggccatggcggaaccttcccaggccccgaccccggccccggctgcgcagccccggccccttcagtccccagcccctgccccaactccgactcctgcacccagcccggcttcagccccgattccgactcccaccccggcaccagcccctgccccagctgcagccccagccggcagcacagggactggggggcccggggtaggaagtgggggggccgggagcgggggggatccggctcggcctggcctgagccagcagcagcgcgccagtcagaggaaggcgcaagtccgggggctgccccgcgccaagaagcttgagaagctaggggtcttctcggcttgcaaggccaatggaacctgtaagtgtaatggctggaaaaaccccaagccccccactgcaccccgcatagatctgcagcagccagctgccaacctgagtgagctgtgccgcagttgtgagcaccccttggctgaccacgtatcccacttggagaatgtgtcagaggatgagataaaccgactgctggggatggtggtggatgtggagaatctcttcatgtctgttcacaaggaagaggacacagacaccaagcaggtctatttctacctcttcaagctactgcggaaatgcatcctgcagatgacccggcctgtggtggaggggtccctgggcagccctccatttgagaaacctaatattgagcagggtgtgctgaactttgtgcagtacaagtttagtcacctggctccccgggagcggcagacgatgttcgagctctcaaagatgttcttgctctgccttaactactgggagcttgagacacctgcccagtttcggcagaggtctcaggctgaggacgtggctacctacaaggtcaattacaccagatggctctgttactgccacgtgccccagagctgtgatagcctcccccgctacgaaaccactcatgtctttgggcgaagccttctccggtccattttcaccgttacccgccggcagctgctggaaaagttccgagtggagaaggacaaattggtgcccgagaagaggaccctcatcctcactcacttccccaaattcctgtccatgctggaggaggagatctatggggcaaactctccaatctgggagtcaggcttcaccatgccaccctcagaggggacacagctggttccccggccagcttcagtcagtgcagcggttgttcccagcacccccatcttcagccccagcatgggtgggggcagcaacagctccctgagtctggattctgcaggggccgagcctatgccaggcgagaagaggacgctcccagagaacctgaccctggaggatgccaagcggctccgtgtgatgggtgacatccccatggagctggtcaatgaggtcatgctgaccatcactgaccctgctgccatgctggggcctgagacgagcctgctttcggccaatgcggcccgggatgagacagcccgcctggaggagcgccgcggcatcatcgagttccatgtcatcggcaactcactgacgcccaaggccaaccggcgggtgttgctgtggctcgtggggctgcagaatgtcttttcccaccagctgccgcgcatgcctaaggagtatatcgcccgcctcgtctttgacccgaagcacaagactctggccttgatcaaggatgggcgggtcatcggtggcatctgcttccgcatgtttcccacccagggcttcacggagattgtcttctgtgctgtcacctcgaatgagcaggtcaagggttatgggacccacctgatgaaccacctgaaggagtatcacatcaagcacaacattctctacttcctcacctacgccgacgagtacgccatcggctacttcaaaaagcagggtttctccaaggacatcaaggtgcccaagagccgctacctgggctacatcaaggactacgagggagcgacgctgatggagtgtgagctgaatccccgcatcccctacacggagctgtcccacatcatcaagaagcagaaagagatcatcaagaagctgattgagcgcaaacaggcccagatccgcaaggtctacccggggctcagctgcttcaaggagggcgtgaggcagatccctgtggagagcgttcctggcattcgagagacaggctggaagccattggggaaggagaaggggaaggagctgaaggaccccgaccagctctacacaaccctcaaaaacctgctggcccaaatcaagtctcaccccagtgcctggcccttcatggagcctgtgaagaagtcggaggcccctgactactacgaggtcatccgcttccccattgacctgaagaccatgactgagcggctgcgaagccgctactacgtgacccggaagctctttgtggccgacctgcagcgggtcatcgccaactgtcgcgagtacaaccccccggacagcgagtactgccgctgtgccagcgccctggagaagttcttctacttcaagctcaaggagggaggcctcattgacaagtaggcccatctttgggccgcagccctgacctggaatgtctccacctcggattctgatctgatccttagggggtgccctggccccacggacccgactcagcttgagacactccagccaagggtcctccggacccgatcctgcagctctttctggaccttcaggcacccccaagcgtgcagctctgtcccagccttcactgtgtgtgagaggtctcctgggttggggcccagcccctctagagtagctggtggccagggatgaaccttgcccagccgtggtggcccccaggcctggtccccaagagctttggaggcttggattcctgggcctggcccaggtggctgtttccctgaggaccagaactgctcattttagcttgagtgatggcttcaggggttggaagttcagcccaaactgaagggggccatgccttgtccagcactgttctgtcagtctcccccaggggtggggggtatggggaccattcattccctggcattaatcccttagagggaataataaagctttttatttctctg

SEQ ID NO: 158 - DNA, 5139 bp, Homo sapiens
agtctgcgccgggcggcggtggcggcggagacccgaacatggcgaccgcgcgcaccttcgggcccgagcgggaagccgagccggccaaggaagcgcgcgtcgtgggctcggagcttgtggacacttatacggtttacatcatccaggtcactgatggcagccatgagtggacagtaaagcaccgctacagcgacttccatgacctgcatgaaaagctcgttgcagagagaaagattgataaaaatctgcttccgcccaaaaagataattgggaaaaactcaagaagcttggtggagaagagggagaaggatctggaggtctacctccagaagctcctggctgccttccctggcgtgacccccagagtactggcccacttcttgcattttcacttctatgagataaatggcatcaccgcggcactggctgaagagctctttgagaaaggagaacagctcctgggggccggcgaggtctttgccattggacccctgcagctgtatgccgtcacggagcagctgcagcagggaaagcccacgtgcgccagtggggatgccaagaccgacctcgggcacatcctggacttcacctgtcgccttaagtaccttaaggtttctggcacagaaggaccttttgggaccagcaacattcaggagcagctcctgccgttcgacctatcaatattcaagtccctgcatcaggtggagataagtcactgtgatgctaagcacatcagagggctggtcgcatcgaagcccaccttagccacgctgagtgtccgcttctcagcaacctcgatgaaggaagtccttgttcctgaagcctcagaatttgatgagtgggagcctgaaggcacaaccctagaaggccctgtgactgccgtcatccccacttggcaggcattgaccacgcttgacctgagccacaacagcatctccgagatcgacgagtctgtgaaactgatcccaaagattgagttcctggacctgagtcacaatggattgctggttgtggacaatctgcagcacctgtataaccttgtgcatctggacctgtcctacaacaagctctcctccttggaagggcttcacaccaagctggggaacatcaagaccttaaacctggcaggcaacctcctagagagtctgagtggcctgcacaagctctactcactggtcaacctggatctccgggacaacaggatcgaacagatggaggaggtccggagcataggcagcctcccgtgtctggagcacgtgtctctgctgaacaaccctctgagcatcatccccgactaccggaccaaggtgctggctcagttcggagagagggcctcagaggtctgtctggatgacacagtgaccacagagaaggagctggacactgtggaagtgctgaaagcaattcagaaagccaaggaggtcaagtccaaactgagcaacccagagaagaagggtggtgaagactcccggctctcagctgccccctgcatcagacccagcagctcccctcccactgtggctcccgcatctgcctccctgccccagcccatcctctctaaccaaggaatcatgttcgttcaggaggaggccctggccagcagcctctcgtccactgacagtctgactcccgagcaccagcccattgcccagggatgttctgattccttggagtccatccctgcgggacaggcagcttccgatgatttaagggacgtgccaggagctgttggtggtgcaagcccagaacatgccgagccggaggtccaggtggtgccggggtctggccagatcatcttcctgcccttcacctgcattggctacacggccaccaatcaggacttcatccagcgcctgagcacactgatccggcaggccatcgagcggcagctgcctgcctggatcgaggctgccaaccagcgggaggagggccagggtgaacagggcgaggaggaggatgaggaggaggaagaagaggaggacgtggctgagaaccgctactttgaaatggggcccccagacgtggaggaggaggagggaggaggccagggggaggaagaggaggaggaagaggaggatgaagaggccgaggaggagcgcctggctctggaatgggccctgggcgcggacgaggacttcctgctggagcacatccgcatcctcaaggtgctgtggtgcttcctgatccatgtgcagggcagtatccgccagttcgccgcctgccttgtgctcaccgacttcggcatcgcagtcttcgagatcccgcaccaggagtctcggggcagcagccagcacatcctctcctccctgcgctttgtcttttgcttcccgcatggcgacctcaccgagtttggcttcctcatgccggagctgtgtctggtgctcaaggtacggcacagtgagaacacgctcttcattatctcggacgccgccaacctgcacgagttccacgcggacctgcgctcatgctttgcaccccagcacatggccatgctgtgtagccccatcctctacggcagccacaccagcctgcaggagttcctgcgccagctgctcaccttctacaaggtggctggcggctgccaggagcgcagccagggctgcttccccgtctacctggtctacagtgacaagcgcatggtgcagacggccgccggggactactcaggcaacatcgagtgggccagctgcacactctgttcagccgtgcggcgctcctgctgcgcgccctctgaggccgtcaagtccgccgccatcccctactggctgttgctcacgccccagcacctcaacgtcatcaaggccgacttcaaccccatgcccaaccgtggcacccacaactgtcgcaaccgcaacagcttcaagctcagccgtgtgccgctctccaccgtgctgctggaccccacacgcagctgtacccagcctcggggcgcctttgctgatggccacgtgctagagctgctcgtggggtaccgctttgtcactgccatcttcgtgctgccccacgagaagttccacttcctgcgcgtctacaaccagctgcgggcctcgctgcaggacctgaagactgtggtcatcgccaagacccccgggacgggaggcagcccccagggctcctttgcggatggccagcctgccgagcgcagggccagcaatgaccagcgtccccaggaggtcccagcagaggctctggccccggccccagcggaagtcccagctccagcccctgcagcagcctcagcctcaggcccagcgaagactccggccccagcagaggcctcaacttcagctttggtcccagaggagacgccagtggaagctccagccccacccccagccgaggcccctgcccagtacccgagtgagcacctcatccaggccacctcggaggagaatcagatcccctcgcacttgcctgcctgcccgtcgctccggcacgtcgccagcctgcggggcagcgccatcatcgagctcttccacagcagcattgctgaggttgaaaacgaggagctgaggcacctcatgtggtcctcggtggtgttctaccagaccccagggctggaggtgactgcctgcgtgctgctctccaccaaggctgtgtactttgtgctccacgacggcctccgccgctacttctcagagccactgcaggatttctggcatcagaaaaacaccgactacaacaacagccctttccacatctcccagtgcttcgtgctaaagcttagtgacctgcagtcagtcaatgtggggcttttcgaccagcatttccggctgacgggttccaccccgatgcaggtggtcacgtgcttgacgcgggacagctacctgacgcactgcttcctccagcacctcatggtcgtgctgtcctctctggaacgcacgccctcgccggagcctgttgacaaggacttctactccgagtttgggaacaagaccacagggaagatggagaactacgagctgatccactctagtcgcgtcaagtttacctaccccagtgaggaggagattggggacctgacgttcactgtggcccaaaagatggctgagccagagaaggccccagccctcagcatcctgctgtacgtgcaggccttccaggtgggcatgccaccccctgggtgctgcaggggccccctgcgccccaagacactcctgctcaccagctccgagatcttcctcctggatgaggactgtgtccactacccactgcccgagtttgccaaagagccgccgcagagagacaggtaccggctggacgatggccgccgcgtccgggacctggaccgagtgctcatgggctaccagacctacccgcaggccctcaccctcgtcttcgatgacgtgcaaggtcatgacctcatgggcagtgtcaccctggaccactttggggaggtgccaggtggcccggctagagccagccagggccgtgaagtccagtggcaggtgtttgtccccagtgctgagagcagagagaagctcatctcgctgttggctcgccagtgggaggccctgtgtggccgtgagctgcctgtcgagctcaccggctagcccaggccacagccagcctgtcgtgtccagcctgacgcctactggggcagggcagcaggcttttgtgttctctaaaaatgttttatcctccctttggtaccttaatttgactgtcctcgcagagaatgtgaacatgtgtgtgtgttgtgttaattctttctcatgttgggagtgagaatgccgggcccctcagggctgtcggtgtgctgtcagcctcccacaggtggtacagccgtgcacaccagtgtcgtgtctgctgttgtgggaccgttgttaacacgtgacactgtgggtctgactttctcttctacacgtcctttcctgaagtgtcgagtccagtcctttgttgctgttgctgttgctgttgctgttgctgttgctgttggcatcttgctgctaatcctgaggctggtagcagaatgcacattggaagctcccaccccatattgttcttcaaagtggaggtctcccctgatccagacaagtgggagagcccgtgggggcaggggacctggagctgccagcaccaagcgtgattcctgctgcctgtattctctattccaataaagcagagtttgacaccgtc

SEQ ID NO: 159 - DNA, 2292 bp, Homo sapiens
ggagaaaggcaggcagccggcgggcgctgcgtgtgtgtttgagtgtgcgagtgtgagtgagtgtgagtgccgggtcctgcctctcctggtgcccccagcagaggggcccggtggcctggggagggcgggcgggctgctcggaggcagaggcagcaagaggcggcggcggggagagccgagaaggaggaggaggagagaggaaagagcggagcagccattgttgagggaaaccttgcaaacaaagaaggctccggactccccgcggccccccgccccccaggccggccccctggcccccggcccccggcccagtggccattgtaactttcccccgggacagcggccgccgcggggcgggccgaggctgtgcgtgcgagtctttgtgcggccggcggactggagctcccagtcgggcctgcccgtcccactcgggacatgagctgctgaagttgtccccccgtcagccctcacccctgccaggactcctctgggcttgcagtcgctcccccgtacctctcctggccccctcagttctcccaggttgttcctcaaagtcattcaagctgtactcgccgaaggagcccccgaacggcaacgcctttccccccttccatcccggcaccatgctggatagggatgtgggcccaactcccatgtatccgcctacatacctggagccagggattgggaggcacacaccatatggcaaccaaactgactacagaatatttgagcttaacaaacggcttcagaactggacagaggagtgtgacaatctctggtgggatgcattcacgactgagttctttgaggatgatgccatgttgaccatcactttctgcctggaggatggaccaaagagatataccattggccggaccctgatcccacgctacttccgcagcatctttgaggggggtgctacggagctgtactatgttcttaagcaccccaaggaggcattccacagcaactttgtgtccctcgactgtgaccagggcagcatggtgacccagcatggcaagcccatgttcacccaggtgtgtgtggagggccggttgtacctggagttcatgtttgacgacatgatgcggataaagacgtggcacttcagcatccggcagcaccgagagctcatcccccgcagcatccttgccatgcatgcccaagacccccagatgttggatcagctctccaaaaacatcactcggtgtgggctgtccaattccactctcaactacctccgactctgtgtgatactcgagcccatgcaagagctcatgtcacgccacaagacctacagcctcagcccccgcgactgcctcaagacctgccttttccagaagtggcagcgcatggtagcaccccctgcggagcccacacgtcagcagcccagcaaacggcggaaacggaagatgtcagggggcagcaccatgagctctggtggtggcaacaccaacaacagcaacagcaagaagaagagcccagctagcaccttcgccctctccagccaggtacctgatgtgatggtggtgggggagcccaccctgatgggcggggagttcggggacgaggacgagaggctcatcacccggctggagaacacccagtttgacgcagccaacggcattgacgacgaggacagctttaacaactcccctgcactgggcgccaacagcccctggaacagcaagcctccgtccagccaagaaagcaaatcggagaaccccacgtcacaggcctcccagtaaaaggccctgctgtggccacccagtgctctgcctacctgccccacccctcacagccccagggagcagaagacagaatgaagagactgagcatctaaaatgggcagcctccatccacccgcttcagggaggaactggactctctgggggcaggtgccaagatttgcccccccagtggccctgggctgggcctggcctctacagagccttttagggggagggggtactcatgtggatgcctacttggaacctgggcctctgagacatgtcctgaccaccccccagggcatttgcctccatcttcaccccagattgtgggtttcccatccccctgactttacccctttcaagcctggggttgtctatacccacagcccttagggacttaaagttacggggcttcgttgaatgctccttcccctaggcagctggtaatagaggggtaaagctctgggcccctcctccctgctgccacttatcccagctccaagtttttttaaaaataatattattaaaaatgtaagttaaaaaaaaaaaaaaaaaa

SEQ ID NO: 160 - DNA, 508 bp, Homo sapiens
tttggtgctttggatccatttccatcggtccttacagccgctcgtcagactccagcagccaagatggtgaagcagatcgagagcaagactgcttttcaggaagccttggacgctgcaggtgataaacttgtagtagttgacttctcagccacgtggtgtgggccttgcaaaatgatcaagcctttctttcattccctctctgaaaagtattccaacgtgatattccttgaagtagatgtggatgactgtcaggatgttgcttcagagtgtgaagtcaaatgcatgccaacattccagttttttaagaagggacaaaaggtgggtgaattttctggagccaataaggaaaagcttgaagccaccattaatgaattagtctaatcatgttttctgaaaatataaccagccattggctatttaaaacttgtaatttttttaatttacaaaaatataaaatatgaagacataaacccagttgccatctgcgtgacaataaaacattaatgct

SEQ ID NO: 161 - DNA, 1750 bp, Homo sapiens
ctgcccggcgccggcttccgggtggtgcgagcgagatggggcggagggccggtcttgcagagtagctgcggtgagtgggcgtgtgcgccgagcggtctggcccaagggctgggggccggccgagggtcttcgggagcaggccgcagggcgcggagagatcctgggatcgccgtccgccgctgctacccggcatgtcggcggaggcctcgggcccggctgccgccgcggccccgtccctggaagcccccaagccctcgggtctcgagcctggccccgccgcctacggtctcaagccgctgaccccgaacagcaaatacgtgaagctgaacgtgggcggctcgttgcactacaccacgctgcgcaccctcacgggacaggacaccatgctcaaagccatgttcagcggccgcgtggaggtgctgaccgatgccggaggttgggtgctgattgaccggagcggccgtcactttggtacaatcctcaattacctgcgggatgggtctgtgccactgccggagagtacgagagaactgggggagctgctgggcgaagcacgctactacctggtgcagggcctgattgaggactgccagctggcgctgcagcaaaaaagggagacgctgtccccgctgtgcctcatccccatggtgacatctccccgggaggagcagcagctcctggccagcacctccaagcccgtggtgaagctcctgcacaaccgcagtaacaacaagtactcctacaccagcacttcagatgacaacctacttaagaacatcgagctgttcgacaagctggccctgcgcttccacgggcggctactcttcctcaaggatgtcctgggggacgagatctgttgctggtctttctacgggcagggccgcaaaatcgccgaggtgtgctgcacctccattgtctatgctacggagaagaagcagaccaaggtggaatttccagaggcccggatcttcgaggagaccctgaacatcctcatctacgagactccccggggcccagacccagccctcctggaggccacagggggagcagctggagctggtggggctggccgcggggaggatgaagagaaccgagagcaccgtgtccgcaggatccatgtccggcgccatatcacccacgacgagcgtcctcatggccaacaaattgtcttcaaggactgacctctgaccctccccctgccttcctcttgccttgggacccagtccctctctctttccctccccttcccagacttttgccccggctctgctggccaagtcgtgggtcctcctctgtcccttcattgcatggcacagctcactttggcccttctccacccatcccaaccccattgctaacaacatggtacattccggccccaccactcagagccttccgaagccaacacttgtccccaccctggccctgcgtccttccctctccagctggttaagagggatttagaattccctttctctttttttagtgcatcgtccatgccaaagtgtgcggcccttcctgacatcaccacagtctgagcagcctcccgcgtcctgcagggtagtccgccccctcctccccaccatcctccctacctccttaactttgtactagactggcctgggcctgcccagctcagcgttatcagtctgtttcatattatttattattttaattttctattaaattattgaaataaagttaagttgagaaaaaaaaaaaaaaaaaaaaaagaaaaaaaaaaaaaaaa

SEQ ID NO: 162 - DNA, 2143 bp, Homo sapiens
tcggagctgaacttcctaaaagacaaagtgtttatctttcaagattcattctccctgaatcttaccaacaaaacactcctgaggagaaagaaagagagggagggagagaaaaagagagagagagaaacaaaaaaccaaagagagagaaaaaatgaattcatctaaatcatctgaaacacaatgcacagagagaggatgcttctcttcccaaatgttcttatggactgttgctgggatccccatcctatttctcagtgcctgtttcatcaccagatgtgttgtgacatttcgcatctttcaaacctgtgatgagaaaaagtttcagctacctgagaatttcacagagctctcctgctacaattatggatcaggttcagtcaagaattgttgtccattgaactgggaatattttcaatccagctgctacttcttttctactgacaccatttcctgggcgttaagtttaaagaactgctcagccatgggggctcacctggtggttatcaactcacaggaggagcaggaattcctttcctacaagaaacctaaaatgagagagttttttattggactgtcagaccaggttgtcgagggtcagtggcaatgggtggacggcacacctttgacaaagtctctgagcttctgggatgtaggggagcccaacaacatagctaccctggaggactgtgccaccatgagagactcttcaaacccaaggcaaaattggaatgatgtaacctgtttcctcaattattttcggatttgtgaaatggtaggaataaatcctttgaacaaaggaaaatctctttaagaacagaaggcacaactcaaatgtgtaaagaaggaagagcaagaacatggccacacccaccgccccacacgagaaatttgtgcgctgaacttcaaaggacttcataagtatttgttactctgatataaataaaaataagtagttttaaatgttataattcatgttactggctgaagtgcattttctctctacgttagtctcaggtcctcttcccagaatttacaaagcaattcataccttttgctacatttgcctcattttttagtgttcgtatgaaagtacagggacacggagccaagacagagtctagcaaagaaggggattttggaaggtgccttccaaaaatctcctgaatccgggctctgtagcaggtcctcttctttctagcttctgacaagtctgtcttctcttcttggtttcataccgttcttatctcctgcccaagcatatatcgtctctttactcccctgtataatgagtaagaagcttcttcaagtcatgaaacttattcctgctcagaataccggtgtggcctttctggctacaggcctccactgcaccttcttagggaagggcatgccagccatcagctccaaacaggctgtaaccaagtccacccatccctggggcttcctttgctctgccttattttcaattgactgaatggatctcaccagattttgtatctattgctcagctaggacccgagtccaatagtcaatttattctaagcgaacattcatctccacactttcctgtctcaagcccatccattatttcttaacttttattttagctttcgggggtacatgttaaaggctttttatataggtaaactcatgtcgtggaggtttgttgtacagattatttcatcacccaggtattaagcccagtgcctaatattgtttttttcggctcctctccctcctcctaccttccgccctcaagtagactccagtgtctgttattcccttctttgtgtttatgaattctcatcatttagctcccacttataagtgaggacatgcagtatttggttttctgttcccatgtttgctaaggataatggtttccagttctaccgatgttcccacaaaagacataattttcttttttaaggctgcttagtattccatggtatctatgtatcacattttctctatccaatctattgttgactcacatttagattgattccatgtttttgctattgtgaatagtgctgcaatgaacattcgtgtgcatgtgtctttatggtagaaagatttatatttctctgagtatgtatccagtaatagcccattcatttattgcataaaattctaccaatac

SEQ ID NO: 163 - DNA, 6598 bp, Homo sapiens
ttttcttctgcacttctgtctggagaggtctgtagccactgagggccccggtcggggccgctttgcaggtccctagtcaggaccgagcaggggagtaggataggaatccccgccgcacctttgtacgagcctgaccccttccgtgggtttgttcctgggtcgccgtcaagctgcggtctctcctcccccgcccttcagccccgcggtctccaggggcggcgccctgggtctggaacgcggttgccaccgaggaggcggcggccctgcgtctggaacgccgttgccaccgaggaggcggcggccccgagcgcgcctggaagccccgggcaaccggccagggtcgggcacaggtggggtccgtcaggccgcccggggctcctctgtcccagctctgcggcccagggggtgacgtgatggcggcagcggtgctgacggaccgggcccaggtgtctgtgacctttgatgatgtggctgtgactttcaccaaggaggagtgggggcagctggacctagctcagcggaccctgtaccaggaggtgatgctggaaaactgtgggctcctggtgtctctggggtgtcctgttcccaaagctgagctgatctgccacctagagcatgggcaggagccatggaccaggaaggaagacctctcccaagacacctgtccaggcgacaaaggaaaacctaagaccacagaacctaccacttgtgagccagccttgtcagagggaatctcacttcagggacaagtgacacaaggaaactcagtggactcacagttggggcaagccgaggatcaggatgggctatcagaaatgcaggaaggacacttcagaccaggaatagatccccaggagaagtctcctgggaagatgagccctgaatgtgatggtttagggacagctgatggtgtgtgttcaaggattggacaggagcaagtctctccaggagatagagtccgtagccataactcatgtgagtcaggtaaagatcccatgattcaggaagaggaaaataactttaaatgcagtgaatgtggaaaagtatttaacaagaaacacctccttgctggacatgagaaaattcactctggagttaagccctatgaatgcacagaatgtgggaaaacctttattaagagcacacatctcctgcaacatcacatgatccacactggggagaggccctatgagtgcatggagtgtggaaaggccttcaaccgcaagtcataccttacccagcaccagcggattcacagtggagagaagccttacaagtgcaatgaatgcggaaaggccttcacccaccgctccaattttgtcttgcataacaggagacacactggagaaaaatcctttgtgtgcacagaatgtggccaagtctttcgacataggccaggctttctccggcactatgttgtccacagtggtgagaatccctatgagtgcttggagtgtggcaaggtcttcaaacacaggtcatatctcatgtggcaccagcagactcataccggggagaagccctatgagtgcagtgaatgtgggaaggtcttcttggagagtgcagccctgattcaccactatgtcatccacactggagagaagccctttgagtgcctcgagtgtgggaaggctttcaaccaccgatcctacctcaagaggcaccagcggattcacactggggagaagcccttcgtgtgcagtgaatgtggaaaggccttcacccactgctctacttttatcttgcataaaagggcccacactggagaaaagcctttcgagtgcaaagagtgtgggaaagcctttagcaatcggaaggacctcattcgccacttcagcatccacactggagagaagccctatgagtgcgtggagtgtggaaaggccttcacccgcatgtcgggcctcacgaggcacaagcggattcatagtggagagaagccctatgaatgtgttgagtgtgggaaatcgttttgctggagcacaaacctcattcgacatgccattatccacactggagagaagccctataaatgtagtgaatgtggaaaggccttcagtcgcagctcgtccctcactcagcatcaaaggatgcatactgggaaaaatcccatcagtgtaacagatgtgggaagaccttttacaagtggacaaacctcagttacccttcgagaacttcttttagggaaggactttttgaatgtaaccactgaggcaaatattttgccagaggaaacatcttcctctgcatctgatcaaccataccaaagagaaaccccacaagtgtcttcactgtgagaaaaccttctgttgctgaatattacttgtcatctgaagagtcatattagaaattcgttcagtctagagccttattctccatctgataatttatcctggagagagacccagtggttattgtgcacataggagaaccttcagctgcatctttctccttagtttacagtgcaattttatctcaggaattatttttaaaaggaggaggggacatagaaaaaatgaaatgcaagcacacatcttttcaggcttctctgccaagcctatggcgctttgtcatggatttcttagtgtatttgggggaagggaaatgtttcaaggtaaagaaccttgaccctttatgtgcttgtatgtacatttattgctatccagtgtcagaacagttagtttaggaaaagtatgcaaactttaatcgcacatcttctgtattccacaatagtacttactcttgagaagcataactttatgacaacttagggggcttgagccatgaaatactcacgtttaagtcagtaaggatacacatgttaacattcaggcttttgtcttgatgcccgtcttttggtttacgtcatcattgtagccatatggtaaatttttatttgttaaatttttaaaaattacttagctcaaaatgtcagtggtaaatttttaaattgagtaaagtgattcttctttgctcttatttaaaatcgacagcatttctagttcctttgacattccatataatttttaggattagtttgtacttatttacaaaacagtcttgttcagatttttacagaaattgagttaagtctgtggattaatctgttaagaattggtatctttactatgttgggtcttgtagttcatgagtgcaggagtaggcctcttaatttataatagttaagcattccttaaagtatttcattaatgttaaaaattttcagcgtatagatccctatgcatttttgttagaatttgcatcctagggtgcttttttgtttgtgtgtgtgtgtaatttgagtgattgtaaatggcattgatgtttgaactttgaattgcacacaatttttggtagtatacagaaatataatatttttggacattgttttgctaccctgcaaccttattgagttcacttattatttttagctatttctttcgacagaatccttggaattttctatatagaaatgtcatctgcaaatacagaccattttttatctttcatcttacctgtaatcctagcactttgagaccactaaggcaggtggatcacctgaggccaggagttcgagaccagcctggccaacatggcaaaaccctgtctactaaaaatacaaaaattagccaggcatggtggcgtgtgcctgtaatcccagctgctggggggctgaggcaggaggatcagttgaacgtgggaggcagaggttgcagtgagctgagatctcaccactgcactccagcctgggcaacagagcgagactctgtctcaacaacaacaacaaaaagtcctgaacatgattgtggaagtgtgttgctctttcaagttctatcactttttgtttgcaaagttcaaagctgtattgtttggtacatatacatgtaggtttgccaagtctttgtggtgaattgactcttctgtcattatgtgatgtcatttttttgccttttaatagtcttgtcaatactttacctgatgttctcatagtgactcctgcatattttgattaatgtttgcatggttaatatttcttcattttattttaaagcttacctgtatcattacttatgaagtcagtttctttgaacagcatatactcaggccatgctttttttattcattctgcatatgtctctcttaattggtatgttgaaatgatttacattaaaataattattgatattttagggcttaagtgtgcccttaaatgatttttgtgttcttttttattgttcctctgttatttggggttgtttactagtcttcctataggttacttcaccttttttttttttaataatttgatttgatacatatgtagtgttttttagtatagatcctccttgacttatgatggggttatgtcacaataaacccattgcaagttgaaaatactatgtcaaatatgcatttaatacacctaccctgctgaacatcatagccgatcttgccttcagaatgctcagaaaatttacattagcctgcagttgggcaaaatcatctaacacaaggcctactttataataaagttactgcaaagaattttaaataaaaattcaagtgtggtttctactgaatgcatgtcgcattcgcaccattgtaaagtcaagtagtaagtcgaaccatcctaagtcagggactgtctgtatatatctgcattttttagtgattgttctactattacagtgtaaatatataacttatgacagtttaataagttatcagcaatttagcactttacttccattaggttcctttagcttacctactaatgtaactatcttaagtaatagtaattcctcttcaaaaattgagcgctatgttgcaagatgtaatttttcttttccttttttttgagaccaagtctcactctgtcacccacgctggagtgctgtgatgcgatctcggctctctgcaacctctgcctcccgggttcaagcaattaactgcctcagcttccctagtaatggattacaggcgcccgccaccacgcctggctaatttttgtatttttagtagagacggggtttcaccatcttggccaggttggtcttgaactcttgacctcatgatccacccgcctcggccccccaaagtgctggggttacaggtgtgagccactgcacccggccacaagatgtaatttttactttatctctcacacgtattttacaaaacgtcatgagaaacattgtctcttgaccttttttttttttttttttttttaaagagacagagtctcactctgtcacccaggctggagtgcagtggcacgatcttggctcactgcaacctccgcctcctgggttcaagcgattctcctgcctcagcctcctgagtagctgggattacaggtgtgcgccgccacacccagctaattttgtatttttagtagagacggggtttcaccatgttgctcaggctggtctcaaactcctgaccttgtgatccgccaaccttggcctgtcgacctctttacccattccattgttcattcttctttcttgaaatcccaaaccttctattaacatttcttttcagttatacactgaactttactgtagcctttcttctagagtaacaaatgttctttgttttccttcctctaaagatgtctttatgtttccttcattcccaaagaatatttttgtggaatataagattcagagttggcagttgttttcttttagacttcagagatgtatctctctgttctgtacattattgtttaatataagaaacctactagcattcaaataatcattccctattttacaatgcatcagttctgtcaagcttcattcaaagtgtttttcattgtctctagtgttcagaagtttggctgtgatgtgcgtggcatggaagtttttgggtgtattctatttggcgctccctggtgcttgcccagctttttgatctgtaggattatgccttttgcaaaatttggggaactttcaactattatttcttcaaatattttttcaccccccagtcttgtcttttttagggacttcaataacatgagtggcagatcttgttttacactcccatgggtccttcaggctctcatcttttttctttttccagtctattttctgtcttgttaatattgattaatttttattgaccttccatggtcctcactgattgttttctttgtcatacctaatctgttgagtttgtgcagtgagttttcattttggttttgtattttccagttgtttaatttccattgggtgggttcttttgtacaccttctgtttctttgcttattttttaacgccaaagaaagactctcagagaatagacaactatattccaaagtcatggttctctggtggtttgtcttgacatttgaatagaaatgttaaactatctgggggaatagaaagcccacagtcttctgagttgtgctacaccaatatttctatgaacagatcttacaactgagagtgatctgcagatttttcagagtcatgttctccatggaatgtttgtaaaattccctagctctctgcactgagctgagatcgtgccactgcactccagcctgggcaacagagcgagactccatctcaaaaaaaaaaaaaaaaaa

SEQ ID NO: 164 - DNA, 2106 bp, Homo sapiens
agaagggcgtcgggcggccgtcgggacggaagccgggaggcgctgccgaccgcgcctgcgacagcgtcagccctgcgcggagcgccggcccgatggcggcggcggcggcgatggccgagcaggagagcgcccggaacggcggccgcaaccgcggcggcgtccagcgtgtggagggcaagctgcgcgccagcgtcgagaagggcgactactacgaggcgcaccagatgtaccggaccctgttcttcaggtacatgtcccagagcaagcacacggaggcccgggagctcatgtactcgggagccctgctcttcttcagccatggccagcaaaacagtgcagcagacttgtccatgctggtcctggagtccctggagaaggcggaagtggaggtggctgacgagctgctggaaaatctggctaaagtgttcagcctgatggaccccaactctcctgagcgcgtgacctttgtgtccagagccctgaagtggtccagtgggggctccgggaagctgggccacccccggctgcaccagctgctggccctcaccctgtggaaagaacaaaactattgtgagtcgaggtatcattttctgcactcagcggacggggagggctgtgccaacatgctggtggagtattccacgtcccgcggcttccgcagcgaggtggacatgttcgtggcccaggccgtgctacagtttctctgtttaaaaaacaaaagtagcgcatcggtggtcttcacgacgtacacccagaagcacccgtccatcgaggacgggcctccgtttgtggagccgctgcttaacttcatctggttcctgctgctggctgtggacggtgggaagctgacggtgttcactgtgctgtgtgagcagtaccagccatccctccggcgggaccccatgtacaacgagtacctcgaccgcataggacagctgttcttcggcgtcccgcccaagcagacgtcttcctacgggggcctgctcgggaaccttctgaccagcctcatgggctcctcagagcaggaggatggggaggagagccccagcgacggcagccccatcgagctggactgaactggccaggccacgtggagacaccacggtcgacgacggctggagggacgtttcagaggcgagtcctgggtggctcctcgccttgggggctcctggccctgaggctggcggtggccgcatgccggcgcgtgtctgtttctgtgcggcggctcagggtggcgcggctgctgctcactgtgctgctgggacccaagagtggggcgtcgcccctgctggccgccgcgtcccccgagattgacccacaataaagcacaggccttaccgcggcgtcaccctctcccactcctttgttctgggtcctttcgggagggctgatgggcagcacaggaggcccgtcctcggggggctgcgcacatcacgctccttgccgggcgtccggcacagctgcggtcaccaaagcaggtgctggccctcggacctgagagcccagccagggcccatgtggtctgcaaatgggagcggctgtttttgaacacggggtcattctgcagtcaggacgaaccggtccccgtcgcagacggagtgcacgtgccctgcgccacatcctcacgctcggtggagggacgcgtgcggcgggacggtgcctacgggtacttgcagctgtgtcccatgtggcatcccagagctgcgccctgctggtctctgtgagcgccacgctgctgtgctggaaatgccgctttaaaaagggataccgtgggactctgcccgtctctttcataacgcaatatttatttgtattgggtgatgattgattctttcgacctaacattttgggttttaaccaaataaccggtccaggagtgagcagctccgttctgtcagatgctactccaaatgttaccagaacgatgacaaaaggggagacgctctattttttcacagttaaatgacagttgtagattgatacgcagttgtgcatgggaaggggaaacgcacagctttatttactgtaaagtggaatttcaggaaggcttgtgtgaaccgttgcgcataaataaaccctttctaccggaaaaaaaaaaaaaaaaaa

SEQ ID NO: 165 - DNA, 2307 bp, Homo sapiens
gtgctttgctgtataaatgcggtggcgcccggcgtagggacacttcggtcctgagcgcttgggagttaggttgtttgccggcgtagcggccagcgcctgagcccgcccttgatcttcgctgtggcatggcggacgaggggaagtcgtacagcgaacacgatgatgaacgcgttaatttccctcaaagaaagaagaaaggccggggtcccttccggtggaaatatggtgaaggaaaccgtaggtctggaagaggcggttctggtattcggtcttcccgccttgaggaagatgatggagatgtggcaatgagtgatgcccaggatggtccccgagtacgatacaacccctataccacccgacctaaccgtcggggtgatacttggcatgatcgagatcgcattcatgttactgtgcggagagacagagctcctccagagagaggaggggctggcaccagccaggatgggacctcaaagaactggttcaagattacaattccttatggcagaaagtatgacaaggcatggctcctgagcatgattcagagcaagtgcagtgtgcccttcacccctattgagtttcactatgagaatacacgggcccagttcttcgttgaagacgccagtactgcctctgcattgaaggctgtcaactataagattttggatcgggagaaccgaaggatatctatcatcatcaactcttctgctccaccccacactatactgaatgaactgaagccagaacaagtagaacagctaaagctgatcatgagcaaacgatacgatggctcccaacaagcccttgacctcaaaggcctccgttcagacccagatttggtggcccagaacattgacgttgtcctgaatcgcagaagctgtatggcagctaccctgaggatcattgaagagaacatccctgagctattgtccttgaacttgagcaacaacaggctgtacaggctggatgacatgtctagcattgttcagaaggcacccaacctgaagatcctaaacctttctggaaatgaattgaagtctgagcgggaattggacaagataaaggggctgaagctagaagagctctggctcgatggaaactccctgtgtgacaccttccgagaccagtccacctacatcagcgccattcgcgaacgatttcccaagttactacgcctggatggccatgagctacccccaccaattgcctttgatgttgaagcccccacgacgttaccgccctgcaagggaagctattttggaacagaaaacttgaagagtctggtcttgcacttcctgcaacagtactatgcaatttacgactctggagaccgacaagggctcctggatgcctaccatgatggggcctgctgttccctgagcattcctttcattcctcagaaccctgcccgaagcagcttagccgagtatttcaaggatagcagaaatgtgaagaagcttaaagaccctaccttgcggttccggctgctgaagcacacgcgtctcaacgttgttgccttcctcaatgagttgcccaaaacccagcacgacgtcaattccttcgtggtagacataagcgcccagacaagcacattgctgtgtttttctgtcaatggagtcttcaaggaagtggacggaaagtcccgggattctttgcgagccttcacccggacattcattgctgttcctgctagcaattcagggctatgtattgtaaatgatgagctatttgtgcggaatgccagttctgaagagatccaaagagccttcgctatgcctgcacccacgccttcctccagcccggtgcccaccctctctccagagcagcaggaaatgttgcaagcattctctacccagtctggcatgaacctcgagtggtcccagaagtgccttcaggacaacaactgggactacaccagatctgcccaggccttcactcatctcaaggccaagggcgagatcccagaagtggcattcatgaagtgatcgtagtcatgcctcagaagcagtcccccctgtaaatagtccttggatattaccgtctggttgtcgtctgtcatctcctcctgtctggcccgaggccgccccgtgactgtgaccgagggagggagggctgcctgatccctctcctcgcctgccttctggaagacttcagaagattgagcctcactggtgccaggaagccaaagcttactttgtagaactgacactaaactacccgaaggacttaggtgctttgtgtacttaaccccaggacctccttactttttaatataaagagtgatgttgtaaaaaaaaaaaaaaaaaa

SEQ ID NO: 166 - DNA, 3612 bp, Homo sapiens
gtacgctcgcaaggcgctcgcagactccggagtcgccaacatgtcgaccgccatgaatttcgggaccaagagcttccagccgcggcccccggacaagggcagcttcccgctggatcacttaggtgaatgtaaaagctttaaagagaaattcatgaagtgtcttcataacaataattttgaaaatgctttgtgcagaaaggaatcaaaagaatatttagaatgcaggatggagagaaaattgatgctacaagaaccattggagaaactgggatttggagacttgactagtggaaaatcagaggcaaaaaaatgaattttgatgagaagacccctgggccgtgttcagtggtctctcaggacggagggcatcatcctgcctcttaggttggctgaggcctgcgtgtggtgtccttagaaatgggcttcgaatagaagctccagccctgtgggggcgtctcctgggtagggagtggcgtcccgttttcccttaggagggtgtttctgcattgaacccctgagtgggacggcgttcccggcaaagctgggagggaggcgagcgtggggcaagacccttgtcttcgaggccggggccctcttgtatggggcggttttatgttgcagtcctctgatactttctgagttcaaagaggtaaatgtataaatttcagtcccttctgaacacagatatcatcagaaaattaccattccctagcaggatgttttcgtgtttgtattcgtatatgccagttcatttcctttgaaaaaaaaaaaaagtggaacacaaagtaggaagtgagaaccttctggctttggatggattgacttcttgattctttctggttttgcctgaacaccaagtagcttcataatcaaagggtcattttctggtttgtatcagaccgtatttataaagttgggtatttaatttcagtaactcctgtattttaacagaaaaagaacctgagtccatttgcagttaggctcgcaccagctgtcttctgtgccagccagctccgcccgagaccccggcacgtgttcgcagcacagcctggcaggggccctgagcggagttctcagcccgtctgtgccaaagttgcctgtgggtcacggaaacccggcccatgtccacccagtgcgtcaggccagccggggcccaaacctgtggatggaacgcaggtgcctgcacatctggggcctcagccagacctgtctccttcccaggcactgtcggaaaggggctggctcctgtctggtcagtggaggatggtggcaggagacggggtggggaggtccaggtcacgtcctctctggcgaccctggcagtggctgtctccaagccctggcaggtggggccaccaatctggccgacctcaggctctgggaaacaggctgccctcgtccctctgcctgtgggtggctgaggcttctcagcccatctccagttctctgcagcaaaggccctctgtttctgtcctgcagtggtggccctttcgtggttaaacatgtccctcccctcctcacagaactgagtacctattgcggctgggcccgcccaaccctgtgtccctgcacccatgggttctaccacctgattcggctgcagctgtcactgtcccgtgtctgctctctgtcaggcctctgagtgctgcagacgtattaacatatcaccgctagttgatggaaagtcttgtttcttattagaatattttgtgtaggcacagggttgccccagcactgtctatagcaaccccagtgtcctcacagtgcacgtgagccgtgacgcagccaccgtggagtcggcgctgacgcggtgtggccacgtgccatgagctcgccaacgcagtgcggctatatggcgtgagcttactgtgaagtggagacaggcagggacacaggaaactacaaacgagaaatccagaaggaggagctggaactgatgggcatagccggccgcgagcccctccgagcacccctgggggtggagttctggctgtcatggcagagggtttcacatgctcaaaaagtaaatgaaccaggatgtgaggggaacacaacagaccatgccgacggagctcccgggcccaggccggggcctcttcccatcgcactctgacccgccgtcgggagtgtacccagggtcgggcctgcctctccgctcgcaccgcactctgacccatcaggagtgtggggaagaccgtcgaccaaaggtgggaaagacaggaaagatactgtactctaagtagtaaatttgttttttgcgtggacgattctgaagctgtattctgagatggaaaaaactagaaatacatcgtggatgatgagagccaggtgtattgagctcctgcttttctaacgtacaaaggtaactggatagagaaacggagtgatcgccctcacctggccagggtgtgctccgagaccccagcaggtgccgaagccgcggatagtcccgaatcctgtccaggcgctgttttttcctgtacgtacctgtgatcaagtctgagatgtgacagcaaaactgacagaacttcgtgcttccctcttcaaaatgtcacagatgggcactgtgttcttaccggagatcttagcaacctcggcatctggctgtttttcttataggtcaggagtttccaccttttcccttaaaggaagcgcttggcagcttctctggtgtgtctgagtcgccagcatcaccactgtcctgttctggggccattcttaagtaaaataaaagcttcttggacccaagcaccacatcaccgcgatggctggtctgatcaccgagatggctgctgagtgcctggcaggcagggtggcgtggatggcccgaaacgctggacggagggagggttgatgtcccagcaggacggctgctcagaacagcacagaatcaaaaactcatgaatggtttatttctggaattttccacttagtatttttggactgtggctgaccatgggtaactgaaaccgtgtgtaagggggactgttgtgaggggctgtgcacaaatgcttcccagctcttgagggcctggacgcagtgacccgtgcactcagggtcttggccctgataccattctgtaaccaaaaggaaccagggccaggccagagaaggtatcagatgagctagagagtgaagaattgctgggatgaggagacttgttgaaataacacggggggatgggaaggagcatacggtggccagcctgggcagtgtgagcgtgaaaataaacaggctgggcgcacggctcacgcctgcaatcccagcactttaggaggccaaggtgggaggatcacttgaggctaggagttcaagaccagcctgggcaacatgggtgaaaccctgtctctacaaaacaagaaaagtcagccgtgcgtggtgtcacccgcctgtagtcccagatactcaggaagctgaggcaggaggatcacttgagccagaggttaagtctgcagtgagctgtgattgtaccactgctctccagcctgagcaacagagccggaccctgtctcaccaaaggaaaaaaaaaaaaaaaaaagaaagaaaattaattattgtaatgggctgtagccctcagaataaattgatatccagtagtctataaaaaaaaaa

SEQ ID NO: 167 - DNA, 1648 bp, Homo sapiens
cgtagaaccagataggggcgggaacagcccagcgggccgtcccatcggcttttgggtctgttacccaaagaatgataaagttggttttatttcaagaagtcgatcgaaaagaaagccccagcgctctagagctcagctgacgggaaagggggtgcgcagcctcgagtttgagagctacccggagccccaagacaggggggggttccagctgcccgcacgccccgaccttccatcgtaggccggaccatgggaaccccaaagccacggatcctgccctggctggtgtcgcagctggacctggggcaactggagggcgtggcctgggtgaacaagagccgcacgcgcttccgcatcccttggaagcacggcctacggcaggatgcacagcaggaggatttcggaatcttccaggcctgggccgaggccactggtgcatatgttcccgggagggataagccagacctgccaacctggaagaggaatttccgctctgccctcaaccgcaaagaagggttgcgtttagcagaggaccggagcaaggaccctcacgacccacataaaatctacgagtttgtgaactcaggagttggggacttttcccagccagacacctctccggacaccaatggtggaggcagtacttctgatacccaggaagacattctggatgagttactgggtaacatggtgttggccccactcccagatccgggacccccaagcctggctgtagcccctgagccctgccctcagcccctgcggagccccagcttggacaatcccactcccttcccaaacctggggccctctgagaacccactgaagcggctgttggtgccgggggaagagtgggagttcgaggtgacagccttctaccggggccgccaagtcttccagcagaccatctcctgcccggagggcctgcggctggtggggtccgaagtgggagacaggacgctgcctggatggccagtcacactgccagaccctggcatgtccctgacagacaggggagtgatgagctacgtgaggcatgtgctgagctgcctgggtgggggactggctctctggcgggccgggcagtggctctgggcccagcggctggggcactgccacacatactgggcagtgagcgaggagctgctccccaacagcgggcatgggcctgatggcgaggtccccaaggacaaggaaggaggcgtgtttgacctggggcccttcattgtagatctgattaccttcacggaaggaagcggacgctcaccacgctatgccctctggttctgtgtgggggagtcatggccccaggaccagccgtggaccaagaggctcgtgatggtcaaggttgtgcccacgtgcctcagggccttggtagaaatggcccgggtagggggtgcctcctccctggagaatactgtggacctgcacatttccaacagccacccactctccctcacctccgaccagtacaaggcctacctgcaggacttggtggagggcatggatttccagggccctggggagagctgagccctcgctcctcatggtgtgcctccaacccccctgttccccaccacctcaaccaataaactggttcctgctatgaaaaaaaaaaaaaaaaaaaaaaaaaaaaaaaaaaaaaaaaaaa

SEQ ID NO: 168 - DNA, 2246 bp, Homo sapiens
ccgccgagaaatagggggcgcgtgtttggaaattgatagaaaagataaagggaccgagctgctgtcagcctggcttactgatctgcgtccgtttcaccacggattcagttactaagcattttttttctttttttggttctttgcaacgtgagtggcattggctcagtgatttccatgagcatctctaccagaaaacattgcctcgatgaggtgtggtggaagcccggcagccccttctaatcggctaggcttgagaaagcgtgtacctctgcatttccgaaattaactcagcgtgatcggcaagattttcctcagcatctggtgtcaagacactcgtcactattaattcggaaagaaaaaaaaaaaacaaaacaccgttttccagcatttctctttgtggagaactaaacaacaggaaaaatgtctattttccctaagatatctttgagacctgaggttgaaaactatcttaaggaaggctttatgaataaggagattgtgactgctttaggtaaacaagaagcagaaaggaagtttgaaactttgttaaagcacctgtcacatcctccatcatttacaactgtcagagtgaatacacatttagcctcagtacaacatgtgaaaaatctgttacttgatgaacttcagaagcagtttaatggattaagtgttcctattcttcaacatccagaccttcaagatgtgttacttattcctgttattggacccagaaagaatattaaaaaacaacagtgtgaagccattgttggagcccagtgtggcaatgcagttttaagaggagcccatgtctatgccccaggaattgtgtcagcatcacaatttatgaaagctggagatgttatttctgtatactctgatattaaaggaaaatgtaagaaaggagccaaagaatttgatggaacaaaagtatttcttggaaatgggatttctgaactaagccgcaaagaaatcttcagtggattacctgaactgaaaggcatgggcataagaatgacagaaccagtatatctcagcccttcatttgacagtgtactgccccgttacttatttttacaaaatttgccatctgccttagtaagtcatgtactaaatcctcaacctggagagaagattctagacttgtgtgcagcacctggagggaaaacaacacacattgcagcactaatgcatgatcagggagaagttatagcactggataaaatcttcaacaaagtagaaaaaatcaaacagaatgccttattgttagggctgaattccatcagggcattttgttttgatggaacaaaggcggttaaacttgatatggtggaggacacagaaggagaacctccatttctaccagaatcctttgaccgaattcttctggatgcaccctgtagtggaatgggacagagaccaaacatggcctgtacttggtctgtgaaggaagtggcatcatatcagccattacagcgaaaactcttcactgcagcggttcagctgctgaagccagagggtgtgctggtttatagcacgtgcactataacactggccgaaaatgaagaacaggttgcctgggccctgacaaaatttccttgccttcagcttcagccccaggaaccgcagattggaggagaaggaatgaggggagctgggctctcatgtgaacagttgaaacagctgcagcgatttgatccatcggctgtgccattaccggacactgacatggactctcttagagaggccagaagagaagacatgttgcgtctggctaataaggactctataggtttttttattgcaaaatttgtaaaatgcaaaagcacataggagagggatggatgctcagaaatgaaaattccaaacatttgctgtctgtggtttttttttttttttttttttaaccaaagtgttgtcaggccaactgaatgatgatgtggttgctatggaaacagaaaaggctgccagctgttttaccagggatccagagacatagaggaagtagggggtggtatgagattatattttctgtttttaaaagattttttttttttatgtatttagtagagtataaagaaaagcagatgcctatagatgtctggagcatattttcatttgtgatctaatgttttaatttgtaaagtgtacaagtcatttttaatgttaaaaattagtgaatctaacaaaaggaataaattagcaatatttgaaaaaaaaaaaaaaaaaaaaaaaaaaaaaaaaaaaaa

SEQ ID NO: 169 - DNA, 1787 bp, Homo sapiens
aaaaaaaaaaaaaagccgtgggtcaggagccagagccctctgctctagtcttagctgtgccaatgtgactccctgtgtgatttgggggtaaattactgcccctcactgggtctctgtctacccacctgcaaaatgagaggatctttggatgagtctccttaattcatttcctggacaaacttcctccaaggctcccccagatttatcagtgacgcccttccctaagtatcaacttagccgtactttgaactctggcccctcaggtttcaaggggacggccttgtctgggatcagctctgtctggggaaagaagctgcaccagcctctggatagcaggctgagtcacttgtttcttgtgccttgagtcagttctctcatcagctctcctcctaggccagtgttattacctccagtaaagatggaaaagttggggttcagagagggctagagacagacagcctgctgtgtcctgtcttttctcctgtgctgtacaggttcaccaatttttaaaatccaaatatatctcatggtacagtggaagaactggccagagagtctggaagtttgggttctggtcctggctgtgccactgactcactgtgaccttgggatcttgtgctgtgaagacatttcccaagtgcttcatgttagccagcaaatctgacccacaaggcctggaaagaggtgattgttaggttgcgcagaggtggtcttatccagctcagcttcccctgggacccaccgtgggacctgaggcagaactggggtggacttggcctcctccatggcacaccggctgcagatacgactgctgacgtgggatgtgaaggacacgctgctcaggctccgccaccccttaggggaggcctatgccaccaaggcccgggcccatgggctggaggtggagccctcagccctggaacaaggcttcaggcaggcatacagggctcagagccacagcttccccaactacggcctgagccacggcctaacctcccgccagtggtggctggatgtggtcctgcagaccttccacctggcgggtgtccaggatgctcaggctgtagcccccatcgctgaacagctttataaagacttcagccacccctgcacctggcaggtgttggatggggctgaggacaccctgagggagtgccgcacacggggtctgagactggcagtgatctccaactttgaccgacggctagagggcatcctggggggccttggcctgcgtgaacacttcgactttgtgctgacctccgaggctgctggctggcccaagccggacccccgcattttccaggaggccttgcggcttgctcatatggaaccagtagtggcagcccatgttggggataattacctctgcgattaccaggggcctcgggctgtgggcatgcacagcttcctggtggttggcccacaggcactggaccccgtggtcagggattctgtacctaaagaacacatcctcccctctctggcccatctcctgcctgcccttgactgcctagagggctcaactccagggctttgaggccagtgagggaagtggctgggccctaggccatggagaaaaccttaaacaaaccctggagacagggagccccttctttctccacagctctggacctttccccctctccctgcggcctttgtcacctactgtgataataaagcagtgagtgctgagctctcacccttcccccactaaccagaaaaaaaaaaaaaaaaaaaaaaaaaaaaaaaaaaaaaaaaaaaaaaaaaaaaaaaaaaaaaaaaaa

SEQ ID NO: 170 - DNA, 1913 bp, Homo sapiens
atgagcgacatccgccactcgctgctgcgccgcgatgcgctgagcgccgccaaggaggtgttgtaccacctggacatctacttcagcagccagctgcagagcgcgccgctgcccatcgtggacaagggccccgtggagctgctggaggagttcgtgttccaggtgcccaaggagcgcagcgcgcagcccaagagactgaattcccttcaggagcttcaacttcttgaaatcatgtgcaattatttccaggagcaaaccaaggactctgttcggcagattattttttcatcccttttcagccctcaagggaacaaagccgatgacagccggatgagcttgttgggaaaactggtctccatggcggtggctgtgtgtcgaatcccggtgttggagtgtgctgcctcctggcttcagcggacgcccgtggtttactgtgtgaggttagccaaggcccttgtagatgactactgctgtttggtgccgggatccattcagacgctgaagcagatattcagtgccagcccgagattctgctgccagttcatcacctccgttaccgcgctctatgacctgtcatcagatgacctcattccacctatggacttgcttgaaatgattgtcacctggatttttgaggacccaaggttgattctcatcacttttttaaatactccgattgcggccaatctgccaataggattcttagagctcaccccgctcgttggattgatccgctggtgcgtgaaggcacccctggcttataaaaggaaaaagaagccccccttatccaatggccatgtcagcaacaaggtcacaaaggacccgggcgtggggatggacagagactcccacctcttgtactcaaaactccacctcagcgtcctgcaagtgctcatgacgctgcagctgcacctgaccgagaagaatctgtatgggcgcctggggctgatcctcttcgaccacatggtcccgctggtagaggagatcaacaggttggcggatgaactgaaccccctcaacgcctcccaggagattgagctctcgctggaccggctggcgcaggctctgcaggtggccatggcctcaggagctctgctgtgcacgagagatgacctgagaaccttgtgctccaggctgccccataataacctcctccagctggtgatctcgggtcccgtgcagcagtcgcctcacgccgcgctccccccggggttctacccccacatccacacgcccccgctgggctacggggctgtcccggcccaccccgccgcccaccccgccctgcccacgcaccccggccacaccttcatctccggcgtgacctttcccttcaggcccatccgctaggctggcccgtgtgtgccttctgcgctctcgctggacgaagcctttcgagatggaaggggtggccggactcccagaagagaacctcggggaaggggtcgggcagcccctccccgccggcagaaccgtcttggtgtcacggagtccaggtgcttcccacccggtcgcattctttgacatgcagattggatggtggagggaagagtccagcctctgccgagagcctgctgcgtgcatttttaaaagatgccgatcctgggagcctctgttctctgcgcatttcagacacagcctgtgtggcgaggagtgtgacggcaggagccacgggtgcaagcccgtgtgtctggcctctttcctcgtgaagacgatgtgtccccgccagaaaaagtgggcaccttctgcagccccgtgagctgagcccaggctgcgtagtgaccacaagcttatgtgcagcactgctcagggaggctgtcaggaattcccctcacctcggaaaggaacttctcagttttattgggggtgtctaaatttcctttcatatgttcaaataaatttttctaaacagt

SEQ ID NO: 171 - DNA, 3004 bp, Homo sapiens
gccacgcgtgcgcttaggcgccgctgagcgctgactgggtgcgagtggggaagctgctaacccgacccggattggcgctgaggtggcccgtggggcagggcagatgattctggaccagatgaagcctgaggagccttccagctctaagatagcaggataggagacttctaagattggagctgcagaagacttgccagcccaccagcacaatgtcaggaagccatacacctgcctgtggccctttctcagccctgactccgagcatatggccccaggagatcttggccaagtacacgcagaaggaagagtcagcagagcaaccagagttctactacgatgagtttggtttccgtgtgtacaaggaagaaggtgatgagcctggctccagtctgctggcgaactcccctctgatggaggatgctccacagaggctgcggtggcaggcccacctggagttcacccataaccacgatgtgggggatctcacctgggacaagattgccgtctccctaccccgctctgagaagctccgctccctggtgctggccggcatcccacatggcatgaggccacagctgtggatgcggctctctggggccctgcagaagaagaggaactctgagctgtcctaccgcgagattgtgaagaacagctccaacgatgagaccatcgctgccaagcagatcgagaaggacctgctccgcaccatgcccagcaacgcctgcttcgccagcatgggtagcatcggggtgccccgcctgcgcagggtgctccgggccctggcctggctctacccagagatcggctactgccagggcaccggcatggtggccgcctgcctcctgctgttcctggaggaggaggacgccttctggatgatgtctgccatcatcgaggacctgctccccgcctcctacttcagcaccaccctgctgggtgtccagactgaccagcgggtcctgcgccacctcattgtccagtacctgcctcgcctggacaagctgctccaggagcatgacattgagctgtccctgatcacactgcactggttcctcacggccttcgccagcgtggtggacatcaagctgctcctgcgcatctgggacctgtttttctacgagggctcccgggtgctgttccagctcacgctgggcatgctgcacctcaaggaggaagagctgatccagtcagagaactcggcctccatcttcaacacgctatcggatatcccgtcgcagatggaggacgcggagctgcttctgggggtggccatgcggctggccggctccctcaccgatgtggccgtggagactcagcgccgcaagcacctggcctatctcattgcagaccagggccagctcctgggggccggcaccctcaccaacctctctcaggttgttcgccgcaggacccagcggaggaagtccaccatcactgctctgctcttcggggaggatgacctggaggcactcaaggccaagaacatcaagcagacggaactggtggctgacctccgggaagccatcctgcgcgtggcacgccacttccagtgcacagaccccaaaaactgcagcgtggagctgactccagactatagcatggagagccaccagcgggaccacgagaactacgtggcgtgctcacgcagccaccggcgccgagccaaggccctgctggactttgagcggcacgacgacgacgagctgggcttccgcaagaacgacatcatcacaatcgtgtctcagaaggacgagcactgctgggtgggggagctcaacggcctgcgaggctggtttccagccaagttcgtggaagtcctggatgagcgcagcaaagagtactccatcgcgggggatgactcggtgacggagggggtcacagacctcgtgcgagggaccctctgcccggcccttaaggccctgttcgaacatggactgaagaagccatccctgcttgggggcgcctgccacccctggctgtttatcgaggaggctgcaggccgggaggtcgagagagactttgcctccgtgtattcccgtctggtgctctgtaagaccttcaggttggatgaagatggcaaagtcctgaccccggaggagctgctctaccgggctgtgcagtctgtgaacgtgacccacgatgcagtgcatgcacaaatggatgtgaagctccgctcactgatctgcgtggggctcaatgagcaggtgctgcacctgtggctggaggtgctctgctccagcctgcccaccgtggagaagtggtaccagccctggtccttcctgcgcagcccgggctgggtccagatcaagtgtgagctccgagtcctctgctgctttgccttcagcctctcccaggactgggagctccctgcgaagagagaggcgcagcagcccctgaaggagggcgtccgggacatgctggtgaagcaccacctcttcagctgggatgtggacgggtgaccccctcctccccagcccaacctcgggcctgcgtctgaggtggcccaggaccccaagctgcagagcccagggaagagcagctccagagccctggccggggccgcgggatatcaatatcaggctgccccactccacgttccccagcacatcccaggtggtgggagcagagggtaccctgccccaccagggtccttagggatgctctaggccaaaccacagtttgtaccaaaaaccttgtgaggaggtgggggagccatgtctgtgctcaggaagagggaaggggatgggggtggctagtaggctcctggcctctttggtttataaataaactgtgtctgtctttgagaaagcacctacctgtcttctgtgcagctagggctgcagagctgtattcaggtccaaggttctgcccttccttgagtggtctagaaggcactgcgtggcccctcagatgctgggacacaacagacccgggacccagctgtgctacccaccccttccatggactgaataagatggactaacaggccaaaaaaaaaaaaaaa

SEQ ID NO: 172 - DNA, 3303 bp, Homo sapiens
agggccgtccgctctgctgccgccgctgttgcagccaccgccgttgccgcctccctgccggcaagtgtgtggaagctgagcgttgtcgccgccgctatggggagaaagtcaagcaaagccaaggagaagaagcagaagcggttggaggagcgagcagccatggatgccgtttgtgccaaagtggacgctgccaacaggcttggagaccctctggaggctttcccagtgttcaagaaatatgatagaaacgggttgaatgtctccattgaatgtaagcgagtgtctggactggagccagccaccgtggattgggccttcgacctgaccaaaacgaatatgcaaaccatgtatgagcagagcgagtggggctggaaggaccgagagaaacgggaggaaatgacagatgaccgagcctggtacctcatcgcgtgggaaaacagctccgtccctgttgccttttctcacttccggtttgacgtggagtgtggggatgaagtcctgtactgctatgaagtgcagttggaaagcaaggtgcggcggaaaggcctggggaagttcctcatacagatcctgcagctcatggccaacagcacacagatgaagaaggttatgttaacagtatttaaacacaatcatggtgcctaccagttcttcagagaagcgttgcaatttgaaattgatgactcttcccccagcatgtccggttgctgtggggaggattgctcctatgagatcctgagccggaggaccaagtttggggacagccatcactcccacgcgggtgggcactgtagtggctgctgccactgaactctcagagccactttcaagtcacaatgctctctcctaaggcctttcctctttcctggtctcactgttcaccgggtgtcctcagagctgtggcctccccagccctgcacgtgccaggctgcgccctgagagcacagaaccctggggagaagtggtatcagctgctcctcctctcctaggagaccagagtgctagaagggaatgaaagggagagggaagagtaggtggggccgggcagtgaagctcatcctccacagtggctgcctcctcatttggctcctggggcctgcagtggaggttctcgcacctctgcagcccctagattcctggcaacctcccctcccctgacacatacacacttggacaaatggaatgtttatgtccacctttatgaaagttctggagtcctgggtctggggtttgctggtccccaaagaggaacacactgggtgtaagatctgggtgtagagggcggcttcagagagactcacgcttgcgcagttggaattgctgttaacggagactgggaagatcttttgtgccaagatgcagggaaatgaagaaagctctttccagctgtttttatggattcatggagtgggctcatgttgggaccagctgactctgggaggaagactgcctctccatcgctgtcagagagcctgaaaggaccaacaatgaggtgttcttgggacccgccatggggatgattgcttctctaggctcctggatgttgctgcattctaagcttaacctcctggtctcatggcagtgacttgagcttttgattcatagaagaaagccagaggttctgcttgttcttgtctgccagccctcgtcgttctttctcccctgcctctcacctctaccccaaatacctctgttcttagtctcaaggggagaataacatcagggagcccctcatcttccccagaaggacttctcgttcctcatgtagttaactccattgattttcctatcttggtgctgatagctctctaagggtagggcacacctccccacagccaccctccctcttcagagagcccccagccagcagcaggcccctctgcctgcactcctcaggcttgcccctcgctgcctcagtgaggcactagtgccactgccgtggcccagccgggccatagctcaggctgcagcagaaatgcctctcagtggccaacagttgcttttctctctggtgtcaccctgtggcaacaggctggagcaggggaaggagaaagccttcctcttctctcataggatagaaaggcaggctcagaactaatgctcatcctgatctctaggccttgttcctcttccagggaaaaaaagccaaatccttatcaaggaaaaagcacctaacagctccctttggatatccctgagctctgctgtggggagtatcataaaggttctagccttcgtgaagttgttctcgtggaggtctgttggtccctctgacctcagcatctgctcacatcccaccctctgcccaactctggcagtctctcctggcagatctccccagagtggtccttgcttctcacctggattcctgcttgtgcaggagcctgtgtacacagggcctccctcacccagcctggcccctctgctgagcactttgcgctgctcttgatgggcagcagtgggactgggaactccttagagagggccttgcagctttacactggaataagtctgcctctgcctctgcctcaccctgctggctcctggtgggtttcatcccaggcagagttgacattgctggaggggtttggtggactcctaagaatcatgaaaccacaggagcatgtttaggaagagatttgtctctggtccctgtctctgaaaggacacagatgctaaatatttattgtcttagatcatggattcctgatacctctcactcaaggggaccaaaagggacccccccgtgttcatcccttgtaaggtgagttcagtctacgttgtctctttccagtcactggatgcgtggcaccaactggtcaatgggtgcttggtgccataccctgctcaccctagtctctgcaggccatgtcctgaagggttcctcaggaggtcgggactagggtgggagaggcactatctgagacctgcaatcactcttgttggtcttgagcccattcatttccaaaacatccatctttctccacttcccccaggtcttggttttgagaaacagcaggcatggctgagtgcggtggcttacacctgtaatcccagcactttgggaggctgaggcaggcgggtcacctgaggtcaggagttcaagaccagcctggtcaacatggcaaaagcccatctctactaaaaaatacaaaaattagccaggcgtggttgtggcctgtaatcccagctactcgggaggctgaggcaggagactcgcttgaacccaggaggtggaggttgtggtgagctgagatcacgccattgcactccagcctaggcgacagagtgagactccatctc

SEQ ID NO: 173 - DNA, 1857 bp, Homo sapiens
ctgatccgggccgggcgggaagtcgggtcccgaggctccggctcggcagaccgggcggaaagcagccgagcggccatggagctgtgcgggctggggctgccccggccgcccatgctgctggcgctgctgttggcgacactgctggcggcgatgttggcgctgctgactcaggtggcgctggtggtgcaggtggcggaggcggctcgggccccgagcgtctcggccaagccggggccggcgctgtggcccctgccgctctcggtgaagatgaccccgaacctgctgcatctcgccccggagaacttctacatcagccacagccccaattccacggcgggcccctcctgcaccctgctggaggaagcgtttcgacgatatcatggctatatttttggtttctacaagtggcatcatgaacctgctgaattccaggctaaaacccaggttcagcaacttcttgtctcaatcacccttcagtcagagtgtgatgctttccccaacatatcttcagatgagtcttatactttacttgtgaaagaaccagtggctgtccttaaggccaacagagtttggggagcattacgaggtttagagacctttagccagttagtttatcaagattcttatggaactttcaccatcaatgaatccaccattattgattctccaaggttttctcacagaggaattttgattgatacatccagacattatctgccagttaagattattcttaaaactctggatgccatggcttttaataagtttaatgttcttcactggcacatagttgatgaccagtctttcccatatcagagcatcacttttcctgagttaagcaataaaggaagctattctttgtctcatgtttatacaccaaatgatgtccgtatggtgattgaatatgccagattacgaggaattcgagtcctgccagaatttgatacccctgggcatacactatcttggggaaaaggtcagaaagacctcctgactccatgttacagtagacaaaacaagttggactcttttggacctataaaccctactctgaatacaacatacagcttccttactacatttttcaaagaaattagtgaggtgtttccagatcaattcattcatttgggaggagatgaagtggaatttaaatgttgggaatcaaatccaaaaattcaagatttcatgaggcaaaaaggctttggcacagattttaagaaactagaatctttctacattcaaaaggttttggatattattgcaaccataaacaagggatccattgtctggcaggaggtttttgatgataaagcaaagcttgcgccgggcacaatagttgaagtatggaaagacagcgcatatcctgaggaactcagtagagtcacagcatctggcttccctgtaatcctttctgctccttggtacttagatttgattagctatggacaagattggaggaaatactataaagtggaacctcttgattttggcggtactcagaaacagaaacaacttttcattggtggagaagcttgtctatggggagaatatgtggatgcaactaacctcactccaagattatggcctcgggcaagtgctgttggtgagagactctggagttccaaagatgtcagagatatggatgacgcctatgacagactgacaaggcaccgctgcaggatggtcgaacgtggaatagctgcacaacctctttatgctggatattgtaaccatgagaacatgtaaaaaatggaggggaaaaaggccacagcaatctgtactacaatcaactttattttgaaatcatgtaaaataagatattagacttttttgaataaaatatttttattgattgaa

SEQ ID NO: 174 - DNA, 3201 bp, Homo sapiens
gtctgaggaaagacaggaaagcgccagcatctccaccttccccggaagcctccctttgccaggcagaaagggtttcccatggggccgcccctggcgccgcgcccggcccacgtacccggggaggccgggccccggaggacgagggaaagcaggccgggcgccgtgagcttcgcggacgtggccgtgtacttctctcccgaggagtgggaatgcctgcggccagcgcagagggccctgtaccgggacgtgatgcgggagaccttcggccacctgggcgcgctgggattttcagttcccaaacccgcttttatctcgtgggtggaaggagaagtggaggcgtggagcccggaggcccaggatcccgacggtgagagctctgcagctttcagcaggggccaaggacaggaagcaggatccagggatgggaatgaggagaaggaaaggctgaagaagtgtccaaaacaaaaagaggtggcgcatgaagtggctgtcaaggagtggtggcccagcgtcgcctgcccagagttctgcaaccctaggcagagccccatgaatccctggctcaaggacactctgacccgaagactgccccactcttgcccagactgtggccgcaacttcagctacccttccctcctggccagccaccagcgggtccactccggggagcggcccttctcctgcggccagtgtcaggcgcgtttctcccagcgcaggtacctgctccagcatcagttcatccacaccggcgagaagccctacccctgccccgactgcgggcgccgcttccgccagaggggttccctggctatccacaggcgggctcacaccggggagaagccttacgcgtgctcagactgcaagagtcgcttcacttacccctacctgctggccatccaccagcgcaagcacacgggcgagaagccctacagctgccccgattgcagcctccgtttcgcctacacctccctgctggccatccacaggcgcatacacaccggcgagaagccctacccctgtcctgactgcggccgccgcttcacctattcttccctcctcctcagtcaccggcgcattcactccgacagccggcccttcccctgcgtggagtgtgggaaaggcttcaagcgcaagaccgccctggaagcccatcggtggatccaccgctcctgcagcgagaggcgcgcgtggcagcaggccgtggtggggcgttcagagcccatccctgttttgggaggcaaggatcccccagttcacttccggcactttccagatatatttcaagagtgtgggtgatggcgttcacacaaactggtcagcgtttccctggagaggaagaggcaaggtttgtgtatttgggggataaggaaaggaagtgggcgtttgaggaaaacaaagttctgccttaggtaaaaagcagaggtaggggcacagagggctgtggggaggaggcaggaatctgaaaaggtgcctgggggttgaccccattttctgaagctccagcacacagggccccgtgttcacgtcccatccttcactgaaaaccattcacctaactggcttttccttcatgattgttctctcccttgtagctctctgctttttggcctgtatctctcctactcctctgagatggggtcccctacattccagtgcctattaaaggagcctgcacccactctggaccccccagaatagaggggatacctcaggcctgtccctcggctggtgggggggggcggagctcatcccaggattcttttcttttttttgagatggagtcatgctctgtcgcccaggctggagtgcagtggcgtgatctcggctcgctgcagcctctgcctcctgggttcaagccattctctgcctcagccttcccattagctgggattacaggcatgcgccaccaggcccggctaatttttgtgctgttagtagagacggggttccaccgtcttggccaggctggtcttgaattcctgacctcgtgatccacccgcctcggcgtctcaaagtgctgggattacaagcgtgagccaccgacccctgccgaggattctgccttttaccaatgcaggtgaaacatctggcaaggagacacctggagtgtaggtgttccttggtcttgaagacctagaggtggccatagagaggacagtggcctcaggtggggaactccccccccactctcattctgcaagtgcacaaactatcaaacatagcggactctggaactgggccaactcttcactgtatgcattagtgattgcagtgtttttttcttcttcagatatttgcatgttccctggattttgtattttttgataaagatatattcttgggccacagtagctggagatataatgccggaggattctttttttttttttttttttgagacagagtctgtctctgttgcctgggctggagtgcagtggcccaagctacgctcactgcaggctccgcctcctgggttcacgccattctcctgcttcagtctcccgagtggctggaattgcaggcacccgccaccacgcccaactaatattttgtatttttagtagagacgggggtttcgccgtgttggccaggatggtctcgatctcctgacttcgtgatcctcccgcctcggcctcccgaagtgctgggattgcaggcgtgagccactgcacccagcctcttttttttttttgagatggagtttcgctcttgttgcccaggctagagtgcaatggcatgatcttggctcactgcaacctccgcctcctgggttcgggcgattctcctgccccagcctcttgagtggctgggattgcaggcgcccgcgaccatgcctggctaattgcatttttactggagacgggtttcaccgtgttggccaggctggtctccgattcctgacctcgggtgatccacccgacttggcctcccaaagttctgggattacattttttttttaaagaaagaataaattaattgtgattaaagttgaaatcaaggcatagtctttccagtctaatttttactgtaatgcttgtatgtcaacagttatgaaggccaggcgcggcggctcacgcctgtaatcctagcggtttggggggctgaggagggtggatcacttaaggtcaggagttcaggaccagcctggccaatatggtgaaaccccatctctactaaaaataccgaaaaaaaaaaaaaaaa

SEQ ID NO: 175 - DNA, 3098 bp, Homo sapiens
tgctgtacagaacactaccattgccgctctttcccaacaagtaactaggggctcccaatccctaaaatacacacacatatcaacctgcaaggaacctcccaacatttattcaagaaataagctaacttataaggggaactccattacacttacacaaataaaggcaaactcttacggaaacacttgccatcctcacatacacacaccaacacagccgctacacaccaacagaccatctgtctgctagaccaaaaacatctctttccatgtacaaactaaccagtgacatttattaaacttacaacactgagatcatcctgtcgttcccacataccgttcaacgcggcagggacaccacagaccttgtcacacaggtaaaatcccctctcaagatcgtgtcctcgaccactcttatcccttaattaaacacacacaaactggactatgggggaggctccgatcatgcctacaaacacaaactaacctgtcaggggcacagccgactccgcctccactcgcttacttcccagccccctccgggagtctgcctgtcagggacaccccttcaccccgcctggagggacttcccggtaggctcaggatccccctccctgctctcccctcccccatcttcaccactgctctctcagagatccaggtccgggagatgacagtggctcccagaaagcccaggattcaatcgctgagagagtgcttaggcccgaatgccggcccaaatcgttctactcaccgtgtcggaggccgaggccgaggccgagagcgatgagagtgcagggaagtggggaagagggggtggccgccaggctcctccgcttccctgggtccacggcggatccctcccgcttgtcaggaggcggccagcgggtaagctgactggcggaaatgcgagagaggagaagggaaaggtggaaggctaaagggggcaaactgaggggaggcgggtcccgcaaccgagactgggatcgtctcccctccgcaaagcgaacccaaaatggcggcgggagcggcggcggcggcggcggcagcagcagagtggcggcggtggcggcggcagctcctccagagggagggagcgaagggcgcctagcgcccccctcaaccttccactccttcctccttgcgttctttcccaccgtcccccgctccgcccgactccgtccgcgtagcgcgcacgcccgcccgcacgcgtacgagtgtctacgggctcgtcgctggctgctcccaccaaccaccaccttcggccgccccgcgcgccagccagcccgtacgcgctcacccacaggaaccccctcgtccagtccctcactacccctcaggccctgtcaagccggcgccggcgcaggccctcacgcgtaccttcaacggcgcaagcccaagcctcctcctcctcctcctccacctcctcttctctcctccccccccttccccgcccccacggccaccaaccgccgccacggccgccgccgccgccgccagccccccctaccaccctccacccctcgcgcgtgcgcctcccacaatcccccccgcgggactgttccattcctgtcggctgcaggggcaggagaggaagggacgggccgagcgggtcggggcttgccgtttgactggaattgccagaatggcggaccgagccccacgacaacctacctccctgggctcctcgccgcagcgctgcggctcgcctccctctgctcctcctcctccgccggatcgcggcgagcggatcgaggactgcctagcgcccctctgcccaccggtggttggaggccgcggcggctgcgcgttgagtcgtttcctgccggttgacctgagcctacttcgcagtagcaggaccgctgctgtggagctggtcgcaggcggtgtgtgccggtcgcctagtcaggagaactagtcctcgactcacggtgagggaatggaccgacacgggtattgtaccgctgagggaaaggagcgggactccggacctccaggaggtagggagtgaggccagtaggaccggcgcgcctccggggggattcctcccgggcgttgagttgccaacctgggacccgaggaagatcggcgtggtggtgtgctttttgttgttgttaaccctcctcggatttctcgaatttcacaccactgtccatatgcgatgatgtttgtttgcccttgacgcacttactcatggatggtacttcttcagcctcgttagacagcctggtgatggaggatgaagaaaccatgtgcttttcattcagttctggacttagtctcccttttcttccttcagcaagttatttttgttagttccttatcaaaaagtgtacataaaaattaggcaactccaaacatgcctccagggttaatgtgtgaaataataagataatatatgtaaagtggaattagctcctaggcatagggaaagtgcagaatattgccgtgttgtcatttacagttctgttgatgtcgataacgtttgtgggtgtaattggtagtgttctgtccctccaaggagttaataaaacaaagcaaacataggcctgttaggtttctgtggctactgaatatttgtttctcaaaacacttgactgatatttgataattgaatgcagcagaaatacggacgattaaagtccacaaataattccaaagtttacttgatctagtagtttttacctttacctaaagggtaaagcagaataaattaccggaaggatctacttgggtttccctttccttcacatttgtggactcctggggatccaggaagtaattcagaaatgactgttcaaaagcccatgcaaggccgggcgcggtggctaacgcttgtaatcccagcgctttgggaggccaaggtgggcggatgacctgaggtcaggagttcgagaccagcctggccaacatggcaaaatcccgtctctactaaaaatacaaaaattagccaggcgtggtggtggacgcctgtaatcccagctactcaggagactgaggcaggagaatcgcttgaacctgggaggcggagattgcagtgagccgagatggtgccattgcactccagcctgggcaacaagagcgaaactccatctgaggga

SEQ ID NO: 176 - DNA, 1758 bp, Homo sapiens
tcagagatccaggtccgggagatgacagtggctcccagaaagcccaggattcaatcgctgagagagtgcttaggcccgaatgccggcccaaatcgttctactcaccgtgtcggaggccgaggccgaggccgagagcgatgagagtgcagggaagtggggaagagggggtggccgccaggctcctccgcttccctgggtccacggcggatccctcccgcttgtcaggaggcggccagcgggggcaggagaggaagggacgggccgagcgggtcggggcttgccgtttgactggaattgccagaatggcggaccgagccccacgacaacctacctccctgggctcctcgccgcagcgctgcggctcgcctccctctgctcctcctcctccgccggatcgcggcgagcggatcgaggactgcctagcgcccctctgcccaccggtggttggaggccgcggcggctgcgcgttgagtcgtttcctgccggttgacctgagcctacttcgcagtagcaggaccgctgctgtggagctggtcgcaggcggtgtgtgccggtcgcctagtcaggagaactagtcctcgactcacggtgagggaatggaccgacacgggtattgtaccgctgagggaaaggagcgggactccggacctccaggaggtagggagtgaggccagtaggaccggcgcgcctccggggggattcctcccgggcgttgagttgccaacctgggacccgaggaagatcggcgtggtggtgtgctttttgttgttgttaaccctcctcggatttctcgaatttcacaccactgtccatatgcgatgatgtttgtttgcccttgacgcacttactcatggatggtacttcttcagcctcgttagacagcctggtgatggaggatgaagaaaccatgtgcttttcattcagttctggacttagtctcccttttcttccttcagcaagttatttttgttagttccttatcaaaaagtgtacataaaaattaggcaactccaaacatgcctccagggttaatgtgtgaaataataagataatatatgtaaagtggaattagctcctaggcatagggaaagtgcagaatattgccgtgttgtcatttacagttctgttgatgtcgataacgtttgtgggtgtaattggtagtgttctgtccctccaaggagttaataaaacaaagcaaacataggcctgttaggtttctgtggctactgaatatttgtttctcaaaacacttgactgatatttgataattgaatgcagcagaaatacggacgattaaagtccacaaataattccaaagtttacttgatctagtagtttttacctttacctaaagggtaaagcagaataaattaccggaaggatctacttgggtttccctttccttcacatttgtggactcctggggatccaggaagtaattcagaaatgactgttcaaaagcccatgcaaggccgggcgcggtggctaacgcttgtaatcccagcgctttgggaggccaaggtgggcggatgacctgaggtcaggagttcgagaccagcctggccaacatggcaaaatcccgtctctactaaaaatacaaaaattagccaggcgtggtggtggacgcctgtaatcccagctactcaggagactgaggcaggagaatcgcttgaacctgggaggcggagattgcagtgagccgagatggtgccattgcactccagcctgggcaacaagagcgaaactccatctgaggga

SEQ ID NO: 177 - DNA, 1458 bp, Homo sapiens
ctcccagaaagcccaggattcaatcgctgagagagtgcttaggcccgaatgccggcccaaatcgttctactcaccgtgtcggaggccgaggccgaggccgagagcgatgagagtgcagggaagtggggaagagggggtggccgccaggctcctccgcttccctgggtccacggcggatccctcccgcttgtcaggaggcggccagcggtagcaggaccgctgctgtggagctggtcgcaggcggtgtgtgccggtcgcctagtcaggagaactagtcctcgactcacggtgagggaatggaccgacacgggtattgtaccgctgagggaaaggagcgggactccggacctccaggaggtagggagtgaggccagtaggaccggcgcgcctccggggggattcctcccgggcgttgagttgccaacctgggacccgaggaagatcggcgtggtggtgtgctttttgttgttgttaaccctcctcggatttctcgaatttcacaccactgtccatatgcgatgatgtttgtttgcccttgacgcacttactcatggatggtacttcttcagcctcgttagacagcctggtgatggaggatgaagaaaccatgtgcttttcattcagttctggacttagtctcccttttcttccttcagcaagttatttttgttagttccttatcaaaaagtgtacataaaaattaggcaactccaaacatgcctccagggttaatgtgtgaaataataagataatatatgtaaagtggaattagctcctaggcatagggaaagtgcagaatattgccgtgttgtcatttacagttctgttgatgtcgataacgtttgtgggtgtaattggtagtgttctgtccctccaaggagttaataaaacaaagcaaacataggcctgttaggtttctgtggctactgaatatttgtttctcaaaacacttgactgatatttgataattgaatgcagcagaaatacggacgattaaagtccacaaataattccaaagtttacttgatctagtagtttttacctttacctaaagggtaaagcagaataaattaccggaaggatctacttgggtttccctttccttcacatttgtggactcctggggatccaggaagtaattcagaaatgactgttcaaaagcccatgcaaggccgggcgcggtggctaacgcttgtaatcccagcgctttgggaggccaaggtgggcggatgacctgaggtcaggagttcgagaccagcctggccaacatggcaaaatcccgtctctactaaaaatacaaaaattagccaggcgtggtggtggacgcctgtaatcccagctactcaggagactgaggcaggagaatcgcttgaacctgggaggcggagattgcagtgagccgagatggtgccattgcactccagcctgggcaacaagagcgaaactccatctgaggga

SEQ ID NO: 178 - DNA, 2509 bp, Homo sapiens
gagcgaaaggcttgaggaccaggtcggggccgggttccgggtcggggagcggctccgggcggcagctatgaggcgggacgtgcgcatcctgttactgggcgaggcccaggtggggaagacgtcgctgatcctgtccctggtgggcgaggagttccccgaggaggtccctccccgcgcggaggagatcacgatccccgcggacgtcaccccggagaaggtgcccacccacatcgtggactactcagaagccgagcagacggacgaggagctgcgggaggagatccacaaggcaaacgtggtgtgtgtggtgtatgacgtctctgaggaggccaccattgagaagattcgaactaagtggatcccactggtgaatggggggaccacgcaggggcccagggtgcccatcatcctagtgggcaacaagtcagacctgcggtcggggagctccatggaggccgtgctccccatcatgagccagtttcccgagattgagacctgcgtggagtgttcggccaagaacctgaggaacatctcagagctgttctactacgcccagaaggccgtcctgcatcccacagcccccctctatgaccctgaggccaagcagttgaggcccgcgtgcgcccaggcgctgacgcgcatcttcaggctctcagatcaggacctggaccaggcgctcagtgacgaagagctcaacgctttccagaaatcctgctttgggcaccccctggccccgcaggccctggaggacgtgaagacggtggtgtgcaggaacgtggcgggcggcgtgcgggaggaccggctgaccctggatggtttcctcttcctgaacacgctcttcatccagcgcggccggcacgagaccacctggaccatcctgcggcgcttcggctacagcgatgccctggagctgactgcggactatctctcccctctgatccacgtgccccccggctgcagcacggagctcaaccaccttggctaccagtttgtgcagagagtgtttgagaagcacgaccaggaccgcgacggcgccctctcgcccgtggagctgcaaagccttttcagtgtgttcccagcagcgccctggggccccgagctcccacgcacagtccgcacagaggccggccggttgcccctgcacggatacctctgccagtggaccctggtgacctacctggacgtccggagctgccttggacacctaggctacctgggctaccccaccctctgtgagcaggaccaggcccatgccatcacagtcactcgtgagaagaggctggaccaggagaagggacagacgcagcggagcgtcctcctgtgcaaggtggtaggggcccgtggagtgggcaagtctgccttcctgcaggcttttctcggccgcggcctggggcaccaggacacgagggagcagcctcccggctacgccatcgacacggtgcaggtcaatggacaggagaagtacttgatcctctgtgaggtgggcacagatggtctgctggccacatcgctggacgccacctgtgacgttgcctgcttgatgtttgatggcagtgacccaaagtcctttgcacattgtgccagcgtctacaagcaccattacatggacgggcagaccccctgcctctttgtctcctccaaggccgacctgcccgaaggtgtcgcggtgtctggcccatcaccggccgagttttgccgcaagcaccggctacccgctcccgtgccgttctcctgtgctggcccagccgagcccagcaccaccatcttcacccagctcgccaccatggccgccttcccacatttggtccacgcagagctgcatccctcttccttctggctccgggggctgctgggggttgtcggggccgccgtggccgcagtcctcagcttctcactctacagggtcctggtgaagagccagtgaggcccctggtacccaagccccctcccctgacctgggtgtgcctcgctgctggggctctgcaggggcagcacagctggggtgcaggccaggctgccactccgggaacgcctttgcgccgggactttttgtttctgaaggcagtcgatctgcagcggggccttatgctgccatgcactgccctggctcctgccggacccccagggtgggccgtggcaggtggctgagcaggagctcccaagtgccggccaccgctgtcagggattgcccacccctgggcatcatgtgtgtggggccggggagcacaggtgtgggagctggtgaccccagacccagaattctcagggctctacccccctttcctggtcctaggtggccagtgggtatgaggagggctggaaggcagagctttgggccaaaagcaggcgttggggggtcccccctcaagtttggagccgtttccgtggttgtagcagaggaccggaggttgggttcctgattaaacttcactgtgtgttttctatctcggatcccagtctctgaagacaacttgctttgattcaacctaaaaaaaaaaaaaaaaaaaaa

SEQ ID NO: 179 - DNA, 2089 bp, Homo sapiens
gctcacggcggcggcggcggagcggagaggccagagccggagaccgagctgggatcgggccccgggcgggggcggtgcgagcggcgccaagcagatcttaggggcggggacggagccggggcgggcgggactgaagcggagcccgggaacggggcgggaggtcccagggtcccgggttgggggggtggagcagcatttcgtcgccgcgggggtgccgggactccggccgcagtgtcgccgccatcacggacttcctgtgggacaagcgcacgggcctcgccgccagaacgatgccgcatcctcgaaggtaccactcctcagagcgaggcagccgggggagttaccgtgaacactatcggagccgaaagcataagcgacgaagaagtcgctcctggtcaagtagtagtgaccggacacgacggcgtcggcgagaggacagctaccatgtccgttctcgaagcagttatgatgatcgttcgtccgaccggagggtgtatgaccggcgatactgtggcagctacagacgcaacgattatagccgggatcggggagatgcctactatgacacagactatcggcattcctatgaatatcagcgggagaacagcagttaccgcagccagcgcagcagccggaggaagcacagacggcggaggaggcgcagccggacatttagccgctcatcttcgatgaaatcgttagcaccttaggagaggggaccttcggccgagttgtacaatgtgttgaccatcgcaggggtggggctcgagttgccctgaagatcattaagaatgtggagaagtacaaggaagcagctcgacttgagatcaacgtgctagagaaaatcaatgagaaagaccctgacaacaagaacctctgtgtccagatgtttgactggtttgactaccatggccacatgtgtatctcctttgagcttctgggccttagcaccttcgatttcctcaaagacaacaactacctgccctaccccatccaccaagtgcgccacatggccttccagctgtgccaggctgtcaagttcctccatgataacaagctgacacatacagacctcaagcctgaaaatattctgtttgtgaattcagactatgagctcacctacaacctagagaagaagcgagatgagcgcagtgtgaagagcacagctgtgcgggtggtagactttggcagtgccacctttgaccatgagcaccatagcaccattgtctccactcgccattaccgagcaccagaagtcatccttgagttgggctggtcacagccttgtgatgtgtggagtataggctgcatcatctttgaatactatgtgggattcaccctcttccagacccatgacaacagagagcatctagccatgatggaaaggatcttgggtcctatcccttcccggatgatccgaaagacaagaaagcagaaatatttttaccggggtcgcctggattgggatgagaacacatcagctgggcgctatgttcgtgagaactgcaaaccgctgcggcggtatctgacctcagaggcagaggaacaccaccagctcttcgatctgattgaaagcatgctagagtatgaaccagctaagcggctgaccttgggtgaagcccttcagcatcctttcttcgcccgccttcgggctgagccgcccaacaagttgtgggactccagtcgggatatcagtcggtgacgatcaggccctgggcccccctgcatcttttatagcagtgggtgtccagtccaggacactggtgcttttttatacaagagaacgagccagagttcactccttcctcctggctctctatatacctgtgaatatgtgaaatagtgtaaatatgaaagaacttgtacctatcacttcaacccctgccttgtacataatactattccatccacacagtttccaccctcacctgccccctcatacggagttggatgggggccgagtgaggtaaccaggtggcatctaccccatgttttataaggaattttgtacagtctttgtgaaataaaataacgtgcttcatttgacccccaaaaaaaaaaaaaaaaaaaaaaaaaaaaaaaaaaaaaa

SEQ ID NO: 180 - DNA, 2175 bp, Homo sapiens
gctcacggcggcggcggcggagcggagaggccagagccggagaccgagctgggatcgggccccgggcgggggcggtgcgagcggcgccaagcagatcttaggggcggggacggagccggggcgggcgggactgaagcggagcccgggaacggggcgggaggtcccagggtcccgggttgggggggtggagcagcatttcgtcgccgcgggggtgccgggactccggccgcagtgtcgccgccatcacggacttcctgtgggacaagcgcacgggcctcgccgccagaacgatgccgcatcctcgaaggtaccactcctcagagcgaggcagccgggggagttaccgtgaacactatcggagccgaaagcataagcgacgaagaagtcgctcctggtcaagtagtagtgaccggacacgacggcgtcggcgagaggacagctaccatgtccgttctcgaagcagttatgatgatcgttcgtccgaccggagggtgtatgaccggcgatactgtggcagctacagacgcaacgattatagccgggatcggggagatgcctactatgacacagactatcggcattcctatgaatatcagcgggagaacagcagttaccgcagccagcgcagcagccggaggaagcacagacggcggaggaggcgcagccggacatttagccgctcatcttcgcacagcagccggagagccaagagtgtagaggacgacgctgagggccacctcatctaccacgtcggggactggctacaagagcgatatgaaatcgttagcaccttaggagaggggaccttcggccgagttgtacaatgtgttgaccatcgcaggggtggggctcgagttgccctgaagatcattaagaatgtggagaagtacaaggaagcagctcgacttgagatcaacgtgctagagaaaatcaatgagaaagaccctgacaacaagaacctctgtgtccagatgtttgactggtttgactaccatggccacatgtgtatctcctttgagcttctgggccttagcaccttcgatttcctcaaagacaacaactacctgccctaccccatccaccaagtgcgccacatggccttccagctgtgccaggctgtcaagttcctccatgataacaagctgacacatacagacctcaagcctgaaaatattctgtttgtgaattcagactatgagctcacctacaacctagagaagaagcgagatgagcgcagtgtgaagagcacagctgtgcgggtggtagactttggcagtgccacctttgaccatgagcaccatagcaccattgtctccactcgccattaccgagcaccagaagtcatccttgagttgggctggtcacagccttgtgatgtgtggagtataggctgcatcatctttgaatactatgtgggattcaccctcttccagacccatgacaacagagagcatctagccatgatggaaaggatcttgggtcctatcccttcccggatgatccgaaagacaagaaagcagaaatatttttaccggggtcgcctggattgggatgagaacacatcagctgggcgctatgttcgtgagaactgcaaaccgctgcggcggtatctgacctcagaggcagaggaacaccaccagctcttcgatctgattgaaagcatgctagagtatgaaccagctaagcggctgaccttgggtgaagcccttcagcatcctttcttcgcccgccttcgggctgagccgcccaacaagttgtgggactccagtcgggatatcagtcggtgacgatcaggccctgggcccccctgcatcttttatagcagtgggtgtccagtccaggacactggtgcttttttatacaagagaacgagccagagttcactccttcctcctggctctctatatacctgtgaatatgtgaaatagtgtaaatatgaaagaacttgtacctatcacttcaacccctgccttgtacataatactattccatccacacagtttccaccctcacctgccccctcatacggagttggatgggggccgagtgaggtaaccaggtggcatctaccccatgttttataaggaattttgtacagtctttgtgaaataaaataacgtgcttcatttgacccccaaaaaaaaaaaaaaaaaaaaaaaaaaaaaaaaaaaaaaa

SEQ ID NO: 181 - DNA, 2244 bp, Homo sapiens
gctgcatctgaggcggacgccgcagtgtagggcacaccctgagggtagcgagagacgtgacaggaccgagcagctgggggctgcagcctgctctgtccccaccgatcccagagagaggctgtgagtctggatctgggcgttcgcaccctgagagagggggtcaaagctcccctgcggccccgaggaagaagagcaaggttgaggacagcctcgggtcaccagagtagtttggaggcaggcctgcaggcgcgtccccgctcctcagctccaagctgacgtatctacacctgccggcgggcattaagatggctggttatgccactactcccagccccatgcagacccttcaggaggaagcggtgtgtgccatctgcttggattacttcaaggaccccgtgtccatcagctgtgggcacaacttctgccgagggtgtgtgacccagctgtggagtaaggaggacgaggaggaccagaacgaggaggaagatgaatgggaggaggaggaggacgaggaagcggtgggggccatggatggatgggacggctccattcgagaggtgttgtatcgggggaatgctgacgaagagttgttccaagaccaagatgacgatgaactctggctcggtgacagtggtataactaattgggacaacgtagactatatgtgggacgaggaggaagaagaagaagaggaagatcaggactattacctaggaggcttgagacctgacctgagaattgatgtctaccgagaagaagaaatactggaagcatacgatgaggacgaagatgaagagctgtatcctgacatccacccgcctccttccttgccccttccagggcagttcacctgcccccagtgccgaaagagctttacacgtcgcagctttcgtcccaacttgcagctggccaacatggtccagataattcgccagatgtgccccactccttatcggggaaaccggagtaatgatcagggcatgtgctttaaacaccaggaagccctgaaactcttctgtgaggtggacaaagaggccatctgtgtggtgtgccgagaatccaggagccacaaacagcacagcgtgctgcctttggaggaggtggtgcaggagtaccaggaaataaagttggaaacaactctggtgggaatacttcagatagagcaagaaagcattcacagcaaggcctataatcagtaagatgtgtgaaaagttgggtagccacaggaggtgttcattaaggatatgattccatttatatagctatttctattgcataaccaggacagttttattgttttgaggtcaatgttcttttaaaatttgattttctgtaagaagaggctttttggcccagaaagccttacttattttacatcttccagtttgtccatcccatgagttagagttcgtcttgactctgcaagctagaatcaaagaattatgaaagtaagatcatttagatttgaccaagggcaccattaaatggtgtcaggttttaggaagcagacgggtgtataaaaagaaaatgaacaaagatttcacttattggggatcaggcataactggatgcctggattgtcctgccacccagctgccaccaataaaatcattcatcactctgcaagagggaccagatgcttccatcatcagtactccttgtttttctgttatctcctttgaggtagctaaaaatggcagccaaaaaaaaatgttgaggcttttctcaagtatatactcatgttattttgcagaagatagggtcaacttcttcagttgagttatctgaaagtgttgggcagtgacaccatgccaaacactgttaaattcatgccattaaaaacagtggagtgttctgcaaagcccgattctctgcagctttaagactggacagtattgaaatattcacaggaatcttccaagccgtgaaagcttaatattaaacagcccttttaattgcaaaggagaaaaaaatggagacacttgtgaaaccttgcattctgagtgctgccacaaataaattaaggaattccagaatttcttcatctacttctgcagtcttaactctgaattaatgactgtatatatcaaacttcagatcttaaaaaacatcagctcgcaagaggctgaggcaggagaatgacatgaacctgggaggcggagcttgcagtaagccgagactgagccactgcactccagcctgggcaatagagcaagactccatctcaaaaaaaaaaaaaaaaaa

SEQ ID NO: 182 - DNA, 3260 bp, Homo sapiens
ccatcccatagtgagggaagacacgcggaaacaggcttgcacccagacacgacaccatgcatctcctcggcccctggctcctgctcctggttctagaatacttggctttctctgactcaagtaaatgggtttttgagcaccctgaaaccctctacgcctgggagggggcctgcgtctggatcccctgcacctacagagccctagatggtgacctggaaagcttcatcctgttccacaatcctgagtataacaagaacacctcgaagtttgatgggacaagactctatgaaagcacaaaggatgggaaggttccttctgagcagaaaagggtgcaattcctgggagacaagaataagaactgcacactgagtatccacccggtgcacctcaatgacagtggtcagctggggctgaggatggagtccaagactgagaaatggatggaacgaatacacctcaatgtctctgaaaggccttttccacctcatatccagctccctccagaaattcaagagtcccaggaagtcactctgacctgcttgctgaatttctcctgctatgggtatccgatccaattgcagtggctcctagagggggttccaatgaggcaggctgctgtcacctcgacctccttgaccatcaagtctgtcttcacccggagcgagctcaagttctccccacagtggagtcaccatgggaagattgtgacctgccagcttcaggatgcagatgggaagttcctctccaatgacacggtgcagctgaacgtgaagcacaccccgaagttggagatcaaggtcactcccagtgatgccatagtgagggagggggactctgtgaccatgacctgcgaggtcagcagcagcaacccggagtacacgacggtatcctggctcaaggatgggacctcgctgaagaagcagaatacattcacgctaaacctgcgcgaagtgaccaaggaccagagtgggaagtactgctgtcaggtctccaatgacgtgggcccgggaaggtcggaagaagtgttcctgcaagtgcagtatgccccggaaccttccacggttcagatcctccactcaccggctgtggagggaagtcaagtcgagtttctttgcatgtcactggccaatcctcttccaacaaattacacgtggtaccacaatgggaaagaaatgcagggaaggacagaggagaaagtccacatcccaaagatcctcccctggcacgctgggacttattcctgtgtggcagaaaacattcttggtactggacagaggggcccgggagctgagctggatgtccagtatcctcccaagaaggtgaccacagtgattcaaaaccccatgccgattcgagaaggagacacagtgaccctttcctgtaactacaattccagtaaccccagtgttacccggtatgaatggaaaccccatggcgcctgggaggagccatcgcttggggtgctgaagatccaaaacgttggctgggacaacacaaccatcgcctgcgcacgttgtaatagttggtgctcgtgggcctcccctgtcgccctgaatgtccagtatgccccccgagacgtgagggtccggaaaatcaagcccctttccgagattcactctggaaactcggtcagcctccaatgtgacttctcaagcagccaccccaaagaagtccagttcttctgggagaaaaatggcaggcttctggggaaagaaagccagctgaattttgactccatctccccagaagatgctgggagttacagctgctgggtgaacaactccataggacagacagcgtccaaggcctggacacttgaagtgctgtatgcacccaggaggctgcgtgtgtccatgagcccgggggaccaagtgatggaggggaagagtgcaaccctgacctgtgagagtgacgccaaccctcccgtctcccactacacctggtttgactggaataaccaaagcctcccccaccacagccagaagctgagattggagccggtgaaggtccagcactcgggtgcctactggtgccaggggaccaacagtgtgggcaagggccgttcgcctctcagcacccttactgtctactatagcccggagaccatcggcaggcgagtggctgtgggactcgggtcctgcctcgccatcctcatcctggcaatctgtgggctcaagctccagcgacgttggaagaggacacagagccagcaggggcttcaggagaattccagcggccagagcttctttgtgaggaataaaaaggttagaagggcccccctctctgaaggcccccactccctgggatgctacaatccaatgatggaagatggcattagctacaccaccctgcgctttcccgagatgaacataccacgaactggagatgcagagtcctcagagatgcagagacctccccggacctgcgatgacacggtcacttattcagcattgcacaagcgccaagtgggcgactatgagaacgtcattccagattttccagaagatgaggggattcattactcagagctgatccagtttggggtcggggagcggcctcaggcacaagaaaatgtggactatgtgatcctcaaacattgacactggatgggctgcagcagaggcactgggggcagcgggggccagggaagtccccgagtttccccagacaccgccacatggcttcctcctgcgtgcatgtgcgcacacacacacacacacgcacacacacacacacacactcactgcggagaaccttgtgcctggctcagagccagtctttttggtgagggtaaccccaaacctccaaaactcctgcccctgttctcttccactctccttgctacccagaaatcatctaaatacctgccctgacatgcacacctcccctgccccaccagcccactggccatctccacccggagctgctgtgtcctctggatctgctcgtcattttccttcccttctccatctctctggccctctacccctgatctgacatccccactcacgaatattatgcccagtttctgcctctgagggaaagcccagaaaaggacagaaacgaagtagaaaggggcccagtcctggcctggcttctcctttggaagtgaggcattgcacggggagacgtacgtatcagcggccccttgactctggggactccgggtttgagatggacacactggtgtggattaacctgccagggagacagagctcacaataaaaatggctcagatgccacttcaaagaaaaaaaaaa

SEQ ID NO: 183 - DNA, 2309 bp, Homo sapiens
gcgctccgtcaccagggagtgcgggaatccgccgtttgcgctgaggcaatggcggcagctgcgccggtggccgcggacgacgatgagcggcggcggcggccgggggctgcactggaggactcccggtcccaggaaggggcaaatggtgaggccgagtcaggtgagctcagccggcttcgggctgagctggcaggcgccctggcagaaatggaaaccatgaaggctgtggcagaggtgagcgagagcacgaaggccgaggctgtggctgcggtgcagcggcagtgccaagaggaggtggcctcgctgcaggccatcctgaaagactccatcagcagctatgaagcccagatcaccgccctgaagcaggagcgacagcagcagcagcaggactgtgaggagaaggagcgggagctgggccgcctgaagcagctgctgtcccgggcctaccccctggactccctggagaagcagatggaaaaggcccacgaggactcggagaagctgcgggagatcgtactgcccatggaaaaggagatcgaggagctgaaggcgaagctgctgagggccgaggagctgattcaggagatccagagacgtccccggcatgccccttccctgcacggctccacggagttgctgcccctgtcccgggatccatcgcccccgctggagcctctggaggagctgagcggagatgggggtccagccgctgaggccttcgctcacaactgcgatgacagcgcctccatctcctccttctcccttggcggtggggtcggcagcagctcctccctgccccaaagccgccagggcctgagccctgaacaggaagagacggcctcgctggtgtctacgggcaccctggttcccgagggcatctacctgccccctcctggctaccagctcgtcccagacactcagtgggagcagctgcagacagagggccgacagctgcagaaggacctggagagcgtcagtcgcgagcgggacgagctccaagagggcctgagacggagcaatgaggactgtgccaagcagatgcaggtgctcctggcccaggtccagaactcagagcagctgctgcggaccctgcaagggaccgtgagccaggcccaggagcgggtgcagctgcagatggcggagctggtcaccacccacaagtgcctgcaccatgaggtaaagcggttgaatgaggaaaaccaagggctccgggccgagcagctgccatcctcagccccccagggctcgcagcaggagcagggcgaggaggaatcactgcccagctctgtgccagagctgcagcagctgctgtgctgcacgcggcaagaggcgagggcccggctgcaggcccaggagcacggggccgagcgcctgcggatcgagatcgtgacgctgcgggaggctctggaggaggagacagtggccagggccagcctggaggggcagctgagggtgcagcgggaggagacagaggtgctggaggcctccctgtgcagcctgaggacagagatggagcgggtgcagcaggaacagagcaaggcccagctcccagacctcctctcagaacagagggccaaggtgctgcggctgcaggcagagctggagaccagtgagcagtgcagagggatttcgtgcgactgtcccaggccctgcaggtgcgcctagagcggatccgccaggctgagaccctggagcaagtgcgcagcatcatggatgaggcgccactcacggacgtcagggacatcaaggacacctgaggggtcaggatatccccacccccaccctgggaaagacgcctttccccactcctgaaccatgaggcctcgctctggggtcttggatggcttttccaccgtccctgagactggggttgaggggactgacgggggccaccaccgccccgccctccagcgcctcctcccagggtggctgggcctcctgttctcaggggtcacacctgggtgaggggcccaagcccctcccggaaccaaaggtgcaggctcaggcctgcggctttctggctgctgtgctgcctcctgggctccagccctcccctgcccccagcccgtcccctgcccagggcacagcggagccatgggggctgggagtccccatcagaggcagtgaggtgggccccggccctgggacaggcagctgccttctggtctgcatgacactaagacgcttgtccacagcggcgacccagacctccaagcttgcacagaggcaaggccagacttttccgtcgtttattttcaataaataagcagctcagcgcaaaaaaaaaaaaaaaaaaaaaaaaaaaaaaa

SEQ ID NO: 184 - DNA, 1717 bp, Homo sapiens
gcgttttgccacagagccgtaaaggcgcgcgggaacatggggctgtatgctgcagctgcaggcgtgttggccggcgtggagagccgccagggctctatcaaggggttggtgtactccagcaacttccagaacgtgaagcagctgtacgcgctggtgtgcgaaacgcagcgctactccgccgtgctggatgctgtgatcgccagcgccggcctcctccgtgcggagaagaagctgcggccgcacctggccaaggtgctagtgtatgagttgttgttgggaaagggctttcgagggggtgggggccgatggaaggctctgttgggccggcaccaggcgaggctcaaggctgagttggctcggctcaaggttcatcggggtgtgagccggaatgaggacctgttggaagtgggatccaggcctggtccagcctcccagctgcctcgatttgtgcgtgtgaacactctcaagacctgctccgatgatgtagttgattatttcaagagacaaggtttctcctatcagggtcgggcttccagcctcgatgacttacgagccctcaaggggaagcattttctcctggaccccttgatgccggagctgctggtgtttcccgcccagacagatctgcatgaacacccactgtaccgggccggacacctcattctgcaggacagggccagctgtctcccagccatgctgctggaccccccgccaggctcccatgtcatcgatgcctgtgccgccccaggcaataagaccagtcacttggctgctcttctgaagaaccaagggaagatctttgcctttgacctggatgccaagcggctggcatccatggccacgctgctggcccgggctggcgtctcttgctgtgaactggctgaggaggacttcctggcggtctccccctcggatccacgctaccatgaggtccactacatcctgctggatccttcctgcagtggctcgggtatgccgagcagacagctggaggagcccggggcaggcacacctagcccggtgcgtctgcatgccctggcagggttccagcagcgagccctgtgccacgcgctcactttcccttccctgcagcggctcgtctactccacgtgctccctctgccaggaggagaatgaagacgtggtgcgagatgcgctgcagcagaacccgggcgccttcaggctagctcccgccctgcctgcctggccccaccgaggcctgagcacgttcccgggtgccgagcactgcctccgggcctcccctgagaccacactcagcagtggcttcttcgttgctgtaattgaacgggtcgaggtgccaaggtgagtgagtgggggcgtgcttgggaggcgcaggatggcaccggcacatctaacatctacacttctctagctcagcctcacaggccaaagcatcagcaccagaacgcacacccagcccagccccaaagagaaagaagagacagcaaagagccgcagccggtgcttgcacaccgccttgcacatagcagaggctccgggctgactccttcctggtgggaaaggaagatgcctgtcctctccgtggaggaccctgggccctcaccgcaggaagcagtttgggttttgaaaggttattgggtcccttccttgggctgtgttcttgctggtgagcaaagtgttgcctgcaaaaataaaatgcagaacgtactctaaaaaaaaaaaaaaaaaaaaaaaaa

SEQ ID NO: 185 - DNA, 1647 bp, Homo sapiens
gcgttttgccacagagccgtaaaggcgcgcgggaacatggggctgtatgctgcagctgcaggcgtgttggccggcgtggagagccgccagggctctatcaaggggttggtgtactccagcaacttccagaacgtgaagcagctgtacgcgctggtgtgcgaaacgcagcgctactccgccgtgctggatgctgtgatcgccagcgccggcctcctccgtgcggagaagaagctgcggccgcacctggccaaggtgctagtgtatgagttgttgttgggaaagggctttcgagggggtgggggccgatggaaggctctgttgggccggcaccaggcgaggctcaaggctgagttggctcggctcaaggttcatcggggtgtgagccggaatgaggacctgttggaagtgggatccaggcctggtccagcctcccagctgcctcgatttgtgcgtgtgaacactctcaagacctgctccgatgatgtagttgattatttcaagagacaaggtttctcctatcagggtcgggcttccagcctcgatgacttacgagccctcaaggggaagcattttctcctggaccccttgatgccggagctgctggtgtttcccgcccagacagatctgcatgaacacccactgtaccgggccggacacctcattctgcaggacagggccagctgtctcccagccatgctgctggaccccccgccaggctcccatgtcatcgatgcctgtgccgccccaggcaataagaccagtcacttggctgctcttctgaagaaccaagggaagatctttgcctttgacctggatgccaagcggctggcatccatggccacgctgctggcccgggctggcgtctcttgctgtgaactggctgaggaggacttcctggcggtctccccctcggatccacgctaccatgaggtccactacatcctgctggatccttcctgcagtggctcgggtatgccgagcagacagctggaggagcccggggcaggcacacctagcccggtgcgtctgcatgccctggcagggttccagcagcgagccctgtgccacgcgctcactttcccttccctgcagcggctcgtctactccacgtgctccctctgccaggaggagaatgaagacgtggtgcgagatgcgctgcagcagaacccgggcgccttcaggctagctcccgccctgcctgcctggccccaccgaggcctgagcacgttcccgggtgccgagcactgcctccgggcctcccctgagaccacactcagcagtggcttcttcgttgctgtaattgaacgggtcgaggtgccaagctcagcctcacaggccaaagcatcagcaccagaacgcacacccagcccagccccaaagagaaagaagagacagcaaagagccgcagccggtgcttgcacaccgccttgcacatagcagaggctccgggctgactccttcctggtgggaaaggaagatgcctgtcctctccgtggaggaccctgggccctcaccgcaggaagcagtttgggttttgaaaggttattgggtcccttccttgggctgtgttcttgctggtgagcaaagtgttgcctgcaaaaataaaatgcagaacgtactctaaaaaaaaaaaaaaaaaaaaaaaaa

SEQ ID NO: 186 - DNA, 2091 bp, Homo sapiens
attgtttaatcaaaggaagagtcaaaataagctacacccagattactgagaaaggtgaaatgaaaacaagctcaaaaccaaattccaggaagatgctgtctttgtattgacttaccatttcatgttttcacacatgtcaaagtcttgaagcttcggtcattagtcttccgcttcctaaagcaagaaactaaatgctgacttgtgtcgtttgccccagatgccaccggaaatgtcatcttctccccagacgctggcttgcaagcacagcagcacccagaggctaacctatttcccctatagcccaagctctgagatctcccgtctggtcacaatgatctacaggagaggaagaaagctatctagggacgagatctagaatcaactgagagagatgcttaaaaatcaccagttactttaatgaccatccgcagagccatcctgtgcaaaggaaggagctaggctgtgcgccctgggcgtcatgatccttctgcgggcctccgaagtgcggcagctgcttcacaataagttcgtggtcatcctgggggactctgtgcatagggcagtatacaaggacctggtgcttctgctgcagaaggaccgcctgctcactcccgggcagcttagagcaaggggggagctgaacttcgaacaagatgagctggtggacggaggccagcggggccacatgcacaacggccttaactaccgtgaggtccgcgagttccgctccgaccaccatctggtacgtttttacttcctcacccgcgtgtactccgattacctccagaccatcttgaaagagctgcagtcgggcgagcacgcccccgacctggtcatcatgaattcctgcctctgggacatctccaggtatggtccgaactcctggagaagctacctggagaacctggagaacctgttccagtgcctgggccaggtgctgcccgagtcttgcctcctggtgtggaacacggccatgcctgtgggcgaggaagtcaccgggggttttcttccgcccaagctccggcggcagaaggccaccttcctgaaaaacgaagtggtcaaagccaacttccacagcgccaccgaggcacgtaaacataacttcgatgtactggacttgcatttccacttccgccacgcgagggagaacctgcactgggacggggtgcactggaatggacgtgtgcaccgctgcctctcccagctgctgctggcccacgtggccgacgcctggggtgtggagctgccccaccgccaccccgtgggcgagtggatcaagaagaaaaaacctggcccgagagtcgaagggccgccccaggccaacagaaatcacccggccttacctctgtccccacccttaccttcccccacataccgccccctgcttgggttcccaccccagcgcttgccgctgctcccgctcctgtccccacagcctcctcctcccattctccatcaccagggaatgccccggttcccacagggtcccccagatgcctgtttttcctcagaccatactttccagtcggatcaattctattgccattcagatgtcccctcatcagcccatgcaggtttcttcgtcgaagacaattttatggttggtcctcagctgcctatgcccttcttccccacaccccgttatcagcggcctgccccagtggtacataggggttttggcaggtatcgtccccgtggcccctatacgccctggggacagcggcctcgaccttcaaagagaagggccccagccaatcctgagccaaggcctcaatagacggacctaggccttatttcctctttatgaacatggattggacagatctgacacttcctttccattgcttggcctgaacagactgaccttgttaacttaagcctggagtccatgcctcgtcttccttttgttcattgctgttaccaagaaagccaaggaagagcagcctgactcattcttcttggctgcagcctcttccccacttcctgggagtgacccagcgttattcctgcctcctcactcctattctctttgcctttgtgtaaaaataaaatggaaataaacaagttgcacagaaaaaaaaaaaaaaaaaa

SEQ ID NO: 187 - DNA, 3227 bp, Homo sapiens
ggttccggttgctgccgccgctggcgggcggcgagtctggagagagcgcgcagtttgcgcggcggctcggcgcttccctgtcgtcgcactttgtggttgctgcagctcgggggcctgggctgcccctgacaccccttctgggcgatggtgcagcccaagggcgcctccatcccccgccgctgccgctaacccgggtcccccactccatggccgcctcggcgccgcccccaccggacaagctggagggaggtggcggccccgcaccgccccctgcgccgcccagcaccgggaggaagcagggcaaggccggtctgcaaatgaagagtccagaaaagaagcgaaggaagtcaaatactcagggccctgcatactcacatctgacggagtttgcaccacccccaactcccatggtggatcacctggttgcatccaacccttttgaagatgacttcggagcccccaaagtgggggttgcagcccctccattccttggcagtcctgtgcccttcggaggcttccgtgtgcaggggggcatggcgggccaggtacccccaggctacagcactggaggtggagggggcccccagccactccgtcgacagccaccccccttccctcccaatcctatgggccctgctttcaacatgcccccccagggtcctggctacccacccccaggcaacatgaactttcccagccaacccttcaaccagcctctgggtcaaaactttagtcctcccagtgggcagatgatgccgggcccagtggggggatttggtcccatgatctcacccaccatgggacagcctcccagagcagagctgggcccaccttctctgtcccaacgatttgctcagccaggggctccttttggcccttctcctctccagagacctggtcaggggctccccagcctgccgcctaacacaagtccctttcctggtccggaccctggctttcctggccctggtggtgaggatggggggaagcccttgaatccacctgcttctactgcttttccccaggagccccactcaggctccccggctgctgctgttaatgggaaccagcccagtttccccccgaacagcagtgggcggggtgggggcactccagatgccaacagcttggcaccccctggcaaggcaggtgggggctccgggccccagcctcccccaggcttggtgtacccatgtggtgcctgtcggagtgaggtgaacgatgaccaggatgccattctgtgtgaggcctcctgccagaaatggttccaccgtgagtgcacaggcatgactgagagcgcctatgggctgctgaccactgaagcttctgccgtctgggcctgcgatctctgcctcaagaccaaggagatccagtctgtctacatccgtgagggcatggggcagctggtggctgctaacgatgggtgacgctggtgaagtggcccagggaagtgcacatgtctctccctgctcttccagggtgatttttttgatgtttggctcttggtccttgtttccactggctttccatccccatggggcagaaacagtggctcctgggagcagaaaaggaattgaggtgggcaggcagaagagcctggattgctcactgttttgggaaacttacatgttgagatctacagagatccaggaaaccaaagccctgctgagcagagccattttgtggctatttctggaggcccaggagtgtggctgcaagagaaaaggggctggaggaagatccggagggcaggggtgttccctctgctgatgatggatgcccctaacacctgtgcctaacacccctactgaaccccacagctccagccttagtttttggagtcaagtgttaaaggtttctggccagaggaattggggtcttgccatccctgcaatagcccttttatgggctctgggagacagctttagggaataaatggggattttcccctttttctacccactcctttgcttcctccaagacttacccaactccttccccctcagagaaccaaatagcctgaggaagcaggagagttcctggttatggcagtttcttggtgatttggggcttcaagacagtaggtgagagatgctgtcaggacgtatcttcttcataccaaagtcactggtcctttctcagcctctctcgtgcttttctcctaatgaccatatttttgccaaaaattgggatatgttatctgacagaccagaatatttgaagtttgggctgtcctgaaagtctggactttggtggtaccctcctcccccagcccatctgttgcacattatactccgtgtgttcttcaactttcggcgcccttattcccctgccttcctggcttgattgaaggaaagcttgaaaaggcgcagagccctatacctcatttcctccatgataaaaggatccaagtgaggccctgtcacagcctgtgggtaggggatgcggcgggatcctcattgccatggtactcaaaggtagaagagcctggagtttgttgcttctctttgctattctttcatatcctcttgggcctggtgattaattagcaattctcattcctctcagccaaaggcctgcactgggctttatttgtctttttttattttttaagcactgcctgccagagatgggcctggggcctgatgaggaccttagcgctgctcgttctccttttctgttcatgcacacattcctccatggggtggggaaggcaggcatggggtgtggccctcggagaagttaggagtcccccagctcaagatacagtggcaaagacctagtggtcccctacccccacttctctcagttcctggcatgaggagagaagaccctgctctggtggagctgacaacctttgaggctgggaggagagcagcctctgggcatcgttcccagtgtccctcacactaaaacggcgtagatggcaaccccccacccccaccccgctgctcaactcttgtgtttgttgttctgtttgccccatttatctgttgctgtttttgtgttgtcttcccctgctccgcattttgtaaaatggcccctgggggagtgtttttgctggatctgctccctctcgctctctcactccactactttttggaacaaagtgatggcagaatgcggtggtggtgggggtcttttgtactgttggattaataaaatgattttaaaatcccaaaaaaaaaaaaaaaaaaaaaaaaaaaaaaaaaaaaaaaaaaaaaaaa

SEQ ID NO: 188 - DNA, 2051 bp, Homo sapiens
tcatttcatgttatgttttcatttcccctctgtctgagagattgctctgatgtctttccttccataagtcctacggagatcgagcttacctcatttttctcccaggcctaggagctcaattaccaggatcactttcttccccagggtgtactacagacctccacatgttggacagtaggattcagcagagaatgagtcccacatcctcttttcatccataagccactcttcccaactactcttccgccttccattgtccctatgtctactttactgctcaatctggattttggggaacctcctcccaaaaaggcattagaaggaaatgccaagcaccgaaattttgtcaagaagcggaggctcttagaacggagaggctttctgagtaaaaagaaccaaccccctagcaaggcgcctaagttgcactctgaaccttcaaagaaaggggagactcctacggtcgatggcacttggaagaccccttccttcccaaaaaagaagacagctgcttccagcaatgggtcaggacagcccctggacaagaaagctgcagtgtcttggttgacccctgccccttcaaaaaaggctgattctgttgctgctaaagtagatttgctgggggagttccagagtgcccttccaaagatcaatagccacccaacccgctctcagaagaagagctcccagaagaaatcctctaaaaagaaccatcctcagaagaatgccccacagaactccacccaagctcattcagagaataaatgctccggagcatcccagaagttgccacggaagatggtggcaattgactgtgagatggtgggcacaggaccaaaggggcatgttagttccttggctcgatgtagcattgtcaactacaacggagatgtgctttatgacgagtacattcttcccccctgccacattgtggactaccgaaccaggtggagtggtatccggaagcagcacatggtgaatgccacacccttcaagattgctcgaggccagatcttgaagatactcacagggaagatagtggtggggcatgccatccacaacgacttcaaagcccttcagtactttcaccccaaatccctcacccgtgacacctcccatatcccccccctcaaccggaaggctgactgcccggagaatgccaccatgtctctgaagcatctcaccaagaagctgctaaaccgggatatccaggttgggaagagcggacattcctctgtggaagatgcccaggccaccatggagctatataagttggttgaagtcgagtgggaagagcacctagcccggaatccccctacagactagtggcaatggggacgctggtgatatgaggaggcagaggcagcacccaggagaaacagggcagtggaccaatggacagctccaccagctccacatctttggaagctagatttggggagagagaagctctaccccagacttaatacccattgaaatttcacctcaggtgttgtgtcctgtgtctggttaagtgtcccatggaaggggaaagccttcacgtcagaacccaaccctataccttttacttcttaaatggtgctaaccacaggtgtcccagggtgctctgtgccagttaagatttttaactttcaaggggcagggcatactgggaaatgtagtttcccaaactgccttatcacttgggtggacatatgtctccttttatgccttttggtcttgagtaattaacagcatcctcttccacgctcagaagtgttctggttggggccaggcatggtggctcacgcctgtagtcccaacacttagggaggccgaggcgggcggatcacctgagatcaggagttcaagaccagcctggccaacatggcgaattcccgttctctactaaaaatacaaaaaatgtgtggggtgtggtggcaggagcctgtaatcctagctactcaggaggctgaggcaggagaatcgcttgagcccaggaggcggagattgcagtgagccgagatcgtgtcactgcactccagcctgggtgacaagagtgagactccgtctcc

SEQ ID NO: 189 - DNA, 3425 bp, Homo sapiens
gcgagctgtcaggccgagtgtcaggccgggcaggtacgcggcgcgcgcccccggcgccccccgctccccgccgggacgccccgcgccgagccggaggccgcgtggacccgaaagccgctgggaaaagtttacccaaggtccagcctagcccctaggcaccatgtcggacagtgatctaggtgaggacgaaggcctcctctccctggcgggcaaaaggaagcgcagggggaacctgcccaaggagtcggtgaagatcctccgggactggctgtacttgcaccgctacaacgcctacccctcagagcaggagaagctgagcctttctggacagaccaacctgtcagtgctgcaaatatgtaactggttcatcaatgcccggcggcggcttctcccagacatgcttcggaaggatggcaaagaccctaatcagtttaccatttcccgccgcgggggtaaggcctcagatgtggccctcccccgtggcagcagcccctcagtgctggctgtgtctgtcccagcccccaccaatgtgctctccctgtctgtgtgctccatgccgcttcactcaggccagggggaaaagccagcagcccctttcccacgtggggagctggagtctcccaagcccctggtgacccctggtagcacacttactctgctgaccagggctgaggctggaagccccacaggtggactcttcaacacgccaccacccacacccccagagcaggacaaagaggacttcagcagcttccagctgctggtggaggtggcgctacagagggctgctgagatggagcttcagaagcagcaggacccatcactcccattactgcacactcccatccctttagtctctgaaaatccccagtaggcatctgccaagaagggtgctgaaggctccagccagctgtcctgggtttccgttttggttccctttcatacagagggttttctatggatcactgccaaacattgggatcatctcctctgtccagaggtcttcaacaggaagatgccagctggcaccactgcactgtgatgggggccctctcctctgctgactctgccgtttctccaggcctccgctcagtgatgagaccaagagatcggagacaagcatggtgctgctgcttctgctgcttctccagaaaatccctgggacacctttgttccagcctggtttcctgggctgggctcaggaaagctgccaaattcagtcctatgttgggtccaagctgcccctgtgctgtttctgtcaagccaggtgtggacattccaagttcatatgcgtgaacaaaagaaaagaggaacccagtggatgtaacagaaccgactccagttgaatgtttagatttttgctaaactgttttctttttcccttttttgctgtggtttgcattcacggcagtagttagcccaggtgtggggaacgagagtgcactgcatgatagcgttctggtgagctgggaaggacccaccactgccactgaggattgttttggaagaaaggaatatttttatcttggggaccagctaagtctctgcagtagtgtgaaattccaaatggttgttttatcattggtttggtttaccaaaaaaaaggcagggaaaaaaaaaaaaaacaaccgtatgagcgcattggcttgtctgccgcaggcacagaagggtagaaagccacagcagggggcagtccagcagactctgactcaactttctaggcacctagcagagaaagataagatcaaaaggtgtttggtttttcttttaatttttattgtagtttttttgggtgggtgggggaagtaaactagactgaagcgatggattttttttttcttttttttctttagtgtttttccctttgttcttgaacacttttgccctgcagcctcagttttgaattcttttagcaacttggattagaggggcccatatgtcagaagctcccagcacctcctacttgggagaaaagtgagccatctgctggtcaggaagtcctccagagaggcagcttttcccacaatggtggcaggaaactttggggaaagcaggaatggtgtccactgctgcggaggaactgccttcagagaaggtggggctggaaaagggttagaagcctcctagctgggattgtctttgtttcacctttctttaaattagaattacagaagcccctgcccagtgaacagataacaattggtcttatgctcctccctttcccccattttttcttttgctgttttgttttttgttttttgtttgtttgtttgtttttttgagacagagtcatgctctgtcacccgggctggagtgcagtggtgcgatctcagctcactgtaacctccgcctcccgggttcaagcaattatttgcctcagcctcccgagtagctgggattataggcacccgccaccatgtctggcttttagtagagacggggtttcaccatcttggccaggctggtcttggaactcctgacctcgtgagccaccacgcccagcctcttttgctgtttcattgctgacagtgttcaacaatatgccccatctttatatatcctaagaaacactaatcctaggttattgctagccaaaatatttttgtcctgagtagtgtcactgggccaaaagatagatcaggacgacagcctttagttttcctgaaatcaccaggtcaggcacaaggagaaaaggttcctggatactgactaacttgggtgggtctagccaggagaaagacagtaacatgtgttctgtactttctgggaagatccctgaagccatcacagaggctccccaacttctgagtcgcccatctgttgctgtgggagtgtgaacggatcgctgaaggagagggagctttgctctctctaggtgggcaagtttcctgggctctctgtgttgcctccctctggcttcttcctcccgtgccctctccccgtgtgccccagggggatcagggatcctcaccctcctgaggcccagtggggaagaatgaacatggcttcatccaggttaactgatgctgccatttgcccagcctcttccatcccagccctgtcagtgagcccaggtctggtgcaactgctgcaggatgcctgtagtagggaactctggaagtgtattgggctgaggtgggattttccctccccacagtgcactgagcaatggagggtggtgagggagccatgctgctgaattctggttggcatttccccattatgtaaaatggggtgttgggtagggcagactctgcttgggtttggttgtaagataaacctggaggagaagcacagttgtcccattgaattatttgagcaaaaactactgtaaataacttttttgtcttttgtcaaataaaatttttttttgtttttttaagcagaaaaaaaaaaaaaaaaaaaaaaaaaaaaaaaaaaaaaaa

SEQ ID NO: 190 - DNA, 1553 bp, Homo sapiens
gcggggattgtttacgtctcgctccggggcggaaagtgggtcagggccgggccggcggagcgcgcagcgggggctgcagattctttccaccatggccagacgcccccggaacagcagggcctggcacttcgtcctgagtgcagcccgccgagacgcagatgcccgggccgtggctctagcaggctccactaactggggctacgactctgatgggcagcacagcgactcggactccgaccccgagtactccacgctgccgccatccatccccagtgcggtgcccgtgaccggcgagtccttctgtgactgtgctgggcagagcgaggcctccttctgtagcagcctgcactcggcccaccggggcagggactgccgctgcggagaggaagacgagtatttcgactgggtctgggatgacttaaataagtcatcagccaccctgctgagctgtgacaaccgtaaggtcagcttccacatggagtacagctgcggcacagcggccatccggggcaccaaggagctgggggagggccagcacttctgggagatcaagatgacctctcccgtctacggcaccgacatgatggtgggcatcgggacgtcggatgtggacctggacaaataccgccacacgttctgcagcctgctgggcagggatgaggacagctggggcctctcctacacgggcctcctccaccacaagggcgacaagaccagcttctcatcgcggttcggccagggctccatcattggcgtgcacctggacacctggcacggcacactcacctttttcaagaacaggaagtgtataggtgtggcagccaccaagctgcagaacaagagattctacccgatggtgtgctccacggcggcccggagcagcatgaaggtcacccgctcctgtgccagcgccacttccctccagtacctgtgctgccaccgcctgcgccagctgcggccagactcgggagacacgctggagggtctgccgctgccgccgggcctcaagcaggtgctacacaacaagctgggctgggtcctgagcatgagttgcagccgccgcaaggctccagtgtccgatccccaggcagcgacctccgcccaccccagcagtcgcgagcctcggccctgccagaggaagcgctgccgccggacctgactgacttcccagtggaactgccttcttgggctgggacagcccctttcctctgtcccttctttctctgtcccttccttccagccacactccagggcggagttggatgaggcccgtccggagggagccatctcttgctcccgaggctgggacagtcctttctgtgggggctctagggcccctctgctgctgtgctgggtggggaagcggctgccctgagccccaggtcttgtgggaggctgcgaggacgagagcctggctggagcccgcgttgctgttcccacagggcctcggtttttcctaacttgctctgcatgctgtcagcggctgccccgccgtcatagacttaaaggactgcaataaatgtagagttgatgtctaacacccaaaaaaaaaa

SEQ ID NO: 191 - DNA, 3520 bp, Homo sapiens
aactgcgggcggcgcagggcaggggcagtcagggagcagcggcggcagagacagggccgggcgggcgccgcctgcggagagcaccgggaggcgggccctgcgtggggccgcgcgcagcagcggcgacgactttatctgggccgcgggggacagcgcagggccatggaggaggcggccgcagctccgatttctccgtggacgatggcagccacgattcaggccatggagaggaagattgaatcgcaggctgctcacctgctttccctagaaggtcaaaccgggatggccgagaagaagctggctgattgcgagaagacagccgtggagttcgggaaccagctggagggcaagtgggccgtgctggggaccctgctgcaggagtacgggctgctgcagaggcggctggagaacgtggagaacctgctgcacaacaggaacctctggatcctgcggctgcccccgggcagcaagggggagtcccctaagactacgccatctccaagtccgaggtcctctcccagattgaacaagggaaggagccctgcaactggcgccgccctgaccccaagattccagatgttcctgtggaccccagtccagatgcagaaactgaggcccagcagagattgagtaacttatgcgagttgtcactcacctcacacgccccagcaagcatccaggagagcctgcctcttggaatagaaatcagacatcccacaggaactctgaggttttcccactgctgccagatgtatgcaaggaacacgtgatcttcgtaattccagagcggggcaaactgcttggcacctcttcaataggtgacattcaatgatagatctctggcttcctgctctgtttgttctggttgccctggaaagcctgctgctcagcccatgccccgggacttcctccaccctcaccaggacattctttccatctcttgtctcctgtgtgcaagtccctttctcctggattccatgtcttgaatgtttcttaatttacttcctcattttggcagaggatgtcctccagttgttttctgggaatgctaatatgcaagtgaaccagtgacctgcagttctgcccacacagggttaataaccaatcagattctctcttttcaagatggttaacataacagacaccaagaaagggaagaggagccgacagcagagggggaagctgaaaagacgcacaaagaatggccataaaagatatgagcaaccccagctttccagacagtcacttttcccagtggtcatacctggtctggaagattccccatcatctcgaataaagctgttgttgcttttaactccatggagagaccgaatggagtgagcccagcagggcatgctgggcaagagaggtcccccgagtcccaaataagaatttcaactagtataaaacgaggcagcgaacccacacgtggaagtctgataccgcttgcagaagggaattgaatagatgtctccctattggtaaggatgtggttttattgacttgaaataacaaagcccgcaagcaacaactgatcatccgcgggatgctgccacaaggaataattgagcactcattcagacacaggggaaaccactgcctctttcagtctttctcccagattccaacagtcagtgttacagcatttcaccttgttcacctccctgagaagacgttgcagctcactcaccccagtgggcactgggagcctctgctcaggtgggagacagatgccccccacacgcacatctggtgtttatgaagcagatactggggcttcataaacacagaaggggcagggaagtagccccagggcatagtgtggggcctcctgactaaaagtagcttgcaaacccctgcctataacagccacttcctggcggtcattgtgccacttaggagccctcctcaccgctcttcctttagttccttcactctgtatagaccctgccagagcagctcagggtggagcagctgcagccatgggacctgctccaggcaaggccctatgctacacagtccctgggggtgaggattccagaggagtcaattccctacccgcccttccaggggatggccgagatgagcgttcccacagggaaagtgaaagttgcaaggctgttgcggaaacaccaggggttccatctaggtcttgctgctcatctcacagaaagccagtcactgagacaagtattgtcagggaagaaggctttatccaggtgctacagacagggtgaacaagagatcagtctcaaatccatcatcatcaactgactaaaattaggggtttatatagcagggaagaaatgtaactacatgtgggaaaacagggattaacgaggggcaaggaagaggagttggccaacaggcagcaggtggtcacctggagaatcatgatgggtgaggggtctggcttctcactttccagatgtggggatctggtaaatttcagtttcttgataccgtctgggaggattgctggctggtttcctgagaaaggaattcagatgacataaatgtaaatttctccttgggtttcaagactgagagggtcaatttctaggtttattcaagaaaaaccataaacatcagttctatgggacaattgggcccatttcaaggctctgaggataagggttaatgaggggacagagtcgcctggagaagttcactggggcctacaagaaactagagaggcttcctggcaaagctctatgctgtctatcctctcttctctccttgcaggaagattccagtataatagacccgaggtgaaaaggcttttgttcaataagtagaaaactgaaggggggtgggaggcacatggatttgaaccagagaccgcttggcctgcaggcaaatgctgtaccttcagttgcacccctcacttgttacagctgtttctgataagcacttgtgcagccccatcagcacctcgatttcttcttggtgagtccatgggaacagccccactgcaaacaacccattcctgctctcctctttcctctaaacctcaacctcctcctacctggcagtccacaggcctacagcttctcctcagtgggaaagacatcagcttggaaaaccacttggaaagccaacgttatcctagaaaagctttttaaatgacccagcaggacaagtctccggatggccttggccaacccggtgcttccctcttttcttggttgtagttctcagaataactagagaatgtactgggagtgttgtcctgagataaggaggaactgtcctaaacctggactctgttcccatcacacctagaacaggatgtcctgcaacgctttagcccaatgatccaagttgcccttggggtataaaacttgacagcagagggcgttcagggtccctcagctgcagtgtgaagtgggacacacaggtgagactccatctgccctgggcaggttcctgagccttgggggaccagttcaccctacatcccaggcttctgttgtcccttgcctgcctgtaaggaataaagttgctttgcttaacttgc

SEQ ID NO: 192 - DNA, 2553 bp, Homo sapiens
tcctccttctatactccctgaaacctgttttaaatttggctctgccattgaaccccgttgctctcacgttaccctctgccgcccgagggtgtggcgcctccctttagagtcttcgttgctctccgggtggggtctttactccccacctgctttggataattaagtaattgatgtacgtctccctcccagctgcaccctggagggctccagccagtttctcccctccctggatccaatcagtgagctgttgggtgctcagctgtggtctggatgtggttctcggcacggtgtcgggacccacctggctggactgtacccctctctctctgctttggtccctcttctttctttgtccccccaccatcacctcttggggcagggagggtgaggcagtttgtcctcctgctgctgttcctgctggtccctcgagggcgccccgcccaccggtcacccagcgaacgcggggcggggccgctgctggcgctgggccccagggcttgcagagagagggccacgccagcggaagggccggccaggaggtggcaggacttgccttactactgagtcgccggcatccccgcctcttccggcctctccgcccggagccctagcgtggaacatgacctttcggaccctctgggtggagacacagcctctgcctgggctgtgcagtgaggtggcaccaccatctcaggtcgtctggcccagtgcatctgtagctggcatgtgacttccagcaagctcctgcccctgagcgctgggaggagcaggtccagcaataattttttttttttttttttgagacagagtttcgctcttgttgcccaggcaatggtgtgatctgggctcaccgcaacctccgcctccagggttcaagcgattctcctgcctcagcctccgagtagctgggattacaggcatgcgccaccacgcccggataattttgtatttttagtagagacagggtttctccatgttggtcaggctggtctcaaactgacctcaggtgatccgcccacctcggcctcccaaagtgctgggattacaggcatgagccactgcgcctggccggacaataatgttttgagctgttgctgagtctggcttttgtgacgggaacttttagcactcaaggagtggccttgtctctggcctgtcccccagtgctcatgggcagccaaggcctggggactgctcaggcagggtagatgtatttgccaggccagctcccgtccctgggacctcagggagtagcttcatccctgaaggctgagtgtcttctgcctcatgtgggtggcccctctgcagggttctcaggcatccagggaagtgggtgccacagcgttgcctccagcctcactggggctggctggactttgctctgacaacacagcagtggctgggcccctgcaactctccagggctcagtttccctgttggccgcactatggcataggcccctgtgtggacaccgatgagctgaccccacaaatgccacccggccgctcccccaggcttcagtggcctaacagctgttgtgtcaggaaccagcttaaagaatctttcttgctttctcaaactctccaggaattcctggtgactggaagggggagtgactcaggccctcaacctctagcaggtaagggtgctacctcctgggtgggcatgcccagttcctcagtgggcccagcgcggcccagcctccgaggaagctctgagcagctggcttggctccgaggtatttttagctacagatccagcccccctccatcaccacaacagtcgagtccaaatcaaacgcgctccaggcaggtggggctggggttctgccagcctcctggccagcaggggtgggtgggcagactggggccagtatcagctgttctgcctggacccaggccgggctgggaaggcacacttgtgcttatttcccgcctccacttctgtgcaagcttgtgctgtcataagcagagatcacagccccatttcttggatggagaaagtggacactgaggtctgaggcttttgaggacagtcaggagccctcctatgggctccagtgatgcactcaccagcttctggtcctcttcttccacctcttagagtgccttggctccctcctgtcgtcctggggaacctcggccccagccctgcctccccagccagtcacagctcctccctggtcaccctgagggagctcagggcccggctggtagctgggttgctctgcttctgtccccgactcctgtggagcctggcaggcaactccatgatctgaccccggttaccttgacagccctgcctggcctcccctctcatggcccagccaccccagaacctgaagaggttttctagctgccgtgcatttgccaggctgggttacccaccctactttccctgcctgccctccagtgctgccaggcctagtgtgccagccagcgctcagccttcagtaaagggttcccctgcttccaacctccattgcactgcttcccctaagactgtgacctcctggaaggctggagcacaactgcctctcaataaacgtgttgc

SEQ ID NO: 193 - DNA, 2371 bp, Homo sapiens
ccggagcctgcggcgggcggctgtgacggccccggcgctgacggcggcggccgggggggcggtgtcgacgcccgcggcgccggctggggcatcaccgcgggcctcgaccccgaaatggcgctgctggccgaacacttgctgaagccgctgcccgcggacaagcagatcgagaccgggcccttcctcgaggcggtgtcccacctgccgcccttcttcgattgccttgggtccccagtgtttactcccatcaaggcagacataagcggcaacatcacgaaaatcaaagctgtgtacgacaccaacccagccaagttccggaccctgcagaacatcctggaggtggagaaagaaatgtatggagcagagtggcccaaagtaggggccacactggcgctgatgtggctgaaaagaggcctccgcttcatccaggtcttcctccagagcatctgcgacggggagcgggacgagaaccaccccaacctcatccgtgtcaacgccaccaaggcctacgagatggccctcaagaagtaccatggctggatcgtgcagaagatcttccaggcagcactgtacgcagcaccctataagtctgacttcctgaaagcgctctccaaggggcagaatgttacggaggaggagtgcctggagaagatccgcctcttcctagtcaactacacggcgaccatcgatgtcatctacgagatgtacacccagatgaacgctgagcttaactacaaggtgtaggcatgcccactgctggacacgtccccgactcgtggccacatggagaaacaggcaaaccagaatcactgtgaatcaagtcggtgaactgcccctggcctgtgtcccccagagcagcccagggtcctgccagagtctgcaggggacagccctcgttttttaagtcttttttttttttttttttggtctattctaaaggaccagtaaataatgatcttacttccaaatctccttggaatttcacgacagcacagactgactttataccttcatttcagcgtggtaaaaaccgattaacacttctaatgagtcaagtcctagggttttttggttttgttttgttgccaacgaggaacacagctctgggggaatggtgtcatccacctcgctttaaaaataagcacatgatggctgggcaccgtggctcacgcctgtaatcccagcactttgggaggctgaggcgggtggatcacctgaggtcgggagtttgagaccagcctggccaacatggtgaaaccccatcgctactaaaaatataaaaaattagctgggcatggtggcgcacgcctgtagttccagctactcaggaggctgaggcaggagaatcgcttgaacccgggaggtggaggttgcagtgagctgagatcgcaccattgcactccagcctgggcaacaagagcgaaactctgtctcaaaaaaaaaaaaaagaggtgggtggattacttgaggtcagggtttgagatcagcctgaccaacatggtgaaaccctatctctactaaaaatatagaattagccaggcatggtagcgcacgcctgtaatcccatcttcttgggaggctgaggcaggagaatcgctagaaactgggaggtggaggttacagtagccgagatcgcgccactgcattccagcctgggcaacaaaagcgaaactctgtctcaaaaaagaaaaaaaagaaaaaaaagcacgtgaccttatgaggctctcgctgtattgttattttaaggactataaagagtttgatttaaaattatgcagggcccctatgtgggattttttaaaaagcaaactggtgtgtattctcatgtggtttgcacagcccagcctcacagcactattgtaaaccctgctctttctgtctcgctagacagatttttttgtttgttttcttttttctggttgttttttgttgttgttgttgttgttttacagctgaaaccaaccagcaagcccttgatgaccaagaggcgtttctttcaaagctatagggcacaaacaattgaccatagatgactccgtttgcattcttctgcagaattatttccttcagggacagattttccaacctaagaaactacctaccgtgtgtattctcttgacggggagagatgaacccttcagctgctaagatccaagaaaacgcctcactgccttaaccttaactgttcttcctggcgctaaaaagagctgtattttttaaagtgctggggcaaacaaagcaaccccaaaagagttgatgtgtgttttaaaagaaaaaacccaatgaggaacaattggagatttttatgcagaaactaaataatccttaataaataaatctctattttggaatcacaaaaaaaaaaaaaaaa

SEQ ID NO: 194 - DNA, 883 bp, Homo sapiens
ctgagagatcctctaccgcagtcgtttgaggaggcggaactgaagttttttcttaattatcatgtgacggggttctggatttaatggggggaaaagggcggaaaaggacaaggatccaaactggcgaatttgctgatcttcgcgtccctctccgctttccggccggcagcgctgccagggtatatttccttttttccgatcctgcaacagcctctttaaactgtttaaatgagaatgtccttggctcagagagtactactcacctggcttttcacactactcttcttgatcatgttggtgttgaaactggatgagaaagcaccttggaactggttcctcatattcattccagtctggatatttgatactatccttcttgtcctgctgattgtgaaaatggctgggcggtgtaagtctggctttgaccctcgacatggatcacacaatattaaaaaaaaagcctggtacctcattgcaatgttacttaaattagccttctgcctcgcactctgtgctaaactggaacagtttactaccatgaatctatcctatgtcttcattcctttatgggccttgctggctggggctttaacagaactcggatataatgtcttttttgtgagagactgacttctaagtacatcatctcctttctattgctgttcaacaagttaccattaaagtgttctgaatctgtcaagcttcaagaataccagagaactgagggaaaataccaaatgtagttttatactacttccataaaacaggattggtgaatcacggacttctagtcaacctacagcttaattattcagcatttgagttattgagatccttattatctctatgtaaataaagtttgttttggacctcaaaaaaaaaa

SEQ ID NO: 195 - DNA, 2088 bp, Homo sapiens
ggtccgagttcggaatttcggttcaaggcccagttcctcggattgttcctgcgcaacttcagtttcccttccaggcacgggcaatgagtgtttggccgcgacgagttggaaagcccggatgcgtccttcggttgggcggggtgtctcagtgacgtcactgggggtataaaagggcctgggtggcgggcgcctgggcagagcgtcctagcagtgtcactgcgtgggttggtttgtgtagagaggcgtgagcgagcccgttgtccggagtgcacctgctgcctgttctgtccctcccgggagcccccgccgctgtcgccgtcgagtcgccatggaagtgcagaaagaggcacagcgcatcatgaccctgtcggtgtggaagatgtatcactcccgcatgcagcgcggtggcctgcggctgcaccggagtctgcagctgtcgctggtcatgcgcagcgcccgggagctctacctctcggccaaggtggaggccctcgagcccgaggtgtcgttgccggccgccctcccctctgaccctcgcctgcacccgccccgagaagccgagtccacggccgagacagcgacccccgacggtgagcacccgtttccggagccaatggacacgcaggaggcgccgacagccgaggagacctccgcctgctgtgccccgcgccccgccaaagtcagccgcaaacgacgcagcagcagcctgagcgacggcggggacgctggactggtcccgagcaagaaagcccgtctggaagaaaaggaagaagaggagggagcgtcatccgaagtcgccgatcgcctgcagccccctccggcgcaagcggagggcgcctttcccaacctggcccgcgtcctgcagaggcgcttctccggcctcctgaactgcagccccgcggcccctccgacggcgccgcccgcgtgcgaggcaaagcccgcttgccgcccggcggacagcatgctcaacgtgctcgtgcgggccgtggtggccttctgaggaccccgagcggcgctgccggagcccagagcgcgcgtcgaaccgtcggcccgagggcgcagacctgaggcgaggccacccccctccatcctgggggaagcgcccgcgaaaaccgtggagagaagccgccgcccgggctgctgagaggcccggagagggactctgtccccggggagccatcgccttcagtgtgcagggacggcaccgaggagtctgagccgggggcgcgggcgccttccgcagagacctgcgcccacaggtgctgtcttagtggactgggacgtgaacctttcgctctccttctggactgggagaagggaggcttgggtgttgtgttttttgttttgtttgtttgtttgtttttaaagatctcctcagggtcggacttcattttgtactgtgggctgtgctggccctttcaaggtttttcaagagttggttttgcgtttccaacctcggagaattccaggcactccccttccccctccgctgacatacttgtataagcggtcatcgttgcgtcatggggcaggcgtggggagcttcctgtcgccttgcgtgggtgtggggcctgggaggaggtcctggggcgtgcacccgccctgggcagtggggaggagagtggcctgagttacttcacccccgcgtgctgctggttaatgtcccgcgtctctgcaccttcgggtgggagcggggactgatctactttcacattctcaagtttttctcatctgcattagaggtgcccagtaggttcccaggttccagcgtgcccctccctcagacacacggacacaatcagccgagaagttcctggtctgaatcacgagaatgtggaggggtggggggtgtcagtggaaaggcataaggctgagctgagaccagttgctggtgaaactgggccaatctggggaggggaacatccttgccagggagtttctgagggtctgctttgtttacctttcgtgcggtggattctttttaactccgtctacctggcgttttgttagaaatgtcagataggaaaataaaaaccatttgagtaaaaaaaaaaaaaaaaaaaaaaaaaaaaaaaaaaaaaaaaaaaa

SEQ ID NO: 196 - DNA, 3032 bp, Homo sapiens
gaattccggagaaaggcgcaggggtgggagctgttgccgaagctgccacagcaaaagttctcccccctccccccttcccctcctctcaaggcccctagaaaggttggagctgccggccctgcagtcggtgaccgctgacgacttcggccgcgcccgcggatagcgggaggaatcagcagcttggaaattcaagcacgtgatctggcgggatgggcgtttgcctaacgtatttaatggaggaatcggatggcataagtgattaaggtggtattgaggatttctgaagcctatgaaaggtagaaactcaaccatgatttctttttcaactctacagcattcctttccttgaagtcttcgtttttaccttagtctcgggcagttatacttaagcatgaacattgacgacaaactggaaggattgtttcttaaatgtggcggcatagacgaaatgcagtcttccaggacaatggttgtaatgggtggagtgtctggccagtctactgtgtctggagagctacaggattcagtacttcaagatcgaagtatgcctcaccaggagatccttgctgcagatgaagtgttacaagaaagtgaaatgagacaacaggatatgatatcacatgatgaactcatggtccatgaggagacagtgaaaaatgatgaagagcagatggaaacacatgaaagacttcctcaaggactacagtatgcacttaatgtccctataagcgtaaagcaggaaattacttttactgatgtatctgagcaactgatgagagacaaaaaacaaatcagagagccagtagacttacagaaaaagaagaagcggaaacaacgttctcccgcaaaaatccttacaataaatgaggatggatcacttggtttgaaaacccctaaatctcacgtttgtgagcactgcaatgctgcctttagaacgaactatcacttacagagacatgtcttcattcatacaggtgaaaaaccatttcaatgtagtcaatgtgacatgcgtttcatacagaagtacctgcttcagagacatgagaagattcatactggtgaaaaaccatttcgctgtgatgaatgtggtatgagattcatacaaaaatatcatatggaaaggcataagagaactcatagtggagaaaaaccttaccagtgtgaatactgtttacagtatttttccagaacagatcgtgtattgaaacataaacgtatgtgccatgaaaatcatgacaaaaaactaaatacatgtgccatcaaaggtggccttctgacatctgaggaagattctggcttttctacatcaccaaaagacaactcactgccaaaaaagaaaaggcagaaaacggagaaaaaatcatctggaatggacaaagagagtgctttggacaaatctgacctgaaaaaagacaaaaatgattacttgcctgtttattcttcaagtactaaagtaaaagatgagtatatggttgcagaatatgctgttgaaatgccacattcgtcagttgggggctcgcatttagaagatgcgtcaggagaaatacacccacctaagttagttctcaaaaaaattaatagtaagagaagtctgaaacagccactggagcaaaatcaaacaatttcacctttatccacatatgaagagagcaaagtttcaaagtatgcttttgaacttgtggataaacaggctttactggactcagaaggcaatgctgacattgatcaggttgataatttgcaggaggggcccagtaaacctgtgcatagtagtactaattatgatgatgccatgcagtttttgaagaagaagcggtatcttcaagcagcaagtaacaacagcagggaatatgcgctgaatgtgggtaccatacgttctcagccttctgtaacacaagcagctgtggcaagtgtcattgatgaaagtaccacggcatccatattagagtcacaggcactgaatgtggagattaagagtaatcatgacaaaaatgttattccagatgaggtactgcagactctgttggatcattattcccacaaagctaatggacagcatgagatatccttcagtgttgcagatactgaagtgacttctagcatatcaataaattcttcagaagtaccagaggtcaccccatcagagaatgttggatcaagctcccaagcatcctcatcagataaagccaacatgttgcaggaatactccaagtttctgcagcaggctttggacagaactagccaaaatgatgcctatttgaatagcccgagccttaactttgtgactgataaccagaccctcccaaatcagccagcattctcttccatagacaagcaggtctatgccaccatgcccatcaatagctttcgatcaggaatgaattctccactaagaacaactccagataagtcccactttggactaatagttggtgattcacagcactcatttcccttttcaggtgatgagacaaaccatgcttctgccacatcaacacaggactttctggatcaagtcacttctcagaagaaagctgaggcccagcctgtccaccaagcttaccaaatgagctcctttgaacagcccttccgtgctccctatcatggatcaagagctggaatagctactcaatttagcactgccaatggacaggtgaaccttcggggaccagggacaagtgctgaattttcagaatttcccttggtgaatgtaaatgataatagagctgggatgacatcttcacctgatgccacaactggccagacttttggctaaaaaaaaaaaaaaagtgaaataatactggcactttagaacagattaatcaagagtggggttactatgtgtaaatggagtgctgtacagatttaagagcaatgcgtaataacaagttaagctgatatacgatgataataactgcatttcgtttggttagtcagcattctttgaactgccttacatgttgtcacctttatagaagcaatgcattacttgttttagatcagaaacttgctattccacccacaccaagtaa

SEQ ID NO: 197 - DNA, 1687 bp, Homo sapiens
cgggcgcgcggggagggggcgcaggaagcgggcgaggccgggcgcgggaggcggcggcggccccgggagctgccgatcggcgccgggacaaaggcgcggccgcccggcgcccccagcagcccgagccggggcgcacagccggggcgcagcccgcgccccccgccgcgattgacatgatgtttccacaaagcaggcattcgggctcctcgcacctaccccagcaactcaaattcaccacctcggactcctgcgaccgcatcaaagacgaatttcagctactgcaagctcagtaccacagcctcaagctcgaatgtgacaagttggccagtgagaagtcagagatgcagcgtcactatgtgatgtactacgagatgtcctacggcttgaacatcgagatgcacaaacaggctgagatcgtcaaaaggctgaacgggatttgtgcccaggtcctgccctacctctcccaagagcaccagcagcaggtcttgggagccattgagagggccaagcaggtcaccgctcccgagctgaactctatcatccgacagcagctccaagcccaccagctgtcccagctgcaggccctggccctgcccttgaccccactacccgtggggctgcagccgccttcgctgccggcggtcagcgcaggcaccggcctcctctcgctgtccgcgctgggttcccaggcccacctctccaaggaagacaagaacgggcacgatggtgacacccaccaggaggatgatggcgagaagtcggattagcagggggccgggacagggaggttgggaggggggacagaggggagacagaggcacggagagaaaggaatgtttagcacaagacacagcggagctcgggattggctaaactcccatagtatttatggtggccgccggcgggggccccagcccagcttgcaggccacctctagctttcttcctaccccattcccggcttccctcctcctcccctgcagcctggttaggtggatacctgccctgacatgtgaggcaagctaaggcctggagggtcagatgggagaccaggtcccaagggagcaagacctcgcgaagcgcagcagccccggcccttcccccgttttgaacatgtgtaaccgacagtctgcctgggccacagccctctcaccctggtactgcatgcacgcaatgctagctgcccctttcccgtcctgggcaccccgagtctcccccgaccccgggtcccaggtatgctcccacctccacctgccccactcaccacctctgctagttccagacacctccacgcccacctggtcctctcccatcgcccacaaaagggggggcacgagggacgagcttagctgagctgggaggagcagggtgagggtgggcgacccaggattccccctccccttcccaaataaagatgagggtactaaagttgtcttggtttttattttattattatttttttctttttccagtatactagcttgtcttttaagaaaggggatattaaaaaaaaaaaaagacaaaagtgtttttaaaaaaaagcaacacccacacctgtgtctgtatatagtcagcttatctcgtgttcaatcgtctgatctctacagagagaagtggaaaatgctgtatcaagggtgggcttagctgtgcctttccaataaagatgtgagaagcttcaaaaaaaaaaa

SEQ ID NO: 198 - DNA, 1754 bp, Homo sapiens
tggagcagcggggcctggcacacagtaggcgttctataaatgtgtcacaagaatggcttccctcaggaaggcggcattaccgctgcctttctgcagaaaaggaaactaaggctcagcaagaaccaccgcccagccagagccaaggtcacagagcacgtccgtggcacgcgtccaggtcgtgccacagcagggccggcggcttcgacgcgggcagccgggtcccttttctttgacagatggggaaaccgaggcccggccggctgccggggctcctcgcacctaccccagcaactcaaattcaccacctcggactcctgcgaccgcatcaaagacgaatttcagctactgcaagctcagtaccacagcctcaagctcgaatgtgacaagttggccagtgagaagtcagagatgcagcgtcactatgtgatgtactacgagatgtcctacggcttgaacatcgagatgcacaaacaggctgagatcgtcaaaaggctgaacgggatttgtgcccaggtcctgccctacctctcccaagagcaccagcagcaggtcttgggagccattgagagggccaagcaggtcaccgctcccgagctgaactctatcatccgacagcagctccaagcccaccagctgtcccagctgcaggccctggccctgcccttgaccccactacccgtggggctgcagccgccttcgctgccggcggtcagcgcaggcaccggcctcctctcgctgtccgcgctgggttcccaggcccacctctccaaggaagacaagaacgggcacgatggtgacacccaccaggaggatgatggcgagaagtcggattagcagggggccgggacagggaggttgggaggggggacagaggggagacagaggcacggagagaaaggaatgtttagcacaagacacagcggagctcgggattggctaaactcccatagtatttatggtggccgccggcgggggccccagcccagcttgcaggccacctctagctttcttcctaccccattcccggcttccctcctcctcccctgcagcctggttaggtggatacctgccctgacatgtgaggcaagctaaggcctggagggtcagatgggagaccaggtcccaagggagcaagacctcgcgaagcgcagcagccccggcccttcccccgttttgaacatgtgtaaccgacagtctgcctgggccacagccctctcaccctggtactgcatgcacgcaatgctagctgcccctttcccgtcctgggcaccccgagtctcccccgaccccgggtcccaggtatgctcccacctccacctgccccactcaccacctctgctagttccagacacctccacgcccacctggtcctctcccatcgcccacaaaagggggggcacgagggacgagcttagctgagctgggaggagcagggtgagggtgggcgacccaggattccccctccccttcccaaataaagatgagggtactaaagttgtcttggtttttattttattattatttttttctttttccagtatactagcttgtcttttaagaaaggggatattaaaaaaaaaaaaagacaaaagtgtttttaaaaaaaagcaacacccacacctgtgtctgtatatagtcagcttatctcgtgttcaatcgtctgatctctacagagagaagtggaaaatgctgtatcaagggtgggcttagctgtgcctttccaataaagatgtgagaagcttcaaaaaaaaaaa

SEQ ID NO: 199 - DNA, 1684 bp, Homo sapiens
cgggcgcgcggggagggggcgcaggaagcgggcgaggccgggcgcgggaggcggcggcggccccgggagctgccgatcggcgccgggacaaaggcgcggccgcccggcgcccccagcagcccgagccggggcgcacagccggggcgcagcccgcgccccccgccgcgattgacatgatgtttccacaaagcaggcattcgggctcctcgcacctaccccagcaactcaaattcaccacctcggactcctgcgaccgcatcaaagacgaatttcagctactgcaagctcagtaccacagcctcaagctcgaatgtgacaagttggccagtgagaagtcagagatgcagcgtcactatgtgatgtactacgagatgtcctacggcttgaacatcgagatgcacaaacaggctgagatcgtcaaaaggctgaacgggatttgtgcccaggtcctgccctacctctcccaagagcaccagcagcaggtcttgggagccattgagagggccaagcaggtcaccgctcccgagctgaactctatcatccgacagctccaagcccaccagctgtcccagctgcaggccctggccctgcccttgaccccactacccgtggggctgcagccgccttcgctgccggcggtcagcgcaggcaccggcctcctctcgctgtccgcgctgggttcccaggcccacctctccaaggaagacaagaacgggcacgatggtgacacccaccaggaggatgatggcgagaagtcggattagcagggggccgggacagggaggttgggaggggggacagaggggagacagaggcacggagagaaaggaatgtttagcacaagacacagcggagctcgggattggctaaactcccatagtatttatggtggccgccggcgggggccccagcccagcttgcaggccacctctagctttcttcctaccccattcccggcttccctcctcctcccctgcagcctggttaggtggatacctgccctgacatgtgaggcaagctaaggcctggagggtcagatgggagaccaggtcccaagggagcaagacctcgcgaagcgcagcagccccggcccttcccccgttttgaacatgtgtaaccgacagtctgcctgggccacagccctctcaccctggtactgcatgcacgcaatgctagctgcccctttcccgtcctgggcaccccgagtctcccccgaccccgggtcccaggtatgctcccacctccacctgccccactcaccacctctgctagttccagacacctccacgcccacctggtcctctcccatcgcccacaaaagggggggcacgagggacgagcttagctgagctgggaggagcagggtgagggtgggcgacccaggattccccctccccttcccaaataaagatgagggtactaaagttgtcttggtttttattttattattatttttttctttttccagtatactagcttgtcttttaagaaaggggatattaaaaaaaaaaaaagacaaaagtgtttttaaaaaaaagcaacacccacacctgtgtctgtatatagtcagcttatctcgtgttcaatcgtctgatctctacagagagaagtggaaaatgctgtatcaagggtgggcttagctgtgcctttccaataaagatgtgagaagcttcaaaaaaaaaaa

SEQ ID NO: 200 - DNA, 3877 bp, Homo sapiens
ggaggaaagtgtgccatggcggagcctgtggggaagcggggccgctggtccggaggtagcggtgccggccgagggggtcggggcggctggggcggtcggggccggcgtcctcgggcccagcggtctccatcccggggcacgctggacgtagtgtctgtggacttggtcaccgacagcgatgaggaaattctggaggtcgccaccgctcgcggtgccgcggacgaggttgaggtggagcccccggagcccccggggccggtcgcgtcccgggataacagcaacagtgacagcgaaggggaggacaggcggcccgcaggacccccgcgggagccggtcaggcggcggcggcggctggtgctggatccgggggaggcgccgctggttccggtgtactcggggaaggttaaaagcagccttcgccttatcccagatgatctatccctcctgaaactctaccctccaggggatgaggaagaggcagagctggcagattcgagtggtctctaccatgagggctccccatcaccaggctctccctggaagacaaagctgaggactaaggataaagaagagaagaaaaagacagagtttctggatctggacaactctcctctgtccccaccttcaccaaggaccaaaagcagaacgcatactcgggcactcaagaagttaagtgaggtgaacaagcgcctccaggatctccgttcctgtctgagccccaagccacctcagggtcaagagcaacagggccaagaggatgaagtggtcttggtggaagggcccaccctcccagagaccccccgactcttcccactcaaaatccgttgccgggctgacctggtcagattgcccctcaggatgtcggagcccctgcagagtgtggtggaccacatggccacccaccttggggtgtccccaagcaggatccttttgctttttggagagacagagctatcacctactgccactcccaggaccctaaagctcggagtggctgacatcattgactgtgtggtactaacaagttctccagaggccacagagacgtcccaacagctccagctccgggtgcagggaaaggagaaacaccagacactggaagtctcactgtctcgagattcccctctaaagaccctcatgtcccactatgaggaggccatgggactgtcgggacggaagctctccttcttctttgatgggacaaagctttcaggcagggagctgccagctgacctgggcatggaatctggggacctcattgaggtctggggctgacaccccactccctgtttgacggcccagcctggacttggggagaatgactttcccttttttgccccataagggctagcataagctgaggtagaacttatctttaagctgcagcaaaatcaaggagtgacttttgtcccctctcctgttgaccctggtttagagccgttaaccacttggtgagttatgtgggtgttgttgccctgggtggcctgtggctccgtccacaagtcatgctgagttttgcagcctctgtgacttggagatgtcccttcacccctcccctttcaccaccatcctcttttcctcatggaaatgtctgctttatgaaactatgcacatattgaaagtgagttgaaacaaatgagggttgggtaggagcttccaggcctgggatttacaccacgcctagcccagcagaggccttagtcccatttggggcttgggagtgacatttgcttgaggcttatacactggtgtggttgcctggcttgcaggaaatgaccaagctcacacatgctggctgaagcgtaagcagacaactgaggtactcttttgaaggatgaaggtggtggattctcagccctgggggtcttcctcacctgaggacccttcagagccaccctttctagtttgcatttcctggtgcacacatttaaggcataacagcacattcatccctttggtttgggatctcaggaatacagtcccatgcaaagattctctggttttatggcttttttccctttctttacaccatcctctcccataagcacccatgtctttgaatatgaatgtatttgtaaaataccacgtttcatgtgtgaatatgtgcttttactgtacatagtgctattgtgcaataggtcttatgctgttttcactcaatgtgtgctaagatctagccccattgactcttctagaaatgcagtattgctttgacctgccatgtggcactccacaatgtcaattgcagtttacacacattgcctaaagtgggggacacctgggtgcccctgaccccttggcaccggatacaggccacgataaacatcctttcgtgtgttcccttctgtgcttgtgtggcatgtgtacccaggatgggcctataggtcacagaggtcagtttctctttggttttccagattttctttagaacggtgactgaccctcctacttgaggccgcccttttctccttatccttgccagcacttgtattgccagactacctaatttttgccagtctcatgggtagatagtggtgcagtgctttaacatacattcatctgatcagcattaatttggggaattttttcacttagcctttctggtttcccttcctgtgcattgcccattttctcatggagtttcttatcttttttggtttattctcaggagttgcttgtacattcttgggcaattgcagataattccaagaatgcatatttgggctgggtatggaggttcactggtaatcccagcactttgggaggcccaggcagaaggatcgctgcagcccaggagttcgagactagcctgggcaacatagcgagacctcgtctctacaaaaaaaaattaaaaagggggctttgggaggccaaggcgggcagatcatgagggcaggagattgagaccctcctggccaacatggtgaaaccccgtctctactaaaatacaaaaaattagctgggcatggtggcgcacacctgtagtcccagctactctggaggctgaggcaggggaatcgcttaaacccaggaggcggagattgcagtgagccaaggttccaccactgcactccagcctggcgacagagcaaggctccactcaaaaaaaagatttaaaggggaaaaaattgaaattttctttgtatctaggggtatccgtcactgaacagaaattcttaattttggctaggcgtgatggctcaggtctgtaatcccagcactttcggtggccggggtgggtggatcacttgaggccaggagttcaagaccaccctgaccaacttggtgaaatcccatctctactaaaaatacaaaaattagctgggtgcagtggcgcatgcttgtaatcccagctactcaggaggcagaggcaggagaatcacttgaacccgggaggtggaggctgcagtgaacagagacagtgccactgcacatcagcctgagtgacagagagactttgtctcaaaaaaaaaagaaaattttaattttaatgtagacagtatgaattatcttgttctgcagttggttgctttttgattgcttatttaatagagttgttaagatattttacatcttctcctgttagctgttcagcttttcctttcatattgagaacactacacagtgctgaagtccagctggtacacaccggggtgacaccttggctgcatctgttctcaacagtcagacacttcttctaattggttgatgctgggctgtactggttgctaaatattgcacatcattttaaaactatttgagatgcacttttgtactcaggaggccaaggcaggaggattgcttgagcccaggagtttgagaccagcctgggcaacacagcgagaccttgtctcttaaaaaaaaaaaaaaaaaaaaa

SEQ ID NO: 201 - DNA, 1675 bp, Homo sapiens
gtgacaaccggaagcggaagtgaaaatgggtgtccctgctgcctcttagcaacaagaggggtcaagtgacacaaccagctgactcccgtagaggaagacactgtggaggccagttctggagctattgcagcctcggttgcccggccggggacccgagccgaaaagttatcgtcagaatgtcgggcaaagaccgaattgaaatctttccctcgcgaatggcacagaccatcatgaaggctcgtttaaagggagcacagacaggtcgaaacctcctgaagaaaaaatctgatgccttaactcttcgatttcgacagatcctaaagaagataatagagactaaaatgttgatgggcgaagtgatgagagaagctgccttttcactagctgaagccaagttcacagcaggtgacttcagcactacagttatccaaaatgtcaataaagcgcaagtgaagattcgagcgaagaaagataatgtagcaggtgttactttgccagtatttgaacattaccatgaaggaactgacagttatgaactgactggtttagccagaggtggggaacagttggctaaattaaagaggaattatgccaaagcagtggaactactggtggaactagcttctctgcagacttcttttgttactttggatgaagctattaagataaccaacaggcgtgtaaatgccattgaacatgtcatcattccccggattgaacgtactcttgcttatatcatcacagagctggatgagagagagcgagaagagttctataggttaaagaaaatacaagagaagaaaaagattctaaaggaaaaatctgagaaggacttggagcaaaggagagcagctggagaggtgttggagcctgctaatcttctggctgaagagaaggacgaggatcttctatttgaataatctttcctgttctggttctttgagaaaccctaacactggcttcattttaattcacagtgtgtaggtttgatttgtgtggctatttattttttggcctaagaatttcactggttgtaaaatttacctagatgtctatttatgggattacttttgcagaatcataatttagcaaccatttatcatggatgaaagagatctgtaaaacctgcccaggaacttacagaatttactttgcagaagcgttatcatactccatttacatctgtgttacacgtgatctgcttaccaagcatattaggaaatacctcttaggaagcattagcggtctcaggccaattactgtggagcagctttcattcctacccacttgcaaaccttggcgctgttgtctgagattgctgcagccattcttgttaccatggtacttctcaaactttgtgaaaacctgcacttttccttgcatgacaggttcctgtcttgtctgtcatgggagccattctgccaatttaaatgcgactgtggtataaacagtaaaatgatttaaaagtaagtcattccgtttttattaatttactgttaagtcatgttctcatgctcagatcagtagtgtcagccagagctttctctgcagacatgtaggaagtgggtagctatttttcccactccatgtattagagttttacaaaaaggcttacttttgagacaactgttgcattttggggtactaataaatgattgccgatgagttaaaaaaa

SEQ ID NO: 202 - DNA, 1935 bp, Homo sapiens
atgtggtcagtgctccagcaggcagctgccaactgtgcctttgccttcacttcttacttgcacacagccacaaagccagccagaggtgagggccagggcagctcaggttcctctcgggcacacacacagctctgtgcctgtgtgggcacagccttccatgcctccaggagtgtggcagagcttctcagcggccactgtgggcatctcgttcctcagatcttcctttcatgagttatgtagttgaattatcaatctttcttggcttctaagttttgtgttctacttagaatgctcttcccccttaaagattatatttgaaatgttttccatgttttcttctagtacttttatgggtttcattttcatattgaaatcattgatctacttctagtttttgatacaaaatgtgagccaggaaacccagtttttaaatttcaaatagctgtccaggtgtccctgcacctcttatgcatgagccctcgctttgtgccaatgtggagtgcccgcctgctcacacgtgcccatgtggagtgcccgcctgctcatgtgcccatgtggagtgcccgcctgctcacacatgtcgatgcggagtgcccgcctgctcacacatgcccatgtggagtgcccgcctgctcacacgtgcccatgtggagtgcccgcctgctcacacacgtgtccatgtggagtgcccacctgctcatgtgcccatgtggagtgcccacctgctcacatgtgccgatgtggagtgccacctgctcacacacgtgcccatgtggagtgcccgcctgctcacgtgcccatgtggagtgcccgcctgctcacacgtgccgatgcggagtgcccgcctgctcacacgtgcccatgcggagtgcccgcctgctcacacgtgcccatgcggagtgcccgcctgctcacacgtgcccatgcggagtgcccgcctgctcacacgtgccgacgtggagtgcccgcctgctcacacgtgcccatgtggagtgcccgcctgctcacacgtgccaacgtggagtgcccgcctgatcacacgtgcccatgtggagtgctcgcctgctcacacgtgccgatgtggagtgcctgcctgctcacacgtgcccatgtggagtgttcgcctgctcacacgtgccgatgcggagtgcccgcctgctcacacgtgccgatgcggagtgcccgcctgctcacacgtgcccatgtggagtgcccgcctgctcacgtgccgatgtggagtgcccgcctgctcacacgtgcccatgtggagtgcccgcctgctcacgtgccgatgtggggtgcccgcctgctcacatgtgccgatgtggagtgcccgcctgctcacacgtgcccatgtggagtgcccgcctgctcacacgtgccgacgtggagtgcccgcctgctcacgtgcccatatggagtgcccgcctgctcacacgtgccattgtggagtgcccgcctgctcacacacatgccgatgtggagtgcccgcctgctcacacgtgcccatgtggagtgcccgcctgctcacacgtgcctatgtggagtgcccgcctgctcacacacgtgcccatgtggagtgcccgcctgctcacacgtgcccatgtggagtgcctgcctgctcacacacgtgcccatgtggagtgcccgcctgctcacacaaagccctggcatggtggttctgtaggtttcctgtcctgccggccgagtcagacgctgttaccgtacattctactcatggtggctttttaatacgtttttatgtcaaggatcccttttatatttctctgcacctcgagataacgtaggaatattagggatgagatggaagaggagagggtgtttttgtaaaattgaattcaggactgatttgttagcctggtgcttttcgtatcagaccttttaatgaattttcatggatgctgattaaaagac

SEQ ID NO: 203 - DNA, 4878 bp, Homo sapiens
gtccgccatttgcaaggggcccggagcgggatcgcggcacctgccgagcgggtcgccgcctctgccgcggtccttggaccccgccgccgccctggcctgggagcttgccccgccgcagcggccggcagcgcggcgctccgcgggcggcaggcacgggccccgggccccctcacggcgcccagccgcgggcctcccgaggcaaaagcccgtgggccgccgcgatggccctcaagatggtgaagggcagcatcgaccgcatgttcgacaagaatctgcaggacttggtccgcggcatccgtaaccacaaggaggacgaggcaaaatacatatctcagtgcattgatgagatcaagcaggagctgaagcaggacaacatagcggtgaaggcgaacgcggtctgcaagctgacgtatttacagatgttgggatacgacatcagctgggccgccttcaacatcatagaagtgatgagtgcctccaagttcaccttcaagcgaattggctacctcgctgcttcccagagctttcacgaaggcaccgacgtcatcatgctgaccaccaatcagatccgtaaggacttgagcagccccagccagtacgacacaggtgttgcactgacgggtctgtcctgcttcgtcaccccagaccttgccagagacctggcaaatgacatcatgacactgatgtcacacaccaagccctacatcaggaagaaggctgtgctgatcatgtacaaggtgttcctgaagtaccccgagtcgctgcgccctgcctttccccggctgaaggagaagctggaggaccccgaccccggggttcagtcggctgccgtcaatgtcatctgcgagctggccagacgcaaccctaagaactacctgtccctggccccgctctttttcaagctgatgacgtcctccaccaacaactgggtcctcatcaagatcatcaagctgttcggtgctcttactcctttggaaccgcggctgggcaagaagctgatcgagcccctcaccaatctcatccacagcacgtctgccatgtctctcctctatgaatgtgtgaacaccgtgattgcagtgctcatctcgctgtcctccggcatgcccaaccacagcgccagcatccagctttgtgttcagaaattaaggatattgatcgaggactccgatcagaacttgaagtacctggggctgctggcaatgtccaagatcctgaagacccaccccaagtccgtgcagtcccacaaggacctcatcctgcagtgcctggacgacaaggacgagtccatccggctgcgggccctggacctgctctatgggatggtgtccaagaagaacctgatggagatcgtgaagaagctgatgacccacgtagacaaggcagagggtaccacctaccgtgacgagctgctcaccaagatcattgacatctgcagccagtccaactaccagtacatcaccaacttcgagtggtacatcagcatcctggtggagctgacccggctggagggcacacggcacggccacctcatcgccgcccaaatgctggacgtggccatccgcgtgaaggccatccgcaagttcgccgtgtcccagatgtctgcgctgcttgacagtgcacacctgctggccagcagcacccagcggaacgggatctgtgaggtgctgtacgctgccgcctggatctgcggggagttctcagagcatctgcaggaaccacaccacactttggaggccatgctgcggcccagagtcaccacgctgccaggccacatccaggccgtgtatgtgcagaacgtggtcaagctctacgcctccatcctgcagcagaaggagcaggccggggaggcagagggcgctcaggccgtcacccagctcatggtggaccggctgccccagtttgtgcagagcgcagacctggaggtgcaggagcgggcgtcctgcatcctgcagctggtcaagcacatccagaagcttcaggccaaggacgtgcctgtggcagaggaggtcagcgctctctttgctggggagctgaacccagtggcccccaaggcccagaagaaggttccagtccccgaaggcctggacctggacgcctggatcaatgagccactctcggacagcgagtcagaggacgagaggcccagggccgtcttccacgaggaggagcagcggcgtcccaagcaccggccgtcggaggcggacgaggaagagctggctcggcgccgagaggcccggaagcaggagcaggccaacaaccccttctacatcaagagctcgccatcgccacagaagcggtaccaggacaccccgggcgtggagcacattcccgtggtgcagattgacctctccgtccccttgaaggttccagggctgcctatgtcagatcagtatgtgaagctggaggaggagcggcggcaccggcagaagctggagaaggacaagaggaggaaaaagaggaaggagaaggagaagaagggcaagcgccgccacagctcgctgcccacggagagcgacgaggacatcgcccctgcccagcaggtggacatcgtcacagaggagatgcctgagaatgctctgcccagcgacgaggatgacaaagaccccaacgacccctacagggctctggatattgacctggataagcccttagccgacagcgagaaactgcctattcagaaacacagaaacaccgagacctcaaaatcccctgagaaggacgttcccatggtagaaaagaagagcaagaaacccaagaagaaagagaaaaaacacaaagagaaagagagagacaaggagaagaagaaggagaaggagaagaagaaatctcccaagcctaagaagaagaagcacaggaaggagaaggaggagcggaccaaaggcaagaagaagtccaagaagcagcctccaggcagcgaggaggcagcgggggagccggtgcagaatggcgcgccagaggaggagcagctcccgcctgagtccagctactccctcctcgctgaaaattcctatgttaaaatgacctgtgacatccggggcagtctgcaggaggacagccaggtcactgtggccatcgtgctggagaacaggagcagcagcatcctcaagggcatggagctcagcgtgctggactcactcaatgccaggatggcccggccgcagggctcctccgtccacgatggcgtccccgtgcctttccagctgcccccaggcgtctccaacgaagcccagtatgtgttcaccatccagagcatcgtcatggcgcagaagctcaaggggaccctgtccttcattgccaagaatgacgagggtgcgacccacgagaagctggacttcaggctgcacttcagctgcagctcctacttgatcaccactccctgctacagtgacgcctttgctaagttgctggagtctggggacttgagcatgagctcaatcaaagtcgatggcattcggatgtccttccagaatcttctggcgaagatctgttttcaccaccatttttccgttgtggagcgagtggactcctgcgcctccatgtacagccgctccatccagggccaccatgtctgcctcctggtgaaaaaggtgagaactctgtctcagtcgacgggaagtgcagtgactccacgctactgagcaacttgttagaagagatgaaggcgacgctggccaagtgttgagagctgcctgcgagccccgcaccaccccgcggagcacgtacccagggaccgcagccctgacgtgtctcgcctctcctcagtcgtgtgtactgtacccaagcctgagtgttaatttaactctatgttgtccgccgtgtagacatccgaggtcatttgttgcgttgaattatctgaccatccttttttactgtgactcttcccattctctttggcaagaagtccccttctcgcccccaaaccagcaagggactcccccacctgggtctgtgccctgccccgcgctgggggccgagtccttgaatgtggcttcaggggctcctgtcctgggccagggcctgatgggcaccacgtgaggggcacttggtggacagggcggggctgacgtggcctcctctggggtcgcctgcttttgacccaaaggtcctgacggttgcgtccgggggaggggaaggaagggccgctgtcgccaaggttttctctcccagaacccacagtgggaaagcggtcttgccaggcgttgtccattgtcagtgtgctcgtgggctggtgactgggtcttgggatcccaggccacgcgccagccaggctgtgggcagggcggggccagggacgccaaagagaggttgcagtcagaaccgtggacggggtgggttgaggcctctctgccacccgtcttcctggtcagcagaagtgcatctcggcttgggtttggggtggtccgcatcccctgcttgccactatgcgcaccaaggtttccccacatccttcccagcacccttaggaaggcccaggcagggcctggaagcagcggacctgggctgttctgtgttgaaggagtgtgcccagtgcccttgggcaggacctgtgagagccacctcacaggcagagcccccaccaggcagggcaaggagactccgctcactccccacggccagcgtgggcacaggactgacccttcttcagagataatgacattttatcttctccttttgatgaaaactgtcactttagcatgtaatccattacagaatcccatgcagtgattccaggatttgaaattgtatgatgtgttacataagaatttatttgctatcgacattcccgtataaagagagagacatatcacgctgctgtcatgattttgtgtcaagatgatccaataaagttgtaaaacaggcatttccaaaaaaaaaaaa

SEQ ID NO: 204 - DNA, 3107 bp, Homo sapiens
gactcgagtaacatggccgctgtctcgtgagtcccgctagtgccgggcgggagttgttaagcggccagggtcaggtgtgctggagcggggtccgggcccgggttccagggcgaggcggcggagcgtggcaggcaagcctagagcggcgtggtccatgcgccggcgccgggggcagagcggagccgcagactcccctggccccggcgcggccccggcagccgcgggctaaggagtcgcgaggttcccccagctgccaccatgaaccccgagaaggatttcgcgccgctcacgcctaacatcgtgcgcgccctcaatgacaagctgtacgaaaagcggaaggtggcagcgctggagatcgagaagctggtccgggagttcgtggcccagaacaataccgtgcaaatcaagcatgtgatccagaccctgtcccaggagtttgccctgtctcagcacccccacagccggaaagggggcctcatcggcctggccgcctgctccatcgcactgggcaaggactcagggctctacctgaaggagctgatcgagccagtgctgacctgcttcaatgatgcagacagcaggctgcgctactatgcctgcgaggccctctacaacatcgtcaaggtggcccggggcgctgtgctgccccacttcaacgtgctctttgacgggctgagcaagctggcagccgacccagaccccaatgtgaaaagcggatctgagctcctagaccgccttttaaaggacattgtgactgagagcaacaagtttgacctggtgagcttcatccccttgttgcgagagaggatttactccaacaaccagtatgcccggcagttcatcatctcctggatcctggttctggagtcggtgccagacattaacctgctggattacctgccggagatcctggatggactcttccagatcctgggtgacaatggcaaagagattcgcaaaatgtgtgaggttgttcttggagaattcttaaaagaaattaagaagaacccctccagtgtgaagtttgctgagatggccaacatcctggtgatccactgccagacaacagatgacctcatccagctgacagccatgtgctggatgcgggagttcatccagctggcgggccgcgtcatgctgccttactcctccgggatcctgactgctgtcttgccctgcttggcctacgatgaccgcaagaaaagcatcaaagaagtggccaacgtgtgcaaccagagcctgatgaagctggtcacccccgaggacgacgagctggatgagctgagacctgggcagaggcaggcagagcccacccctgacgatgccctgccaaagcaggagggcacagccagtggaggtccagatggttcctgtgactccagcttcagtagcggcatcagtgtcttcactgcagccagcactgaaagagccccagtgacccttcacctcgacgggatcgtgcaggtcctaaactgccacctcagtgacacggccattgggatgatgaccaggattgcagttctcaagtggctctaccacctctacatcaaaactcctcggaagatgttccggcacacggacagcctctttcccatcctactgcagacgttatcggatgaatcggatgaggtgatcctgaaggacctggaggtgctggcagaaatcgcttcctcccccgcaggccagacggatgacccaggccccctcgatggccctgacctccaggccagccactcagagctccaggtgcccacccctggcagagccggcctactgaacacctctggtaccaaaggcttagaatgttctccttcaactcccaccatgaattcttacttttataagttcatgatcaaccttctcaagagattcagcagcgaacggaagctcctggaggtcagaggccctttcatcatcaggcagctgtgcctcctgctgaatgcggagaacatcttccactcaatggcagacatcctgctgcgggaggaggacctcaagttcgcctcgaccatggtccacgccctcaacaccatcctgctgacctccacagagctcttccagctaaggaaccagctgaaggacctgaagaccctggagagccagaacctgttctgctgcctgtaccgctcctggtgccacaacccagtcaccacggtgtccctctgcttcctcacccagaactaccggcacgcctatgacctcatccagaagtttggggacctggaggtcaccgtggacttcctcgcagaggtggacaagctggtgcagctgattgagtgccccatcttcacatatctgcgcctgcagctgctggacgtgaagaacaacccctacctgatcaaggccctctacggcctgctcatgctcctgccgcagagcagcgccttccagctgctctcgcaccggctccagtgcgtgcccaaccctgagctgctgcagaccgaagacagtctaaaggcagcccccaagtcccagaaagctgactcccctagcatcgactacgcagagctgctgcagcactttgagaaggtccagaacaagcacctggaagtgcggcaccagcggagcgggcgtggggaccacctggaccggagggttgtcctctgacaggcctggcacggaggagggcccaccgagtggtcccatgaaacactaagggtcgtcacgccctcccgaggagctcaaggacctgcctgtcaggaccagggctgggcctgccaacccagggcagtgttggggccggaggctgctgtgtctgcccaagctcctctcagagtccagtccccaggcctccagcgctgtcagctgcaccctggcattctcacagagctggctgcccacccagtggggggctatagcctcagagaccactcatcctctggaatcaacctctttctaataccctcttggaaaaagagcttgcccctcctccagcacactagagctctggccttgtgtgtatatgtatacatacgtgaacacatgcctgtgtgtgtgtgtgtgtgtgtgtacttgtatgcacgtaggcaccagcacaaagatctgaatgatgcaccccacccccaccccaataaagaaataacagaaaaccctcaaaaaaaaaaaaa

SEQ ID NO: 205 - DNA, 5879 bp, Homo sapiens
cgccagggctgcgtaggcttgtggcgcgcccgcggagaggccggggctctgacgcccgctctgcggcttcggtgtttgaacaggccacagtccaggagcgcttacattcaggagctccgcgtagcacctgcccaaccaaactcagccctccgttaagatcctggttccatgccgcagtaggacagcaggcccaagtctgcacatcccagtgatgcaccatgccaatagtggataagttgaaggaggccctgaaacccggccgcaaggactcggctgatgatggagaactggggaagcttcttgcctcctctgccaagaaggtccttttacagaaaatcgagttcgagccagccagcaagagcttctcctaccagctggaggccttaaagagcaaatatgtgttgctcaaccccaaaacagagggagctagtcgccacaagagtggagatgacccaccggccaggagacagggcagtgagcacacgtatgagagctgtggtgacggagtcccagccccgcagaaagtgcttttccccacggagcgactgtctctgaggtgggagcgggtcttccgcgtgggcgcaggactccacaaccttggcaacacctgctttctcaatgccaccatccagtgcttgacctacacaccacctctagccaactacctgctctccaaggagcatgctcgcagctgccaccagggaagcttctgcatgctgtgtgtcatgcagaaccacattgtccaggccttcgccaacagcggcaacgccatcaagcccgtctccttcatccgagacctgaaaaagatcgcccgacacttccgctttgggaaccaggaggacgcgcatgagttcctgcggtacaccatcgacgccatgcagaaagcctgcctgaatggctgtgccaagttggatcgtcaaacgcaggctactaccttggtccatcaaatttttggagggtatctcagatcacgcgtgaagtgctccgtgtgcaagagcgtctcggacacctacgacccctacttggacgtcgcgctggagatccggcaagctgcgaatattgtgcgtgctctggaactttttgtgaaagcagatgtcctgagtggagagaatgcctacatgtgtgctaaatgcaagaagaaggttccagccagcaagcgcttcaccatccacagaacatccaacgtcttaaccctttccctcaagcgttttgccaacttcagcggggggaagatcaccaaggatgtaggctatccggaattcctcaacatacgtccgtatatgtcccagaataatggtgatcctgtcatgtatggactctatgctgtcctggtgcactcgggctacagctgccatgccgggcactattactgctacgtgaaggcaagcaatggacagtggtaccagatgaatgattccttggtccattccagcaacgtcaaggtggttctgaaccagcaggcctacgtgctgttctatctgcgaattccaggctctaagaaaagtcccgagggcctcatctccaggacaggctcctcctcccttcccggccgcccgagtgtgattccagatcactccaagaagaacatcggcaatgggattatttcctccccactgactggaaagcgacaagactctgggacgatgaagaagccgcacaccactgaagagattggtgtgcccatatccaggaatggctccaccctgggcctgaagtcccagaacggctgcattcctccaaagctgccctcggggtccccttcccccaaactctcccagacacccacacacatgccaaccatcctagacgaccctggaaagaaggtgaagaagccagctcctccacagcacttttcccccagaactgctcaggggctgcctgggaccagcaactcgaatagcagcagatctgggagccaaaggcagggctcctgggacagcagggatgttgtcctctctacctcacctaagctcctggctacagccactgccaacgggcatgggctgaaggggaacgacgagagcgctggcctcgacaggaggggctccagcagctccagcccagagcactcggccagcagcgactccaccaaggccccccagacccccaggagtggagcggcccatctctgcgattctcaggaaacgaactgttccaccgctggccactccaaaacgccgccaagtggagcagattctaagacggtgaagctgaagtcccctgtcctgagcaacaccaccactgagcctgcaagcaccatgtctcctccaccagccaaaaaactggccctttctgccaagaaggccagcaccctgtggagggcgaccggcaatgacctccgtccacctcccccctcaccatcctccgacctcacccaccccatgaaaacctctcaccccgtcgttgcctccacttggcccgtccatagagccagggctgtgtcacctgctccccaatcatccagccgcctgcaaccccccttcagcccccaccccacattgctgtccagtacccccaagcccccagggacgtcagaaccacggagctgctcctccatctcgacggcgctgcctcaggtcaacgaggaccttgtgtcccttccacaccagttgccagaggccagtgagcccccccggagcccctctgagaagaggaaaaagacctttgtgggagagccgcagaggctgggctcagagacgtgcctcccacagcacatcagggaggccactgcggctccccacgggaagaggaagaggaagaagaagaagcgcccggaggacacagctgccagcgccctgcaggaggggcagacacagagacagcctgggagccccatgtacaggagggagggccaggcacagctgcccgctgtcagacggcaggaagatggcacacagccacaggtgaatggccagcaggtgggatgtgttacggacggccaccacgcgagcagcaggaagcggaggaggaaaggagcagaaggtcttggtgaagaaggcggcctgcaccaggacccacttcggcacagctgctctcccatgggtgatggtgatccagaggccatggaagagtctccaaggaaaaagaaaaaaagaaagcaggagacacagcgggcagtagaagaggatgggcatctcaaatgcccaaggagtgccaagccccaagatgctgttgtccccgagtccagcagctgcgcaccatccgcgaatggctggtgtcctggggaccgcatggggctgagccaggcccctcctgtgtcttggaatggagagcgggagtctgatgtggtccaggaactgctcaaatactcatctgataaagcttacgggagaaaagttctgacctgggatggcaagatgtcggcggtcagtcaggatgctattgaagacagcagacaggcccggactgagaccgtggttgatgactgggacgaagagtttgaccgagggaaggaaaagaaaattaaaaaatttaagagagagaagaggagaaacttcaacgccttccagaaacttcagactcgacggaacttctggtctgtgactcacccagcaaaggctgccagcctcagctatcgccgctgactgtgcccctgtggaaggaggtcggttccgagggggtgggtgtaagggtgaggtgggggtgtgtgtgccgtgtatgtgtgtaggggtgtggtggggtgtggcgtgtgtgtatgatgtatgtgggctgtgtatctggcacatgtgtgttgggtggtgtgtgtggtgtgggcgcgtctgtggtgtgtgtcctagtcacttggagaagggtgtgtgtgggatgcgtgtgtataagggggtgtgtgtgggatgcgtgtgtataagggggtgtgtgtagtgtgtgttgggtgtggggtgtgtacacctggcatctgtggcatgtgttctggtcacttggagaagggcatgtgtggggtgtgtgtgggatgtgggttgtgtgtatatctggcatgtgtcccagtcacttgcagaagggtgacttcttgccagccgcatcgagatgccatgcattgggttcctaggttggactcatacccgagggtggcagtgggaagattcgggtctcgtttctctctgtcaggactaccgtggtttgttctgcagcctcctggagacaaggcgtcccttcccgggagctgtcggtctggatctgagggagctctctgtgtgggctctgctgtgctgggagcctgtcacggtaggagctctcccggtaccagtgtccacagaccgcccaacatagaggctttgaggcttctctagatcggaacctctttggtgacattcccgaccagccctgcaagagaaacgacagtgtgtgtgtgagcagaggtggctgcacacctgctggacatctttgccaggctgtgccttctcatgtttcatagacagtggtctgtgctggcagaggctgctgcccctggttggggctatcaggagagtgggggatggtggccacatgtcctccaggtggtctcccggtgcatagctggtggctctgggcaagccatcccttgcttctcggggctgacgccaccgttgtgtccgagcccgccctcccctgcttcctcagcgggaccccttcatctgttggccttacctgtcctcagaaaggaagaggtgaccccacccagccacctctcccttttatggaactcgagagggtggccctactgtgcaccccttccttgtgagtagctctcaactgtcctggagagcagaggctatttggggtcggaggagccctcgatacctgcgaatacatctgctttccaggctgctgtttattctgagacgactgtgctgtagcttcccttgcagctgcaataacccgcaggtcttcactgaggtggaggctttggggtagaattctccatttattttactacttaatacaaaacatttatttttgaccagtcctgtggcttccattagcaatatgtttcctttcccaaatatgcaaatagtggctttgtttgctcaattttgtgagtgctttggaatttaaatgattgtataactcaagaagattacttttctatgttgctcaagctgtgcctgccaacttgtaacttaataaatacaggaaatcctcagagaaggtgatattttcaggaaaaagacaaatgccctcatagtagtgggaagtgtgaaggtgaccgtgaacatccttcctcatcgggtctgtccccgtcatttcctcccggagtcgtcgcaggtggagatggacaacgtggtgttggacttagacctccttcagtgtggctctgctgggccagaggcatcctgctgtcccgggtggctgcctcgctgtctgcaccccctctccctggggcagctttgcttcctgcccctgtgctcggggcctgggtggttactggcgtgtagatggaattgcttttttaatatgggaagatacatttatttttttccatgtgggtgggtgtctctttttggattttcttctgtttttacgtttctcttcttagaagggtgggagagaatcaagctcctgtggccacctgtgtcccagcagcagtgagtggagctgctcagggtgccctctcctgcggaccagtctctgaatgttcaaagatgagggcctggcttccgtgctctggctttgtaacttatctggaagggaaagcacatgccttcacgggcaggatgatcaagcggtgctgattcacgagagtggaagcctccagagcttggggctttctggctgctcttcattgacctgtgtgttcccagcacacgaacagcgcccctaacggagatttgttcagcgactgaatatacacctgtaaacgagtagcatgtatacattgattttgattacaaatggttctgtattat

SEQ ID NO: 206 - DNA, 2528 bp, Homo sapiens
gagttccagcagtccgcgagctgccgtcggctccgcggggggggcgggccgggcaccccggggcgcggaggagcgctcctcgcttctctccttcccccctgccgcactccgccggaccctcccgccggcccgcgccgctgcactcgccctctcctctcgccccccggcaaactttcggcccctccccgcccctcgcccgttattcgtcgtggctcaagcccggccacgccgccccaagggctcctcccgacctcccggcctgccgctccggccactgcgggatccagaaacatgtcgaccacacttctgtccgccttctacgatgtcgacttcttgtgcaagacagagaaatccctggccaacctcaacctgaacaacatgctggacaagaaggcggtggggacgcctgtggccgccgcccccagctcgggcttcgcgccgggattcctccgacggcactcggccagcaacctgcatgcactcgcccaccccgcgcccagccccggcagctgctcgcccaagttcccgggcgccgctaacggcagcagctgcggcagcgcggcggccggcggtccgacctcctacggcacccttaaggagccgtcggggggcggcggcacagccctgctcaacaaggagaacaaattccgggaccgctcgtttagcgagaacggcgatcgcagccagcacctcctgcacctgcagcagcagcagaaggggggcggcggctcccagatcaactccacgcgctacaagaccgagctgtgccggcccttcgaggagagcggcacgtgcaagtacggcgaaaagtgccagttcgcgcatggcttccacgagctgcgcagcctgactcgccatccgaagtacaagaccgagctgtgccgcacctttcataccatcggcttctgcccctatgggccgcgctgccacttcatccacaacgcggacgagcggcggcccgcgccgtcggggggcgcctccggggacctgcgtgcctttggcacgcgcgatgcgttgcacctgggcttcccgcgggagccgcggcccaagttgcaccacagcctcagcttctcgggcttcccgtcgggccaccatcagcccccgggcggcctcgagtcgccgctgctgctcgacagccccacgtcgcgcacgccgccgccgccctcctgctcttcggcctcgtcctgctcctcctccgcctcctcctgttcctcggcctccgcggcctccacgccctcgggcgccccgacatgctgcgcctccgcggcggccgcggctgcggccgctctgctgtacggcaccgggggcgccgaggacctgctggcgccgggggccccgtgcgcggcctgctcgtcggcctcgtgcgccaacaacgccttcgccttcggtccggagctcagcagcctcatcacgccgctcgccatccagacccacaactttgccgccgtggccgccgccgcctactaccgcagtcagcagcagcagcagcagcagggcctggcgccccccgcgcagccgccggcgccgcccagcgcgaccctccccgccggggccgccgcacctccctcgccgcccttcagcttccagctgccgcgccgcctgtccgactcgcccgtgttcgacgcgccccccagccccccggactcgctgtcggaccgcgacagctacctaagcggctccctgagctccggcagcctcagcggctctgagtctcccagcctcgaccctggccgccgcctgccaatcttcagccgcctctccatctccgacgactgaggcaagagggcgccagtgaggaggaagggaaggcggttcagagatgttggaggacacccctcgccatctcgcccttgctgggggcacgggagtggggggggtgacatgggccctaggcagactgcaagcccgaccgagcacttggactcgaactctgtgccgggaggggcccccacccctcctttttcggtttcctcttgtctttttttttttatttttattacgaagtttcattctttttgagcaaaaaagtcgaactttttctgttgaacaaaatattcacaacagggcagttgtgatacgaatagaacaaaaaaaaaaaaaaaacacttaaactttgttaggactccgatgagtttgggacttcaggaaaaatcaacccagcaccagcagctaccaaccaccattccatctcttcacttgaacagcattagttaagtccagatgtgggaacccttctcttggaagaagttcctaattgtgtctcagaccggtgtaaacaaaccagccagccgccaccttgctaaacctataagctttttaaaatccaatatattctgccaagaatatgccttgatagttagccctcagcccataggtgttttttgttttttaacagaattatatatgtctgggggtgaaaaaacccttgcattccaaaggtccatactggttacttggtttcattgccaccacttagtggatgttcagtttagaaccattttgtctgctccctctggaagccttgcgca

SEQ ID NO: 207 - DNA, 2876 bp, Homo sapiens
aaaaaaaatatattaataaaaaagttcaaaaaaggggggggattgtcatctcctttggggtgcgatggcttcaaatccaaactgaggctctccgggtggtaaggatgtgcgaggaggcctcttgaagaactccaggcctatcatgctgtctctccgctaaagcctgaggcccgaggtcagaggattcaggaaggctctgcagtcggcccaggagggcggggtcccgtggtggaggcggggagagggaaggaccgcacggagcaccaacccctgctcggccccgtaccaggaagcgctggggggcagaggagcggagttgaggcagaagccagtcaggatggtggtgccttcgctgaagcttcaggacctcatcgaagagattcgcggggccaagactcaggcccaggagcgggaggtgatccaaaaggagtgtgcccacatccgggcctccttccgcgacggggacccagtgcacaggcaccggcagctggccaaactgctctacgtccacatgttgggctaccccgcccactttggacagatggagtgcctgaaactgatcgcctcctccagattcacagacaagagggtgggctacctgggggccatgcttctattggatgagaggcacgatgcccacctgctcattaccaacagcatcaagaatgacctgagccaggggattcagccagtacaaggcctggccttgtgcactttgagcaccatgggctctgctgagatgtgccgagacctggccccagaggtggagaaactgctcctgcagcccagtccctacgtgcgcaagaaggctattctgactgcagtgcacatgatccggaaggtccctgaactctccagtgtcttcctcccaccctgtgcccaactgcttcatgagcgtcaccatggcatcctgctgggcaccatcacgctgatcacggagctctgcgaacgaagccctgcagccctcaggcacttccgaaaggtggtaccccagctggtacacatcctccggactctggtgacaatgggatactccacagaacacagcatatctggagtcagcgaccccttcctgcaggtccagatacttcgtctgcttcggatcctgggccggaaccacgaggagagcagtgagaccatgaatgacttgctggcccaggtggccactaacacggacaccagccgaaatgccggaaatgcggtcctgtttgagacagtactcaccatcatggatatccgctctgcagctggcctacgggttctagctgtcaacattcttggtcgcttcctactcaacagtgacaggaacattaggtatgtagccctgacatcactgcttcgactggtgcagtctgatcacagtgctgtgcagcggcatcggcccactgtggtggaatgtctacgggaaactgatgcctccctcagccggagagccctggaactaagcctggctctggtaaatagctccaatgtgcgagccatgatgcaagagctgcaggcctttctggagtcctgccctcctgacctacgggctgactgtgcctcaggcatcctgctggctgcagagaggtttgctccaaccaaacgctggcacatagacaccatcctgcatgtgctgacaacggcgggcacccatgtgcgggatgatgcagtggccaacctgacccagctgattgggggggcccaggagctacatgcctactctgtgcgccgcctctacaatgccctggcagaagacatttcccagcaaccactggtgcaggtggcagcctggtgcattggggagtatggggacctcctgctggcagggaactgcgaggagattgagccccttcaggtggacgaagaggaagtgctggcattgctggaaaaggtgctgcagtcccacatgtccctgccagccactcgaggatatgccctcacagccctcatgaagctcagcactcgcctctgtggggacaacaaccgcatccgccaggtggtgtccatctacgggagctgcttggacgtggagctgcagcagcgggctgtggagtatgacacactcttccggaaatacgaccacatgagggctgccatcctggaaaaaatgcctcttgtggagcgagatggccctcaggctgatgaggaagcaaaggaaagcaaagaagcagcccagctttcagaagcagccccagtgcccacagagccccaggcctcacagctcctggatctgctagatctcctggatggggcttctggggatgtccagcatcctccccatctggacccctccccaggaggtgccctggtacacctgcttgaccttccctgtgtacctccacccccagctcccatcccagatctcaaagtgtttgagcgtgagggagtacagctgaatctgtctttcattcgaccccctgaaaaccctgctttgctgttaatcaccatcactgccaccaacttctcagagggtgatgtcacccatttcatctgccaggctgctgtgcccaagagtctccagctgcagctgcaggcccccagtgggaacacagttccagctcggggtggccttcctatcacccagctcttcagaatcctcaatcctaacaaggcccccctgcggctaaagctgcgcctcacctacgaccactttcaccagtcggtgcaggagatctttgaggtgaacaacttgcctgtggaatcgtggcagtaactgtctccactcacagcctgaaattctcctgtgtcccaaaccccagggggccccagcagcttcgaacctacacctgagggctaccagcaggtggcgctctggctttgcactgcaaaaactggggaccagcccccttctcccacaaataaagcccaataaagcctgagaagtgaggaaagcc

SEQ ID NO: 208 - DNA, 3305 bp, Homo sapiens
aaaaaaaatatattaataaaaaagttcaaaaaaggggggggattgtcatctcctttggggtgcgatggcttcaaatccaaactgaggctctccgggtggtaaggatgtgcgaggaggcctcttgaagaactccaggcctatcatgctgtctctccgctaaagcctgaggcccgaggtcagaggattcaggaaggctctgcagtcggcccaggagggcggggtcccgtggtggaggcggggagagggaaggaccgcacggagcaccaacccctgctcggccccgtaccaggaagcgctggggggcagaggagcggagttgaggcagaagccaggtgaggctggagtcctggggtaggcaggctgtcgctgccgctgccgctgcctgagatggaaatcgggggaggaagctcgcggaagaaacagcggagggttcgtggaaaaaaaagcaatggctgagctaagggatggggtaccaggttagggggaggaaacggtagagagaaataggtggggctcccgcgcatgctcaatagggaaggggcgcccgtggggtgcggacgcatgcgtagtgggcttctcgggcggtggggtgggcgcggaatttggagacccacttcgggaaaggtaaaatgcgggcgcaattttagggtacctgtgggacccgggctcttagggtcttgacacaggacgggcctgggccgaaagcccaggcacgcccgaccagagagtgtttctccactcccggactctgccagtcaggatggtggtgccttcgctgaagcttcaggacctcatcgaagagattcgcggggccaagactcaggcccaggagcgggaggtgatccaaaaggagtgtgcccacatccgggcctccttccgcgacggggacccagtgcacaggcaccggcagctggccaaactgctctacgtccacatgttgggctaccccgcccactttggacagatggagtgcctgaaactgatcgcctcctccagattcacagacaagagggtgggctacctgggggccatgcttctattggatgagaggcacgatgcccacctgctcattaccaacagcatcaagaatgacctgagccaggggattcagccagtacaaggcctggccttgtgcactttgagcaccatgggctctgctgagatgtgccgagacctggccccagaggtggagaaactgctcctgcagcccagtccctacgtgcgcaagaaggctattctgactgcagtgcacatgatccggaaggtccctgaactctccagtgtcttcctcccaccctgtgcccaactgcttcatgagcgtcaccatggcatcctgctgggcaccatcacgctgatcacggagctctgcgaacgaagccctgcagccctcaggcacttccgaaaggtggtaccccagctggtacacatcctccggactctggtgacaatgggatactccacagaacacagcatatctggagtcagcgaccccttcctgcaggtccagatacttcgtctgcttcggatcctgggccggaaccacgaggagagcagtgagaccatgaatgacttgctggcccaggtggccactaacacggacaccagccgaaatgccggaaatgcggtcctgtttgagacagtactcaccatcatggatatccgctctgcagctggcctacgggttctagctgtcaacattcttggtcgcttcctactcaacagtgacaggaacattaggtatgtggccctgacatcactgcttcgactggtgcagtctgatcacagtgctgtgcagcggcatcggcccactgtggtggaatgtctacgggaaactgatgcctccctcagccggagagccctggaactaagcctggctctggtaaatagctccaatgtgcgagccatgatgcaagagctgcaggcctttctggagtcctgccctcctgacctacgggctgactgtgcctcaggcatcctgctggctgcagagaggtttgctccaaccaaacgctggcacatagacaccatcctgcatgtgctgacaacggcgggcacccatgtgcgggatgatgcagtggccaacctgacccagctgattgggggggcccaggagctacatgcctactctgtgcgccgcctctacaatgccctggcagaagacatttcccagcaaccactggtgcaggtggcagcctggtgcattggggagtatggggacctcctgctggcagggaactgcgaggagattgagccccttcaggtggacgaagaggaagtgctggcattgctggaaaaggtgctgcagtcccacatgtccctgccagccactcgaggatatgccctcacagccctcatgaagctcagcactcgcctctgtggggacaacaaccgcatccgccaggtggtgtccatctacgggagctgcttggacgtggagctgcagcagcgggctgtggagtatgacacactcttccggaaatacgaccacatgagggctgccatcctggaaaaaatgcctcttgtggagcgagatggccctcaggctgatgaggaagcaaaggaaagcaaagaagcagcccagctttcagaagcagccccagtgcccacagagccccaggcctcacagctcctggatctgctagatctcctggatggggcttctggggatgtccagcatcctccccatctggacccctccccaggaggtgccctggtacacctgcttgaccttccctgtgtacctccacccccagctcccatcccagatctcaaagtgtttgagcgtgagggagtacagctgaatctgtctttcattcgaccccctgaaaaccctgctttgctgttaatcaccatcactgccaccaacttctcagagggtgatgtcacccatttcatctgccaggctgctgtgcccaagagtctccagctgcagctgcaggcccccagtgggaacacagttccagctcggggtggccttcctatcacccagctcttcagaatcctcaatcctaacaaggcccccctgcggctaaagctgcgcctcacctacgaccactttcaccagtcggtgcaggagatctttgaggtgaacaacttgcctgtggaatcgtggcagtaactgtctccactcacagcctgaaattctcctgtgtcccaaaccccagggggccccagcagcttcgaacctacacctgagggctaccagcaggtggcgctctggctttgcactgcaaaaactggggaccagcccccttctcccacaaataaagcccaataaagcctgagaagtgaggaaagccaaaaaa

SEQ ID NO: 209 - DNA, 552 bp, Homo sapiens
aggaaattgacgaacacgtgacgcggtcgggcggaccactgcagactgagcggtggaccgaattgggaccgctggcttataagcgatcatgtttctccagtattacctcaacgagcagggagatcgagtctatacgctgaagaaatttgacccgatgggacaacagacctgctcagcccatcctgctcggttctccccagatgacaaatactctcgacaccgaatcaccatcaagaaacgcttcaaggtgctcatgacccagcaaccgcgccctgtcctctgagggtcccttaaactgatgtcttttctgccacctgttacccctcggagactccgtaaccaaactcttcggactgtgagccctgatgcctttttgccagccatactctttggcatccagtctctcgtggcgattgattatgcttgtgtgaggcaatcatggtggcatcacccataaagggaacacatttgacttttttttctcatattttaaattactacaagattattaaagataaaatgatttgaaaaactcaaaaaaaaaaaaaaaaa

SEQ ID NO: 210 - DNA, 2425 bp, Homo sapiens
gggcgctggtggcggcggtggcggaggtggaggtggaggtggaagctgaagctgaagcagagccagaggcggcgcggcggggtgctcggcggcgcggcacgcggcccagaagcgttggaatcctgaattgagacggctgcgcctaaagacagcaggagtggcggggccgccgccgtcgccggagagatgagccgggaagcttgaggccggagacgcccgccttcgggcccgtccgcccggcttccccgctcccgggtactggaagatgaaagagactatacaagggaccgggtcctgggggcctgagcctcctggacccggcatacccccagcttactcaagtcccaggcgggagcgtcttcgttggcccccacctcccaaaccccgactcaagtcaggtggagggtttgggccagatcctgggtcagggaccacagtgccagccagacgcctccctgtcccccgaccctcttttgatgcctcagcaagtgaagaggaggaagaagaggaggaggaggaggatgaagatgaagaggaggaagtggcagcttggaggctgcccccaagatggagtcagctgggaacctcccagcggccccgcccttcccgccccactcatcgaaaaacctgctcacagcgccgccgccgagccatgagagccttccggatgctgctctactcaaaaagcacctcgctgacattccactggaagctttgggggcgccaccggggccggcggcggggcctcgcacaccccaagaaccatctttcaccccagcaagggggtgcgacgccacaggtgccatccccctgttgtcgttttgactccccccgggggccacctccaccccggctgggtctgctaggtgctctcatggctgaggatggggtgagagggtctccaccagtgccctctgggccccccatggaggaagatggactcaggtggactccaaagtctcctctggaccctgactcgggcctcctttcatgtactctgcccaacggttttgggggacaatctgggccagaaggggagcgcagcttggcaccccctgatgccagcatcctcatcagcaatgtgtgcagcatcggggaccatgtggcccaggagctttttcagggctcagatttgggcatggcagaagaggcagagaggcctggggagaaagccggccagcacagccccctgcgagaggagcatgtgacctgcgtacagagtatcttggacgaattccttcaaacgtatggcagcctcatacccctcagcactgatgaggtagtagagaagctggaggacattttccagcaggagttttccaccccttccaggaagggcctggtgttgcagctgatccagtcttaccagcggatgccaggcaatgccatggtgaggggcttccgagtggcttataagcggcacgtgctgaccatggatgacttggggaccttgtatggacagaactggctcaatgaccaggtgatgaacatgtatggagacctggtcatggacacagtccctgaaaaggtgcatttcttcaatagtttcttctatgataaactccgtaccaagggttatgatggggtgaaaaggtggaccaaaaacgtggacatcttcaataaggagctactgctaatccccatccacctggaggtgcattggtccctcatctctgttgatgtgaggcgacgcaccatcacctattttgactcgcagcgtaccctaaaccgccgctgccctaagcatattgccaagtatctacaggcagaggcggtaaagaaagaccgactggatttccaccagggctggaaaggttacttcaaaatgaatgtggccaggcagaataatgacagtgactgtggtgcttttgtgttgcagtactgcaagcatctggccctgtctcagccattcagcttcacccagcaggacatgcccaaacttcgtcggcagatctacaaggagctgtgtcactgcaaactcactgtgtgagcctcgtaccccagaccccaagcccataaatgggaagggagacatgggagtcccttcccaagaaactccagttcctttcctctcttgcctcttcccactcacttccctttggtttttcatatttaaatgtttcaatttctgtatttttttttctttgagagaatacttgttgatttctgatgtgcaggggatggctacagaaaagcccctttcttcctctgtttgcaggggagtgtggccctgtggcctgggtggagcagtcatcctcccccttccccgtgcagggagcaggaaatcagtgctgggggtggtgggcggacaataggatcactgcctgccagatcttcaaacttttatttatatatatatatataaaaatgccacggtcctgctctggtcaataaaggatcctttgttgataaaaaaaaaaaaaaa

SEQ ID NO: 211 - DNA, 2592 bp, Homo sapiens
agggcgaacgggcgagtggcagcgaggcggggcgggctgaggccagcgcggaagtctcgcgaggccgggcccgagcagagtgtggcggcggcggcgagatctgggctcgggttgaggagttggtatttgtgtggaaggaggcggaggcgcaggaggaagggggaagcggagcgccggcccggagggcgggaggaggcgcggccagggcgggcggttgcggcgaggcgaggcgaggcggggagccgagacgagcagcggccgagcgagcgcgggcgcgggcgcaccgaggcgagggaggcggggaagccccgccgccgccgcggcgcccgccccttcccccgccgcccgccccctctccccccgcccgctcgccgccttcctccctctgccttccttccccacggccggccgcctcctcgcccgcccgcccgcagccgaggagccgaggccgccgcggccgtggcggcggagccctcagccatggcctcgggcgacaccctctacatcgccacggacggctcggagatgccggccgagatcgtggagctgcacgagatcgaggtggagaccatcccggtggagaccatcgagaccacagtggtgggcgaggaggaggaggaggacgacgacgacgaggacggcggcggtggcgaccacggcggcgggggcggccacgggcacgccggccaccaccaccaccaccatcaccaccaccaccacccgcccatgatcgctctgcagccgctggtcaccgacgacccgacccaggtgcaccaccaccaggaggtgatcctggtgcagacgcgcgaggaggtggtgggcggcgacgactcggacgggctgcgcgccgaggacggcttcgaggatcagattctcatcccggtgcccgcgccggccggcggcgacgacgactacattgaacaaacgctggtcaccgtggcggcggccggcaagagcggcggcggcggctcgtcgtcgtcgggaggcggccgcgtcaagaagggcggcggcaagaagagcggcaagaagagttacctcagcggcggggccggcgcggcgggcggcggcggcgccgacccgggcaacaagaagtgggagcagaagcaggtgcagatcaagaccctggagggcgagttctcggtcaccatgtggtcctcagatgaaaaaaaagatattgaccatgagacagtggttgaagaacagatcattggagagaactcacctcctgattattcagaatatatgacaggaaagaaacttcctcctggaggaatacctggcattgacctctcagatcccaaacaactggcagaatttgctagaatgaagccaagaaaaattaaagaagatgatgctccaagaacaatagcttgccctcataaaggctgcacaaagatgttcagggataactcggccatgagaaaacatctgcacacccacggtcccagagtccacgtctgtgcagaatgtggcaaagcttttgttgagagttcaaaactaaaacgacaccaactggttcatactggagagaagccctttcagtgcacgttcgaaggctgtgggaaacgcttttcactggacttcaatttgcgcacacatgtgcgaatccataccggagacaggccctatgtgtgccccttcgatggttgtaataagaagtttgctcagtcaactaacctgaaatctcacatcttaacacatgctaaggccaaaaacaaccagtgaaaagaagagagaagacccttctcgaccacgggaagcatcttccagaagtgtgattgggaataaatatgcctctcctttgtatattatttctaggaagaattttaaaaatgaatcctacacacctaagggacatgttttgataaagtagtaaaaattaaaaaaaaaaaactttactaagatgacattgctaagatgctctatcttgctctgtaatctcgtttcaaaaacacagtgtttttgtaaagtgtggtcccaacaggaggacaattcatgaacttcgcatcaaaagacaattctttatacaacagtgctaaaaatgggacttcttttcacattcttataaatatgaagctcacctgttgcttacaatttttttaattttgtattttccaagtgtgcatattgtacacttttttggggatatgcttagtaatgctacgtgtgatttttctggaggttgataactttgcttgcagtagattttctttaaaagaatgggcagttacatgcatacttcaaaagtattttcctgtaaaaaaaaaaaagttatataggttttgtttgctatcttaattttggttgtattctttgatgttaacacattttgtataattgtatcgtatagctgtattgaatcatgtagtatcaaatattagatgtgatttaatagtgttaatcaatttaaacccattttagtcactttttttttccaaaaaaatactgccagatgctgatgttcagtgtaatttctttgcctgttcagttacagaaagtggtgctcagttgtagaatgtattgtaccttttaacacctgatgtgtacatcccatgtaacagaaagggcaacaataaaatagcaatcctaaag

SEQ ID NO: 212 - DNA, 2039 bp, Homo sapiens
cgggcgggcaggcgggcaggccggcaggcgggtgcgcggagggctggtaccccgcagcaggtgggcggggtgcggttggcggcggcggctgggccgggggctgccggctgcgctcgggccgtgcgcggcggccgtgcgggcacgccatggacttcaacatgaagaagctggcgtcggacgcgggcatcttcttcacccgggcggtgcagttcacggaggagaaatttggccaggctgagaagactgagcttgatgcccactttgaaaaccttctggcccgggcagacagcaccaagaactggacagagaagatcttgaggcagacagaggtgctgctgcagcccaaccccagtgcccgagtggaggagttcctgtatgagaagctggacaggaaggtcccctcaagggtcaccaacggggagctgctggctcagtacatggcagacgcggccagtgagctggggccgaccaccccctatgggaagacactgatcaaggtggcagaagctgaaaagcaactgggagccgcggagagggattttatccacacggcctccatcagcttcctcacacccttgcgcaacttcctggagggggactggaagaccatctcgaaggagaggcggctcctccaaaaccggcgtctggacttggatgcctgcaaagcgaggctgaagaaggccaaggctgcagaagccaaagccacgacggtgcctgactttcaggagactagacctcgtaattacattctctcggccagcgcctccgcgctctggaatgatgaagtggacaaggccgagcaggagctccgcgtggcccagacagagtttgaccggcaagcagaagtgacccgtctcttgctggagggaatcagtagcactcacgtgaaccacctgcgctgcctccacgagttcgtcaagtctcagacaacctactacgcacagtgctaccgccacatgctggacttgcagaagcagctgggcagatttcccggcaccttcgtgggcaccacagagcccgcctccccacccctgagcagcacctcacccaccactgctgcggccactatgcctgtggtgccctctgtggccagcctggcccctccaggggaggcctcgctctgcctggaagaggtggccccccctgccagtgggacccgcaaagctcgggtgctctatgactacgaggcagccgacagcagtgagctggccctgctggctgatgagctcatcactgtctacagcctgcctggcatggaccctgactggctcattggcgagagaggcaacaagaagggcaaggtccctgtcacctacttggaactgctcagctaggcaggtgcccccatcccccccgcattctggcctaggcaggagaggatgggcgcagccctgccacttaacttgtttgttggtgacacagttgttcagagtggggagaattcaccccattctgtccctgcccctagtcacctagctgtgagggtgcctgaggctgaatggctccacccctcccccagccctgcttctgacctgtggctctggagcccctgcccctgcctgcatccccgagcaccccaccctccaggctccactaaggagggaggggctgtctgcagcagctgcactcagcacctaggccagggtggggccgccgcagatgggctcaggaagccccaggtgcactcagcgagagccctgcctttcagttgccaaaagctgcatcaggggaatgcggcaaggcacacagggctctggcagcccctggggactgggcgctgcccctgggaggggagagcctggccagggctggtgttgggcccggagcagcatcttccggtgctatcctcccctcccacccctcacagctcaagccaagtccagcggccgcagtcttcacctctccacactcactttttatctggtgtttttacttctgcctgcgtttgctctctagccaataaaccgtccttgtgtgcgagtcaaaaaaaaaaaaaaaaaaaaaaaaaaaaaaaaaaaaaaaaaaaaaaaaaaaaaaaa

SEQ ID NO: 213 - DNA, 4729 bp, Homo sapiens
gcatgcaggcaagatggcggaaggggaggacgtgggatggtggcggagctggctgcagcagagctaccaagcagtcaaagagaagtcctctgaagccttggagtttatgaagcgggacctgacggagtttacccaggtggtgcagcatgacacggcctgtaccatcgcagccacggccagcgtggtcaaggagaagctggctattgcagcctgttcccggggcgcttgcttcctctgcccgttctctatacagacggaaggctcctcaggagcaacagagaagatgaagaaagggttatctgacttcctaggggtgatctcagacacctttgccccttcgccagacaaaaccatcgactgcgatgtcatcaccctgatgggcacaccgtctggcacagctgagccctatgatggcaccaaggctcgcctctatagcctgcagtcggacccagcaacctactgtaatgaaccagatgggcccccggaattgtttgacgcctggctttcccagttctgcttggaggagaagaagggggagatctcagagctccttgtaggcagcccctccatccgggccctctacaccaagatggttccagcagctgtttcccattcagaattctggcatcggtatttctataaagtccatcagttggagcaggagcaggcccggagggacgccctgaagcagcgggcggaacagagcatctctgaagagcccggctgggaggaggaggaagaggagctcatgggcatttcacccatatctccaaaagaggcaaaggttcctgtggccaaaatttctacattccctgaaggagaacctggcccccagagcccctgtgaagagaatctggtgacttcagttgagcccccagcagaggtgactccatcagagagcagtgagagcatctccctcgtgacacagatcgccaacccggccactgcacctgaggcacgagtgctacccaaggacctgtcccaaaagctgctagaggcatccttggaggaacagggcctggctgtggatgtgggtgagactggaccctcaccccctattcactccaagcccctaacgcctgctggccacaccggcggcccagagcccaggcctccagccagagtagagactctgagggaggaggcgcccacagacttacgggtgtttgagctgaactcggatagtgggaagtctacaccctccaacaatggaaagaaaggctcaagcacggacatcagtgaggactgggagaaagactttgacttggacatgactgaagaggaggtgcagatggcactttccaaagtggatgcctccggggaggtgagtgggcctggtgggtcagagggaagcgagcctaatggtcctgggtgtgagagctctccccagccagcccagctgtcccctcaggagggtccctgctcctgtctgaggtgacaggtggtgggaaaggagctggagcttcctgctcagacccacaacattggtcatcagcaggctgcacttttcctcagttccagggtggatagagggtcaagttcttgaccttagctctgtatcaaaattgcctgagaaactgcttaagaaaacagatgtcatgctgagcgcggtggctcacacctgtaatcccaacactttgggaggccaaggtgggaggattgcttgaggcgaggagttcaagaccagcctggccaatatagtgagaccccatttctgtttttgaaaaaaaaaaaaaaaggaaaaaagaaaacagacatcaaaccctgcctgaccttctgagttgtggtcctcaggtatgaggcctgagtatatacttggccttggagacaaaagaccagtgtgatcaagggcaagggcaagttacttaacctgagcccctggttcctcatctaaaacatggaattgatcattataagacctggctataagctgtaatgaggtgatccatgtagacaccttagggctattgcctgagacatggtgaccagcactcaggagacattagtgataaaccccacaaaacccattccagttattaagctcaaggaggccttagtactgttattcttcactacctctcagaatcaaaagtggctcatttagattgagaggctggaacagtccaaagctctcccagctaataagtgacaggactgaggctgcaacccagacatctgattcatgtcagcgttagttccactgtcacataagaaccacatgagtccttccatcatgcaacttatgagcctgttagaaagaggtggacagattagagagacatgtgaagggcctcctttttcatgatgggaaactgaagccttgggggagtattttacctactcaggagtattttgcacttgtgactacctcactatacccaggacagagaaagcccatagtgccctgtcaggccgcaggggcttgctggctttttgtgtctttgcagccccctttaaaacctgacgtgcagtacacgtgagcattctagaacctgctataccagggcttagccgacagcaggccaagagtaggaacaaagcaagaaaacgttccgtggggagacttgagctgggaattagggtgttggtgcccctagtgaagacctagtgggcatctgtaggccactgccacctctgcttttggccacagtgccactcaggcagtggcctccattcacccaaagactaagtaacttgcccttgattacactggtcttttgtgtccagggccaagtatctgctcaggcctcctgagttctctgcttctcagagccatggcattatctgctcagcaggaggcaagttctccttaaaggactgaggctgacttggttcctgtaggcagccatcaccttgtggtgtctggtgttggttgggggaagtgtttcctttaggtctgaggtaatcagagcatcaggcccaccccccaggcagagggcagctctgcccctcagacacattccttaagactaggggttcactctcagtgggacctcagagtatggcctggggtaggggatgggaggtggctctgctcagcaagtggaggttaggtctgggcctgactcaggagtaactatgtgtttgtgatttccattaccccctcccatttgcagctggaagatgtagagtgggaggactgggagtgagggagccagagggagcagctcccccacccatggcatctctcgcctccctcgctcgtctcagcccagccctggaagactgagaatgttcccccaaatctcctctgccaaccagagctctgggcacagattctggtggctccctgctggccctcttgggcctctgctcacacctgggaaggggctctctaaatcccggccagaaactctgacttgtgccaacaataggatgacccaagggagaggaaacctatcctcctcaccagaagagcctgtgtttttctgctgaacacccactgttcctgaggactcctgctgggaagtcccaagggatagttctagcccttctgcctgtgtagacagaagctaaaccaccagtctctctcggaggaagctgagacaacatactctgtccatacataagcaggcagggagggccatgccacctacccttggctaaacagggacagtgaacacattttggttcctatcccagtgggtaagaggcacttatctctgggaaatttgcctctcttgggactctccccctcccaggcattttccattcctggaaaggctcctttggggttcagaatccagagaccaaaccctgacccacctccttcctttcctccagcccacactggtctgtccccatgccttcccagggcttcttcatgtcagatgcacccaagtccttagcccagctgtgccacctgcaggagttcgctcttgcgtttcttcccctccccaagaagggagggggctacttcaggcccttctgtgtgttgcctggcaggataccttgtccaaccagctacccacctcaactcccctgtagtttaggacacaaaacagctaccagcggtacagagcggtgatcaaagccgagtacttacaactctggtaagcctagcttctccgcctcagcccttctgcttctggaagagctatcctgggggtgaacttgaaactctcatcaggcttctgcaaaagctcttcttcctgaagacagacccagcctttgtgctctcaccctccactctggtaaagctgcacctctgggggaatgaggggctgcaggaatctctggagagcctggtgcttcacgatgctgctctggtgattcttgtacctaatctggtgtgctcaccaatgagtgaaagggatcgtgggtcagggacaccgagagagtgaggtcacttccacttcaaaccttcagtgagggggtgggatggagagaatgctgaatcttttttttgacgggatggggtttttctctttgtaattatttctttagtttaattaaccttttggttgtttgtgcaatattatatattttaaattataatgcatctccccagagtattttgtagctgggaaaagaaaaaaggaaaaaaagaaaaaaagattctaacagctgttagttttataattaaaaaagaaagaaaaaaaaaaaaaaaaaaaaaaaaaaaaaaaaaaaaaaaaaaaaaaaaaaaaaaaaaaaaaaaaaaaaaaaaaaaaaaaaaaaaaaaaaaaaaaaaaaaaaaaaaaaaaaaaaaaaaaaaaaaaaaaaaaaaaaa

SEQ ID NO: 214 - DNA, 4371 bp, Homo sapiens
cgcgacttcgccccgcccggcgcgggcccaggaccctgatgtcgcttttgaacagcccctgcacctggcagccagcgagctactgtagtaggcattgccgactgtttgcataccggatgggagtgacagtgtaatagaaaaacaagcaagaaaccttttaggtaggactcctaaggctcagaggaagttacctccagccgctgccatgcccaactcagtgctgtgggcggtggacctcttcgggagagtgtacacgctgtccacagcaggccagtactgggaaatgtgcaaggactcccagctggagttcaagcgcgtcagcgccaccacgcagtgctgctggggcattgcctgtgacaaccaggtctacgtgtatgtgtgtgccagcgatgtccccatccgccgccgagaggaggcctatgagaatcagcgctggaatcccatgggcggcttctgtgagaagctcctgctgagtgaccgctgggggtggagtgacgtgagtgggctccagcaccggccgctggacagggtggcactgccctcgccgcactgggagtgggagtctgactggtacgtggatgagaattttggaggtgaacccactgagaaaggggggtggacgtacgccatcgactttcccgccacctacacgaaagacaagaagtggaattcttgtgtgcggcgccggaagtggatccggtacaggagatacaagtcccgggacatctgggccaagatcccctcgaaggatgaccccaaggagctgcccgaccccttcaacgacctctctgtagggggctgggagatcacggaggagcctgtgggccgcctgtcagtgtgggctgtgtctctgcagggcaaggtgtggtacagagaggacgtcagccactccaaccccgaagggtcctcctggtccctgctggacacccccggggaggtggttcagatcagctgtgggccccacgacctcctgtgggccacactctgggagggacaggccctggtccgggaaggaatcaacaggagcaatcccaaaggaagttcctggtccatcgtggagcctcctggatctgaaaacggggtcatgcacatctcggtgggagtcagcgtggtctgggctgtcaccaaggactggaaggtgtggttccgaagaggcgtcaactctcacaatccctgcggcaccagttggattgagatggttggtgagatgacgatggtgaacgtgggaatgaacgaccaggtgtggggcattggctgtgaggaccgagccgtgtacttccggcagggtgtcacccccagcgagctcagtgggaagacctggaaagccatcatcgcggcccgagagtgtgaccggtcacactctggcagctcgtctagtctcctcagtgccggctgcttcttcggtgatgaggtgaggggtagtggcgagtctgcccccagcgacaccgatgcctcctcggaagtcgagagaccagggcctggccagattctccctgcagaacctctagacgattccaagaatgccacagggaactcagcctcaggcctgggggctggcaggaccgcagaagataccgtggaagatgcctgcccagccgagggcagcagggaggccagacccaacacgcaccccggcccggcccccaccccggccgagctgccctggaccaatattgacctcaaggaggccaagaaagtgcccagccactcggccgctggcttccccgagaccaccagcctctcctctctggggctcctcccactgggcttggaggagccgtatggggtggatgaccacccgctgtgggcctgggtgtcgggaggcggctgcgtggtggaggcatgtgccatgcccagatggttcactgtccaggcgggcctgtcctcctcggtacacatgctgtccctgtccatcacgccggcccagaccgctgcctggaggaagcagatcttccagcagctcacggaaaggaccaagcgggagctggagaacttcagacactacgagcaggccgtggagcagtcggtgtgggtgaagaccggggcgctgcagtggtggtgcgactggaagccccacaagtgggtggacgtgcgcttggccctggagcagttcacggggcacgacggcgtccgggacagcatcctcttcatctactatgtggtccacgaggagaagaagtacatccacatattcctgaatgaggtggtggcgctggtcccagtgctgaacgagaccaagcactcctttgccctgtacacccctgagcggacacggcagaggtggccggtgcgtctggctgctgccaccgagcaggacatgaatgactggctcgccctgctcagcctgtcttgctgcgagagccggaaggtgcagggccgcccgtccccgcaggccatctggtccatcacctgcaagggggacatcttcgtgagcgagcccagcccagacctggaggcccacgagcaccccctgccctgcgaccagatgttttggcggcagatgggaggccacctgcggatggtggaggccaacagccggggcgtggtgtggggcatcggctatgaccacacggcctgggtatacacaggcggctatggaggcggctgcttccaaggcctggccagcagcaccagtaacatctacacgcagtcagacgtgaagtgtgttcacatctatgagaaccagcgctggaaccccgtcacaggctacaccagcaggggtctgcccacggaccggtacatgtggagcgatgcctcggggctgcaggagtgcacgaaggctggcacgaagcccccgtccctgcagtgggcctgggtttccgactggttcgtggatttcagcgttccggggggcacggaccaggaggggtggcagtatgccagcgacttccctgcctcataccatgggtccaaaacgatgaaggattttgtgaggaggaggtgctgggccagaaaatgcaagctggtgaccagtgggccctggctggaggtgccccccatcgccctcagggacgtgtccatcatcccggagagcccgggtgccgaggggagtgggcacagcatcgccctctgggccgtcagcgacaagggggatgtgctgtgccgcctgggcgtgtcggagctcaaccctgcgggctcctcctggctgcacgttggcaccgaccagcccttcgcctccatctccatcggggcctgctaccaggtgtgggccgtggcaagggacggctccgccttctaccggggatccgtgtacccctcgcagccagccggtgactgctggtaccacatcccgtccccaccgagacagaggctgaagcaggtgtccgcggggcagacgtcggtgtatgccctggatgagaatggaaacctgtggtatcgccaagggatcacgcccagctacccgcagggctccagctgggagcacgtgtccaacaacgtgtgccgagtgtccgtggggcccctggaccaggtctgggtgatcgccaacaaagtgcagggcagccacagcctgagccgggggacagtgtgtcatcgcaccggcgtgcagcctcacgagcccaagggccacggctgggactacggcatcgggggaggctgggaccatatctctgtccgggccaatgccaccagggccccccggagctcgtcccaggagcaggagccgagtgccccaccagaggcccatggccccgtctgctgctgaggcccccccacacacctacatgcagggacggtgcccagtttgggggatcaaggctgagccattcttgtgctggagtgtgcaccgtgggagcaatgtggcccaggtggactcaggagggaacctggccccaaggctgcggccacttcagaggcactggctgagacggccctgaaatgtgaagctccgcggacactcccacacgtgtccccgtctgcgaggagtcccggggtgtggggcatggggtggggctgcacctcccagaggcccctcccacccttcccttcccctctcccttctgcctttccaggactagaaccgggaacctggagccctccgggaacgccggccctggggcagcagagccaggatggagccctcctgagctggcatctcagacagcacccgggcccgccacccctcaccaagagagatggccatggggctcagggcctctttaccatgtgcagtgaccatttctcagagcaggacttgcaaagaggctttaatttcaaaagtgaaggaaggaggccaggcgccgtggctcacgcctgtaatcccagcactttgggaggctgaggtgggcagatcacctaggtcaagagtttcaaaccagacgggccaacatggtgaaaccccatctctactaaaaatacaaaaaaaaaaaaaaa

SEQ ID NO: 215 - DNA, 3548 bp, Homo sapiens
cccacgggtgttagtggcgggggcggcagagtccgggtgggttgtcgcgacggagccgggcctcttcgccgtcttgagacggggctggcgagaagggcccctcacggagttgccatgggcgtctaaccgcggcagccaggcccctctctacgtgagaccccggcccccctcccctttctgcagcccgcccgccacctgcgcgccgcgtggcctccgccggcgcctgcccgccccgcgcctccgtctcccacggagcaggccgggctctcgccatgggtcactgtcgcctctgccacgggaagttttcctcgagaagcctgcgcagcatctccgagagggcgcctggagcgagcatggagaggccatccgcagaggagcgcgtgctcgtacgggacttccagcgcctgcttggtgtggctgtccgccaggaccccaccttgtctccgtttgtctgcaagagctgccacgcccagttctaccagtgccacagccttctcaagtccttcctgcagagggtcaacgcctccccggctggtcgccggaagccttgtgcaaaggtcggtgcccagcccccaacaggggcagaggagggagcgtgtctggtggatctgatcacatccagcccccagtgcctgcacggcttggtggggtgggtgcatggacatgcggccagctgcggggccctgccccaccttcagaggacactgtcctccgagtactgcggcgtcatccaggtcgtgtggggctgcgaccagggccacgactacaccatggataccagctccagctgcaaggccttcttgctggacagtgcgctggcagtcaagtggccatgggacaaagagacggcgccacggctgccccagcaccgagggtggaaccctggggatgcccctcagacctcccagggtagagggacagggaccccagttggggctgagaccaagaccctgcccagcacggatgtggcccagcctccttcggacagcgacgcggtggggcccaggtcgggcttcccacctcagccaagcctgcccctttgcagggccccagggcagttgggtgagaagcagcttccatcttcaacctcggatgatcgggtaaaagacgagttcagtgacctttctgagggagacgtcttgagtgaagatgaaaatgacaagaagcaaaatgcccagtcttcggacgagtcctttgagccttacccagaaaggaaagtctctggtaagaagagtgaaagcaaagaagccaagaagtctgaagaaccaagaattcggaagaagccgggacccaagcccggatggaagaagaagcttcgttgtgagagggaggagcttcccaccatctacaagtgtccttaccagggctgcacggccgtgtaccgaggcgctgacggcatgaagaagcacatcaaggagcaccacgaggaggtccgggagcggccctgcccccaccctggctgcaacaaggttttcatgatcgaccgctacctgcagcgccacgtgaagctcatccacacagaggtgcggaactatatctgtgacgaatgtggacaaaccttcaagcagcggaagcaccttctcgtccaccaaatgcgacattcgggagccaagcctttgcagtgtgaggtctgtgggttccagtgcaggcagcgggcatccctcaagtaccacatgaccaaacacaaggctgagactgagctggactttgcctgtgaccagtgtggccggcggtttgagaaggcccacaacctcaatgtacacatgtccatggtgcacccgctgacacagacccaggacaaggccctgcccctggaggcggaaccaccacctgggccaccgagcccctctgtgaccacagagggccaggcggtgaagcccgaacccacctgaggacggcagtgaggatgagcacctctagcagcctggactccgcagtggctgtgtcagcctcacccttcgtgtgcacccgcatgggagggtcggagggtgctgcccgcccttggtgctggaggcgggcttggtgtccggctcaagtagccttcctctgctctgggaccagtggtttattttcccgcaaacgctgagtgactcggggccggacagttcataaataattgattcctttccccactaaagcagtcgaggagatttgtaatccactttttagtgcaacaagagctccatgttatgcttgtaataaattatttacacgggagctgggctggtgtgcagtggcaggtcccgtcagaagagatgaggctcctgggacaggtcagcgtcaggggcagcctgctgtctgctctggagggcggcgctcacctctgggtcgcagtccccacgatcagccagcagctgtgagagaggagcaggtcctcagcccatgccgcccactaggcctcagaccacaggggaggggctctggcagaaatagtcgagttgtattgccagccaggcaggcacatggcccaggcagctgtcaattctcatgtcccccacatggcccaaggtgggcatcttgacgttacctctgccacgtgtgagaagctctttttcgggcaccgaggtattaactgcagcagaaaaagacgagcttttgttatcagttccacggggttgccctagagagaaaacaggcaaactcacaggttagaagacatacagaaacagggctggtgtgtcccccatagtctgcatgctgtgccggaacattctttggcagaaggagcctccggctggggggagctcccctggaggtgggactggcccttgcacctgcctgacccttgagctccaggctcctgccagctggaggtgaaactgtgcttgtatccccagccacgaagagctggaccagcttcaagtacatgtccacagcaacatgcaggaaggcctcttccctgatggccgcgtcttcatggaagtaggagagaagactagaggtaaagacatagtgacaaatggctacagactgctggaaaggtagcaggtgatgccaagggatactgctcatctgtggagcagaggcacagacaacccttcccatctggcgggacccagaggtgctgagatgggggtctgggaaacactgcccagccctgaccagccctgtgggtggaggtacctgtaaaaagcgaaaggcagcagcctggtgtgctgatccggggccacacggaggaggagccgccccagcctgaggtctgcaacaccaagaagtggctcaggcaactctggacatctctgcctattatcagtgctggggacacccctgggggtcgggacgtgtaccctgggaggcctggctgtggggatagtgtggggcgaacagcctgagctgaggatacccaggtacctgtcagcagctgggagaggatgggggggtcgacctcttgcaggagggtgggtgtggtgcagagagaggcagtccccatgataggcccattggtcctggggttgaccagtgagccagtaaattatcttattgctttaaacaagtttgtgcttaatctgtcccaactaaaatggagcttataaacttacttagcaagg

SEQ ID NO: 216 - DNA, 2654 bp, Homo sapiens
ttcccggtggctggctgctctgattggctgaacaaatagtccgagggtggtgggcatccgccctcccgacaaggcagaccaggccccctgcaggtcccctatccgcaccccggcccctgagagctggcactgcgactcgagacagcggcccggcaggacagctccagaatgaaaatgcggttcttggggttggtggtctgtttggttctctggaccctgcattctgaggggtctggagggaaactgacagctgtggatcctgaaacaaacatgaatgtgagtgaaattatctcttactggggattccctagtgaggaatacctagttgagacagaagatggatatattctgtgccttaaccgaattcctcatgggaggaagaaccattctgacaaaggtcccaaaccagttgtcttcctgcaacatggcttgctggcagattctagtaactgggtcacaaaccttgccaacagcagcctgggcttcattcttgctgatgctggttttgacgtgtggatgggcaacagcagaggaaatacctggtctcggaaacataagacactctcagtttctcaggatgaattctgggctttcagttatgatgagatggcaaaatatgacctaccagcttccattaacttcattctgaataaaactggccaagaacaagtgtattatgtgggtcattctcaaggcaccactataggttttatagcattttcacagatccctgagctggctaaaaggattaaaatgttttttgccctgggtcctgtggcttccgtcgccttctgtactagccctatggccaaattaggacgattaccagatcatctcattaaggacttatttggagacaaagaatttcttccccagagtgcgtttttgaagtggctgggtacccacgtttgcactcatgtcatactgaaggagctctgtggaaatctctgttttcttctgtgtggatttaatgagagaaatttaaatatgtctagagtggatgtatatacaacacattctcctgctggaacttctgtgcaaaacatgttacactggagccaggctgttaaattccaaaagtttcaagcctttgactggggaagcagtgccaagaattattttcattacaaccagagttatcctcccacatacaatgtgaaggacatgcttgtgccgactgcagtctggagcgggggtcacgactggcttgcagatgtctacgacgtcaatatcttactgactcagatcaccaacttggtgttccatgagagcattccggaatgggagcatcttgacttcatttggggcctggatgccccttggaggctttataataaaattattaatctaatgaggaaatatcagtgaaagctggacttgagctgtgtaccaccaagtcaatgattatgtcatgtgaaaatgtgtttgcttcatttctgtaaaacacttgtttttctttcccaggtcttttgtttttttatatccaagaaaatgataactttgaagatgcccagttcactctagtttcaattagaaacatactagctattttttctttaattagggctggaataggaagccagtgtctcaaccatagtattgtctctttaagtcttttaaatatcactgatgtgtaaaaaggtcattatatccattctgtttttaaaatttaaaatatattgactttttgcccttcataggacaaagtaatatatgtgttggaattttaaaattgtgttgtcattggtaaatctgtcactgacttaagcgaggtataaaagtacgcagttttcatgtccttgccttaaagagctctctagtctaacggtcttgtagttagagatctaaatgacattttatcatgttttcctgcagcaggtgcatagtcaaatccagaaatatcacagctgtgccagtaataaggatgctaacaattaattttatcaaacctaactgtgacagctgtgatttgacacgttttaattgctcaggttaaatgaaatagttttccggcgtcttcaaaaacaaattgcactgataaaacaaaaacaaaagtatgttttaaatgctttgaagactgatacactcaaccatctatattcatgagctctcaatttcatggcaggccatagttctacttatctgagaagcaaatccctgtggagactataccactattttttctgagattaatgtactcttggagcccgctactgtcgttattgatcacatctgtgtgaagccaaagccccgtggttgcccatgagaagtgtccttgttcattttcacccaaatgaagtgtgaacgtgatgttttcggatgcaaactcagctcagggattcattttgtgtcttagttttatatgcatccttatttttaatacacctgcttcacgtccctatgttgggaagtccatatttgtctgcttttcttgcagcatcatttccttacaatactgtccggtggacaaaatgacaattgatatgtttttctgatataattactttagctgcactaacagtacaatgcttgttaatggttaatataggcagggcgaatactactttgtaacttttaaagtcttaaacttttcaataaaattgagtgagacttataggcccaaaaaaaaaaaaaaaaaaaaaaaaaaaaaaaaa

SEQ ID NO: 217 - DNA, 2866 bp, Homo sapiens
ctcatgaggagccactcagattcctgtcacttctcaaagcatctccgtcgtgaacatggccctgccaccattcttcggccagggtcgcccaggcccaccgcccccgcagccgccgcctcctgctcctttcggctgtccgccaccgccgctgccctccccggctttcccgccgcctctcccccagcggcccggcccttttccgggggcctccgcccccttccttcagcctccgctggctctgcagccccgagcctccgcggaggcctcccgcggcggaggcggcgctggcgccttctacccggtgccaccaccgccgctgcctcctccgccgccccagtgtcggcccttcccggggaccgacgccggcgagcggccgcggccaccgcctcccggcccggggccgccctggagcccgcggtggcctgaggcgccgccgccgccggccgacgtgctcggggatgcggccctccaacgcctgcgcgaccggcagtggctggaggcggtgttcgggaccccgcggcgggcaggctgtccggtgccccagcgcacgcatgccgggcccagccttggcgaagtgcgcgcgcgattgctccgggctctgcgcctggtgcggcggctgcgcggcctgagccaggccctgcgcgaggccgaagccgacggcgcggcctgggtcctgctgtactcccagaccgcgccgctgcgcgcggaactggccgagcggctacagccgttgacccaggctgcctatgtgggcgaggcgcggaggaggctggagagggtccggcgccgccggctgcggcttcgcgagagggcccgggaacgcgaggccgagcgggaggcagaggccgcgcgggcagtggaacgcgagcaggagattgaccgctggagggtgaagtgtgtgcaggaggtggaggagaagaagcgggagcaggaactcaaagcagccgctgatggcgtactatctgaagtgaggaaaaaacaagcagataccaaaagaatggtggacattctacgggctttggagaaattgaggaaactgaggaaagaggctgcagcgaggaaaggggtctgtcctccagcctcagcagatgagacttttacgcatcatcttcagcgactgagaaaactcattaaaaagcgctctgaactgtatgaagctgaagagagagccctcagagttatgctagaaggagaacaagaggaagagaggaaaagagaattagaaaagaaacaaagaaaagaaaaagagaaaattttacttcagaaacgtgaaattgagtccaagttgtttggggatccagatgagttcccacttgctcacctcttggagcctttccgacagtattatctccaagccgagcactccctgccagcgctcatccagatcaggcatgattgggatcagtacctggtgccatccgatcatcccaaaggcaacttcgttccccaaggatgggtccttcccccgctccccagcaacgacatctgggcaactgctgttaagctgcattagtaaagatgctccaggagtgtggtccagccagcgctctttccagctgtaaatattagcgatggtgccatcttttgctgtagactaaactgcaacttctaaattccatgtggcattcccctaccctgaagttatgctttccttctgtgctctgtgctggccagaggtgcctcttgaatcagattaatgtggtttttcaggaaaggacttaggtgaactgaggtttttaccacaggcagtgaatgaccttggttcaccaaatttgcctctgttttgaggggcttggtccagagtgacttgttaatttactctaacttccttgtgtgttgatgggtaagtacactcaaacactgaatacaggtgtgtgatgggtagatttcacagcccttctactaatagtgagtgtgaaggcaagcttgatgcaaaacctcctgacctttcctacctgaagagccctttgacttctaggaagaaaggtcaaaaatgttatcttcagttgtgttaatcccagttttagtgcagcttaggaggctgctagttaggaagatggcagtggctgtaggctgggttgccagaaaagatggtggcctagtcttattattcagatggagaacttagaaaacctgaagagtacccaaattggattgtattttaatggacaatggctgtattttttccatgttagaaggatcctaatgaaagcacctgttatttttaagtttctaagggtctagttgttcagaatccccaaggatatttccctaacctcactcagtcacattgtaggagccagtgtagctatggaattatcttaggaactcaagcttctaaaactatccatgtagtcaaatctaggggaaaaagcaaataaaaatagtaaaatttggccgggcacagtggctcacgcctgtaatcccaacactttgggaggccgaggcgggccgatcacgaggtcaggagatcaaggccatcctggctaacacggtgaaaccctgtctctactaaaaatacaaaaaaatattagctgggcgtaggtggtgcacacctgtagtcccagctactggggaggctgaggcaggagaatggtgtaaaacccaggaggcagagcttgcagtgagccgagatcgcgccacggcactccagcctgggagacagagcaagactccgtctcaaaaaaaaaaaaagtaaaatttattttttatattcattaataaatgctgttgtgcttggagatgatcactcatataacatgtcatttttttggttctgttttggtttggtttttgccaattattttgttatatttccaaaaaactaaataaaaatcatttttattttttaaaaaaaaaaaaaaaa

SEQ ID NO: 218 - DNA, 2245 bp, Homo sapiens
gtacccccatcctttctctcgcccctcctacccgcagctcctggcgctcggcggggctaactgcagcgcggagatctcggccgccaagctccgcctcccgccccgggctgtgccccggggctcgcctgaggccgaccacccgcaccccacctctagcggctttgctcgaggcccaccttcttcccacccccggcaaactccagtaggctcgccctcgctgactccccgcccccgcgtcaactgcaaggggcccgcccatagccagttccggggcggttgctcacatcgaccggaactccccgccccctcccgcggcccctggggccgtaggaggccgcagcgaggaggtagagggggcgggggtcgcactagggtgtccctagagaacgaggactctgaaggcgggacatttgggcgacccccgggcggggccagccattaaacagtcccacttctgtgccagacactgaactgggctcttgacgggcatcatctcttaatcctcagaacatcccagggagctccacaggatccccatatcctgggccatgagtgagttgaaagactgccccttgcagttccacgacttcaagtctgtggatcacctgaaggtctgtccccgctacacggcagtgctggcacgctctgaggatgatggcatcggcatcgaggagctggacaccctgcagctggagctggagaccctgctgtcttctgccagccggcgcctgcgtgtgcttgaggccgaaacccagatcctcaccgactggcaggataagaaaggtgacagacgattcctgaagctgggtcgagaccatgaacttggagctccccccaaacatgggaagcccaagaagcagaaactggaagggaaggcaggacatgggccgggccctggcccaggacggcccaaatccaaaaaccttcagcccaagatccaggaatatgaattcactgatgaccctatcgacgtgccacggatccccaaaaatgatgcccccaacaggttctgggcttcagtggagccctactgtgctgacatcaccagcgaggaggtccgcacacttgaggagttactgaagcccccagaagatgaggctgagcattacaagatcccacccctggggaagcactactcccagcgctgggcccaggaggacctgctggaggagcagaaggatggggcccgggcagcggctgtggctgacaagaagaaaggcctcatggggccactgaccgaactggacactaaagatgtggatgccctgctgaagaagtctgaggcccagcatgaacagccggaagatggatgcccctttggtgccctgacgcagcgcctcctgcaggccctggtggaggaaaatattatttcccctatggaggattctcctattcctgacatgtctgggaaagaatcaggggctgacggggcaagcacctcccctcgcaatcagaacaagcccttcagtgtgccgcatactaagtccctggagagccgcatcaaggaggagctaattgcccagggccttttggagtctgaggaccgccccgcagaggactccgaggatgaggtccttgctgagcttcgcaaacggcaggctgagctgaaggcacttagtgcccacaaccgcaccaagaagcacgacctgctgaggctggcaaaggaggaggtgagccggcaggagctgaggcagcgggtgcgcatggctgacaacgaggtcatggacgcctttcgcaagatcatggctgcccggcagaagaagcggactcccaccaagaaagaaaaggaccaggcctggaagactctgaaggagcgtgagagcatcctgaagctgctggatgggtagccctcacccctgcctcaggctgattatctggcctaggggaggggaagggaggcccacttccttctttgggcacaggaaacattggcctgtggctgtccctcaaatggcggcagtctctagagggccgtggcccttcccctgaggtcttttggcctagctctgtacaaccaggacacaggaagccctgctgggctagcctgaggcctagtctctgcttggtccccgagatggggttggaggggacttcgtttctgggtcttcctcttcccctctttaccatcccccactccctaatcccctacccctgtctccccttcaaggacttctcccttgtggttttgtaaagtgcaaacttaagaataaagtgactgctgtggtttttcaaaaaaaaaaaaaaa

SEQ ID NO: 219 - DNA, 2571 bp, Homo sapiens
gtacccccatcctttctctcgcccctcctacccgcagctcctggcgctcggcggggctaactgcagcgcggagatctcggccgccaagctccgcctcccgccccgggctgtgccccggggctcgcctgaggccgaccacccgcaccccacctctagcggctttgctcgaggcccaccttcttcccacccccggcaaactccagtaggctcgccctcgctgactccccgcccccgcgtcaactgcaaggggcccgcccatagccagttccggggcggttgctcacatcgaccggaactccccgccccctcccgcggcccctggggccgtaggaggccgcagcgaggaggtagagggggcgggggtcgcactagggtgtccctagagaacgaggactctgaaggcgggacatttgggcgacccccgggcggggccagccattaaacagtcccacttctgtgccagacactgaactgggctcttgacgggcatcatctcttaatcctcagaacatcccagggagctccacaggatccccatatcctgggccatgagtgagttgaaagactgccccttgcagttccacgacttcaagtctgtggatcacctgaaggtctgtccccgctacacggcagtgctggcacgctctgaggatgatggcatcggcatcgaggagctggacaccctgcagctggagctggagaccctgctgtcttctgccagccggcgcctgcgtgtgcttgaggccgaaacccagatcctcaccgactggcaggataagaaaggtgacagacgattcctgaagctgggtcgagaccatgaacttggagctccccccaaacatgggaagcccaagaagcagaaactggaagggaaggcaggacatgggccgggccctggcccaggacggcccaaatccaaaaaccttcagcccaagatccaggaatatgaattcactgatgaccctatcgacgtgccacggatccccaaaaatgatgcccccaacaggttctgggcttcagtggagccctactgtgctgacatcaccagcgaggaggtccgcacacttgaggagttactgaagcccccagaagatgaggctgagcattacaagatcccacccctggggaagcactactcccagcgctgggcccaggaggacctgctggaggagcagaaggatggggcccgggcagcggctgtggctgacaagaagaaaggcctcatggggccactgaccgaactggacactaaagatgtggatgccctgctgaagaagtctgaggcccagcatgaacagccggaagatggatgcccctttggtgccctgacgcagcgcctcctgcaggccctggtggaggaaaatattatttcccctatggaggattctcctattcctgacatgtctgggaaagaatcaggggctgacggggcaagcacctcccctcgcaatcagaacaagcccttcagtgtgccgcatactaagtccctggagagccgcatcaaggaggagctaattgcccagggccttttggagtctgaggaccgccccgcagaggactccgaggatgaggtccttgctgagcttcgcaaacggcaggctgagctgaaggcacttagtgcccacaaccgcaccaagaagcacgacctgctgaggtgagcgttagcaggatgcacagtcccgggggtggccttggaggctgtggccacggctagtcacctttcaggggttttacaacaggctttccaatcctggctggcctctaaatcacctggagagcctcgaaaaaaacagcagtggccagtccaccgggtatgtcccaaacaaattctgattccacagagtggggctcaggcatctgtgactgaccgattgatttgatttgtttttgttttgtttttttttgagagggagtctcgcactgtcacccaggctggagtgcagtggcatgatctcggctcactgcaagctccgcctcccaggttcatgccattctcctgcctcagcctcctgagtagctgatactacaggcacccaccaccacgcccagctaatttttttgtatttttagtagagacggggtttcaccgtgttagccaggatggtctcgatctcctgacctcgtgatccacccgcctcggcctcccaaagtgccgggattacaggcgtgagccactgcgcctggcctagtttggttttttaattatggtaaaggcataatataaaatgtatctccatgggaggctgaggcaggagaatcagttgaacctgggaggcggaggttgcagtgagctgagactgcaccattgcattccagcctgggcaacaagagtgaaactgcatctcaaaaaaaaaaagaaaaaaaatttacgcttcttaaccatttttaagtgtacagtttagtagtgttacccatattcacattgttgtgtgatttattttttgtcttttcatgcttcttttctttttatccccaaagttttgttattaaaaatttgatacacacagaaaatctgaaagaatcatacaataaacatcagtatattctccacctaaaaaaaaaaaaaaaaaa

SEQ ID NO: 220 - DNA, 2165 bp, Homo sapiens
gtacccccatcctttctctcgcccctcctacccgcagctcctggcgctcggcggggctaactgcagcgcggagatctcggccgccaagctccgcctcccgccccgggctgtgccccggggctcgcctgaggccgaccacccgcaccccacctctagcggctttgctcgaggcccaccttcttcccacccccggcaaactccagtaggctcgccctcgctgactccccgcccccgcgtcaactgcaaggggcccgcccatagccagttccggggcggttgctcacatcgaccggaactccccgccccctcccgcggcccctggggccgtaggaggccgcagcgaggaggtagagggggcgggggtcgcactagggtgtccctagagaacgaggactctgaaggcgggacatttgggcgacccccgggcggggccagccattaaacagtcccacttctgtgccagacactgaactgggctcttgacgggcatcatctcttaatcctcagaacatcccagggagctccacaggatccccatatcctgggccatgagtgagttgaaagactgccccttgcagttccacgacttcaagtctgtggatcacctgaaggtctgtccccgctacacggcagtgctggcacgctctgaggatgatggcatcggcatcgaggagctggacaccctgcagctggagctggagaccctgctgtcttctgccagccggcgcctgcgtgtgcttgaggccgaaacccagatcctcaccgactggcaggataagaaaggtgacagacgattcctgaagctgggtcgagaccatgaacttggagctccccccaaacatgggaagcccaagaagcagaaactggaagggaaggcaggacatgggccgggccctggcccaggacggcccaaatccaaaaaccttcagcccaagatccaggaatatgaattcactgatgaccctatcgacgtgccacggatccccaaaaatgatgcccccaacaggttctgggcttcagtggagccctactgtgctgacatcaccagcgaggaggtccgcacacttgaggagttactgaagcccccagaagatgaggctgagcattacaagatcccacccctggggaagcactactcccagcgctgggcccaggaggacctgctggaggagcagaaggatggggcccgggcagcggctgtggctgacaagaagaaaggcctcatggggccactgaccgaactggacactaaagatgtggatgccctgctgaagaagtctgaggcccagcatgaacagccggaagatggatgcccctttggtgccctgacgcagcgcctcctgcaggccctggtggaggaaaatattatttcccctatggaggattctcctattcctgacatgtctgggaaagaatcaggggctgacggggcaagcacctcccctcgcaatcagaacaagcccttcagtgtgccgcatactaagtccctggagagccgcatcaaggaggagctaattgcccagggccttttggagtctgaggaccgccccgcagaggactccgaggatgaggtccttgctgagcttcgcaaacggcaggctgagctgaaggcacttagtgcccacaaccgcaccaagaagcacgacctgctgaggtgagcgttagcaggatgcacagtcccgggggtggccttggaggctgtggccacggctagtcacctttcaggggttttacaacaggctttccaatcctggctggcctctaaatcacctggagagcctcgaaaaaaacagcagtggccagtccaccgggtatgtcccaaacaaattctgattccacagagtggggctcaggcatctgtgactgaccgattgatttgatttgtttttgttttgtttttttttgagagggagtctcgcctgggcaacaagagtgaaactgcatctcaaaaaaaaaaagaaaaaaaatttacgcttcttaaccatttttaagtgtacagtttagtagtgttacccatattcacattgttgtgtgatttattttttgtcttttcatgcttcttttctttttatccccaaagttttgttattaaaaatttgatacacacagaaaatctgaaagaatcatacaataaacatcagtatattctccacctaaaaaaaaaa

SEQ ID NO: 221 - DNA, 1634 bp, Homo sapiens
ccctgctaacaaagggagccacttccttcctctctgcacataccccatgtctcaccacgatgatggagctacagtgggacttggaatccagatgtgtgaaggatggagggttgaagccgcactcagcttcctgccccaccagaggaagtggggagagacggcaggtgcagtgatggctggcggagtcatggacaaggagtacgtgggttttgctgccctccccaaccagctgcaccgcaagtctgtcaagaaggggtttgacttcacgctaatggtggcaggggagtcaggcctagggaaatccaccctcatcaacagcctcttcctcaccaacctctatgaggatcgccaggtgccagaggccagtgctcgcttgacacagaccctggccattgagcgccggggcgtagagattgaggaagggggtgtgaaagtgaagctgacccttgtggacacacctggctttggggactcagtggactgctctgactgctggcttccggtggtgaaattcatcgaggagcaatttgagcagtaccttagggatgagagtggcctgaaccggaagaacatccaggactcccgagtccactgctgcctctacttcatctcacccttcggccgggggctccggcccctagatgtggccttcctccgggcagtacacgagaaagtcaacatcatcccagtcattggcaaagcggatgctctgatgccccaggaaacccaggccctcaagcagaagatccgggatcagttgaaggaagaggagatccacatctaccagttccccgaatgtgactctgatgaagatgaagacttcaagaggcaggatgcagagatgaaggaaagcatcccttttgcagtcgtgggatcatgcgaggtggtgagggatggcgggaaccggccggtgaggggacgccgctactcctgggggaccgtggaggtggagaacccacatcactgcgatttcctgaacctgcgacggatgctggtgcagacacacctgcaggacctgaaagaggtgacgcacgatctgctctacgagggctaccgggcccgctgcctacagagcctggcccggcctggggctcgcgatcgagccagccgcagtaagctttcccgccagagcgccacagagatcccgctgcccatgctgcctctggcggacaccgagaagctgatccgcgagaaagacgaagagctgcgccgcatgcaagagatgctggagaagatgcaggcccaaatgcagcagagccaggcccagggcgagcagtcagacgccctctgaggccacgccccgcccggccttacctcggctccgccttcagtcggcctcttgtccaatccccgcgccccacactgcccagcgccccccgggacctccgcgggtgccgccctcgcgcgggctagggggaggttctcccagcctgagtccgtagccccgccccggcgctggtcccgcccacccagacaccgcccacttcccggcccggggcctgcacaatctccgaccgcatcactgtcttccggagtcccccttcttctcccagactctgtcttcaataaaaactgagcttcccgcggccaaaaaaaaaaaaaaaaaaaaaaaaaaaaaaaaaaaaaaaaaaaaa

SEQ ID NO: 222 - DNA, 2642 bp, Homo sapiens
actttcaaaatggcggagtgtggagcgagcggcagcgggagcagcggggacagtctggacaagagcatcacgctgccccccgacgagatcttccgcaacctggagaacgccaagcgcttcgccatcgacataggcgggtcgttaaccaagctggcctactattcaacggtacagcacaaagtcgccaaggtgcggtctttcgaccactccggaaaggacacagaacgtgaacatgagccgccctatgagatttcagttcaagaagagatcactgctcgactgcacttcattaagtttgagaatacctacatcgaagcctgcctggacttcatcaaagaccatctcgtcaacacagagaccaaggtcatccaggcgaccgggggcggggcctacaagttcaaggacctcatcgaagagaagctgcggctgaaagtcgacaaggaggacgtgatgacgtgcctgattaaggggtgcaacttcgtgctcaagaacatcccccatgaggccttcgtgtaccagaaggattccgaccctgagttccggttccagaccaaccacccccacattttcccctatcttcttgtcaatatcggctctggagtctccatcgtgaaggtggagacggaggacaggttcgagtgggtcggcggcagctccattggaggcggcaccttctgggggcttggcgctctgctcaccaaaacgaagaagtttgacgagctcctgcacctggcctcgaggggccagcacagcaatgtggacatgctggtgcgggacgtctacggcggcgcccaccagactctcgggctgagcgggaacctcatcgccagcagcttcgggaagtcggccaccgccgaccaagagttctccaaagaagacatggcgaagagcctgctgcacatgatcagcaacgacattgggcagctggcctgcctccacgcacggctgcacagcctggaccgcgtgtactttggaggcttctttatccggggccaccccgtgaccatgcgcaccatcacctatagcatcaacttcttctccaagggggaagtgcaggcgctgtttctgaggcacgaaggctacctgggagccatcggagcgttcctgaaaggagctgagcaggacaatcctaaccagtacagctggggagagaactatgcaggcagctccgggctgatgagtgcatcacccgagctcggcccggcgcagcgggcgcggagtggcacttttgacttgctggaaatggaccggctggagaggccactggttgacctgccgctcctcctggacccgccctcctacgtgcccgacacggtggacctcaccgatgacgctctggcccgaaaatactggctcacctgctttgaggaggccctggacggggtagtgaagcgcgcagtggcgagccagccagactctgtggatgcagccgagagggcggagaagttccggcagaagtactggaacaagcttcagaccctgaggcagcagcccttcgcctatgggaccctgaccgtgcgcagcctgctggacaccagggagcactgtctgaacgagttcaacttcccggatccctactccaaagtgaagcagcgggagaatggcgtggcgctgaggtgcttccccggggtcgtgcgctccctggacgcgctgggctgggaggaacggcagctggcgctggtgaaaggcctcctggcggggaatgtcttcgactggggggccaaagccgtgtctgctgtccttgaatccgacccctactttgggtttgaagaagcaaagaggaagttacaagaaagaccctggctcgtggattcctacagcgagtggcttcagagattaaaggggccccctcataaatgtgccttaattttcgcagataacagtggaatagacatcattttgggagtcttcccctttgtcagggagctactccttagagggacagaggtcatcctggcgtgcaactcaggccccgccctgaacgacgtgacccacagcgagtccctcatcgtggcagagcgtattgcgggcatggaccctgtcgtgcactctgcgctccaggaagagaggctgctgctggtgcagacgggctccagctccccgtgcctcgacctcagccgcctggataaggggctggccgcactggtgcgggagcgtggcgcggatctggtggtcatcgagggcatgggccgtgctgtccacacaaactaccacgcagccctgcgctgcgagagcctcaagctggccgtcatcaagaacgcgtggctggccgagcggctgggcggccggctcttcagcgtcatcttcaagtacgaggtcccagccgagtgaggcgctgcagctgccggactcttctgcttgtcacttgtcaggaatgtgtttttaccaccacagggaaactgcgttcaaatcaacgtatttatatggtactgctgtgacgcggcacatacaccccagccgcacagatgcgtgtgacccagaggcgagacgcagctttgtcctgggagacgttcatattggaatctatttaactgctaaagaaccttttatatatatatatatataaatagagagatctatacaggtatgtctgacgggacgcagcaccgtgggcacgcaccaaatagagtttttaaaagagg

SEQ ID NO: 223 - DNA, 1223 bp, Homo sapiens
tgcgacagagccgtaaaggcgcgcgggaacatggggctgtacgctgcggtggcaggcgtgctggccggcgtggagagccgccagggctctatcaaggggctggtgtactccagcaacttccagcctcgatgacttacgagccctcaaggggaagcattttctcctggaccccttgatgccggagctgctggtgtttcccgcccagacagatctgcatgaacacccactgtaccgggccggacacctcattctgcaggacagggccagctgtctcccagccatgctgctggacccccgccaggctcccatgtcatggatgcctgtgccaccccaggcaataaagaccagtcacttggctgctcttctgaagaaccaagggaagatctttgcctttgacctggatgccaggcggctggcatccatggccacgctgctggcctgggctggcgtctcctgctgtgagctggctgaggaggacttcctggcggtctcccccttagatccgcgctatcgtgaggtccactatgtcctgctggatccttcctgcagtggctcgggtatgccgagcagacagctggaggagcccggggcagggacacctagcccggtgcgtctgcatgccctggcagggttccagcagcgagccctgtgccacgcgctcactttcccttccctgcagcggctcgtctactccatgtgctccctctgccaggaggagaatgaagacatggtacaagatgcgctgcagcagaacccgggcgccttcaggctagctcccgccctgcctgcccggccccaccgaggcctgagcacgttcccgggtgccgagcactgcctccgggcttcccccaagaccacgcttagcggtggcttcttcgttgctgtaattgaacgggtcgagatgccgacctcagcctcacaggccaaagcatcagcaccagaacgcacacccagcccagccccaaagagaaagaagagagcaaaaagctgcagccggtgcttgcacaccgccttgcacatagcagaggctccgggctcactccttcctggtgggaaaggaagatgcctgtcctctccgtggaagaccctgggccctcaccgcaggcagcagtttgcgttttgaaaggttattgggtcccttcctcgggctgtgttcttgctggtgagcaaaagtgttgcctgcagaaataaaatgcagaacgtactctacgataaaaaaaaaa

SEQ ID NO: 224 - DNA, 1760 bp, Homo sapiens
tgcgacagagccgtaaaggcgcgcgggaacatggggctgtacgctgcggtggcaggcgtgctggccggcgtggagagccgccagggctctatcaaggggctggtgtactccagcaacttccagaacgtgaagcagctgtacgcgctggtgtgcgaaacgcagcgctactccgccgtgctggatgccgtgatctccagcgccggcctcctcagtgcgaagaagctgcagccgcacctggccaagggtgctagtgtatgagttgttgggaaagggctttcgagggggtgggggccaatggaaggctctgttgggacggcaccaggcgaggtgttgagttggctcggctcaaggttcttcggggtgtgagctggcatgaggacctgttggaagtgggatccaggcctggtccagcctcccagctgcctcgatttgtgcgtgtgaacactctcaagacctgctccgtttatgtagttatttcaagagacaaggtttctcctatcagggtcgggcttccaggctggatggagtgccctggcgcgatcttggctcaccgcaacctctgcctcctgggttcaagcgattctcctgcttcagccttctgagcagctgggattatgaaggggtggcctgcccctccacatctgtgggatatctcatcagcctcgatgacttacgagccctcaaggggaagcattttctcctggaccccttgatgccggagctgctggtgtttcccgcccagacagatctgcatgaacacccactgtaccgggccggacacctcattctgcaggacagggccagctgtctcccagccatgctgctggacccccgccaggctcccatgtcatggatgcctgtgccaccccaggcaataaagaccagtcacttggctgctcttctgaagaaccaagggaagatctttgcctttgacctggatgccaggcggctggcatccatggccacgctgctggcctgggctggcgtctcctgctgtgagctggctgaggaggacttcctggcggtctcccccttagatccgcgctatcgtgaggtccactatgtcctgctggatccttcctgcagtggctcgggtatgccgagcagacagctggaggagcccggggcagggacacctagcccggtgcgtctgcatgccctggcagggttccagcagcgagccctgtgccacgcgctcactttcccttccctgcagcggctcgtctactccatgtgctccctctgccaggaggagaatgaagacatggtacaagatgcgctgcagcagaacccgggcgccttcaggctagctcccgccctgcctgcccggccccaccgaggcctgagcacgttcccgggtgccgagcactgcctccgggcttcccccaagaccacgcttagcggtggcttcttcgttgctgtaattgaacgggtcgagatgccgacctcagcctcacaggccaaagcatcagcaccagaacgcacacccagcccagccccaaagagaaagaagagagcaaaaagctgcagccggtgcttgcacaccgccttgcacatagcagaggctccgggctcactccttcctggtgggaaaggaagatgcctgtcctctccgtggaagaccctgggccctcaccgcaggcagcagtttgcgttttgaaaggttattgggtcccttcctcgggctgtgttcttgctggtgagcaaaagtgttgcctgcagaaataaaatgcagaacgtactctacgataaaaaaaaaa

SEQ ID NO: 225 - DNA, 1688 bp, Homo sapiens
tgcgacagagccgtaaaggcgcgcgggaacatggggctgtacgctgcggtggcaggcgtgctggccggcgtggagagccgccagggctctatcaaggggctggtgtactccagcaacttccagaacgtgaagcagctgtacgcgctggtgtgcgaaacgcagcgctactccgccgtgctggatgccgtgatctccagcgccggcctcctcagtgcgaagaagctgcagccgcacctggccaagggtgctagtgtatgagttgttgggaaagggctttcgagggggtgggggccaatggaaggctctgttgggacggcaccaggcgaggtgttgagttggctcggctcaaggttcttcggggtgtgagctggcatgaggacctgttggaagtgggatccaggcctggtccagcctcccagctgcctcgatttgtgcgtgtgaacactctcaagacctgctccgtttatgtagttatttcaagagacaaggtttctcctatcagggtcgggcttccaggctggatggagtgccctggcgcgatcttggctcaccgcaacctctgcctcctgggttcaagcgattctcctgcttcagccttctgagcagctgggattatgaaggggtggcctgcccctccacatctgtgggatatctcatcagcctcgatgacttacgagccctcaaggggaagcattttctcctggaccccttgatgccggagctgctggtgtttcccgcccagacagatctgcatgaacacccactgtaccgggccggacacctcattctgcaggacagggccagctgtctcccagccatgctgctggacccccgccaggctcccatgtcatggatgcctgtgccaccccaggcaataaagaccagtcacttggctgctcttctgaagaaccaagggaagatctttgcctttgacctggatgccaggcggctggcatccatggccacgctgctggcctgggctggcgtctcctgctgtgagctggctgaggaggacttcctggcggtctcccccttagatccgcgctatcgtgaggtccactatgtcctgctggatccttcctgcagtggctcgggtatgccgagcagacagctggaggagcccggggcagggacacctagcccgcggctcgtctactccatgtgctccctctgccaggaggagaatgaagacatggtacaagatgcgctgcagcagaacccgggcgccttcaggctagctcccgccctgcctgcccggccccaccgaggcctgagcacgttcccgggtgccgagcactgcctccgggcttcccccaagaccacgcttagcggtggcttcttcgttgctgtaattgaacgggtcgagatgccgacctcagcctcacaggccaaagcatcagcaccagaacgcacacccagcccagccccaaagagaaagaagagagcaaaaagctgcagccggtgcttgcacaccgccttgcacatagcagaggctccgggctcactccttcctggtgggaaaggaagatgcctgtcctctccgtggaagaccctgggccctcaccgcaggcagcagtttgcgttttgaaaggttattgggtcccttcctcgggctgtgttcttgctggtgagcaaaagtgttgcctgcagaaataaaatgcagaacgtactctacgataaaaaaaaaa

SEQ ID NO: 226 - DNA, 1246 bp, Homo sapiens
ctgaagcatacccggcaggggctgtccccaggcccaacaagcaaagggcccagtagcgagggccactggagcccatctccggggggctgggcaggaagtagggtggggtttggggtagggatctggtaccctgggactgctgcaactcaaactaaccaacccactgggagaagatgcctgggggtccaggagtcctccaagctctgcctgccaccatcttcctcctcttcctgctgtctgctgtctacctgggccctgggtgccaggccctgtggatgcacaaggtcccagcatcattgatggtgagcctgggggaagacgcccacttccaatgcccgcacaatagcagcaacaacgccaacgtcacctggtggcgcgtcctccatggcaactacacgtggccccctgagttcttgggcccgggcgaggaccccaatggtacgctgatcatccagaatgtgaacaagagccatgggggcatatacgtgtgccgggtccaggagggcaacgagtcataccagcagtcctgcggcacctacctccgcgtgcgccagccgccccccaggcccttcctggacatgggggagggcaccaagaaccgaatcatcacagccgaggggatcatcctcctgttctgcgcggtggtgcctgggacgctgctgctgttcaggaaacgatggcagaacgagaagctcgggttggatgccggggatgaatatgaagatgaaaacctttatgaaggcctgaacctggacgactgctccatgtatgaggacatctcccggggcctccagggcacctaccaggatgtgggcagcctcaacataggagatgtccagctggagaagccgtgacacccctactcctgccaggctgcccccgcctgctgtgcacccagctccagtgtctcagctcacttccctgggacattctcctttcagcccttctgggggcttccttagtcatattcccccagtggggggtgggagggtaacctcactcttctccaggccaggcctccttggactcccctgggggtgtcccactcttcttccctctaaactgccccacctcctaacctaatccccccgccccgctgcctttcccaggctcccctcaccccagcgggtaatgagcccttaatcgctgcctctaggggagctgattgtagcagcctcgttagtgtcaccccctcctccctgatctgtcagggccacttagtgataataaattcttcccaactgca

SEQ ID NO: 227 - DNA, 1132 bp, Homo sapiens
ctgaagcatacccggcaggggctgtccccaggcccaacaagcaaagggcccagtagcgagggccactggagcccatctccggggggctgggcaggaagtagggtggggtttggggtagggatctggtaccctgggactgctgcaactcaaactaaccaacccactgggagaagatgcctgggggtccaggagtcctccaagctctgcctgccaccatcttcctcctcttcctgctgtctgctgtctacctgggccctgggtgccaggccctgtggatgcacaaggtcccagcatcattgatggtgagcctgggggaagacgcccacttccaatgcccgcacaatagcagcaacaacgccaacgtcacctggtggcgcgtcctccatggcaactacacgtggccccctgagttcttgggcccgggcgaggaccccaatgagccgccccccaggcccttcctggacatgggggagggcaccaagaaccgaatcatcacagccgaggggatcatcctcctgttctgcgcggtggtgcctgggacgctgctgctgttcaggaaacgatggcagaacgagaagctcgggttggatgccggggatgaatatgaagatgaaaacctttatgaaggcctgaacctggacgactgctccatgtatgaggacatctcccggggcctccagggcacctaccaggatgtgggcagcctcaacataggagatgtccagctggagaagccgtgacacccctactcctgccaggctgcccccgcctgctgtgcacccagctccagtgtctcagctcacttccctgggacattctcctttcagcccttctgggggcttccttagtcatattcccccagtggggggtgggagggtaacctcactcttctccaggccaggcctccttggactcccctgggggtgtcccactcttcttccctctaaactgccccacctcctaacctaatccccccgccccgctgcctttcccaggctcccctcaccccagcgggtaatgagcccttaatcgctgcctctaggggagctgattgtagcagcctcgttagtgtcaccccctcctccctgatctgtcagggccacttagtgataataaattcttcccaactgca

SEQ ID NO: 228 - DNA, 1623 bp, Homo sapiens
gctggtttctgggggtcgtggccttgctcccgctgtgcgggaaaagaatccaggcccttccacgcgcgtgtgggtgcgggggccccgaagtgctcgtggttccccgctaggtctccgctggggcaggaaccggaatcatgggtgggaccaccagcacccgccgggtcaccttcgaggcggacgagaatgagaacatcaccgtggtgaagggcatccggctttcggaaaatgtgattgatcgaatgaaggaatcctctccatctggttcgaagtctcagcggtattctggtgcttatggtgcctcagtttctgatgaagaattgaaaagaagagtagctgaggagctggcattggagcaagccaagaaagaatccgaagatcagaaacgactaaagcaagccaaagagctggaccgagagagggctgctgccaatgagcagttaaccagagccatccttcgggagaggatatgtagcgaggaggaacgcgctaaggcaaagcacctggctaggcagctggaagagaaagaccgagtgctaaagaagcaggatgcattctacaaagaacagctggctagactggaggagaggagctcagagttctacagagtcaccactgaacaatatcagaaagctgctgaagaggtggaagcaaagttcaagcgatatgagtctcatccagtctgtgctgatctgcaggccaaaattcttcagtgttaccgtgagaacacccaccagaccctcaaatgctccgctctggccacccagtatatgcactgtgtcaatcatgccaaacagagcatgcttgagaagggaggataaaaactttcagaatgagcaaaacaccatcaacgttaattccagagatggaacattttttttcctagtgagaaaacaacccatttgaagagaagaccactaatgagaagaccactaaagagagacatcaagaatggattcagcagaatcatttcacgttttgaacagcagcagtttgaagggccaaagccttgatcagggatcagtcattaaaggacactcttgagtattagtaaaccctcttatgatgattaaaagagaagggcagccctctccaccttttggtactttctattcaacttgcactgaccataaaatgtttctcttctgaacaagccccatcatttggtgaacctccaccctaacaaagtaggatggggttgggggctaaattaattggagtggggcgaggagagagccagaaaacatagatccgagggcagcagtgctgggtggagagagccagaaaacagatctggaggcagcagtgctggatggaattgtctaggctgtggcatgttggttttgtctttcttttctcctttgattatgtaagagctatttcattataacttattatggtgattatacaggcaagaagacaaaaaggagagaaaatgtacctcttctactggaataatgtttatgattacaagtgagataaggtatttttatcaatatgaaggcaaccttggctgataaaacctctatagtgaatactcacatctttacttcactcactatcaataataaatatattttctgacaaagactggcaaaaaaaaaaaaaaaaaaaaaaaaaaaa

SEQ ID NO: 229 - DNA, 2082 bp, Homo sapiens
gaaagagccgagtgggctcgaggccgacgcgaccatcgtttgtcgacgccgctgccaccgcctgcctgagagaagtcgtcgcggccgaccccgtcgcctccgccggctaccatgtccgcccaggcgcagatgcgggccctgctggaccagctcatgggcacggctcgggacggagacgaaaccagacagagggtcaagtttacagatgaccgtgtctgcaagagtcaccttctggactgctgcccccatgacatcctggctgggacgcgcatggatttaggagaatgtaccaaaatccacgacttggccctccgagcagattatgagattgcaagtaaagaaagagacctgttttttgaattagatgcaatggatcacttggagtcctttattgctgaatgtgatcggagaactgagctcgccaagaagcggctggcagaaacacaggaggaaatcagtgcggaagtttctgcaaaggcagaaaaagtacatgagttaaatgaagaaataggaaaactccttgctaaagccgaacagctaggggctgaaggtaatgtggatgaatcccagaagattcttatggaagtggaaaaagttcgtgcgaagaaaaaagaagctgaggaagaatacagaaattccatgcctgcatccagttttcagcagcaaaagctgcgtgtctgcgaggtctgttcagcctaccttggtctccatgacaatgaccgtcgcctggcagaccacttcggtggcaagttacacttggggttcattcagatccgagagaagcttgatcagttgaggaaaactgtcgctgaaaagcaggagaagagaaatcaggatcgcttgaggaggagagaggagagggaacgggaggagcgtctgagcaggaggtcgggatcaagaaccagagatcgcaggaggtcacgctcccgggatcggcgtcggaggcggtcaagatctacctcccgagagcgacggaaattgtcccggtcccggtcccgagatagacatcggcgccaccgcagccgttcccggagccacagccggggacatcgtcgggcttcccgggaccgaagtgcgaaatacaagtaactactctgactccttcggtagctgcaaccaggagtgagcccttctctgtgttcccagggtctgctgagggccgtgtctggtggggatggggctgggctcaccctcaggagtagggctggggagtcgtgaacgggactcaggtgtgggaagaggcgagagggctgtggaggagctcgcacggcgccaggtgatgggctgcacaggcactgtcccctgcctgcgtcctggggcctgtgcactgttgcgtccatgctcagagtggctgagacttgtgtcctgaccaggccctgcttacctctgttttggtttttgtttttgatatttttttttccattgtgtttttacgtagtgtcatgttctgtgcatatagtgttgtattctcctttgcactgtttatgttacagtgaaggctctccttattaaaaatcttcgcaaaggtcactttttaatggctatctaacactccatatgtggtgggcaagtctggttggcctccggggggtttccaggtataggggatgtagggccttgcctggcctggtctgcgggtccatcgtcagtgcctgagcggccagcagaaggggggcagcagcctccactgagcctctggttcccatttcccaggttctccagagagcgggcatccagagaggagtcctgggagagcgggcggagcgagcgagggcccccggactggaggcttgagagctccaacgggaagatggcttcacggaggtcagaagagaaggaggccggcgagatctgaacccgtctcccgggtgctgtaaatagtctgataaacgttcacacagtctaaaattaccctttatatttgctgaatacaactcatcttttgtagtttaaaatttctattgttttggagctagctgtgagtttctagaagtgtacagagttgctcctgtgttcccgggtcatgttgagtaggaataaataaatctgatgctgcctcctgaggctgcggggggtttctgc

SEQ ID NO: 230 - DNA, 1452 bp, Homo sapiens
gaaagagccgagtgggctcgaggccgacgcgaccatcgtttgtcgacgccgctgccaccgcctgcctgagagaagtcgtcgcggccgaccccgtcgcctccgccggctaccatgtccgcccaggcgcagatgcgggccctgctggaccagctcatgggcacggctcgggacggagacgaaaccagacagagggtcaagtttacagatgaccgtgtctgcaagagtcaccttctggactgctgcccccatgacatcctggctgggacgcgcatggatttaggagaatgtaccaaaatccacgacttggccctccgagcagattatgagattgcaagtaaagaaagagacctgttttttgaattagatgcaatggatcacttggagtcctttattgctgaatgtgatcggagaactgagctcgccaagaagcggctggcagaaacacaggaggaaatcagtgcggaagtttctgcaaaggcagaaaaagtacatgagttaaatgaagaaataggaaaactccttgctaaagccgaacagctaggggctgaaggtaatgtggatgaatcccagaagattcttatggaagtggaaaaagttcgtgcgaagaaaaaagaagctgaggaagaatacagaaattccatgcctgcatccagttttcagcagcaaaagctgcgtgtctgcgaggtctgttcagcctaccttggtctccatgacaatgaccgtcgcctggcagaccacttcggtggcaagttacacttggggttcattcagatccgagagaagcttgatcagttgaggaaaactgtcgctgaaaagcaggagaagagaaatcaggatcgcttgaggaggagagaggagagggaacgggaggagcgtctgagcaggaggtcgggatcaagaaccagagatcgcaggaggtcacgctcccgggatcggcgtcggaggcggtcaagatctacctcccgagagcgacggaaattgtcccggtcccggtcccgagatagacatcggcgccaccgcagccgttcccggagccacagccggggacatcgtcgggcttcccgggaccgaagtgcgaaatacaagttctccagagagcgggcatccagagaggagtcctgggagagcgggcggagcgagcgagggcccccggactggaggcttgagagctccaacgggaagatggcttcacggaggtcagaagagaaggaggccggcgagatctgaacccgtctcccgggtgctgtaaatagtctgataaacgttcacacagtctaaaattaccctttatatttgctgaatacaactcatcttttgtagtttaaaatttctattgttttggagctagctgtgagtttctagaagtgtacagagttgctcctgtgttcccgggtcatgttgagtaggaataaataaatctgatgctgcctcctgaggctgcggggggtttaa

SEQ ID NO: 231 - DNA, 3704 bp, Homo sapiens
cgtagctcccgctttcgcctcttcgtttatgactccgttgggctccggccctcctagagaggcctccatagcgcaggttcgtgggttctcgcggacctttttccgtgtagctttctgcttcttcccggcattcctgtttccgttttctcacagccctctggcttttccaccactgagacactttgcgctcaggacttcagtgacgtcatctttctgcggcgcgcggacacccgccggtggaagaagaaacagctccgccgtccttcgcttcttttgctgggctgctgctccttcggcatcatggcgccgtcgctgtggaaggggctggtgggcatcggtctctttgccctagcccacgccgccttttccgctgcgcagcatcgttcttatatgcgattaacagaaaaagaagatgaatcactgccaatagatatagttcttcagacacttctggcctttgcagttacctgttacggtatagttcatattgcaggagagtttaaagacatggatgccacttcagaactgaaaaataagacatttgatacgttaaggaatcacccatccttttatgtatttaatcatcgtggtcgagtacttttccggccttcggatacagcaaattcttcaaaccaagatgcattgtcctctaacacatcattgaagttacgaaaactcgaatcactgcgtcgttaagatttttacaaattataataataggacaggacacagagctggaatattggagtttggggtataaaacactcctccctgcccccattagtatttatattgatctttcagacctactttagtaaaaaaaaccatggcccttgtttatatactgttaatccaatcattaatgcagtgtaagttatatgtgaaatgagtctttggtatttcatataggaattattttttttttcatttaaaacaaatccacatcttttgtaaaagccactgttttgaacacatttccttgaaaaatgttggtggtttttgtgattatttatttttttagatttcttttcttttgcactacaatttttggaatccttttggaaatactgtgtgactgctgtgttttgcagcatgaattatagtaaaatggtcttcaattcttaacaaatggacttccctgatgagaccaaaatggtgatttaacagtttttcttgtgtcccctaaaaagtggctctgcttcagaagtacttgccagtttttaatttatttgtgacttttcaccctaccctgctcccatataccttctaccatcagctgtcttgtttcatcatttctctgagattctgtgtgcagtgagcaatttttgtgtcagaaattctttgtcagaacaaatatatgtaacaggctcaacttactgtaaagctacttgtgttctcttcatttgtctgtaaaaatttccctaattgattatatagtgtaagaatagttgaagactagttgaagaccttttgtgatttcattatcatgcctatgcagaagaaaaatcattgaggaaaattgtcattagccagtttaactgattcaaactctgtttatttcatactaaactagtgaataagtgaaataaaggaaactcgtcattaatctaaagacagagttcaaaggaattgggccaaatatattctcagtatttggaactaatgtttttaaggtttttaggaaaatcaggtcatttaagaaattgttttgtagtttctggtttatagcagtcttcaagttttccatcttcactgtatgttgctgaaagtgaggatgaggatacagagttgatatttttagaaacagtaattttacttttaaggaaattggctagctctttgagctagagagctgtaggaagctcaacatttctttgtagagaacgttgctttttttggattgtacaggtataaaaacattgcttttgttgaattgtataggtgtaaaaagggaataactgtatgcaggtttgaaaaggaaatgtgctttaggcatgagtcataagatgccattgtacttgtaggcattttattttcctttagaaatggacatcagctcttctcttctgactggtaacacatagccccaaagcatgagattatttttcattgggtttttattgttgtttagttttggtttgttacgccagcccagtctgtctgcggaacactgactctgctctctaatgagaacaaagttagaaatctgccgataacctaaaataatttagaaatgaattaaaaatgtgaaatcgggttaaagtgatgatgataaaatagcatgcaagaaacaagctccttccatcagacttggctactgttttcttctggtacgatttggtttggaagagcctcttgtttccttctctttggggtatgtcttcgtttcttaatatgtttgtaacattattgagatataattcacataccttacaattcacttattttaagggtacaatttagtggtttttagtgtattcacaaagttgtgtaaccgtgaccacagtcaattttagaacatttcgttaccccaaaaagaaaccctgtacccttgagcagtcacctctcattttctcccagtgcccaccccatccccgagcccctggcaaccactaatctatttctctctctgtagatttgcttattctggtcatttcatataaatggaattctacaatattcggtcttttgggactggcttcccaaatatgattttctatatggagtgagaaaattcttctcatcttgagaactcttattgctgtgaaagggagtggttggtaaaatcaatagatttcaggcaagagggccagatacctaacaggtttttctccgtgaatcttatgctgagtagtttttcctcataaccaagcatttatgatatattactacttataatactgtggctagtctctagaatggatgttgaaatctttgcctcctcagtcgggaagagtcctgctaaaaatcaggctaaaaatcaggccaaaaatcaggccaaatgacttggcaaataattgacaaagtggttttcacgtgtgtctatctttgctagcagcttgtatacctcaggccaggtgagctccccaaatttcttttttcatttactccagtgagtttctgctgtctttttcaagtatgtaccataggacttaaaggtgatttggatgcgttgtaacactgctaaatatgctaagtacagaattttatctacagtactgtgagacagtcaattattgcctagggtagttcaaaaatatgatgtgagctagttaagcctttgcttgactgatttcagtgatattcagaagtgtgtaccaatcaaggctctttaaaatacggaacgactcacttaataaccagggaaccagccaaatactgtgcagccgcagaatatgcatatcaatgagttggaggtgattattctctgtaactccctaatgattgttttctaagcattgtggcttctcagtggcttgacagcatcttcctggttgtatgtggcctgtttacatgatgtattgaataatgttgtttgttgtgagcatcaatgcctgtaacaccaaactaaacacgtgtttttgggatatgtttccaatctttaaatgaccttgccctgtccaataaataaatgattgtctcaccctgaaaaaaaaaaaaaaaaaaaaaaaaaaaaaaaaaaaaaaaaaaaaaaaaaaaaaaaa

SEQ ID NO: 232 - DNA, 1759 bp, Homo sapiens
ggcgcgcctcaggacttcgggtcccctcaccccgggcggatgcccaaagactccgccttcccaagagcccctgcggccgggcgcgaaaatggcggcggcggcgacggccgggcgctcctgaagcagcagttatggagcttccctcagggccggggccggagcggctctttgactcgcaccggcttccgggtgactgcttcctactgctcgtgctgctgctctacgcgccagtcgggttctgcctcctcgtcctgcgcctctttctcgggatccacgtcttcctggtcagctgcgcgctgccagacagcgtccttcgcagattcgtagtgcggaccatgtgtgcggtgctagggctcgtggcccggcaggaggactccggactccgggatcacagtgtcagggtcctcatttccaaccatgtgacacctttcgaccacaacatagtcaatttgcttaccacctgtagcaccgtgagtgagagcgaggccgagagcgccacggggcggttccctggggcccagctgaaggcccccctgtccccactcgcgttccgcatggaggatactgaggccttacccctaaccccgatcctctacccaacatgtcagtttttttttttcattttcctcaatatttttcttcttgctttctcttctcctggttcccagcctctactcaatagtccccccagctttgtgtgctggtctcggggcttcatggagatgaatgggcggggggagttggtggagtcactcaagagattctgtgcttccacgaggcttccccccactcctctgctgctattccctgaggaagaggccaccaatggccgggaggggctcctgcgcttcagttcctggccattttctatccaagatgtggtacaacctcttaccctgcaagttcagagacccctggtctctgtgacggtgtcagatgcctcctgggtctcagaactgctgtggtcacttttcgtccctttcacggtgtatcaagtaaggtggcttcgtcctgttcatcgccaactaggggaagcgaatgaggagtttgcactccgtgtacaacagctggtggccaaggaattgggccagacagggacacggctcactccagctgacaaagcagagcacatgaagcgacaaagacaccccagattgcgcccccagtcagcccagtcttctttccctccctcccctggtccttctcctgatgtgcaactggcaactctggctcagagagtcaaggaagttttgccccatgtgccattgggtgtcatccagagagacctggccaagactggctgtgtagacttgactatcactaatctgcttgagggggccgtagctttcatgcctgaagacatcaccaagggaactcagtccctacccacagcctctgcctccaagtttcccagctctggcccggtgacccctcagccaacagccctaacatttgccaagtcttcctgggcccggcaggagagcctgcaggagcgcaagcaagcactatatgaatacgcaagaaggagattcacagagagacgagcccaggaggctgactgagctcaaaggaacaggatggcacccagagccgcaggacggagactgggggcagccctcacccaactcacaacaggctggatgggtgggtggtaaaaagggaaggatgaggctcccccaatgtcacattaaattcatggttttcattcaaggcaaaaaaaaaaaaaaaaaaaaaaaaaaaaaaaaaaaaaaaaaaaaaa

SEQ ID NO: 233 - DNA, 1561 bp, Homo sapiens
ggcgcgcctcaggacttcgggtcccctcaccccgggcggatgcccaaagactccgccttcccaagagcccctgcggccgggcgcgaaaatggcggcggcggcgacggccgggcgctcctgaagcagcagttatggagcttccctcagggccggggccggagcggctctttgactcgcaccggcttccgggtgactgcttcctactgctcgtgctgctgctctacgcgccagtcgggttctgcctcctcgtcctgcgcctctttctcgggatccacgtcttcctggtcagctgcgcgctgccagacagcgtccttcgcagattcgtagtgcggaccatgtgtgcggtgctagggctcgtggcccggcaggaggactccggactccgggatcacagtgtcagggtcctcatttccaaccatgtgacacctttcgaccacaacatagtcaatttgcttaccacctgtagcacccctctactcaatagtccccccagctttgtgtgctggtctcggggcttcatggagatgaatgggcggggggagttggtggagtcactcaagagattctgtgcttccacgaggcttccccccactcctctgctgctattccctgaggaagaggccaccaatggccgggaggggctcctgcgcttcagttcctggccattttctatccaagatgtggtacaacctcttaccctgcaagttcagagacccctggtctctgtgacggtgtcagatgcctcctgggtctcagaactgctgtggtcacttttcgtccctttcacggtgtatcaagtaaggtggcttcgtcctgttcatcgccaactaggggaagcgaatgaggagtttgcactccgtgtacaacagctggtggccaaggaattgggccagacagggacacggctcactccagctgacaaagcagagcacatgaagcgacaaagacaccccagattgcgcccccagtcagcccagtcttctttccctccctcccctggtccttctcctgatgtgcaactggcaactctggctcagagagtcaaggaagttttgccccatgtgccattgggtgtcatccagagagacctggccaagactggctgtgtagacttgactatcactaatctgcttgagggggccgtagctttcatgcctgaagacatcaccaagggaactcagtccctacccacagcctctgcctccaagtttcccagctctggcccggtgacccctcagccaacagccctaacatttgccaagtcttcctgggcccggcaggagagcctgcaggagcgcaagcaagcactatatgaatacgcaagaaggagattcacagagagacgagcccaggaggctgactgagctcaaaggaacaggatggcacccagagccgcaggacggagactgggggcagccctcacccaactcacaacaggctggatgggtgggtggtaaaaagggaaggatgaggctcccccaatgtcacattaaattcatggttttcattcaaggcaaaaaaaaaaaaaaaaaaaaaaaaaaaaaaaaaaaaaaaaaaaaaa

SEQ ID NO: 234 - DNA, 1623 bp, Homo sapiens
ggcgcgcctcaggacttcgggtcccctcaccccgggcggatgcccaaagactccgccttcccaagagcccctgcggccgggcgcgaaaatggcggcggcggcgacggccgggcgctcctgaagcagcagttatggagcttccctcagggccggggccggagcggctctttgactcgcaccggcttccgggtgactgcttcctactgctcgtgctgctgctctacgcgccagtcgggttctgcctcctcgtcctgcgcctctttctcgggatccacgtcttcctggtcagctgcgcgctgccagacagcgtccttcgcagattcgtagtgcggaccatgtgtgcggtgctagggctcgtggcccggcaggaggactccggactccgggatcacagtgtcagggtcctcatttccaaccatgtgacacctttcgaccacaacatagtcaatttgcttaccacctgtagcacccctctactcaatagtccccccagctttgtgtgctggtctcggggcttcatggagatgaatgggcggggggagttggtggagtcactcaagagattctgtgcttccacgaggcttccccccactcctctgctgctattccctgaggaagaggccaccaatggccgggaggggctcctgcgcttcagttcctggccattttctatccaagatgtggtacaacctcttaccctgcaagttcagagacccctggtctctgtgacggtgtcagatgcctcctgggtctcagaactgctgtggtcacttttcgtccctttcacggtgtatcaagtaaggtggcttcgtcctgttcatcgccaactaggggaagcgaatgaggagtttgcactccgtgtacaacagctggtggccaaggaattgggccagacagggacacggctcactccagctgacaaagcagagcacatgaagcgacaaagacaccccagattgcgcccccagtcagcccagtcttctttccctccctcccctggtccttctcctgatgtgcaactggcaactctggctcagagagtcaaggaagttttgccccatgtgccattgggtgtcatccagagagacctggccaagactggctgtgtagacttgactatcactaatctgcttgagggggccgtagctttcatgcctgaagacatcaccaagggaactcagtccctacccacagcctctgcctccaaggcattcgatgcgtgtttaatgatgatgactccgcaagccctctgacattgtgatcacctcagtttcccagctctggcccggtgacccctcagccaacagccctaacatttgccaagtcttcctgggcccggcaggagagcctgcaggagcgcaagcaagcactatatgaatacgcaagaaggagattcacagagagacgagcccaggaggctgactgagctcaaaggaacaggatggcacccagagccgcaggacggagactgggggcagccctcacccaactcacaacaggctggatgggtgggtggtaaaaagggaaggatgaggctcccccaatgtcacattaaattcatggttttcattcaaggcaaaaaaaaaaaaaaaaaaaaaaaaaaaaaaaaaaaaaaaaaaaaaa

SEQ ID NO: 235 - DNA, 2821 bp, Homo sapiens
cgccccttcccagccccaagggtctaggatacagtctttgtagatgagcgggtcccccttggaggacagaatgaagaattgggaaatcatggccgttctggagagtagacaagaagacggcgaaagtcgggcctgccccgccctgcggccccggaacaaaagaacgcgtgtgcgctggccctttaagagcgattctcctccgcccgcgccagctcggaccgcgggaaacccggcgcctgcactaccccgcccggagattcccttccgacgcccgcaccgcctccccgtcactcattctaggcccgcacggtgattggcttgcggctagcgggaggtgaagaaggccgccttgtccgattggcccgcacgcagtggcgccggtcacgtggggggcgacgtttcgcgccaatttcggttggccggccacagtccaccgcgcggagattctcagcttccccaggagcaagacctctgagcccgccaagcgcggccgcacggccctcggcagcgatggcactgaaggactacgcgctagagaaggaaaaggttaagaagttcttacaagagttctaccaggatgatgaactcgggaagaagcagttcaagtatgggaaccagttggttcggctggctcatcgggaacaggtggctctgtatgtggacctggacgacgtagccgaggatgaccccgagttggtggactcaatttgtgagaatgccaggcgctacgcgaagctctttgctgatgccgtacaagagctgctgcctcagtacaaggagagggaagtggtaaataaagatgtcctggacgtttacattgagcatcggctaatgatggagcagcggagtcgggaccctgggatggtccgaagcccccagaaccagtaccctgctgaactcatgcgcagatttgagctgtattttcaaggccctagcagcaacaagcctcgtgtgatccgggaagtgcgggctgactctgtggggaagttggtaactgtgcgtggaatcgtcactcgtgtctctgaagtcaaacccaagatggtggtggccacttacacttgtgaccagtgtggggcagagacctaccagccgatccagtctcccactttcatgcctctgatcatgtgcccaagccaggagtgccaaaccaaccgctcaggagggcggctgtatctgcagacacggggctccagattcatcaaattccaggagatgaagatgcaagaacatagtgatcaggtgcctgtgggaaatatccctcgtagtatcacggtgctggtagaaggagagaacacaaggattgcccagcctggagaccacgtcagcgtcactggtattttcttgccaatcctgcgcactgggttccgacaggtggtacagggtttactctcagaaacctacctggaagcccatcggattgtgaagatgaacaagagtgaggatgatgagtctggggctggagagctcaccagggaggagctgaggcaaattgcagaggaggatttctacgaaaagctggcagcttcaatcgccccagaaatatacgggcatgaagatgtgaagaaggcactgctgctcctgctagtcgggggtgtggaccagtctcctcgaggcatgaaaatccggggcaacatcaacatctgtctgatgggggatcctggtgtggccaagtctcagctcctgtcatacattgatcgactggcgcctcgcagccagtacacaacaggccggggctcctcaggagtggggcttacggcagctgtgctgagagactccgtgagtggagaactgaccttagagggtggggccctggtgctggctgaccagggtgtgtgctgcattgatgagttcgacaagatggctgaggccgaccgcacagccatccacgaggtcatggagcagcagaccatctccattgccaaggccggcattctcaccacactcaatgcccgctgctccatcctggctgccgccaaccctgcctacgggcgctacaaccctcgccgcagcctggagcagaacatacagctacctgctgcactgctctcccggtttgacctcctctggctgattcaggaccggcccgaccgagacaatgacctacggttggcccagcacatcacctatgtgcaccagcacagccggcagcccccctcccagtttgaacctctggacatgaagctcatgaggcgttacatagccatgtgccgcgagaagcagcccatggtgccagagtctctggctgactacatcacagcagcatacgtggagatgaggcgagaggcttgggctagtaaggatgccacctatacttctgcccggaccctgctggctatcctgcgcctttccactgctctggcacgtctgagaatggtggatgtggtggagaaagaagatgtgaatgaagccatcaggctaatggagatgtcaaaggactctcttctaggagacaaggggcagacagctaggactcagagaccagcagatgtgatatttgccaccgtccgtgaactggtctcagggggccgaagtgtccggttctctgaggcagagcagcgctgtgtatctcgtggcttcacacccgcccagttccaggcggctctggatgaatatgaggagctcaatgtctggcaggtcaatgcttcccggacacggatcacttttgtctgattccagcctgcttgcaaccctggggtcctcttgttccctgctggcctgccccttgggaaggggcagtgatgcctttgaggggaaggaggagcccctctttctcccatgctgcacttactccttttgctaataaaagtgtttgtagattgtc

SEQ ID NO: 236 - DNA, 2900 bp, Homo sapiens
agtgtcgtgtaaacagtgtccttccgcgcggcggccgcggagagagctgcggcccgggggggcgtgcctgggatccggagcttcgctcgggcccgggaaaggcggcagtgggctgggatcgcggtgtctctgggtgtgatggccaatggctggactggctcccgccctgggcggaggaatcccgagctgtgaagcggctggaatccgggcccatgtgcttctttgtttactaagagcggaagcgatggcgggagcgggggtggggtgcggtggcggggtgcggtggcggaggtcccggtgaaatcaggggctaaggggacccaaagaaggcgggggatcataggggtggaaagaaagctgagaaccttgagaccggagtgtgaggggccaacggggaagggcgctagaattttaaactaaagtagggaccggaattcccctggggagatgttggatggccctgtgcactgccacgggctctttattcttcgctggttagaaacagacttgtgaaaaagagttatgcccactttggggagacttcgaaaaggttaagaagttcttacaagagttctaccaggatgatgaactcgggaagaagcagttcaagtatgggaaccagttggttcggctggctcatcgggaacaggtggctctgtatgtggacctggacgacgtagccgaggatgaccccgagttggtggactcaatttgtgagaatgccaggcgctacgcgaagctctttgctgatgccgtacaagagctgctgcctcagtacaaggagagggaagtggtaaataaagatgtcctggacgtttacattgagcatcggctaatgatggagcagcggagtcgggaccctgggatggtccgaagcccccagaaccagtaccctgctgaactcatgcgcagattgtgagtggtctctgtcgggaaagatgtagggattggttctccaggatcttgtttgtgactgttttctccccttagtgagctgtattttcaaggccctagcagcaacaagcctcgtgtgatccgggaagtgcgggctgactctgtggggaagttggtaactgtgcgtggaatcgtcactcgtgtctctgaagtcaaacccaagatggtggtggccacttacacttgtgaccagtgtggggcagagacctaccagccgatccagtctcccactttcatgcctctgatcatgtgcccaagccaggagtgccaaaccaaccgctcaggagggcggctgtatctgcagacacggggctccagattcatcaaattccaggagatgaagatgcaagaacatagtgatcaggtgcctgtgggaaatatccctcgtagtatcacggtgctggtagaaggagagaacacaaggattgcccagcctggagaccacgtcagcgtcactggtattttcttgccaatcctgcgcactgggttccgacaggtggtacagggtttactctcagaaacctacctggaagcccatcggattgtgaagatgaacaagagtgaggatgatgagtctggggctggagagctcaccagggaggagctgaggcaaattgcagaggaggatttctacgaaaagctggcagcttcaatcgccccagaaatatacgggcatgaagatgtgaagaaggcactgctgctcctgctagtcgggggtgtggaccagtctcctcgaggcatgaaaatccggggcaacatcaacatctgtctgatgggggatcctggtgtggccaagtctcagctcctgtcatacattgatcgactggcgcctcgcagccagtacacaacaggccggggctcctcaggagtggggcttacggcagctgtgctgagagactccgtgagtggagaactgaccttagagggtggggccctggtgctggctgaccagggtgtgtgctgcattgatgagttcgacaagatggctgaggccgaccgcacagccatccacgaggtcatggagcagcagaccatctccattgccaaggccggcattctcaccacactcaatgcccgctgctccatcctggctgccgccaaccctgcctacgggcgctacaaccctcgccgcagcctggagcagaacatacagctacctgctgcactgctctcccggtttgacctcctctggctgattcaggaccggcccgaccgagacaatgacctacggttggcccagcacatcacctatgtgcaccagcacagccggcagcccccctcccagtttgaacctctggacatgaagctcatgaggcgttacatagccatgtgccgcgagaagcagcccatggtgccagagtctctggctgactacatcacagcagcatacgtggagatgaggcgagaggcttgggctagtaaggatgccacctatacttctgcccggaccctgctggctatcctgcgcctttccactgctctggcacgtctgagaatggtggatgtggtggagaaagaagatgtgaatgaagccatcaggctaatggagatgtcaaaggactctcttctaggagacaaggggcagacagctaggactcagagaccagcagatgtgatatttgccaccgtccgtgaactggtctcagggggccgaagtgtccggttctctgaggcagagcagcgctgtgtatctcgtggcttcacacccgcccagttccaggcggctctggatgaatatgaggagctcaatgtctggcaggtcaatgcttcccggacacggatcacttttgtctgattccagcctgcttgcaaccctggggtcctcttgttccctgctggcctgccccttgggaaggggcagtgatgcctttgaggggaaggaggagcccctctttctcccatgctgcacttactccttttgctaataaaagtgtttgtagattgtc

SEQ ID NO: 237 - DNA, 5260 bp, Homo sapiens
aaaatggcggcggcggcggcggcggctggtgctgcagggtcggcagctcccgcggcagcggccggcgccccgggatctgggggcgcaccctcagggtcgcagggggtgctgatcggggacaggctgtactccggggtgctcatcaccttggagaactgcctcctgcctgacgacaagctccgtttcacgccgtccatgtcgagcggcctcgacaccgacacagagaccgacctccgcgtggtgggctgcgagctcatccaggcggccggtatcctgctccgcctgccgcaggtggccatggctaccgggcaggtgttgttccagcggttcttttataccaagtccttcgtgaagcactccatggagcatgtgtcaatggcctgtgtccacctggcttccaagatagaagaggccccaagacgcatacgggacgtcatcaatgtgtttcaccgccttcgacagctgagagacaaaaagaagcccgtgcctctactactggatcaagattatgttaatttaaagaaccaaattataaaggcggaaagacgagttctcaaagagttgggtttctgcgtccatgtgaagcatcctcataagataatcgttatgtaccttcaggtgttagagtgtgagcgtaaccaacacctggtccagacctcatgggtagcctctgagggtaagtgactaagacttctcctctgctgtccaagcgctttggtgcagggacagcggcatcttcagccaatccagtgcaggctctccaccgaaggctggctctagactggtggtacgcacatagcatagccatggccgactcctgctgtggttctctgacgattgtgcttcttgttaatcctctgtcgtgctttggtaatcgtattgattagagttggtaactgtcttgacttgaattttgtccctttaaaactgctgtacctgtatgataaagatgcagtacctttctcttaaaaaaaaatgctatggaaagctgtgagaattgaagagacaaattggctgtgtcagtgtggggttatgtcatgatttctagaagccctgaagttgctcttttgagcagctttgcatgacacgctctggtaaaaggtgtgcatctttaaattatttcatggatactttgaaaaatattgtatcacttcaaatacagcaataagtttatatgttctcaagatttcatttgtttttaagaattttaagttcgtggattaatatcactacttgaatactgacagttgttgattagacaccgaaaggttactgattgttgaatgtatctgtgttagagctgtgcactggcacgcttgcatcaggggctggggccacacggccgccacacagattcccccgtgatgcctggagctgcttccagagccgggtgtctccaagaggcacctgtaggacttcccatttagaaatctcttgagtgggtttgtatgttaccttctccaaggtttatttaggacagagatattgctggaaggtcatgggtcagattccctcacaacccacctcgtctgcgggtgcagccccactccaaggctccccgttattggggtatgtgaggagcagtaaatataaaaccagttcaactgtcctcatggaatcaccctttctgtttttgcagtattcataaagctagtgtaaggtctggttttagtctattaaatcttagagatctaaaggaaatgctcaaaatgtagccaggttttaaatgctttaacttttaaaaaatgtaaatttttgtatgtttatagcttctaaatatgaaagttaaagaatgtactgtgatgaaatgttcagtattatgttgcttctcagtatcatgttgcttctcagtattgtgttgcttctgattctatgaatgttcattttaagaccccttgttgaaatgggacagttggcagcggctctgatgagcccgagaagaggcctgcccttgggtgcggagtctccctccgcacgatgctcccacgcgtccaacttgcacccaaggggcttttccctcttccaagtggactccttcaaggaagctgcagctcggtcagcagagaaggggcctgccgccagcgccctggaggaagaggaagaggaacccaagaggatggcttgtctcccagcagccacaccggctttgtgctcagccagttcatttgagtttgcatgtttctctgcactatggattttgagcatttagatttctttaatcaaaagcgttttagtgactccagtagacattttctttctgaggcatcgtgctttgcatgagagcaggccaaggttgaggggaaaagtaaagttaaagtcggttctctttcatagcaacacgtattgtctgacattcagccagctttttttttttctaataatttctgtgcctttctgtcctgtatttactgtatttagaaaaagcagctagaatatttctccattaactcttgagattcacaggactgtctagctctgagtcctagcaatagactccttagaggagtagtacgtttatctagattttctctagataatgcaggcggaagacctgggttcccgggtggggcattgcagttcttcctgtgtttggcttccaggaattacatgaacgacagccttcgcaccgacgtcttcgtgcggttccagccagagagcatcgcctgtgcctgcatttatcttgctgcccggacgctggagatccctttgcccaatcgtccccattggtttcttttgtttggagcaactgaagaagaaattcaggaaatctgcttaaagatcttgcagctttatgctcggaaaaaggttgatctcacacacctggagggtgaagtggaaaaaagaaagcacgctatcgaagaggcaaaggcccaagcccggggcctgttgcctgggggcacacaggtgctggatggtacctcggggttctctcctgcccccaagctgggctggagtgcaatggcgctgtctcagctcactgtaacctctgcctcccgggttcaagcgattctcctgcctcagcctcccaagtagctgggattgcagcctggagtgcagtggcgctatctgggatcactgcaagctccgcctaccagattctggtgattcttgtgcctcagcctcccaagtagctgggattgcaggcgcccaccaccacgctcagtggaatcccccaaagaaggtaaagggagcaagccttccccactgtctgtgaagaacaccaagaggaggctggagggcgccaagaaagccaaggcggacagccccgtgaacggcttgccaaaggggcgagagagtcggagtcggagccggagccgtgagcagagctactcgaggtccccatcccgatcagcgtctcctaagaggaggaaaagtgacagcggctccacatctggtgggtccaagtcgcagagccgctcccggagcaggagtgactccccaccgagacaggccccccgcagcgctccctacaaaggctctgagattcggggctcccggaagtccaaggactgcaagtacccccagaagccacacaagtctcggagccggagttcttcccgttctcgaagcaggtcacgggagcgggcggataatccgggaaaatacaagaagaaaagtcattactacagagatcagcgacgagagcgctcgaggtcgtatgaacgcacaggccgtcgctatgagcgggaccaccctgggcacagcaggcatcggaggtgaggcggggttgcagtgactggtggccgcaagcccttccctggggagtacctgatggctgccctttgacccccggtggctgccctttgacccccgggtgtgctctcagcgcaagtggtcctagaacaggattctttttggaaatgtctgtcgactggaccttggtggatttggaaatggaactgagggaccggtgacacgtgcttcagaccggtctggggtgcggcgcacacctgggcccgtgcagggctcagctcggcagcagctctgagggcagctcaatgaaaaagtgaatgcacacgcccttgttggcgtggcctggcatggcctggtgctatcggcagccgctctccactccccgactgatactcaattacgtgaagccaagaaagatgatttttagaacctttgcctatattaggttgtacttatgtacatattttgcagtgtttcacaggagaaagtggccttaactgccccttattctctctccacgttgtaaataaacatgtgtttaatacaagttaaagctatgtatgaaaactcagaacttgaatcccgtcagcttaaaacttgtgtagggaatcctgacttttaaaatgtgagggtatttggatctgtgttgaaagtcgtatatttttatctgtgcggtgctgagtgcaggccaccagctcctaaatagaggttccctatatgcgcgtatgacatggtgaataaacacaactctctccactcaggacatccggagcgttatggacgtggtaggtggtcgttctgtgtgcttgtgaaagtgtccaggcgtgtgcacagccagtgcgcccacttccgggctccttgctccctgctgtactgaagttttggattttgcatccaatcctgtgtgcctgcccttctgccgaaggcttgtgaggggcctgagtcctctgcccatcaggatgacaggctccttcctgcagggccataggagggaagttttggaaacacagaatgattccaaggtgctctcgttcctgagggggactggtttgtaacccatgacatctgtgggcgagagaggcagctgggagcaggacacttggagggtcacccacgggggtggcacctgcactctgagtgccccccactgtcatcagctgcctcttaccgtggacacagttttggttttggggactagggggccccactcctggtggtaccgtttggacttactagggcagtgggacatataggccggggctagtgggataacggggagttacgcctgatgacttttttgatggaatcctgcattagatagctggtgggaccccccctcagaattggggaactgaggagactccagggagggtgtccttccagggagagcagctatgaggggccccctagcttcctgtgcctggaagtaagagaaccagtaaagggccatacacacctgtacccaagagaccgctctccatttgctttctttttttactaaataattgtaaaatattattatgacataaagaaccatttaaggccaaaaaaaaaaaaaaaaaaaaaa

SEQ ID NO: 238 - DNA, 3107 bp, Homo sapiens
caaaatggcggcggcggcggcggcggctggtgctgcagggtcggcagctcccgcggcagcggccggcgccccgggatctgggggcgcaccctcagggtcgcagggggtgctgatcggggacaggctgtactccggggtgctcatcaccttggagaactgcctcctgcctgacgacaagctccgtttcacgccgtccatgtcgagcggcctcgacaccgacacagagaccgacctccgcgtggtgggctgcgagctcatccaggcggccggtatcctgctccgcctgccgcaggtggccatggctaccgggcaggtgttgttccagcggttcttttataccaagtccttcgtgaagcactccatggagcatgtgtcaatggcctgtgtccacctggcttccaagatagaagaggccccaagacgcatacgggacgtcatcaatgtgtttcaccgccttcgacagctgagagacaaaaagaagcccgtgcctctactactggatcaagattatgttaatttaaagaaccaaattataaaggcggaaagacgagttctcaaagagttgggtttctgcgtccatgtgaagcatcctcataagataatcgttatgtaccttcaggtgttagagtgtgagcgtaaccaacacctggtccagacctcatggaattacatgaacgacagccttcgcaccgacgtcttcgtgcggttccagccagagagcatcgcctgtgcctgcatttatcttgctgcccggacgctggagatccctttgcccaatcgtccccattggtttcttttgtttggagcaactgaagaagaaattcaggaaatctgcttaaagatcttgcagctttatgctcggaaaaaggttgatctcacacacctggagggtgaagtggaaaaaagaaagcacgctatcgaagaggcaaaggcccaagcccggggcctgttgcctgggggcacacaggtgctggatggtacctcggggttctctcctgcccccaagctggtggaatcccccaaagaaggtaaagggagcaagccttccccactgtctgtgaagaacaccaagaggaggctggagggcgccaagaaagccaaggcggacagccccgtgaacggcttgccaaaggggcgagagagtcggagtcggagccggagccgtgagcagagctactcgaggtccccatcccgatcagcgtctcctaagaggaggaaaagtgacagcggctccacatctggtgggtccaagtcgcagagccgctcccggagcaggagtgactccccaccgagacaggccccccgcagcgctccctacaaaggctctgagattcggggctcccggaagtccaaggactgcaagtacccccagaagccacacaagtctcggagccggagttcttcccgttctcgaagcaggtcacgggagcgggcggataatccgggaaaatacaagaagaaaagtcattactacagagatcagcgacgagagcgctcgaggtcgtatgaacgcacaggccgtcgctatgagcgggaccaccctgggcacagcaggcatcggaggtgaggcggggttgcagtgactggtggccgcaagcccttccctggggagtacctgatggctgccctttgacccccggtggctgccctttgacccccgggtgtgctctcagcgcaagtggtcctagaacaggattctttttggaaatgtctgtcgactggaccttggtggatttggaaatggaactgagggaccggtgacacgtgcttcagaccggtctggggtgcggcgcacacctgggcccgtgcagggctcagctcggcagcagctctgagggcagctcaatgaaaaagtgaatgcacacgcccttgttggcgtggcctggcatggcctggtgctatcggcagccgctctccactccccgactgatactcaattacgtgaagccaagaaagatgatttttagaacctttgcctatattaggttgtacttatgtacatattttgcagtgtttcacaggagaaagtggccttaactgccccttattctctctccacgttgtaaataaacatgtgtttaatacaagttaaagctatgtatgaaaactcagaacttgaatcccgtcagcttaaaacttgtgtagggaatcctgacttttaaaatgtgagggtatttggatctgtgttgaaagtcgtatatttttatctgtgcggtgctgagtgcaggccaccagctcctaaatagaggttccctatatgcgcgtatgacatggtgaataaacacaactctctccactcaggacatccggagcgttatggacgtggtaggtggtcgttctgtgtgcttgtgaaagtgtccaggcgtgtgcacagccagtgcgcccacttccgggctccttgctccctgctgtactgaagttttggattttgcatccaatcctgtgtgcctgcccttctgccgaaggcttgtgaggggcctgagtcctctgcccatcaggatgacaggctccttcctgcagggccataggagggaagttttggaaacacagaatgattccaaggtgctctcgttcctgagggggactggtttgtaacccatgacatctgtgggcgagagaggcagctgggagcaggacacttggagggtcacccacgggggtggcacctgcactctgagtgccccccactgtcatcagctgcctcttaccgtggacacagttttggttttggggactagggggccccactcctggtggtaccgtttggacttactagggcagtgggacatataggccggggctagtgggataacggggagttacgcctgatgacttttttgatggaatcctgcattagatagctggtgggaccccccctcagaattggggaactgaggagactccagggagggtgtccttccagggagagcagctatgaggggccccctagcttcctgtgcctggaagtaagagaaccagtaaagggccatacacacctgtacccaagagaccgctctccatttgctttctttttttactaaataattgtaaaatattattatgacataaagaaccatttaaggccaaaaaaaaaaaaaaaaaaaaaa

SEQ ID NO: 239 - DNA, 2014 bp, Homo sapiens
aggagacggcccacggcgcccgcgggctggggcggtcgcttcttccttctccgtggcctacgagggtccccagcctgggtaaagatggccccatggcccccgaagggcctagtcccagctgtgctctggggcctcagcctcttcctcaacctcccaggacctatctggctccagccctctccacctccccagtcttctcccccgcctcagccccatccgtgtcatacctgccggggactggttgacagctttaacaagggcctggagagaaccatccgggacaactttggaggtggaaacactgcctgggaggaagagaatttgtccaaatacaaagacagtgagacccgcctggtagaggtgctggagggtgtgtgcagcaagtcagacttcgagtgccaccgcctgctggagctgagtgaggagctggtggagagctggtggtttcacaagcagcaggaggccccggacctcttccagtggctgtgctcagattccctgaagctctgctgccccgcaggcaccttcgggccctcctgccttccctgtcctgggggaacagagaggccctgcggtggctacgggcagtgtgaaggagaagggacacgagggggcagcgggcactgtgactgccaagccggctacgggggtgaggcctgtggccagtgtggccttggctactttgaggcagaacgcaacgccagccatctggtatgttcggcttgttttggcccctgtgcccgatgctcaggacctgaggaatcaaactgtttgcaatgcaagaagggctgggccctgcatcacctcaagtgtgtagacattgatgagtgtggcacagagggagccaactgtggagctgaccaattctgcgtgaacactgagggctcctatgagtgccgagactgtgccaaggcctgcctaggctgcatgggggcagggccaggtcgctgtaagaagtgtagccctggctatcagcaggtgggctccaagtgtctcgatgtggatgagtgtgagacagaggtgtgtccgggagagaacaagcagtgtgaaaacaccgagggcggttatcgctgcatctgtgccgagggctacaagcagatggaaggcatctgtgtgaaggagcagatcccaggtgcattccccatcttaactgatttaacccctgaaacaacccgacgctggaagttgggttctcatccccactctacatatgtaaaaatgaagatgcagagagatgaagctactttcccagggctatatggcaagcaagtcgcaaagctgggatcccaatccagacagtctgaccgtggaacgagactcatacacagtcagcaggcttcttctcagagatgacagaagacgagttggtggtgctgcagcagatgttctttggcatcatcatctgtgcactggccacgctggctgctaagggcgacttggtgttcaccgccatcttcattggggctgtggcggccatgactggctactggttgtcagagcgcagtgaccgtgtgctggagggcttcatcaagggcagataatcgcggccaccacctgtaggacctcctcccacccacgctgcccccagagcttgggctgccctcctgctggacactcaggacagcttggtttatttttgagagtggggtaagcacccctacctgccttacagagcagcccaggtacccaggcccgggcagacaaggcccctggggtaaaaagtagccctgaaggtggataccatgagctcttcacctggcggggactggcaggcttcacaatgtgtgaatttcaaaagtttttccttaatggtggctgctagagctttggcccctgcttaggattaggtggtcctcacaggggtggggccatcacagctccctcctgccagctgcatgctgccagttcctgttctgtgttcaccacatccccacaccccattgccacttatttattcatctcaggaaataaagaaaggtcttggaaagttaaaaaaaaaaaaaaaaaaaaaaaa

SEQ ID NO: 240 - DNA, 2072 bp, Homo sapiens
ggcctcgaggcaagattcggcacgaggctaattctgcggatccggcccctaatattctttatcagaccctcagacaagaggctgacttctgcccccttgtcaaggagcgaggccactttcctctccaccccatgctagcgaggataacttatttctcttctggaattgcatcttatgcgcctttccccacccatccccacagcccctgcaatacccagtttggcctcttttgcttgtaataacgcagatcccagcgccacggcaccttagaacagacctttttctttctcgcgtggggcctgactccttcagtgaagcctctccacgccctctatctgcaggtccccagcctgggtaaagatggccccatggcccccgaagggcctagtcccagctgtgctctggggcctcagcctcttcctcaacctcccaggacctatctggctccagccctctccacctccccagtcttctcccccgcctcagccccatccgtgtcatacctgccggggactggttgacagctttaacaagggcctggagagaaccatccgggacaactttggaggtggaaacactgcctgggaggaagagaatttgtccaaatacaaagacagtgagacccgcctggtagaggtgctggagggtgtgtgcagcaagtcagacttcgagtgccaccgcctgctggagctgagtgaggagctggtggagagctggtggtttcacaagcagcaggaggccccggacctcttccagtggctgtgctcagattccctgaagctctgctgccccgcaggcaccttcgggccctcctgccttccctgtcctgggggaacagagaggccctgcggtggctacgggcagtgtgaaggagaagggacacgagggggcagcgggcactgtgactgccaagccggctacgggggtgaggcctgtggccagtgtggccttggctactttgaggcagaacgcaacgccagccatctggtatgttcggcttgttttggcccctgtgcccgatgctcaggacctgaggaatcaaactgtttgcaatgcaagaagggctgggccctgcatcacctcaagtgtgtagacattgatgagtgtggcacagagggagccaactgtggagctgaccaattctgcgtgaacactgagggctcctatgagtgccgagactgtgccaaggcctgcctaggctgcatgggggcagggccaggtcgctgtaagaagtgtagccctggctatcagcaggtgggctccaagtgtctcgatgtggatgagtgtgagacagaggtgtgtccgggagagaacaagcagtgtgaaaacaccgagggcggttatcgctgcatctgtgccgagggctacaagcagatggaaggcatctgtgtgaaggagcagatcccagagtcagcaggcttcttctcagagatgacagaagacgagttggtggtgctgcagcagatgttctttggcatcatcatctgtgcactggccacgctggctgctaagggcgacttggtgttcaccgccatcttcattggggctgtggcggccatgactggctactggttgtcagagcgcagtgaccgtgtgctggagggcttcatcaagggcagataatcgcggccaccacctgtaggacctcctcccacccacgctgcccccagagcttgggctgccctcctgctggacactcaggacagcttggtttatttttgagagtggggtaagcacccctacctgccttacagagcagcccaggtacccaggcccgggcagacaaggcccctggggtaaaaagtagccctgaaggtggataccatgagctcttcacctggcggggactggcaggcttcacaatgtgtgaatttcaaaagtttttccttaatggtggctgctagagctttggcccctgcttaggattaggtggtcctcacaggggtggggccatcacagctccctcctgccagctgcatgctgccagttcctgttctgtgttcaccacatccccacaccccattgccacttatttattcatctcaggaaataaagaaaggtcttggaaagtt

SEQ ID NO: 241 - DNA, 8618 bp, Homo sapiens
atgtccttgagcagtggagcctccggagggaaaggagtggatgcaaacccggttgagacatacgacagtggggatgaatgggacattggagtagggaatctcatcattgacctggacgccgatctggaaaaggaccagcagaaactggaaatgtcaggctcaaaggaggtggggataccggctcccaatgctgtggccacactaccagacaacatcaagtttgtgaccccagtgccaggtcctcaagggaaggaaggcaaatcaaaatccaaaaggagtaagagtggcaaagacactagcaaacccactccagggacttccctgttcactccaagtgagggggcagctagcaagaaagaggtgcaggggcgctcaggagatggtgccaatgctggaggcctggttgctgctattgctcccaagggctcagagaaggcggctaaggcatcccgcagtgtagccggttccaaaaaggagaaggagaacagctcatctaagagcaagaaggagagaagcgaaggagtggggacttgttcagaaaaggatcctggggtcctccagccagttcccttgggaggacggggtggtcagtatgatggaagtgcaggggtggatacaggagctgtggagccacttgggagtatagctattgagcctggggcagcgctcaatcctttgggaactaaaccggagccagaggaaggggagaatgagtgtcgcctgctaaagaaagtcaagtctgaaaagatggagtcccctgtttccacaccagcagtgctgccaatacaccttttggtgccagtggtcaacaatgacatctcatctccttgtgagcagatcatggttcgtacccgatcagttggggtcaacacatgtgatgtggctctggccacagagcctgagtgcttgggcccctgtgaacctggaactagcgtcaaccttgaaggcatcgtgtggcaggaaacagaagatgggatgttggtggtaaatgtaacgtggaggaacaagacatatgtaggtacactccttgactgcacacgacatgattgggcacccccaaggttctgtgactccccgaccagtgacctggaaatgcgcaatggccggggtagaggcaaacgcatgcgtcccaacagtaatacacctgtcaatgagacagccacagcctctgacagcaaagggaccagtaacagcagcaaaacccgggcaggagccaatagcaaaggccgtcggggcagccagaattcttcagagcaccgcccacctgccagcagcacttctgaggatgtcaaggccagcccttcctcagctaataagcggaaaaacaaacccctttcagacatggagctgaattctagctcagaggactccaaagggagcaagcgtgtccgtactaattccatgggctcagccactggcccccttcctgggacaaaggtagaacccactgttctggacagaaactgcccctcccccgtcctaattgactgtccccacccaaactgcaacaagaagtacaagcacatcaatggacttaagtaccaccaagctcatgcccatacagatgatgacagcaagccggaagcggatggggacagtgagtacggagaggaacctattctccatgcagatcttgggagctgcaacggtgcatctgtctcacaaaaaggttccttgtcccctgcccgctcagctacccccaaagttcgacttgtagagccccatagcccttctccttcaagcaaattcagcacaaaaggcctctgtaagaaaaagttgagtggggaaggggacacagaccttggggccttatccaatgatggctctgatgatggaccctcagtgatggatgaaacaagcaatgatgcctttgattctttagaaaggaagtgtatggaaaaagaaaaatgtaaaaaaccctctagtttaaaacctgaaaagattccttccaagagcctaaagtcagcccgtcccattgcccctgccatccccccacagcaaatctacaccttccagacagccaccttcacagcagcgagcccaggctcttcctcaggcttgaccgccacagtggcacaagccatgcccaacagtccccaactcaagcccattcagcccaagcccactgttatgggagaacctttcacagtcaaccctgccttgactccagccaaggacaagaaaaagaaagacaaaaaaaagaaggaatcttcaaaggaacttgaaagtcctctgacccctgggaaggtgtgtcgagcagaggaaggcaaaagcccattcagggaatcttcaggagatgggatgaaaatggaggggctcctaaatggctcatcagacccccaccaaagccgactggctagcatcaaggctgaagccgacaagatctacagtttcacggacaatgcccccagcccttccattggaggcagtagccgccttgaaaacactacccctactcagcccctgactcccttacatgtggtgacccagaatggagctgaagccagctcagtcaaaaccaacagccctgcatactctgacatctctgatgctggggaggatggggagggcaaggtagacagtgtcaaatcaaaggacgccgaacagttggttaaagaaggggctaagaaaactctttttccccctcagcctcagagcaaagactcaccatattaccaaggctttgagagttactattctccaagttatgcacagtccagccctggggctctgaaccccagcagccaggcaggagtggagagccaggccctgaagacaaaaagggatgaggaacctgagagcatagaagggaaagtgaagaacgatatctgtgaagaaaagaagcccgagctgagcagttccagtcagcagccctcggtcatccagcagcgtcccaatatgtacatgcagtccctgtactacaaccagtatgcctatgtacccccctatggctacagcgaccagagttaccacacccaccttctgagcactaacacggcttaccggcagcagtacgaagaacagcagaaacgccagagcttagagcagcagcagcggggagtggacaagaaggcagagatgggcctgaaggagcgggaggcagcactcaaggaagagtggaagcaaaagccgtcaattccaccaactctcaccaaggcccccagcctgacagacctggtgaaatcaggacctggcaaggccaaggagccaggggctgacccagccaaatcagtcatcattcccaagttagatgactcttcaaaactcccgggccaggcccctgaaggccttaaagtgaagctgagtgatgccagccacctaagcaaggaggcctctgaggccaagacaggtgctgagtgtggtcgacaggcagagatggatccaatactctggtaccgacaggaggcagagccccggatgtggacatatgtttatcctgccaagtactcagacatcaagtcagaggatgagcggtggaaggaggagcgggaccgcaaattgaaggaggaaaggagtcggagtaaggactctgtccccaaggaagatgggaaggaaagcacaagtagtgactgcaagctgcccacgtcagaggagtctcgccttgggagcaaggagccccggccaagtgtccatgtgcctgtgtcctccccacttacccagcaccagtcctacatcccctacatgcacggctattcctacagtcagtcctacgaccccaaccaccccagctaccggagcatgcctgctgtgatgatgcagaactacccaggttcctacctgccttccagctactctttttccccatatggcagcaaggtctcaggtggtgaagatgctgacaaggcacgagccagccccagtgtgacttgtaaatccagctcagagtccaaagccctggacatcttgcagcagcatgccagtcactacaagagcaagtctcccacgataagtgataaaacttctcaggagagagatcgaggaggctgtggggtggttgggggtggtggcagctgtagcagcgtcgggggagcaagtgggggtgaacggagtgttgaccggccccgcacctctccttcccagcgcctgatgtccacacaccaccaccaccaccacttggggtactcattgctcccagcacagtacaacttaccctatgcagcagggctttcttctacagccattgttgccagccaacaaggctcaactccctcactctacccaccccccaggaggtgagaatgacaccaagtgcccggataaagtcagcttcacgggcccggactggcttacccaaggaggtgctgaaggtgccgtttagacatcagttaaatggtgttgatcatcctgtttgccgtttccaccatgactgaaggcagacccttggctatctcacctccaccagacctccggactacctgaccctacctcttcctcaggagctggagagctggtacttagcaaaaatatttattctctcagccacagttatgactattgtggcctctgtggagatgaaggcacgggaagcaaccaggggaacatggcctcagcccagagaagccactgctctgttccccaagcccttggtctgctgctggagcagtaccagcccccccgcccaccagggagggacccccacccccaagcactgggtaaggtctgaagacagcacagcagccatacccctcaccatcattaccaccatcaccagattctgcatctccctagtgctttgcaccctgggaattggcagcatgtggaggaactagaatctcaggaaagaaattgggggttgttttctacataattgtgaaaacaaggtcttcaaatgtggagacttctccccatttacatgagcacatataaacgctcacaacctagcctggaaaggaagaccaaggcatctgccccaacatggccttgagctgcctgtgaggcagggggcaggggttccaacaccagcacagggctccccagggacactgggagcaagctggtgctggagcatgaatgacgtctgtgaagtagaacctgcgtccccactaagtcctgctgcttcttattccccaactccttgcccttttcccttccctcctaaccccttggtgcctttcccagggggatccccacactggtcttgcctcttcttttccactgcttggctcttaagcctcaggcagataaactagtattccccccagcttggggaaccttggagtctgccaggtcaccttagggcaaggcccagaaggcagcccctgggagcacccagcagttcttggagatgtcctgtcatctagccatctgatatcttcctcatttgaggccacagatatatacagcccaattcctctgtctacaagtacatgattttatatagctcagtctataacctccatgtgggccaatataagctgtgtttcttggtaacacatattttgtttgaggggccactggccatgggaggttatttgttccttagaccctggaataacacatccaagccattacttattagagtctcagaatgtactcagtggagctgtgctttgaggcagccaacatttctctgctctccttagaaatgcagtctcccaatggaagctttatactctttgtactgggaaagtgaggatgatttggtagctttattggggtcatgtcttccccaaggtgtggggagcttagcttacttggcttttgaggtatcatccctctgttctcccctcctatctttccatgaccctctggattgagagagagagataaagactgacagacaccagtgtaggctggaaaagggagtgtgtgaccagagtgccaaaagtgactaggagcaggaacttggctccgactcagtttggaaaatgggaaataggggacagtaagcacaatgcccagtagtagttgatttccaaggaccctggaaccctacacttgagaggcttagggtcaccatctgctcaagaggatcccctctgatctacaggccttttccctaggtttctgcctcctcgtttttgttcaagttgggttctgagtcctccccaaaaaccattgttttagacctcttggcagggccccaaaacagcctccctcatacccatcattccctctgccttctgctgccctcatgggcagtgctctgagcagtgacctccctttcctccgtggaagtagctagtgcagacaccgtcatcccaccccacctgagtcaccccaaccaagagggtgactgaatttcagcctgattatgccctcctggggctcctgtgaggtggagccaaggttccctctctgttcctgtttgtttttaaatattgttgtgtgttttgtatctgtggcactggcctgcagcatactctgtatatattgtaaagaaaccgttaggagtaattttcttttgcattgggcaggcatggccctgcattcctgccctttccactcattctgtaacacagaggacgaacttctgtattagctgggcagccttgggttctccagaagagaacaggtttttcttttcctttttaatttttcttcttaaacatttggctctttgatcctcatatccaagtctcccctgaagagtaggagctgctcagaagagcaggtgaaagccaccatggcagatcctgatgcctgccgggcctagtcttccctctgaaataacatgaagcagcagctgtggagattcttgacaagtgctgagtgaaagatttgctgcccacctctacatggggaggagaaacacaggtgggagctacctgtggcatccatgacctagtcagagggatgagatgctcagcaggggtccccatcctatcccaccccacaaacaaaggctggaaaaatttgctaccaagggccaagaccaccagaccaagcctgtttatgagccacccctgcccaggccctcacagacattgctcacggggcttcccatagaggagaagctaaagagggagggggcctcatccccagatagatcaggcaaggcttggagagctgctctttaggatccacatcaactacttcctcattttaaggtatggcagttcccttcatccccttttcctgccttgtacatgtacatgtatgaaatttccttctcttaccgaactctctccacacatcacaaggtcaaagaaccacacgcttagaagggtaagagggcaccctatgaaatgaaatggtgatttcttgagtctcttttttccacgtttaaggggccatggcaggacttagagttgcgagttaagactgcagagggctagagaattatttcatacaggctttgaggccacccatgtcacttatcccgtataccctctcaccatccccttgtctactctgatgcccccaagatgcaactgggcagctagttggccccataattctgggcctttgttgtttgttttaattacttgggcatcccaggaagctttccagtgatctcctaccatgggcccccctcctgggatcaagcccctcccaggccctgtccccagcccctcctgccccagcccacccgcttgccttggtgctcagccctcccattgggagcaggttggggcgagctggaggcccgggctggaggggcagtgttgctgttcatagattttgttccattggcgttgctctgttgaatttaatttcagtcttcctgattcttcccttctgtaaagtgtacattaccaagttccttgtttttttatatatatatataaatatatatatatacaaactgtactctttttgcctttgtacattcaggcaagaagagaaaataaatctttttaagagacaatcacaaatctgtgagggctgctggttatttctcctggagtttgctgctgagctgcctcttccttcctcccaattttcctgttctccctcagctctcctgatcttcctggccctgctccatatgcatcctcagcttcactttccctggctgatggcaagctgttgaatccagtgtccagactacctgccttgtaacccttttctgcccagcattgttttctggcttggccactggcttagcccaggagctttactctgtgccctggcctcccctctcttcacctttagatttccattcaccgaagtggctttggacccctgggtactctgggacctgtttcctggaggccctggcttgggacactcacctgtgaaactatgcagctgggagctctctgcctaagagtttgcactatttaaacctgcctgggagttaggacggatggttttaggaatgaccggaaaactacccctaaaactcccccgacattccagcctctagaatgctctgatccagagctcagtggatgattcccagctggtggactcctgtggctaccccatcagaacaagggctaagggtttatgggtcaagagtatttgatcagaattttaaagggtggtatactctgaaacacagcccaaccaaaccattgtttggccgctttctcttttcctctaccttcctcatccccacttttttccctttctctctacttcctcttcttaattggctttggaattgaaatatatttttaaattatttgttgtatttattgaataaagtttttaatgtccctgttcttaaa

SEQ ID NO: 242 - DNA, 2815 bp, Homo sapiens
aggaagcggaggaaggtgaagtaggaccgaattcctgtgccgaagaggcctgcagtgggagagcaggatgggggctccggaggtggcgcccaggctctgagctaccctaggtctgcagactagcgggcattggccagagacatggcccagccactggccttcatcctcgatgtccctgagaccccaggggaccagggccagggccccagcccctatgatgaaagcgaagtgcacgactccttccagcagctcatccaggagcagagccagtgcacggcccaggaggggctggagctgcagcagagagagcgggaggtgacaggaagtagccagcagacactctggcggcccgagggcacccagagcacggccacactccgcatcctggccagcatgcccagccgcaccattggccgcagccgaggtgccatcatctcccagtactacaaccgcacggtgcagcttcggtgcaggagcagccggcccctgctcgggaactttgtccgctccgcctggcccagcctccgcctgtacgacctggagctggaccccacggccctggaggaggaggagaagcagagcctcctggtgaaggagttccagagcctggcagtggcacagcgggaccacatgcttcgcgggatgcccttaagcctggctgagaaacgcagcctgcgagagaagagcaggaccccgagggggaagtggaggggccagccgggcagcggcggggtctgctcctgctgtggccggctcagatatgcctgcgtgctggccttgcacagcctgggcctggcgctgctctccgccctgcaggccctgatgccgtggcgctacgccctgaagcgcatcgggggccagttcggctccagcgtgctctcctacttcctctttctcaagaccctgctggctttcaatgccctcctgctgctgctgctggtggccttcatcatgggccctcaggtcgccttcccacccgccctgccgggccctgcccccgtctgcacaggcctggagctcctcacaggcgcgggttgcttcacccacaccgtcatgtactacggccactacagtaacgccacgctgaaccagccgtgtggcagccccctggatggcagccagtgcacacccagggtgggtggcctgccctacaacatgcccctggcctacctctccactgtgggcgtgagcttctttatcacctgcatcaccctggtgtacagcatggctcactctttcggggagagctaccgggtgggcagcacctctggcatccacgccatcaccgtcttctgctcctgggactacaaggtgacgcagaagcgggcctcccgcctccagcaggacaatattcgcacccggctgaaggagctgctggccgagtggcagctgcggcacagccccaggagcgtgtgcgggaggctgcggcaggcggctgtgctggggcttgtgtggctgctgtgtctggggaccgcgctgggctgcgccgtggccgtccacgtcttctcggagttcatgatccagagtccagaggctgctggccaggaggctgtgctgctggtcctgcccctggtggttggcctcctcaacctgggggccccctacctgtgccgtgtcctggccgccctggagccgcatgactccccggtactggaggtgtacgtggccatctgcaggaacctcatcctcaagctggccatcctggggacactgtgctaccactggctgggccgcagggtgggcgtcctgcagggccagtgctgggaggattttgtgggccaggagctgtaccggttcctggtgatggacttcgtcctcatgttgctggacacgctttttggggaactggtgtggaggattatctccgagaagaagctgaagaggaggcggaagccggagtttgacattgcccggaatgtcctggagctgatttatgggcagactctgacctggctgggggtgctcttctcgcccctcctccccgccgtgcagatcatcaagctgctgctcgtcttctatgtcaagaagaccagccttctggccaactgccaggcgccgcgccggccctggctggcctcacacatgagcaccgtcttcctcacgctgctctgcttccccgccttcctgggcgccgctgtcttcctctgctacgccgtctggcaggtgaagccctcgagcacctgcggccccttccggaccctggacaccatgtacgaggccggcagggtgtgggtgcgccacctggaggcggcaggccccagggtctcctggctgccctgggtgcaccggtacctgatggaaaacaccttctttgtcttcctggtgtcagccctgctgctggccgtgatctacctcaacatccaggtggtgcggggccagcgcaaggtcatctgcctgctcaaggagcagatcagcaatgagggtgaggacaaaatcttcttaatcaacaagcttcactccatctacgagaggaaggagagggaggagaggagcagggttgggacaaccgaggaggctgcggcaccccctgccctgctcacagatgaacaggatgcctagggggacggcgatgggcctcacgggcccgcccagcaccctgagaccacactgttgcctcccagtgaccctgctgggacaccaggacaaggaagacagtttcgcctctcgaaagccgcagctgcgcctaggctggagctggaagggtgggtgaatccggcttgggcatccccaatgaactctgccctgcctgggactctatttattctgattaaaggggttttgcaaatgggaaaaaaaaaaaaaaaaaaaaaaaaaa

SEQ ID NO: 243 - DNA, 3352 bp, Homo sapiens
acgagggacgcagccatggcggaggcggctttggaagccgtgcggagcgagttacgagaattcccggccgctgcaagggagctctgcgtgcctcttgctgtgccctacctggacaaacccccaactccgctccacttctaccgggactgggtctgccccaacaggccgtgcattatccgcaacgctctgcagcactggccggccctccagaagtggtccctcccctatttcagagccacagtgggctccacagaggtgagtgtggccgtgaccccagatggttacgcggatgccgtgagaggggatcgcttcatgatgccagctgagcgccgcctgcccctgagcttcgtgctggatgtgctggagggccgggcccagcaccctggagtcctctatgtgcagaagcagtgctccaacctgcccagcgagctgccccagctgctgcctgatctggaatcccatgtgccctgggcctccgaagccctgggaaagatgcccgatgctgtgaacttctggctgggggaggcggctgcagtgacttctttgcacaaggaccactatgagaacctctactgcgtggtctcaggagagaagcatttcctgttccatccgcccagcgaccggcccttcatcccctatgagctgtacacgccggcaacctaccagctaactgaagagggcacctttaaggtggtggatgaagaggccatggagaaggcagaggtgtccaggacctgcctgctcacggttcgtgtcctgcaggcccatcgcctaccctctaaggacctagtgaccccctctgactgctacgtgactctctggctgcccacggcctgcagccacaggctccagacacgcacggtcaagaacagcagtagccctgtctggaaccagagctttcacttcaggatccacaggcagctcaagaatgtcatggaactgaaagtctttgaccaggacctggtgaccggagatgaccctgtgttgtcagtactgtttgatgcggggactctgcgggctggggagttccggcgcgagagcttctcactgagccctcagggtgaggggcgcctggaagttgaatttcgcctgcagagtctggctgaccgtggcgagtggctcgtcagcaatggcgttctggtggcccgggagctctcctgcttgcacgttcaactggaggagacaggagaccagaagtcctcagagcacagagttcagcttgtggttcctgggtcctgtgagggtccgcaggaggcctctgtgggcactggcaccttccgcttccactgcccagcctgctgggagcaggagctgagtattcgcctgcaggatgcccccgaggagcaactaaaggcgccactgagtgccctgccctctggtcaagtggtgaggcttgtcttccccacgtcccaggagcccctgatgagagtggagctgaaaaaagaagcaggactgagggagctggccgtgcgactgggcttcgggccctgtgcagaggagcaggccttcctgagcaggaggaagcaggtggtggccgcggccttgaggcaggccctgcagctggatggagacctgcaggaggatgagatcccagtggtagctattatggccactggtggtgggatccgggcaatgacttccctgtatgggcagctggctggcctgaaggagctgggcctcttggattgcgtctcctacatcaccggggcctcgggctccacctgggccttggccaacctttatgaggacccagagtggtctcagaaggacctggcagggcccactgagttgctgaagacccaggtgaccaagaacaagctgggtgtgctggcccccagccagctgcagcggtaccggcaggagctggccgagcgtgcccgcttgggctacccaagctgcttcaccaacctgtgggccctcatcaacgaggcgctgctgcatgatgagccccatgatcacaagctctcagatcaacgggaggccctgagtcatggccagaaccctctgcccatctactgtgccctcaacaccaaagggcagagcctgaccacttttgaatttggggagtggtgcgagttctctccctacgaggtcggcttccccaagtacggggccttcatcccctctgagctctttggctccgagttctttatggggcagctgatgaagaggcttcctgagtcccgcatctgcttcttagaaggtatctggagcaacctgtatgcagccaacctccaggacagcttatactgggcctcagagcccagccagttctgggaccgctgggtcaggaaccaggccaacctggacaaggagcaggtcccccttctgaagatagaagaaccaccctcaacagccggcagratagctgagtttttcaccgatcttctgacgtggcgtccactggcccaggccacacataatttcctgcgtggcctccatttccacaaagactactttcagcatcctcacttctccacatggaaagctaccactctggatgggctccccaaccagctgacaccctcggagccccacctgtgcctgctggatgttggctacctcatcaataccagctgcctgcccctcctgcagcccactcgggacgtggacctcatcctgtcattggactacaacctccacggagccttccagcagttgcagctcctgggccggttctgccaggagcaggggatcccgttcccacccatctcgcccagccccgaagagcagctccagcctcgggagtgccacaccttctccgaccccacctgccccggagcccctgcggtgctgcactttcctctggtcagcgactccttccgggagtactcggcccctggggtccggcggacacccgaggaggcggcagctggggaggtgaacctgtcttcatcggactctccctaccactacacgaaggtgacctacagccaggaggacgtggacaagctgctgcacctgacacattacaatgtctgcaacaaccaggagcagctgctggaggctctgcgccaggcagtgcagcggaggcggcagcgcaggccccactgatggccggggcccctgccacccctaactctcattcattccctggctgctgagttgcaggtgggaactgtcatcacgcagtgcttcagagcctcgggctcaggtggcackgtcccagggtccaggctgagggctgggagctcccttgcgcctcagcagtttgcagtggggtaaggaggccaagcccatttgtgtaatcacccaaaaccccccggcctgtgcctgttttcccttctgcgctaccttgagtagttggagcacttgatacatcacagactcatacaaaaaaaaaaaaaaaaaa

SEQ ID NO: 244 - DNA, 3328 bp, Homo sapiens
gcgaagtgggcctcgctctcccgggttagcagccgtagccagatccgttgaaaggagtgcagagaggtctcattgcgctcccgaacagacctgacgtagatccgaagtggcccgcgccatctcaactatgaggggacacccgtaggcggcgggagagggacgccgcgaggagccaataaagctccgcaaccggaagtgtcttctgggaggggtcgtacccggaagtgtggcacctcccgggccgcacccggaagtgtgatgccaccgccgctacggggaagtaatggtatccggccaattgagattcggagttaaaacagggatgtgcagatggaggtcggaggagacactgctgccccggcccccgggggcgcggaggacttggaggacacgcagttccccagtgaggaagctagagaaggtggaggggttcacgcggtcccgccggatcccgaagacgagggcctggaggaaacaggatccaaggacaaggaccagccacccagcccatcaccaccgccccagtcagaggccctgtcaagcacctctcggctctggagtcctgcagcccctgagaatagtcccacatgtagccctgagagtagctctggaggccagggcggggaccccagtgatgaggagtggcgcagccagcggaagcatgtgtttgtgctgagtgaggctggcaagcccatctactcgcggtatggtagtgtggaggcgctgtcggctaccatgggtgtaatgaccgccctggtgtcctttgtgcagagtgcgggagatgccatccgtgccatctacgctgaggaccacaagctggtgttcctacaacagggcccactgttgctcgtggccatgtcacggacttctcagtcagcagcccagctgcggggggagctgctagctgtgcacgcacagatcgtgagcacacttacacgtgcaagtgtcgcccgcatcttcgcacacaagcagaactatgacctccgccgcctgctggctggttcagagcgcacactggaccgacttctggacagtatggagcaggacccaggagccctgctcctgggtgccgtgcgctgtgtgccccttgcccgcccgctgcgagacgcactaggtgcgctcctccgacgttgcacagcgcctggcctggcgctgtcagtgctggcagtaggcggtcgacttataacagcagcccaggagcgaaatgtgctggccgagtgccggctggacccagctgacctgcagttgctgctcgactgggtgggtgcaccagcctttgcggcgggtgaggcttgggcacctgtgtgcctgccccgcttcaaccctgatggttttttctacgcctacgtggcccgcctggatgctatgcctgtctgcctgctgctgcttggcacccaacgtgaagccttccatgccatggccgcctgccggcgcctggttgaagatgggatgcatgcccttggtgccatgcgtgcccttggggaggctgccagcttctctaatgcctcatcagccagtgctcctgcctacagcgtgcaggctgtcggggcgccgggcctccggcacttcctgtataagccgctggacatccctgaccaccaccgccaactgccccagtttaccagccctgagctagaggccccctacagcagagaggaggagcggcagcggctgtcggacctgtaccaccgcctgcatgctcgtctccacagcacctcccgacccctgcgcctcatttaccacgtggctgagaaggagacactactggcctgggtgacctccaaattcgagctctatacctgcctcagccctctggtgaccaaggcaggtgcaatcttggtagtgaccaaactcctgcgctgggtgaagaaagaggaggaccggctcttcattcgttacccacccaagtactccacaccaccagccacctctacggaccaagctgcccataatggcttgttcactggactctgatagttggagctcccagaccaggcagtgctgggagcaaccacctttgttttttaccttctgtctaccctggaaatgtgtgtgggggtgtgtctgtggccagtcattgtctccctaagcaatggggcaaggtctgagggcccaccgatgagagagatggtggcagccgccaggcgagcaggctgctttccctgcccagtcatgcacctccccctctggggaaatccttaggcctccctctcccttccctctgtctcatctcctccacttggatgatgctctagcctctgtcagggactgtcccctccaaacttgcttccgtggtctgcctcctagttgaatctcagccctgagtgtccagatctggccaaggtgtctagggtggcccacgggggtgctggaattggcacttcagggccaggctatgcttgggactggcctgagggtattttaaagaaaaaaactacataaaaggcctaaaagtaagacccacaaggatattcctttgcccttcttgtacttttttcatctttaccctgccagaaatgacccgccctcaatgctggctgctgctaacattaatgagaaggtggccttcagtgtccacctgtggaacccaggacacagcacctgactgcacacagtggctgaaatccagcatttttacataggagatgcacttagcctctaagcctcgttttactcatctgtgaaacagagataagtaaccctctctcatgaactctttgatgaggatttgtaaacgaaaacagactcgaactattgtgtaccaccacatagcacatgcacgtctgtcccagactttgacaacctgcacaagacaagcagcctaaagcaggagagacctccctagggttttgtgtgtgtgcacactaccctcactccccaactggccattaccctagttctgcccttgtttgtggagttacagcctcaaggttgtagcatgtgtgctggcaatcagggccgcagtgtgttctgcgcctgcccagagctgactcctgatttaaccgctggcgtaaccgcgggttgcacgcatgcgtgctgaaaagcctttcaccctcacgtggtttcttttttaaccagtcatcaagcgaggctcgcgcgcaggccccgcgttggaaaatggcggggaagctgaaacctctgaatgtggaggcgccagaagctgctgaggaggctgaaggtagtgagggcaagtgggctgcactcctttctctccaaccagggcagaaaggagggaggattcgtcccattacaataatgaaataatgatattctaatttttttaaataaaatgttaagccttttgttattgaaaaaaaaaaaaaaaaaa

SEQ ID NO: 245 - DNA, 2334 bp, Homo sapiens
agattcgcacaaacccggaagcgggtcgcgtggagtgacggtcccaccgcggggatatctcttccaaatgcatgatgaaggagttctcatccacagcgcaaggcaatacagaagtgatccacacagggacattgcaaagacatgaaagtcatcacattagagatttttgcttccaggaaattgagaaagatattcataactttgagtttcagtggcaagaagaggaaaggaatggtcacgaagcacccatgacagaaatcaaagagttgactggtagtacagaccgacatgatcaaaggcatgctggaaacaagcctattaaagatcagcttggatccagctttcattcgcatctgcctgaactccacatatttcagcctgaatggaaaattggtaatcaagttgagaagtctatcatcaatgcctccttaattttgacatcccaaagaatttcttgtagtcccaaaacccgtatttctaataactatgggaataattccctccattcttcattacccatacaaaaattgggaagtacacatgagagaaaaatctttccaatgtaatgagagtggcaaatcctttaattatagctaactcttaaggaaatatcagataatccatttaggatagaaacaatataaatgtgaggtatgtgacaaggtctttaatcagaattgattccttgtatgccataatagatgtcacactggtaagaaaccttacagttgttatgagtgtggcaagaccttcagtcagacgtcatcctttacatgctatcgtagacttcatactggagggaaaccttacaagtgtagtgagcataacaagacctttggttgaaattcagcccttgtaattcataaggcaattcatactggagagaatccttgcaagtgtaatgaatgtggcaaggtttttaatcagaaagcacaccttgcacgtcatcatagacttcatactagagagaagccttacaaatgtgaagaatgtgaaaaagttttcagtcgcaaatcacatcttgaaagacaaaacttaaaagaggtggcgttgcccttgtttttgagaatgccctactgtgtaagtggtagtgttctttcttttttttttttttttaagacggagtctcacctgagcgagcctctgcactggccttatttattattgttattaattttttgtttttgagacggagtttcactcttattgcccaggctggagtgcaatggtgcaatcttggctcactgcaccctctgtctgttgggctcaagcgtttctcttgcctcagcctcccaagtagctgggactacaggtgcatgccaccacgcctggttaatttttgtatttatagtggagatggggtttctccatattggtcaggctggtcttgaacccttgacctcaggtcatccacccgcctcggccttccaaaacgctggatttacaggcttgagccacgcgtccggcctgaagtggtattttttagaaagtaactaaaccttttttcagtttaatgacccagggatgtatttctgaaggacttgggagcgatccttttaaggcaaacaagggagatagtacctgtatcttagtaggaaattaaataattcaaacatcaaatgtttcaaattaaaagctaccgacctttaaataattctgagccttgagaggaacgtggtcatgcaacaagagtccagtggcatgcaggcacaaggttttttcttttttgttttttgtttttttttgagacagtctcgctctgtcgcccaagctgaagtgcagtggtgcgatctcagctcactgcaagctccgcctcctgggttcacgtcattttcctgtctcagcctccccagtagctgggactccaggcacccaccaccactcccggctaattttttgtatttttagtacagacagggtttcactgtgttagccaggatggtcttgatctcctgaccttgtgatccacccacctcagcctcccaaagtgctgggattacaggcatgaatgaccgcgcccagccgcaggcgcaacttttttgagttttcctggccaggcgcagtggctcaagcctgtaatcccagcattttgggaggccgaggtgggcggatcacttgaggtcaggagttagaaaccagcctggccaacgtggtgaaaccccgtctccagtaaacatacaaagccattacagggcatggtggggcacgcctgtattcccagctacttgggaggctgaggcaggagaactgcttgatccggggaggtggaagttgcagtgggccaagatcatgccactgcaccccagcctgggcaacagagcaagactccgtacc

SEQ ID NO: 246 - DNA, 2752 bp, Homo sapiens
acagtgtcatggaggccgcggcggtgacggtcacccggtcggctacacggcggcggcggcggcagctgcaggggctggcggccccggaggcggggacgcaggaggagcaggaggatcaggagccgcggccgcggcggcggcggccgggaaggagcatcaaagatgaagaagaagagacagtctttcgagaggtggtcagtttttccccggaccccctgccagttagatattatgacaaggacaccaccaaacctatcagcttttacttgtcttcgctggaggagctcttggcgtggaagccccgcttggaggatggctttaatgtggccctggagcccctggcgtgtcgccagccccctctgagcagccagaggccccggactttgttgtgtcatgacatgatgggcgggtacctggacgacaggttcattcagggctcggtggtgcagactccctatgctctctaccactggcagtgcatcgacgtctttgtgtacttcagccaccacaccgtcaccattcccccagtgggctggaccaacactgcccacaggcatggggtctgcgtgctggggactttcatcacagagtggaatgaagggggaaggctctgtgaagccttcctggccggggatgagcgctcgtaccaggcagtggctgaccggctggtccagatcactcagttttttcgttttgatggctggctgatcaacatcgagaactcgctgagtctggccgctgtggggaacatgcctcctttcctgcggtacctcaccacacagctgcaccggcaggtcccagggggcctggtgctctggtatgacagcgtggtgcaaagtgggcagctcaaatggcaagacgaactcaaccagcacaacagggtcttctttgattcctgcgacggcttcttcactaactataactggcgggaggagcacttggagcggatgctggggcaggctggggagcgccgggctgatgtgtacgtgggcgtggatgtgtttgctcgggggaacgtggtcggaggccgattcgacacagacaagtcgttggagctgatccgaaagcatggcttctccgtggctttgtttgcccccagctgctccgtgtttcctggcgttggcaatttactgtgctgctgagtgtgaggtcatctccggagcgttttcagcagcccctggctctgcggcgtctcttccgggctgtgggcatgcagggaagtggctgtgaggcagtctgcgctgtggccctgcctctgcccagcgagaggccgtgggctctggacaagccgcccttcaggctggggtagcaggtcagtccaggcaggaagcagcacctgccccccgcgccagcccagccccagcctgagtgcaggagctgcaggacccgcgggggcttttccagctactctgttccttcacgtcctcccttctcagcctcgtccaagcaccgggaagacctccaggctgaccccttgagcagcagtcagcacaggtgcgtgggggcgtgagggaggcagggtcttcaccacaggcgccttcctctgtccttcctgctctttcttctctgcccaggccgctgcagctgcacagcctctgctacacctgggctgcctgggaggcttcctggtgtggtgtctggaccccacggccttgggtcatcctgcggctggtctggggtggggtctgttgtggtccttccacggtgtcagtggcctgaagtccctcgcttttggggggggggtctctcacccccaggccacatagggccagtggtaggggttccctctatgtcgggcagtgctgagggctgggatgctctgtgaccccagctggagcccacacctaagggctggcatccacatcatttcaccctgcagtgagggaagaggccaccaggtggcagcacagccacacccgttcccacgtcagaggagggcaaggctgggtactcagcagccactctgagccggggctccttccaggagctgaaatccacctgtctccatcttccttgcctgcctgggtactcatgccaagcagagactgggattaggggttctgtgctcttgcctaattaggaacattctcccatgtctcttgtgtggtcccagaaggagaagtgagtttgccaaggatatggggcaggaggctccctctgctgaccccctgcagcctggagccagcccggggactgtcctgggtggagggcaggtgaacacaagctgctgccggggactgtcctgggtggacggcaggtgaacacaagcggctgccgcatgtagccactcactcgactttttttcagctgtgaccattcccgggagctctttgagcctttctgtctcatttggaaccagggggaaccaggaaggggctcctggcctctctgtgtcctctgcagtgggggttgtggggggcgcagcatccacgccttgctgcccttctttcatgaagtctgttttttaagtgctggttcccccgaatattttatgcagaggagggaaaatttatagtggcaattattttctcacagtctggtgagcaggcaattaattaggagtaagggggcctagtagagcgtggcgtgtggcagaatcgcaccgccccggctccccagcccaccgccatgcagggctcgcgtgcgggaaaactaatatgccggcgtttaagcctgtgcccctctgctgggtgtaactgctctgaaataaatgatctgacattgtgaaaaaaaaaaaaaaaaaaaaaaaaaa

SEQ ID NO: 247 - DNA, 3578 bp, Homo sapiens
acttccggacgggactcccctctgtccgcgcctcacatctccccttcctctcgcctagtcctgtgccgttttccgtccgcgactcttccggcccagagctttcggagtgcggttgctcaggggaagccgtcgccgcccccgcctcggggccgagtgagagtgcccgtcgcgtcgcgccgcgtcgccccccgggccgcctccttgccgccagtggcgggctccgttctccctcgaagcactccccccagctccatgaatggaaatcggctccgcaggacccgctggggcccagcccctactcatggtgcccagaagacctggctatggcaccatgggcaaacccattaaactgctggctaactgttttcaagttgaaatcccaaagattgatgtctacctctatgaggtagatattaaaccagacaagtgtcctaggagagtgaacagggaggtggttgactcaatggttcagcattttaaagtaactatatttggagaccgtagaccagtttatgatggaaaaagaagtctttacaccgccaatccacttcctgtggcaactacaggggtagatttagacgttactttacctggggaaggtggaaaagatcgacctttcaaggtgtcaatcaaatttgtctctcgggtgagttggcacctactgcatgaagtactgacaggacggaccttgcctgagccactggaattagacaagccaatcagcactaaccctgtccatgccgttgatgtggtgctacgacatctgccctccatgaaatacacacctgtggggcgttcatttttctccgctccagaaggatatgaccaccctctgggagggggcagggaagtgtggtttggattccatcagtctgttcggcctgccatgtggaaaatgatgcttaatatcgatgtttctgccactgccttctacaaagcacaacctgtaattcagttcatgtgtgaagttcttgatattcataatattgatgagcaaccaagacctctgactgattctcatcgggtaaaattcaccaaagagataaaaggtttgaaggttgaagtgactcattgtggaacaatgagacggaaataccgtgtttgtaatgtaacaaggaggcctgccagtcatcaaacctttcctttacagttagaaaacggccaaactgtggagagaacagtagcgcagtatttcagagaaaagtatactcttcagctgaagtacccgcaccttccctgtctgcaagtcgggcaggaacagaaacacacctacctgccactagaagtctgtaatattgtggcagggcaacgatgtatcaagaagctaacagacaatcagacttccactatgatcaaggcaacagcaagatctgcaccagatagacaagaggaaattagcagattggtaagaagtgcaaattatgaaacagatccatttgttcaggagtttcaatttaaagttcgggatgaaatggctcatgtaactggacgcgtacttccagcacctatgctccagtatggaggacggaatcggacagtagcaacaccgagccatggagtatgggacatgcgagggaaacaattccacacaggagttgaaatcaaaatgtgggctatcgcttgttttgccacacagaggcagtgcagagaagaaatattgaagggtttcacagaccagctgcgtaagatttctaaggatgcagggatgcccatccagggccagccatgcttctgcaaatatgcacagggggcagacagcgtagagcccatgttccggcatctcaagaacacatattctggcctacagcttattatcgtcatcctgccggggaagacaccagtgtatgcggaagtgaaacgtgtaggagacacacttttgggtatggctacacaatgtgttcaagtcaagaatgtaataaaaacatctcctcaaactctgtcaaacttgtgcctaaagataaatgttaaactcggagggatcaataatattcttgtacctcatcaaagaccttctgtgttccagcaaccagtgatctttttgggagccgatgtcactcatccacctgctggtgatggaaagaagccttctattgctgctgttgtaggtagtatggatgcacacccaagcagatactgtgccacagtaagagttcagagaccccgacaggagatcatccaggacttggcctccatggtccgggaacttcttattcaattttataagtcaactcggttcaagcctactcgtatcatcttttatcgggatggtgtttcagaggggcagtttaggcaggtattatattatgaactactagcaattcgagaagcctgcatcagtttggagaaagactatcaacctggaataacctacattgtagttcagaagagacatcacactcgattattttgtgctgataggacagaaagggttggaagaagtggcaatatcccagctggaacaacagttgatacagacattacacacccatatgagttcgatttttacctctgtagccatgctggaatacagggtaccagtcgtccttcacactatcatgttttatgggatgataactgctttactgcagatgaacttcagctgctaacttaccagctctgccacacttacgtacgctgtacacgatctgtttctatacctgcaccagcgtattatgctcacctggtagcatttagagccagatatcatcttgtggacaaagaacatgacagtgctgaaggaagtcacgtttcaggacaaagcaatgggcgagatccacaagctcttgccaaggctgtacagattcaccaagataccttacgcacaatgtacttcgcttaaatagtccaagtatattctctgagaggaagtactgaaagatgaattgacatacaacgtatgtttccagtgaagtcaattgagtaaggacacctccagccatacagaaaccaacactgtgtgggggccaaggtctgatccttatgttaatacaaggaagattgtttacttcatcaaggaacacagcatcattatgcaatatgaaaccagccaactgctttttgtgcggtctcctataggaagtatcgcaattgttttgttttcatttcttgtagtctaacccttttaatgcctttacctcaagttgcttggcagcacaactatctttgcaaaaaaaagtaaagaaaaagtaaatgatggtttaaaaaatacacaccttcatgaataatcaaagtgatttttcagaattatgtgtgcaaaaaattaatgtgcattcatatattcttgtaaaaggtgtctgtgtatttttaaaatatatacatccatacttcatatgcatatatatctagatctggattgataatagatatatatgtgtctgttatatattttagagttcattccattggggaattttctttcccttttattctacccccactaccgcctttatttctctatttcccttgccttcatcacctacatttttttcccagtcctaccagtgacattcaaatgttgatgtatctggttcgtttgaatataaaatatggcaaactaaaaaaaaaaaaaaaaaaaaaaa

SEQ ID NO: 248 - DNA, 3320 bp, Homo sapiens
acttccggacgggactcccctctgtccgcgcctcacatctccccttcctctcgcctagtcctgtgccgttttccgtccgcgactcttccggcccagagctttcggagtgcggttgctcaggggaagccgtcgccgcccccgcctcggggccgagtgagagtgcccgtcgcgtcgcgccgcgtcgccccccgggccgcctccttgccgccagtggcgggctccgttctccctcgaagcactccccccagctccatgaatggaaatcggctccgcaggacccgctggggcccagcccctactcatggtgcccagaagacctggctatggcaccatgggcaaacccattaaactgctggctaactgttttcaagttgaaatcccaaagattgatgtctacctctatgaggtagatattaaaccagacaagtgtcctaggagagtgaacaggtagatttagacgttactttacctggggaaggtggaaaagatcgacctttcaaggtgtcaatcaaatttgtctctcgggtgagttggcacctactgcatgaagtactgacaggacggaccttgcctgagccactggaattagacaagccaatcagcactaaccctgtccatgccgttgatgtggtgctacgacatctgccctccatgaatttctgccactgccttctacaaagcacaacctgtaattcagttcatgtgtgaagttcttgatattcataatattgatgagcaaccaagacctctgactgattctcatcgggtaaaattcaccaaagagataaaaggtttgaaggttgaagtgactcattgtggaacaatgagacggaaataccgtgtttgtaatgtaacaaggaggcctgccagtcatcaaacctttcctttacagttagaaaacggccaaactgtggagagaacagtagcgcagtatttcagagaaaagtatactcttcagctgaagtacccgcaccttccctgtctgcaagtcgggcaggaacagaaacacacctacctgccactagaagtctgtaatattgtggcagggcaacgatgtatcaagaagctaacagacaatcagacttccactatgatcaaggcaacagcaagatctgcaccagatagacaagaggaaattagcagattggtaagaagtgcaaattatgaaacagatccatttgttcaggagtttcaatttaaagttcgggatgaaatggctcatgtaactggacgcgtacttccagcacctatgctccagtatggaggacggaatcggacagtagcaacaccgagccatggagtatgggacatgcgagggaaacaattccacacaggagttgaaatcaaaatgtgggctatcgcttgttttgccacacagaggcagtgcagagaagaaatattgaagggtttcacagaccagctgcgtaagatttctaaggatgcagggatgcccatccagggccagccatgcttctgcaaatatgcacagggggcagacagcgtagagcccatgttccggcatctcaagaacacatattctggcctacagcttattatcgtcatcctgccggggaagacaccagtgtatgcggaagtgaaacgtgtaggagacacacttttgggtatggctacacaatgtgttcaagtcaagaatgtaataaaaacatctcctcaaactctgtcaaacttgtgcctaaagataaatgttaaactcggagggatcaataatattcttgtacctcatcaaagaccttctgtgttccagcaaccagtgatctttttgggagccgatgtcactcatccacctgctggtgatggaaagaagccttctattgctgctgttgtaggtagtatggatgcacacccaagcagatactgtgccacagtaagagttcagagaccccgacaggagatcatccaggacttggcctccatggtccgggaacttcttattcaattttataagtcaactcggttcaagcctactcgtatcatcttttatcgggatggtgtttcagaggggcagtttaggcaggtattatattatgaactactagcaattcgagaagcctgcatcagtttggagaaagactatcaacctggaataacctacattgtagttcagaagagacatcacactcgattattttgtgctgataggacagaaagggttggaagaagtggcaatatcccagctggaacaacagttgatacagacattacacacccatatgagttcgatttttacctctgtagccatgctggaatacagggtaccagtcgtccttcacactatcatgttttatgggatgataactgctttactgcagatgaacttcagctgctaacttaccagctctgccacacttacgtacgctgtacacgatctgtttctatacctgcaccagcgtattatgctcacctggtagcatttagagccagatatcatcttgtggacaaagaacatgacagtgctgaaggaagtcacgtttcaggacaaagcaatgggcgagatccacaagctcttgccaaggctgtacagattcaccaagataccttacgcacaatgtacttcgcttaaatagtccaagtatattctctgagaggaagtactgaaagatgaattgacatacaacgtatgtttccagtgaagtcaattgagtaaggacacctccagccatacagaaaccaacactgtgtgggggccaaggtctgatccttatgttaatacaaggaagattgtttacttcatcaaggaacacagcatcattatgcaatatgaaaccagccaactgctttttgtgcggtctcctataggaagtatcgcaattgttttgttttcatttcttgtagtctaacccttttaatgcctttacctcaagttgcttggcagcacaactatctttgcaaaaaaaagtaaagaaaaagtaaatgatggtttaaaaaatacacaccttcatgaataatcaaagtgatttttcagaattatgtgtgcaaaaaattaatgtgcattcatatattcttgtaaaaggtgtctgtgtatttttaaaatatatacatccatacttcatatgcatatatatctagatctggattgataatagatatatatgtgtctgttatatattttagagttcattccattggggaattttctttcccttttattctacccccactaccgcctttatttctctatttcccttgccttcatcacctacatttttttcccagtcctaccagtgacattcaaatgttgatgtatctggttcgtttgaatataaaatatggcaaactaaaaaaaaaaaaaaaaaaaaaaa

SEQ ID NO: 249 - DNA, 1960 bp, Homo sapiens
aagcccggcctggcggcggcggtggcggtagctgccgtggcggcctctgcgcatgctccgtcgcctgcccgccctggccgctcgccgcccgcccgcccgacggagacgcagtcccagctatctgacttcatgtgaaagatggctaatgcagaagtgagtgtcccagtgggggatgtggttgtggtacctactgaaggaaatgaaggggagaatcctgaagacactaaaacccaagtgattttgcagttacagcctgtgcaacaaggtttgtttatcgatggacacttttacaacaggatttatgaagctgggtcggagaacaacacggcagttgtagcagtagaaactcacacgatacacaaaattgaagaagggattgatacaggcactatagaagcaaatgaggatatggaaattgcttaccccataacttgtggggagagcaaagccatcctcctctggaagaagtttgtatgtccaggaataaacgtgaagtgtgtcaagttcaatgatcagttgatcagccccaagcactttgttcatctggctggcaagtccactctgaaggactggaagagagctattcgtctgggtgggatcatgctcaggaaaatgatggactccggacagattgatttttaccaacatgacaaagtttgctccaatacctgcagaagcaccaaatttgatcttctgatcagcagtgcaagagctccagtgccaggacagcagacaagtgtggtgcagacacccacttcggctgatggtagcatcacgcagattgccatctcagaagagagcatggaagaggcagggctggaatggaactcagctctcaccgctgctgtcaccatggccacggaggagggtgtaaagaaagactcagaggaaatttcagaggacactttgatgttctggaaaggaatagctgatgtagggctgatggaagaggttgtctgcaatatacagaaggaaatagaggagctactcaggggagttcagcagcggctcatccaggctcccttccaagtcacagatgctgctgttctcaacaatgtagcacacacatttggcctaatggacacagtcaagaaggttttagacaacagaaggaaccaagtagagcagggagaagaacagtttctctatactctgacagacttggaacgccagttggaggagcagaagaagcaaggccaggatcacaggctgaaatctcagacagttcaaaatgtggtactgatgcctgtgagcactcctaagcctccaaaaaggccccggctccagcggccagcctccaccactgtcttgagcccttctcctcctgtccagcagcctcagttcacagtcatctcacccatcaccatcaccccagtgggtcagtcattttccatgggcaatattccagtggccaccctcagccagggctccagtcctgtgactgtccacacactgccttctggccctcagctcttccgctatgccacagtggtctcctctgccaagagcagctcaccagacacagtgaccatccacccttcatctagcttggcgctgctgagctctactgccatgcaggatgggagtacactgggcaacatgaccaccatggttagccctgtggaattggtggccatggagtccggcctaacctcggcaattcaggctgttgaaagcacctcagaggatgggcagaccatcattgagattgatccagccccggacccagaagctgaagatactgagggcaaagcagtcatcttggagacagagctgaggactgaggagaaagttgtggctgagatggaagaacaccagcatcaagttcacaatgtggagattgtggtcttagaggattaactggggatctcagggccaggagttatgttttgatttggaattttaattatttgtttatttttatcattgtcccactcatttccacataggaccctttttt

SEQ ID NO: 250 - DNA, 1944 bp, Homo sapiens
aagcccggcctggcggcggcggtggcggtagctgccgtggcggcctctgcgcatgctccgtcgcctgcccgccctggccgctcgccgcccgcccgcccgacggagacgtcccagctatctgacttcatgtgaaagatggctaatgcagaagtgagtgtcccagtgggggatgtggttgtggtacctactgaaggaaatgaaggggagaatcctgaagacactaaaacccaagtgattttgcagttacagcctgtgcaacaagggatttatgaagctgggtcggagaacaacacggcagttgtagcagtagaaactcacacgatacacaaaattgaagaagggattgatacaggcactatagaagcaaatgaggatatggaaattgcttaccccataacttgtggggagagcaaagccatcctcctctggaagaagtttgtatgtccaggaataaacgtgaagtgtgtcaagttcaatgatcagttgatcagccccaagcactttgttcatctggctggcaagtccactctgaaggactggaagagagctattcgtctgggtgggatcatgctcaggaaaatgatggactccggacagattgatttttaccaacatgacaaagtttgctccaatacctgcagaagcaccaaatttgatcttctgatcagcagtgcaagagctccagtgccaggacagcagacaagtgtggtgcagacacccacttcggctgatggtagcatcacgcagattgccatctcagaagagagcatggaagaggcagggctggaatggaactcagctctcaccgctgctgtcaccatggccacggaggagggtgtaaagaaagactcagaggaaatttcagaggacactttgatgttctggaaaggaatagctgatgtagggctgatggaagaggttgtctgcaatatacagaaggaaatagaggagctactcaggggagttcagcagcggctcatccaggctcccttccaagtcacagatgctgctgttctcaacaatgtagcacacacatttggcctaatggacacagtcaagaaggttttagacaacagaaggaaccaagtagagcagggagaagaacagtttctctatactctgacagacttggaacgccagttggaggagcagaagaagcaaggccaggatcacaggctgaaatctcagacagttcaaaatgtggtactgatgcctgtgagcactcctaagcctccaaaaaggccccggctccagcggccagcctccaccactgtcttgagcccttctcctcctgtccagcagcctcagttcacagtcatctcacccatcaccatcaccccagtgggtcagtcattttccatgggcaatattccagtggccaccctcagccagggctccagtcctgtgactgtccacacactgccttctggccctcagctcttccgctatgccacagtggtctcctctgccaagagcagctcaccagacacagtgaccatccacccttcatctagcttggcgctgctgagctctactgccatgcaggatgggagtacactgggcaacatgaccaccatggttagccctgtggaattggtggccatggagtccggcctaacctcggcaattcaggctgttgaaagcacctcagaggatgggcagaccatcattgagattgatccagccccggacccagaagctgaagatactgagggcaaagcagtcatcttggagacagagctgaggactgaggagaaagttgtggctgagatggaagaacaccagcatcaagttcacaatgtggagattgtggtcttagaggattaactggggatctcagggccaggagttatgttttgatttggaattttaattatttgtttatttttatcattgtcccactcatttccacataggacccttttttaaaaaaaaaaaaaaaaa

SEQ ID NO: 251 - DNA, 4876 bp, Homo sapiens
cgcgacccggccctggcgcccgagaggattcctgggtgggggtgggcgtggagggccgggggctggagaggcactcggccccggagagtgcagcagacagggctggtcccgaggtggatgcggccccggaaaatgggcggctggggggtgtccagggagtagggtcgggtcggagtatatggaccaccgggcccggagggtccgagccgagagcggagcctgcaccctccacctcccgcccttcgggaaatatcagaactgagccaggaggcaggtgcaccgggaaaatgtgtctgagtcctgcttggcagaagagaaactgagtcaccagcttaggagtcgcagggtcagcgggcctgaagggggctgggtctgtctgcggtgcggaggattgggtgggcctgtgtgagccgaggtggccgctggctggagattggtttgcacttcttggctgggttcccccgtgctccatgactcctgcatctcctgattgtttctcgttggtttggagttgtccctgcggttggagccatctgagcttgtagggtcgaggcccaggaggaaggggagggttcaccgacttacagcctggctgtaggtttgaacaggagtctgaggtcgctgagggtttggggaggcttttctgagctgctctggccccagtcctggggctgtcaccttccagtattgcgtggcgggaggagcgctaacaagagccaagggttgtaaattccacacccagctctgccactttctagttgtaagaccttgagagggctcctcctttctctaatttctattttagaaaattggaacaataatattcttctcccacatgaagatagtaacaatggcagtcgttcagcggatgcttactttgcgttcagcgctgacataccccattccatgtaattctctcaacatttcgaggggagggatcattagctttgtttaacagatagaaaaacggaggctcagagaggacgtggaatttgttcaagataacatcgctcataaggtggctggactgggtgctcataaggtggtttgagccctggtctgactcaagtccatggccttaaccagaaggctaacctgcctttagggcatactccccagtgggagaagaggaaggtgaaaaatcctagggccccagctctccctgtgatgttttgtttacgtgaggccagcaaagacttgacctgagccaacccagtttctcctctggggcccctgcggcctctggccccagactgaagggataccaaagaagtgggctgtagctatttcacatctccttcacgcagtgcgtgggtgctggactctggggtcagctttcaagacaattactgttttggtccatcatgcatccatcctcattaatgaatcggccccctccaaagagttggaccctaagatgcgtgaggcaggctctctaaggtctagaatcccagctcctctctagccccctgcgagctggggcggtgaggtgctatggctgaggctggcccagccgggccctggggacagggactatgaagtggggaaaacagtagacttggagttctgaaacttttctgagcttcggtttcctcatctgttcgagaggtctttgaaacctctcagggaaaggtaagataaccaagtgggagcctctagaatggctcatgggaagtgtgacatgaatattggaggatccgatgtagagggggggtgatctggaaaagttcccttttttagggggaaggtgctccaaagccctctactgctggatccaaagctaaggaaagtgggggcaaatgtggcaggctcggggcaggttagacgctggggagccagttggctggggcctgcagggtgccaggatctgggagagggaagggaggtgttgggctcccttccccattgctctctgcggagtctgaagtagggtcggacgtctctggctgggggtgggatgcagcctccggtgcgccctcagcagtgaccctcgtgtgtgcctctctcttcctttcgcagctgctgccgcccacccctcgtcttctggctgcctccctctttgtgccccacaggctccccctctccacctcctggggcccatcatgaatggtgccccttccccagaggacggggcctccccctcgtctcccccgctgcccccacccccgccccctagttggcgggagttctgtgagtcccacgcccgggctgcggctctggactttgcccgccgttttcgcctctacctggcctcccacccccaatatgcggggcccggggccgaggctgccttctcccgccgttttgctgagctcttcctgcagcactttgaagccgaggtggcccgggcctctggctccctgtcgccacccatcctggctcccctgagccctggtgcggagatttcgccacatgacctgtcccttgagagctgcagggtgggtgggcccctggctgtgctgggcccttctcgatcatctgaggacctggccggccccctcccttcctcagtctcttcctcctctacaacctcctccaagccgaagctcaagaagcgcttttccctgcgttcagtgggtcgctctgtccgaggctcagtccgtggcatcctgcagtggcgggggaccgttgaccctccctcctccgctgggcccctggagacctcgtcaggccccccagtcttaggtggaaacagcaactccaactcctctggcggggctgggaccgttggtaggggactggtcagtgatggaacgtcccctggggaaagatggactcaccgttttgagaggctgagactcagtcggggagggggcgccttgaaggatggagcagggatggtgcagagggaagagctgctgagtttcatgggggctgaggaggcagcccctgacccagccggagtgggccggggaggaggggtggctgggcctccttcagggggaggagggcagcctcagtggcagaagtgtcgcctgctgcttcgaagtgaaggagaaggaggaggaggaagtcgcctggagttctttgtaccacccaaggcctctcggccccgactcagcatcccctgctcttctatcacagacgtccggacaaccacagccctggagatgcctgaccgggagaacacgtttgtggttaaggtggaaggtccatccgagtatatcatggagacagtggatgcccagcatgtgaaggcctgggtgtctgacatccaagaatgcctgagcccaggaccctgccctgctaccagtccccgccccatgaccctccctctggcccctgggacctcattccttacaagggagaacacagacagcctggagctgtcctgcctgaatcactcggagagtctacccagccaggacctgctgcttggacccagcgagagcaatgaccgcctgtcgcagggggcatatgggggcctctcagaccgcccctcggcatccatctcccccagctctgcctccattgccgcctcccattttgactcgatggaactgcttcccccagagttgcccccccgcatccccattgaagagggacccccagcagggacagttcatcccctctcagccccctaccctcccttggacactccggaaacagccacagggtccttcctgttccagggggagccagagggcggtgagggggaccagcccctctcagggtatccttggttccacgggatgctctctcggctcaaggctgcacagttggtgctgactggcggcactggctcccacggtgtcttcctggtgcgccagagtgagacaaggcggggtgaatacgtcctcaccttcaacttccagggcaaggccaagcacctgcgtttgtcgctgaacgaggagggtcagtgccgggtccagcacctgtggttccagtccattttcgatatgctcgagcacttccgggtgcaccccatccctttggagtcgggaggctccagtgatgttgtccttgtcagctatgtcccatcctcccagcgacagcagggccgggagcaggctgggagccatgcgggggtgtgcgagggagatggatgccaccccgatgcctcctgcaccctcatgcccttcggagcgagtgactgtgtaaccgaccacctcccatgacccaccccagccccctgaacccccttcatggacagatcccccacagcctggggcagaagaggcgtcgagggcgccagaagtggcggcagcagcagccgcagcagccaaagagaggcaagagaaagagaaagcgggcggtggaggggtcccggaagagctggtccccgtggttgagctggtccccgtggttgaattggaagaggccatagccccaggctcagaggcccagggcgctgggtctggtggggacgcgggggtgcccccaatggtgcagctgcagcagtcaccactagggggtgatggagaggaagggggccaccccagggccattaacaaccagtactccttcgtgtgagccaaccccacccgctccaccctttttaaaccccccagccctgctcgtgagattgggctgggtagggacagaggaggccgaaatccctcccccatgcttcctgacccttgttggccaagggcatctttgatggtacaagcagaggctcgggagaggctcccgtcacacactacaggtcccctccccagggcaggggatttgggctccatgagctccttgaggggctcttctggtcagccccaccctgggggccatttccccattaactacccccagcccgaggcagggtgagggggaagggctgtcagttacattaaggtggttgttgttgttgttttaaacaaaatggagaagcataaataaataaaaaggtttatctcggttcaaaaaaaaaaaaaaaaaa

SEQ ID NO: 252 - DNA, 695 bp, Homo sapiens
acacaagaagggtaggagagaaaagccatggccgacaaggtcctgaaggagaagagaaagctgtttatccattccatgggtgaaggtacaataaatggcttactggatgaattattacagacaagggtgctgaaccaggaagagatggagaaagtaaaacgtgaaaatgctacagttatggataagacccgagctttgattgactccgttattccgaaaggggcacaggcatgccaaatttgcatcacatacatttgtgaagaagacagttacctggcagagacgctgggactctcagcagctcttcaggcagtgcaggacaacccagctatgcccacatgctcaagcccagaaggcagaatcaagctttgctttctagaagacgctcaaaggatatggaaacaaaagttgcagaggtgccatgttcagaatacaataataaagtggagtgaaagatatacttcaggcagttttgaaatgcagtggctttttcttagaaccaattttattgagcggttctggaggaacatacttctgctccccttgcataaaggatctctatatcctagaatcccaggtttaggtaaagagttgcaaactggaactcataaattatcatagtcttcacccagtctgtctcttagaatttatttcccactgacacaaacaagccattttgtctgcttgtataaccc

SEQ ID NO: 253 - DNA, 758 bp, Homo sapiens
acacaagaagggtaggagagaaaagccatggccgacaaggtcctgaaggagaagagaaagctgtttatccattccatgggtgaaggtacaataaatggcttactggatgaattattacagacaagggtgctgaaccaggaagagatggagaaagtaaaacgtgaaaatgctacagttatggataagacccgagctttgattgactccgttattccgaaaggggcacaggcatgccaaatttgcatcacatacatttgtgaagaagacagttacctggcagagacgctgggactctcagcaggtccgatacctggaaattagcttagtacacaagactcccaattactattttcttccttcccagctcttcaggcagtgcaggacaacccagctatgcccacatgctcaagcccagaaggcagaatcaagctttgctttctagaagacgctcaaaggatatggaaacaaaagttgcagaggtgccatgttcagaatacaataataaagtggagtgaaagatatacttcaggcagttttgaaatgcagtggctttttcttagaaccaattttattgagcggttctggaggaacatacttctgctccccttgcataaaggatctctatatcctagaatcccaggtttaggtaaagagttgcaaactggaactcataaattatcatagtcttcacccagtctgtctcttagaatttatttcccactgacacaaacaagccattttgtctgcttgtataaccc

SEQ ID NO: 254 - DNA, 1290 bp, Homo sapiens
gcggcggcggcggtagaggcggcggcggcggcggcagcgggctcggaggcagcggttgggctcgcggcgagcggacggggtcgagtcagtgcgttcgcgcgagttggaatcgaagcctcttaaaatggcagatgacttggacttcgagacaggagatgcaggggcctcagccaccttcccaatgcagtgctcagcattacgtaagaatggctttgtggtgctcaaaggccggccatgtaagatcgtcgagatgtctacttcgaagactggcaagcacggccacgccaaggtccatctggttggtattgacatctttactgggaagaaatatgaagatatctgcccgtcaactcataatatggatgtccccaacatcaaaaggaatgacttccagctgattggcatccaggatgggtacctatcactgctccaggacagcggggaggtacgagaggaccttcgtctccctgagggagaccttggcaaggagattgagcagaagtacgactgtggagaagagatcctgatcacggtgctgtctgccatgacagaggaggcagctgttgcaatcaaggccatggcaaaataactggctcccaggatggcggtggtggcagcagtgatcctctgaacctgcagaggccccctccccgagcctggcctggctctggcccggtcctaagctggactcctcctacacaatttatttgacgttttattttggttttccccaccccctcaatctgtcggggagcccctgcccttcacctagctcccttggccaggagcgagcgaagctgtggccttggtgaagctgccctcctcttctcccctcacactacagccctggtgggggagaagggggtgggtgctgcttgtggtttagtcttttttttttttttttttttttttttaaattcaatctggaatcagaaagcggtggattctggcaaatggtccttgtgccctccccactcatccctggtctggtcccctgttgcccatagccctttaccctgagcaccaccccaacagactggggaccagccccctcgcctgcctgtgtctctccccaaacccctttagatggggagggaagaggaggagaggggaggggacctgccccctcctcaggcatctgggagggccctgcccccatgggctttacccttccctgcgggctctctccccgacacatttgttaaaatcaaacctgaataaaactacaagtttaatatgaaaaaaaaaaaaaaaaaaaaaaaaaaaaaaaaaaaaaaaaaaaaaaaaaaa

SEQ ID NO: 255 - DNA, 5639 bp, Homo sapiens
gttgcgcgcgagccacctcccctgctggcgcttcctgtcgctaccgctgcggcccagggcccgcgggagcccagggcggtgccgggtgagacaaggccggggtttggctcggattcaccgcgaggtatctaggctgccatgatgccagggccaagacctcggaagggccctcaggccagaggccaaggggtggccgctgccaagcagatggggctctttatggagtttggccctgaggacatgctgctgggcatggatgaggctgaagatgatgaggacctggaggctgagctgctggctctcacaggggaagcacaaaccacaggcaagaagccagcacccaaggggcaggcccccctgcccatggcccacatcgagaagttggcggcagactgtatgcgggatgtggaggaggaggaggaggaggaagggctggaggaagatgcagagctgctgacggagctgcaggaggtcttaggtgtggacgaggagactgagcccctggatggtgatgaggtagctgacccaggcggctctgaggaggagaacggcctagaagacactgaacctccagtgcagacagccgtcctgacagcttcagccccagcagctcaggccggagcatctcaggggctacacgctttgctggaggaacggattcacaactaccgagaggctgcggccagtgccaaggaggcaggcgaagcagccaaagccaggcgctgcgagcgcggcctgaagaccttggagtcgcagctagcctctgtgaggagaggcagaaagatcaatgaggatgagatcccacctccagtggccttaggaaagcggcccctggccccccaggaaccagccaacaggagccctgagacagaccctccagctccccctgccttggagtcagacaacccctcccaacctgagaccagcctccctggcatttctgcccagcccgtttcagacttagacccagacccgcgggccctgctgtcatcccgacagagagagtacaaagtggctgccctcagtgccaagcgggctggagagctagaccgtgcccgagagctcatgaggattgggaagagattcggtgctgtcctggaggccctggagaaggggcagcccgtggatctgagtgccatgcccccggcacctgaggatctgaagccccagcaggcttctcaggctcccacagcaccctcagtcattcccccagccgtggagcgagtgcagccagtgatggcccctgacgtcccagcaaccccagtggcccctacagagtcacagacagtgctggatgccctgcagcagaggctgaacaagtaccgcgaggcgggcatccaggcccggagtggtggggacgagcgcaaggctcggatgcatgagcgcattgccaagcaatatcaagatgctattcgagcacaccgagcaggacggaaagtcaactttgctgaattgcctgttcctccaggatttccccccatccctggcctggagtccactatgggtgttgaggaggacgcagtggcagcgacattggcagctgcagagaaactggcctctgcagaggattcagccccggctgataaagacgaggacgagcctcctgggcacctgcagggtgagcccccagcacaggccccagtggccaagaaacctgcacggcccacagtcccttcatcccagcgcctgcctgagcccagggcctcaagttctaaggagtcaccgagtccatctgtgcgggagcagctggcactgctggaggcacggaaactgcagtatcagcgggcagccctgcaggccaagcgcagccaggacctggagcaggccaaagcctatctgcgggtagccaaatggcttgaggctcagatcatccaggcccgatctggcagacctgttgatctgtccaaggtgccttcgcccttgacggatgaggagggtgacttcatcctcatccaccatgaggacctgcgactctcccagaaggcggaggaggtgtatgcccagctgcaaaaaatgcttctggagcaacaagagaagtgcctgctgttctccaagcagttcatgcaccagggcaacgtggctgagaccacccgatttgagaagcttgctcaggaccgcaagaaacagctggagatcctgcagctggcccaggctcagggcctcgaccctcccacccaccactttgagttgaagacattccagactgtgaggatcttctcagaactcaacagcacagaaatgcatctgatcattgtccggggaatgaacctcccagcccctccaggggtgactcccgatgacctggatgcttttgtgcggtttgagtttcactaccctaactcggaccaggctcaaaaaagcaaaacagctgtggtgaagaacacaaactctccagaatttgatcaactcttcaaactaaacatcaaccgaaaccaccggggcttcaagagggtgatccagagcaaaggcatcaagtttgagatcttccacaaagggtccttcttcagaagcgacaagctggttggcacagcacacctgaaactggagcggctggagaatgagtgtgagatcagagaaattgtggaggtcctggatggaaggaagcccaccggggggaagctggaggtgaaggtgaggctgcgggagcctctgagtggccaggatgtgcagatggtcactgagaactggctggttctggagcccaggggcttgtgaggtgggcagctctctgggccttcagaacctttgccccctccttttactcaactaactactcaactcatatctggagagaaaacctaggagtttctcatctatgagaaagacctaccatgctgggtagggcttatgggctgagtttctgatgttcctcagtagaactgggaagagaaggtaaccttccaaggtttaactatctatctatctatctatcttcaggaaaccctttctaaaatctttgtgttttcactgcagtttagactgacttcttgtgctttgcacccctgtgtagccgatggccagcaccaggagaggagtcaggccgcgactgtgcaggagatgactttcccagctttgctggcttcagaagcctttgtacataagagatgctgctacccaagcaccaaagacctgttaagcatgtgcactactgaccacgactctggtctttcctgttgttggcccctctggggctctacagaaacaggctgggttccaggagcccatctccccgctgtctccccctgccccgagtctggaagagggcaaggacacttccattcctctgtaccatggagtcctgcagccccttaacccctgcgtggcaactgtgtacagcttacccctgcctccagttgcaccacttctagatgtgcctttaaaagatctaactatgggatgggagaacttgagggtgatcgggaacctcccctgctgagggtggtgtcagggttccgtgactccagtgggccagtggtagcctgtcccagacaactccgtcaccccagctctgcctgtgcctttatccctgacagctgctgcactagccttcctgcttccctaaggacttagtggagggggaaagttgtttttggtactacttggtgggaagtaaggggaaggttggatcttgggtttggtctacccacccaagagaaaagactgttaactggaagaaaaaatatatatataaaattttatgtagacacgtttatttatctaggaaactaagtctaactcattgtagggattttatactcaactatacagagtatccaccaaagtcctaatctaaagtcctgctccctgtcactttttaaaagccagggtagcagtaacatgacaaacggctgctgtggcttcctcttgagagaggacagggaaagcctttcctcttcggctggttatgtggggaacttccttagtttttttccacaagaaattctcctttggctttgtttttctgaatggatggagactatgaaggggtttgtagttgtaagagatttaatattcaaaactgaaatattctgcatttcttagaaataccccatcttcccccaccccctttttgaattattaattcaagatcaacaaagcattcctcaagatcacttttaaaaaaggttagaagtgaagcaaatacattcagcttactgatcactatagtattgcataagcacagctcaagaactgagctttgtatgtgtccttttgggggataacagggctggaccatgcttccctgcccttaaacgcagagcttttagtgggtcacagagcgggaactacacacaagtgacttttttccccatgagccctctggccgattttttttttttttttttttttgagacagagtagctctctgccggccaggctggagtgcagtggcatgatctcagctcgctgcaacccccacctcccaggttcaagcgattctcctgtgtcagtctcctgagtagctgggattgcaggcgcccaccactatgcccagctaatttttttctttttagtggagacggtgtttcaccatgttggtcaggctggtctcgaactcctgacctcatgatccacccacctcagcctcccaaagtgctgggattacaggtgtgagccaccgcacccggctggccaatcttatcagaagtgagctaccaaaacttccacagatgtgagatttaacacttaattgcagtcacgtgtatgcaacacagcaataatctagaatgaaaaggagggtgattagccttcataagatgacctatagagcaaagaaaggtgactggaagggttcctaacccaacctactccccttagggtgtgtatccaacccagtgcttcctaagagggttacggaccactgtggttatcctctaaagttccagccagctctaggagtttctaaattcaggcctctgttggaaatggcctatttcgatagatagaaagttttctatagctctaaaggtttctcctttgcaacccattcaatttcagtctgctgctttgctctttcaaaacagaacctccaggctgacgaggcaagacaaagcctcccaccagacttggagattgaagttcttaaaaggcctttgttgtagccaaaggcatgcatgcgtcactggtagtaggaggagcctgtcccagcttcatcttgtcctgagatttatccacatacaggaaacaggcgggacacagtggctcacgcctgtaatcccaccactttggaaagctgaggcaggtggatcacctgaggtcaggaattcgagaccagcctggccaacatggtgaaaccccgtctccactaaaaacaaaaacaattagctgggcatggtggccggcgcctgtaatcccagctactagggaggctgagacacacgaatcccttgagcccaggaagcagaggttgcagtgagcctcgattgtaccactgcactccagcctgggcgacagagcaagactctgtctcaaaacaaacacaaatacagtatccaaacattggagattagtgactcacctgcagttgggagccagctacaacccaaatcattttaaaattttcaattctttgatctcatgcaatgcacactttcttctgaattagcaaactgaataaactacagaaattttttagaatc

SEQ ID NO: 256 - DNA, 2322 bp, Homo sapiens
gggcggggttgcaccatccggcagggcggggcccggccatggcgaccgcggagcccagcgggcgcgcgttgcggttgtctaccccgggaccccggcccagcggggctcgggaccgcgcgccgggagctgcggggccaccctccgggcagatcggtaatagagccctccgtctgggggagcgcacccccgcggccgtggaaaagcgggggccatacatggtgacgcgcgcaccctccattcaagccaagctgcagaagcaccgggacctggccaaggccgttctgcggagaaaaggcatgctgggggcctcgccgaaccgcccagactcttcagggaaaaggtcagtgaagtttaacaagggctatactgctcttagccagagtccagatgaaaacctggtgtccctcgactctgacagtgatggggagctgggatccagatactcctccgggtattcatctgcagagcaggtgaaccaggatgtgagccggcagctgcttcaggatgggtatcacctggatgagattccagatgacgaggacttggacctcatcccccctaagcccatggcctcttcaacatgctcctgctgctggtgctgtcttggggactcttcttcctgtaccctccagtagacattaccctccaaggtgggccctgctcaccatgaggcctacagagccctgttggccactcatagctcacacagtgcagtgagcactgaagtcactgacccctagaaagtgacctgcaggtagcccttacctgttgcttctcaggccagaggcccccatctgggctgtgggctgataggtagaattctgtagttttcctctgctgttggagcagagtttggagaagtcactttaataagggcaagacagaaaattctggttcttatggtgggtgacaaaggtggctaaggaaaacacttgcagacagcttgattggtatttgtcatagtgcttcagggaggcaaaaagggagctcttgtgcccaggctgtgctagatagtgttgaatggaggcagaaaatagcactttatggtttattatagctggcaatccaaaaaagaaactgtttgagaccagttcgagaaattccgtttgctctattcttcctagctctaagatggtttgcaggcttgaccttcaagacagcataaagtgagtccttttgtccctcttcaggttgcacctgtctaactatgacagggatcatagcaggttgcttaatgatacagcaggatcctggcttccagaatccctggacctggggcatccccaactggtccaaccgtccgggtgagtttagtgattctggtttgcccttccctagttagagaaaaactgctctgacatgttcatatttatttatttgtatttccttggtctgggtgagtttcttcacccagtctttgagctaaagattaggtcgaaggtactggggctggccccagaagcctgcagtttttattattaccagcagagggagctacagggagcagtccggtgccttcctattgtttactttttaaacttttgagaagtagcaatggactcgtgagagtgggtatacagctgtgtgggctttgtcctagactgaggcttacagacaggaagggtaagagagacctaagccagctcctagacccttgcctgaggaaatcagtccaccagtgtagagggcctcccttcactccagcatggaccattctattgccagattcttctggtcacagcatgggccttactggatactcaggattgggctttaagcagacctctgggtgtgacacagcctctttcagcccccagcccaaacagcagaaataggcataatttctgctgtgacaccccctacccacaaattggagagtatatcttgctatactctataccaagcctctttctagaatttttccaacaggttttgttttgttttttggcttaactcagaaccatggtgagcgttctgctttgttttgttggagacagggtctctgtcacccaggctggagtgcagtggtgtaatcacagctcactgcagcctcaacctcccaggcccaagcagtcctcccacatggtgagctttgaatgggcatagacagggttcccagcccaatagtcgggattggggtataggttctacatgggaaagtatccagtctcttgctttactcagtgtcctgtgaccaccagaggcatgagagggacaacacactcttttcgctctaccacaaggggtgactagaagatgagcaagtctaataaaaagatacggccttaaaaaaaaaaaaaaaaaaaaaaaaaaaaaaaaaaa

SEQ ID NO: 257 - DNA, 3368 bp, Homo sapiens
agttgtttgggttgagttcaggagaagcatggccaggtcgagtccgtacctgcgccaacttcagggacctctgctcccacccagggatctggtggaggaggacgacgactacctaaacgacgacgtggaggaggatgaagagtccgtgttcatcgacgccgaggagctctgcagtgggggcgtaaaggctggcagcctccccgggtgcctccgcgtttctatttgtgatgaaaacacacaagagacatgtaaagtgtttggacgttttccgataacaggtgcttggtggagagtgaaggtacaagtaaagcctgtggtgggatcaaggagctatcaatatcaagttcaaggatttccgtcttactttttgcagtctgatatgtcaccaccaaatcaaaaacatatctgtgctctctttcttaaagagtgtgaggtctccagtgatgatgttaataaatttttaacatgggtaaaggaggtatcaaactacaaaaacctaaactttgaaaatcttagggaaacactaagaactttccacaaggaaactggaaggaaagatcaaaagcagcctacacagaatggtcaggaagagttgttcctagacaatgagatgagtcttcctctggaaaacacaattccatttagaaatgtaatgacagctttgcagtttccgaagataatggaattccttccagttcttctgcctcgacactttaaatggatcatagggtcaggttctaaagagatgttgaaagagatagaagagattttaggtacacatccgtggaaacttggatttagtaaaataacctacagagagtggaaactcctgcgatgtgaggcaagttggatagcattttgtcagtgtgagtctcttctccagctgatgactgatttggagaagaatgcattaataatgtattccagactgaagcagatatgtagagaagatgggcacacatatgttgaagtgaatgacttaactttgacattgtcaaatcatatgtcatttcatgctgcttcagagtctctgaagtttttgaaggatattggtgtggtgacatatgagaagtcctgtgtcttcccttatgacctttaccatgctgaaagagccatcgccttttcaatttgtgacctgatgaagaaacctccttggcatttatgtgtcgatgtcgaaaaggtgcttgcctctattcacaccacaaaacctgagaattcaagcgatgatgcattgaatgagagcaaacctgatgaagtaagattagaaaatcctgtggatgttgtggacacacaggacaatggtgaccatatttggactaatggtgaaaatgaaattaatgcagaaataagtgaagttcagctggatcaggatcaggttgaagttccactggatcgggatcaggtggctgctttggaaatgatttgctccaatcctgtgacagtcataagtgggaaaggtggatgtgggaagaccacaatcgttagccgtctttttaagcatatagagcagttggaagaaagagaagtaaaaaaagcctgtgaagattttgaacaagaccagaatgcttcagaagaatggattacctttactgagcaaagtcaactagaggcggacaaggctatagaagttttgctcacagcacctacagggaaagcagctggcttactaagacagaaaactggtcttcatgcctacacactgtgtcaggtcaattatagcttctattcatggactcaaacaatgatgaccacaaacaaaccatggaaattttcttcggttagagttctggttgtggatgaagggagtttggtatctgtaggaatcttcaaatcggtcttaaatttattgtgtgagcactccaaactttctaagcttattatccttggtgacattagacagttacccagtattgaacctggtaacttgctgaaagatctttttgagactcttaagtcaagaaattgtgctattgagctaaagacaaaccatagagcagaatctcagctcattgtggacaatgctacaagaatctcaagacgccaatttccaaaatttgatgcagaactaaatatctctgataatccaacattacccatctcaattcaagataagacatttatttttgtcaggctcccagaagaggatgccagttctcagtcatctaaaactaatcatcactcttgtttatattctgcagttaaaactttactacaagaaaataacttacaaaatgcaaaaacatcacaatttattgcatttagaaggcaagactgtgatctaattaatgactgctgctgcaaacactacacaggccacctcaccaaagaccatcagagtagacttgtttttggaattggtgataaaatttgttgtaccaggaatgcatacctctcagacttactacctgaaaatatctctggaagtcagcaaaataatgatctagatgccagtagtgaagacttttctggtacgcttcctgattttgctaaaaataagcgtgactttgaaagtaacgttcgactgtgcaatggagagatatttttcataacaaatgatgtaactgatgtaacttttggaaagagaagatctttgaccattaataatatggctggcctggaagtaactgtggattttaagaaactaatgaaatattgtcgcataaaacatgcatgggcaagaactattcacacttttcaggggtccgaggagcaaacagttgtctatgtggtggggaaggcgggccgccagcactggcagcatgtctacaccgccgtgaccaggggccgctgccgagtgtatgtgattgcagaggagtctcagctccggaatgccattatgaaaaacagttttcctagaaaaactcgtttgaaacatttcttgcaaagtaagctctcctctagcggcgcacctccagcagattttccgtccccacggaagagctctggagacagtggaggacccagcacaccgtcagcatctccactccctgtagtcacagaccacgccatgacaaatgatgtcacctggagcgaggcctcttcgcctgatgagaggacactcacctttgctgaaagatggcaattatcttcacctgatggagtagatacagatgatgatttaccaaaatcgcgagcatccaaaagaacctgtggtgtgaatgatgatgaaagtccaagcaaaatttttatggtgggagaatctccacaagtgtcttccagacttcagaatttgagactgaataatttaattcccaggcaacttttcaagcccaccgataatcaagaaacttagttttatttcaaattgttccgagtaactatgtttttctattggagacaaaatgaacatcgtaacgtcaaagtaccaa

SEQ ID NO: 258 - DNA, 2795 bp, Homo sapiens
gggcggctgggaccggcctggggtagctgcgcagcaggtgggtcggtcccggggatgcagcgcgggggtcagagagcgaccccaacagggtagacggtgaggacgcctcagtgggcagcgttagggaaaggggccagggtgttcccggggttggggtgcgagcccccgctgtgcgtccaggaggccgagggtctggcatcccttcgcgtggagtgcggggcaggggccgggtccccccggaggtggctgagatccagatcggtgaggggccctgcaggcaggtctgtgggttctggcaccacctgagcccactgggcatctggtcatccctggcacctctcctttggagccaccttgtccctggctagacagtcacattttccagtgccgttttggaaagatgttgcctttggagaaggcgtttgcctcccccaggagctccccagccccgccggatctgcccacgccggggtcagcagccggagtccagcaggaagaacccgagaccatccctgagaggacccctgctgacctggagttctcccgcctgcgtttccgggaatttgtctaccaggaggctgccgggccccaccagaccctggcccggctgcatgagctgtgccgccagtggctgatgcctgaggcgcgctccaaggagcagatgctggagctgctggtgctggagcagttcctgggcatcctgcctgataaggtccggccctgggtggtggcacagtaccctgagagctgcaagaaggcagcctccctggtggagggcctcgctgatgtcctggaagagccagggatgctgctgggctcccctgcgggctcatcctcaattcttagcgatggagtgtacgagaggcacatggaccctctgctgctaccaggcgagctcgcgagccccagccaggcccttggagctggggagatcccggcaccttctgagacaccctggctttctccggaccccctgtttctggaacagaggagggtcagagaagcaaagaccgaagaggacggccctgccaacaccgagcagaagctgaagtcctttccagaggaccctcagcacctgggggagtggggccacctggaccctgccgaggagaacctgaagagctaccggaagctgctcctgtgggggtatcagctttcccagcctgacgctgcctccaggctggacactgaggaactccggttggtggaaagagatccacaaggaagcagcctcccagaaggcgggaggcggcaggagagcgctgggtgcgcctgcgaggaggccgcccccgcgggggtgctgcctgagctgcctacggaggcgccccctggggacgcccttgccgatcccccgtcgggcaccactgaggaggaggaagagcagcctgggaaggccccggacccgcaggacccccaggacgcggagtccgactctgccaccggatcgcagaggcagtccgtcatccagcagcctgccccggacaggggcacggcgaaactgggaaccaagaggccgcaccccgaggatggggacgagcagagcctcgagggcgtctctagctccggcgacagcgcagggctggaggccgggcagggccctggggctgacgagccgggcttgtcccgcgggaagccctatgcctgcggcgagtgcggggaggccttcgcgtggctctcgcacctgatggagcaccacagcagccatggcggccggaagcgctacgcctgtcagggctgctggaagaccttccacttcagcctggccctagccgagcaccagaagacccacgagaaggagaaaagctacgcgctggggggcgcccggggcccccaaccgtccacccgcgaagcccaggcgggggctagggcgggcggtcccccagagagcgtggagggcgaggctccccccgcacccccagaggcgcagaggtgagccgctgtgctgtcccgttccggaggggccgctttgccggccgtgaatcccagacgaggcattgggcctttccacgcccctgggtggcggcttcctgtggtgtttgtggacgtcctctgcctgtgccctgaatccgctcctgaggctaagcgctcccaacgagaagggtccacgggaagccctcacctctgtaaacacaccctgggccagcgctcgcatccgaggggagccgccggatgtggaagaagactcggctttcctgcagccatttagtgccgccccatgctaggttatttgacattgtgcagtgtagagttgccttaaagtgcgtgatctgccagtgctttcttcaagtcacccttgccccgattcctcctgtttgcgctccccagggttgctcaagtggaaattttgtcagctgtttagccttttcgtacttggcgtgatgtcaacttcacttctaatctgcaaaagcagaagctgtttcctagtttacctcgcgtgtgtttacctatatggagtagctcgcagagatcacagaaatgcttgcagcctaaggcagggttttcagaccgtgggtcccagcccatttagtaaaatgggaaatcaattagcaagtggtcaccagcattacacagcaatgaagcagaataaagtaggccagaatgcatcatgtagtaaaggcaaatactgttttgtgaaacttttcacccatacatctaaatgtgagaactggttgcaatgtaagacatttcttgctgggaagttgtgagcaaaataagttgaaaacactaataaagatctgtctgtctgagcaaaggagactaaactccttgggctacataaaaaaaaaaaaaaaaaa

SEQ ID NO: 259 - DNA, 6028 bp, Homo sapiens
cattgcgcgccggcctcaagatggccgccttctggcgtctccggcgctgttgaatggcgaaagctttattgttcccttcgggcaggagtgttcgtgtcctctatggcgctgtcaataaagaacggcagtttgaatcggtgctgaacagggcctgtcctcccaaagccaactctaaggagaggagaggaagagcagttcttggggcagagttgacgcaatggagctccccaactacagccggcagctgctgcagcagctgtacactctgtgcaaggagcagcagttctgtgattgcaccatctccattggtaccatttacttcagggctcacaagcttgtcctggctgctgccagcctcctgttcaaaaccctgctggataacacagataccatctccatcgatgcatctgtggtgagccccgaggagtttgcgctcttgttggaaatgatgtacacgggcaaactacctgtgggcaagcacaacttctccaaaatcatctccttagcagacagtctacagatgtttgatgtagctgttagctgcaaaaatcttctgaccagccttgtaaactgctcggttcagggtcaggtggtaagggatgtctctgcgccatcctcagagacattcagaaaggaaccagagaagcctcaagtagaaatcctttcatctgaaggtgctggagagcctcattcttccccagagcttgctgccactccagggggccctgtgaaagctgagactgaggaagcagcccattcagtttcacaagagatgagtgtgaattctcccacagcccaggagagccagaggaatgcagaaaccccagcggagactcctactacagctgaagcttgttccccctcccctgctgtgcaaacctttagtgaggcaaagaagacaagcacagaaccaggatgtgaaaggaaacactaccagctgaattttcttctagaaaatgaaggtgtcttctcagatgcactcatggttacccaggatgttttaaaaaaactagaaatgtgttcagaaattaaaggtccacagaaggagatgatagtgaaatgtttcgagggtgaaggaggacattcagcattccagagaatcctgggtaaagtaagagaggaaagcctggatgttcaaactgttgtgtccctgttgaggctgtaccaatattctaatcctgcagtaaaaacagcactattagacaggaagccagaagatgtagacacagtgcagccaaaagggagcacagaggagggaaagaccttgtctgttctgttactagaacacaaagaggacctgatacagtgtgtaacacagctgagacctattatggagtccctggaaacagccaaggaggaattcctgactggcactgaaaaaagggtgattctgaattgctgtgagggcagaacacccaaggagacaatagaaaatttgttgcacagaatgactgaagagaagacgctgactgctgagggtttggtaaaactcctccaggctgtgaagacgactttcccaaacctgggccttctgctagagaagttgcagaaatcagccactttgccaagcaccacagtccaaccaagccctgatgattatgggactgagctattgagacgctatcatgaaaacctctctgagattttcacagacaaccagattttattaaagatgatctcacacatgacaagtttagcccctggagaaagagaggtcatggagaagcttgtgaaacgtgactctggttcaggtggtttcaattctctgatatcagcagttctagaaaagcagactctctctgccacagccatttggcaactgctgctggtggttcaggagacaaagacctgtccattggacctgctcatggaggaaatacgaagggagcctggtgccgatgctttcttccgggcagtgaccaccccagaacatgccactttagaaacaatcctgaggcataaccagttgatcttggaggccatccaacagaagattgagtgcaagctctttacctcggaggaggagcacctggcagagactgtgaaagagattctgagcattccctctgagacagccagccctgaagcttccctgagagcagtgctgagcagagccatggaaaaatcagtcccggccattgaaatatgccacctcctgtgcagtgtccacaaatcttttccaggcctgcagcctgtcatgcaggagttggcatacattggtgtccttactaaggaagatggagagaaggaaacgtggaaggtgagtaataaatttcaccttgaagccaacaacaaagaagatgaaaaggcagccaaagaagacagccagcctggggaacagaatgatcaaggagagactggttccttgccaggacagcaagagaaagaggcttcagcctccccagaccctgccaagaagagcttcatctgtaaggcctgcgacaaaagcttccatttctactgccgcctaaaggtgcacatgaagcgctgccgggtggctaagagcaaacaggtgcagtgtaaggagtgcagtgagaccaaggattcaaagaaagagctggacaaacatcagctggaggcccatggtgcaggtggagagcccgatgcccccaagaagaagaagaagaggcttccagtgacatgtgacctctgtggcagagaatttgcccatgcctcaggcatgcagtaccataagctgacagagcacttcgatgagaagcctttctcctgtgaagagtgtggggcgaagtttgcagccaattccaccctgaagaaccaccttcgccttcacaccggggaccgcccgttcatgtgcaagcactgcctcatgaccttcacccaggcctccgccctggcctatcacaccaagaagaagcactcagaagggaaaatgtatgcatgccagtactgtgatgctgtgtttgcccagtctattgagctgtcccgccacgtgaggacccacaccggggacaagccctatgtctgcagagactgtggcaagggcttccggcaagccaatggcctctccatccatctgcacacctttcacaacatagaagatccttatgactgcaagaagtgcaggatgagtttccccactcttcaggatcaccggaagcacatccatgaggtgcactccaaagagtaccacccctgccccacgtgtgggaagatcttcagtgccccgtccatgctggagcggcacatggtgacccacgttggagggaagcccttcagctgcgggatctgcaacaaggcctaccagcaattgtctggtttgtggtaccacaatcgaacccaccaccctgacgtatttgctgctcagaaccaccgatcttccaagttctcatcactccagtgcagctcctgtgacaaaaccttccccaacaccattgagcacaagaaacacatcaaagcagaacatgcagatatgaagttccatgaatgtgaccagtgtaaggagctcttccccacgccagccttgctgcaggttcatgtcaagtgccagcattcagggtcccagccattccggtgcttgtactgtgctgctactttccgttttcctggagcattgcagcaccatgtcaccacggagcacttcaagcagtcagagaccaccttcccctgtgagctctgtggggaactcttcacctcccaggcccagcttgacagtcacctggaatctgagcacccaaaggtgatgagcacggaaacccaggccgcagcctcacagatggcgcaggtgatccaaaccccagagcccgtggccccgacagagcaggtgatcactttggaggagacccagcttgccgggtcgcaggtgtttgtgacgttgccagattctcaggcatctcaggccagctctgagctcgtggcggtgactgtggaggacttgctggatggcacagtgacgctgatctgtggtgaggccaaatgagcagcctttcatccggcagagccttcctgcgtttgcagcagagaggaggccccacagcttgccctttgccctccatccctggctgtcctgagtggtgagcatcttagcttagcaccaaccaacacagtctcacctagaaaacagatggaagcttcgttgttctcatagaaccaacagcatctgagccctcaacaccaacagcaccatcctctgtagcagacaggcctccctccccacaggcccgctgctgcagcctctatgacactgtccatccccaagtgacatgtggcttcagaagtagagtctgaaagagcagtgggatgggagctggtgaccagggtaccccaggaggcatgatgtgccgacagcgctcagtgggcagaatggcagttagatatgggacttggcccacagtgggggctgcaaatgctgccactgcctctggccatttaaagtgagaggggcaccaacagacaattcggggaccttaggccccttcctgaggcacacttggccccttcctcggtcctatcatcctaccctctgctggggttccccctccacccagtggccacgcccagcaccctattgatggctataggacaggtagccctcatttccatgcctgataaccccttgtcagttgtcagctcttcccaaaacaaagctctggagtttctgctggaagtgtttaatgtgaggcatcagctgctagacagtgtctgcctttccaggacattcttcttggtattccttacctgaagcctggttcccacagctcttccgtgtcatcttcatccccttcctttaatcaaaggctgaaatctctgcctgacctggcagcctggctccctctgggtcatatggtgcagactgtgaccagcaccaggcaggcagtcctgtctgcgtgtggaggagcagccgtgactgcccgtggctctgctgccgcccactccctgccttgtgagtggcctgctgcctcacctcccgcaggccgccacacttattgcaggtcagtgatcctttggagtttgaatttcacaaagctttttttatcttcagttcctaaaatataatctgataattaatggtttgtggaatccattatgaagtgcaattagatagatgtaggttcctgccgtttggagagaatgactagcatttatcttcttttccttccatgccaaaggttggagtctgctggtgcggtgtttacacaccaggcagggctgtctgccaccttgtgtggcttgaccccctgtggaggggagtgcctggttggatcccacactggcagagatggggccaccccttccttccaggcacatctcacattgccatgtacagaggcaggagtcacgtttggtcaccatggaagcttttattgctcccacatggtcaggtctcaccctgcttgaagcgcagaaggcacagccttactgaccagcacgcccactgactggcatctgccggctttgtgcaggcagccccgacggtttccacagcgagcgccagctccggccagcctgggacagctcatcccagccgactacacctgcttctggtcctgtccacattttgatacgcagatcacttgagcttgtcaattagggttctgccattctgaaataaatgaagtttctaaagcagagtcggcctcagaagccaaaaactgaccagaagatggtgctcaaacctttaagacttcatctccatgtgaagggctcactgtttctaccaaggctgtgcctgtattaaggcttttccgtcctgggaactgtcagtctgggagagctcttgatctgcaggtggcaaaatggcactgaatatccccttggcagcagagaaaacccactgaaagatcgtagagtggcacatgcttacagggcattggtgccaagtccagtggatgagaatccagcccctcacaagctgtgggatggggcttgggagttgcagtgaatgtcattaaaatttcttccaaaacaaaactagaaataattgctgagggcttatagggaagtgatttaaaaagaaaaaacaaacaacaacaaaaaaaactcttcggaataaagagggctgtaaattttg

SEQ ID NO: 260 - DNA, 3370 bp, Homo sapiens
gagccggtgccggcccgcgagccccagcgtctctgcagaccagtcccctccagggtccggcggggcccgcgcggtgggaggagtcgggcactggccggcgactaacgggtccgactgctgaccaagctaggagagacccggaccacggagacagagaccccggcatcgcgacccccgaggacctcctctcctcgccctgtggcacccactagtcctgggcactcagccgcggagagcccccgaccccgcgcgcccagccccgggggagcccacctcctccccgcggcccgcccgggccatgctcccccggggcagcgggtgagccccagccgggaccgggatcggagcccgcgcggagcatggatccgggctgggggcagcgggacgtgggctgggcggccttgctgatcctcttcgccgcctcgctgctcacggtgttcgcctggctgctgcaatatgcccggggcttgtggctggcgcgggcccgcggggaccggggcccgggacccgccttagccggggaacccgcgggttccctgcgggagctgggcgtgtggcgctcgctgctgcggctgcgggcgactcgggctggcgccgccgaggagccaggagtccggggcctcctggcgtcactcttcgccttcaagtctttccgggagaactggcagcgggcttgggtgcgagcgctgaacgagcaggcctgcagaaacgggagctccatccaaatcgcctttgaggaggtgccccaactcccacccagagccagcatcagtcatgtgacctgcgtagaccaatctgagcataccatggtgctgcgttgccagctctctgctgaggaggtgcggttcccagtctctgtgacccagcagtcccccgctgccgtctccatggagacctaccacgtcactctgacactgccaccaacacagttggaagtcaacctggaggaaatccctggtgaggggctgctcatatcctgggccttcactgatcgcccagatctcagcctaacggtgcttcccaagcttcaggccagggagagaggtgaagaacaagtggagctctccacaattgaggaactgatcaaggatgccatagtcagcacccagccagccatgatggtcaacctcagggcttgctctgccccaggaggcctggtacccagtgagaagccacccatgatgccccaggctcagccagccatccccagacctaaccggttattcctacggcagcttcgggcatctcacttgggaaatgagctggaaggcaccgaggaactgtgctgtgtagctgaactcgacaaccccatgcagcagaagtggaccaagcccgcgagggctggatccgaggtggagtggacagaagacctggcactggatctgggcccccagagccgggagctgaccctcaaagtgctgaggagcagcagctgtggagacaccgaactcctaggccaggccacactgcctgtgggctccccctccagaccactgtctcgaagacagttgtgcccactcaccccagggccagggaaagccctgggaccagcagccaccatggcagtggagcttcactatgaggagggctctccccggaacctgggtactcccacctcctccactccacgccccagcatcacacctaccaagaagattgagcttgaccggaccatcatgcccgatggcaccattgtcaccacagtcaccactgtccagtcccggccccgtatagacggcaaattagactccccctcccgctccccgtccaaggtggaggtgaccgagaagacgacaactgtgctgagtgagagcagtggccccagcaatacctcccatagcagcagcccaggggacagccacctttccaacggcttggaccctgtagcagagacagcgattcgccagctgacagagcccagtgggcgggtggccaagaagacacccaccaagcgcagcactctcatcatctctggtgtttccaaggtgcccattgctcaggacgagttggcgctatccctgggctatgcggcatccctggaagcctcagtgcaggatgatgcagggaccagcggaggcccctcttcacctccctcagacccaccagccatgtctccaggaccgctagatgccctctctagtcccacaagtgtccaggaagcagacgagacaacccgttcggatatttctgagaggccatctgtggatgatattgagtcggaaacggggtccactggtgccctggagacccgcagcctcaaggatcacaaagtgagtttcctgcgcagcggcactaagctcatcttccgccggaggcctaggcagaaggaagctggcctgagccaatcacacgatgacctctccaacgcaacggccacgcccagtgtccgaaagaaggccggcagcttttctcgccgccttatcaagcgcttttccttcaaatccaaacccaaggccaatggtaaccccagcccccagctctgaggacccagctctgaaagggcacgagttctctcagcccattccccacctccccttccataccccttcctggatctccagtgcctgggccaggaaagccctctgggttccgggaagccccgtccaccctgggccatggggccggttggaaggatacttggaacgggaagcacatgagaggtgggcacccggtgccgaggacatggacgagggactggtggctgggagggagaggagggccctgtccggcatgtgtgggtattccccagaagcatttgcctcctgctgagcctggtccctgagcggagtcccagggtgctcagctcttcagctgacccttcttcccttatttattctcttttctatttatatgtgtggcttaggaccctccgtgaacagatgatagagggcatctctcccaggtgacccttcttttctgtcccaggagggtgggtaattccctttgggatggggctcccacacctccctcaggtccccactcagaccagcaccagtgtctgcctctgagaatgttggcagctcacagagagcagggccggcccgggatggggggcaggtactccccaccttcctgcctcccctcctgctcctcatccctccctccccctttattaccgttttttgtacttgatgccttctctgtgagcagtggctctgtgggaaggagggagccgggagcctggtgggaagccttccccagagagatggctttaggggctttatttaaagactgtgatgatggagccacgcaaggctgcacctctgtgtgttgggagacgatgatgatgtccattgctgtgtgatggcttggaatttaatttattaaagtcaaattggagtttaaaaaaaaaaaaaaaaaaaaaaaaaaa

SEQ ID NO: 261 - DNA, 2382 bp, Homo sapiens
aagagggaagtcgtggtggtcgcgagggagccggaaagatggtggttaccagatctgcacgggctaaggccagcatccaagccgcgtcggctgaaagttccgggcaaaagagttttgctgctaatgggattcaagcgcatccagaaagtagtactggatctgatgcccgaactactgctgaatcacagaccactgggaagcaaagtttaatccctagaactcctaaagctagaaagaggaagagcagaactacaggctcactaccaaaggggactgaaccatctacggatggagagacctctgaggcagagtcaaattattctgtgtctgagcaccatgataccattttaagggtaactaggagaaggcagatcttaattgcatgctccccagtgtccagtgttaggaaaaagccgaaagtaactccaacaaaggagtcttacactgaagaaatagtgtctgaagcagaatctcatgtttcaggtatttctagaattgtgcttcctacagaaaaaactacaggagccagaagaagtaaggctaaatctctgacagatccaagccaagaatctcatacagaagctatatctgatgctgagacatcaagctcagacatttcattctctggaattgcaactagaagaaccaggagtatgcagaggaaattaaaggcacaaactgaaaagaaagatagtaagattgtaccaggaaatgagaaacagatcgtgggtacacctgtgaattcagaggattcagataccagacaaacttcccatttacaagcaagatctctttctgagataaataagccaaatttctataataatgactttgatgatgatttctcccacagaagttcagaaaatatattaacagtgcacgaacaggccaatgttgaatctcttaaagaaacaaaacagaattgtaaggatttggatgaagatgccaatggaataacagatgaggggaaagaaattaatgagaaaagttctcagctgaagaatctttctgaacttcaggacactagccttcaacagttagtttctcagagacattcaaccccccaaaataaaaatgctgtatcagtgcactctaatctgaactctgaggctgtaatgaaatcattaactcaaacatttgcaactgtggaagtaggcagatggaataacaacaaaaagagccccataaaagcaagtgacttgacaaagtttggtgattgtggtggtagtgatgatgaagaagagtccacagttataagtgtcagtgaagacatgaacagtgaagggaatgtagattttgaatgtgataccaaactatacacgtctgcgcccaacacatctcagggtaaagataattctgtcttactagttctcagcagtgatgaaagccaacagtctgaaaacagtgagaatgaagaggatactttatgttttgttgaaaatagtggccaaagggagtcattaagtggagacacaggaagtctgtcatgtgacaatgcattgtttgtaattgacacaactcctggaatgagtgctgataaaaatttttacttggaagaggaagacaaggcaagtgaggttgccattgaggaagaaaaagaagaggaagaggatgaaaaaagtgaagaagattcatcagaccatgacgaaaatgaagatgagtttagtgatgaagaagacttcctaaatagcacaaaggctaaacttctgaagttgacaagcagcagcatagaccctggtctgagtatcaagcagttgggtggtttgtatattaattttaatgcagataaactacagtctaacaagagaaccctaacacagatcaaggagaaaaagaaaaatgagcttctgcagaaagccgtcattacacctgattttgaaaaaaaccactgtgttccaccatatagtgaatcaaagtatcaacttcagaaaaaacgcagaaaagaacgacaaaaaacagcaggggatggctggtttggtatgaaagctccagaaatgacaaatgaactgaaaaatgatctcaaagcactgaagatgagagccagcatggacccgaaaagattttacaagaaaaatgatagagatggcttccccaagtacttccagattggaaccattgttgacaatccagctgatttctaccattcacgaattcccaagaagcaaaggaaaagaactattgtggaagaactgctggctgattctgaattcagaagatacaaccgaaggaagtactcagagatcatggctgaaaaagcagcaaatgcagcaggaaaaaagttccgaaagaagaagaaatttcgcaattaagatttaccaagcaaactgcaacattttacattgctcctttatttacttattaaagacgtttggaaaactaaaa

SEQ ID NO: 262 - DNA, 2327 bp, Homo sapiens
gcgcggggcggggcttccgggcggggcaggctggcttccggcgggagcggggccgcggatggccgtatacagggcagcgctcggggcttcgctcgcggctgcccgactcttgcccctcggtcgctgttccccgtcgccggcgccccgctctacgttgtcgggcgccgccatggagcccgcgcctcgctggctggcggggctgcgcttcgacaaccgcgccctgcgcgccctgcccgtggaggcgccgccgcccggtcccgagggcgccccgtccgcgccgcggcccgtgcccggggcctgcttcacccgcgtgcagcccaccccgctgcggcagccgcgcctcgtggcgctgtcagagcccgcgctggcgttgctgggcctgggcgcgccgcccgcgcgcgaggccgaggccgaggccgcgctgttcttcagcggcaacgcgctcctgccgggcgccgagcccgccgcgcactgctactgcggccaccaattcggccagttcgccgggcagctgggcgacggcgccgccatgtacctgggcgaggtgtgcacggcgaccggcgagcgctgggagctgcagctcaagggcgccgggcccacgcccttctccagacaggccgacggtcgcaaggtcctacggtcaagcatccgggagtttctatgcagcgaagccatgttccacctgggagtccccaccacacgggccggcgcctgcgtcacgtccgagtccacggtggtgcgcgacgtgttctatgatggtaatcccaaatatgaacaatgcacggttgtgttgcgtgtagcttccactttcataaggtttggatcctttgagatttttaagtctgcagatgagcacacagggcgtgcaggccccagcgtggggaggaacgacattcgagtgcagctgctcgactatgtcatcagctccttttaccccgagatccaggctgctcatgccagcgacagcgtgcagagaaatgctgccttcttccgggaggtgacgcggcgcacggcgcggatggtggccgagtggcagtgtgtgggcttctgccacggcgtgctcaacaccgacaacatgagcatcctggggctcaccatcgactacgggccctttggcttcctggacaggtacgaccccgaccacgtgtgcaatgcctccgacaacaccggccgctacgcgtacagcaagcagcccgaggtgtgcaggtggaacctgcggaagctggccgaggccctgcagccggaactgcccctggagctgggggaggccatcctggccgaggagtttgacgccgagttccaaaggcactacctgcagaagatgcgcaggaagctgggcctcgtgcaggtggagctggaggaagacggggcgctggtgtccaagctcctggagaccatgcatctgaccggtgccgacttcacaaacaccttctacttgctgagctccttcccagtggagctagagtcgccaggcctggcggaattcctggccaggctgatggagcagtgtgcctccctggaggagctgaggctggccttccggccccagatggatccccggcagctatccatgatgctgatgctggcgcagtcaaacccgcagctgttcgcgcttatgggcacccgggcaggcatcgccagggagctggagcgtgtggagcagcagtctcggctggagcagctgagtgcggcagagctgcagagcaggaaccagggccactgggctgactggctacaggcgtacagagcccggctggacaaggacctggaaggcgctggggacgctgccgcctggcaggctgagcacgtgcgcgtgatgcacgccaacaacccgaagtacgtgctgaggaactacatcgcgcagaatgccatcgaggctgccgagcgcggggacttctcagaggtgcggcgggtgctgaaactactggagaccccttaccactgcgaggcgggggccgccacagacgccgaggccacggaagccgacggggcggacggcaggcagcgctcctacagcagtaagcccccgctctgggcagcagaactgtgcgtgacatgatcttcgtaacggcctcggcacgctccacacccctggagtctcccgaggcccccatgtgctgctgagtggccaagatgatgccaggctgccctatacactgggggattctgccctggcccatgcacacccgtctttccatgatggcagagacatccagtcaggacctgacccgtctctgtctgaggccggctcagcagtgcagcctggtccctgggggctggacccaggctcctaaataaaccagcaactccctcgaaaaaaaaaaaaa

SEQ ID NO: 263 - DNA, 5919 bp, Homo sapiens
ccccccgccccggcccggcccggcccggccgcagccccgctgggcgccgcagagatgacggatcctttctgcgttggaggccgtcggctcccggggtccagcaagagtggtcccgggaaggatggcagccgaaaggaggtccgacttccaatgctgcatgacccaccgaagatggggatgccggtggtccgtggtggacagacagtgcccggccaggcccctctctgctttgacccgggaagtccagccagtgacaagacagaagggaagaaaaaggggcggccaaaagccgagaaccaggccctccgagacattcctctctccctgatgaacgactggaaggatgagttcaaggcacactcgagggtgaagtgtccaaactcagggtgctggctggagttccccagcatctacgggctcaagtaccattaccagcggtgccaagggggtgccatctcagatcgcctggccttcccctgccccttctgcgaggccgcattcacctctaagacccagctggagaaacaccggatctggaaccacatggaccgacccctgcctgcctccaagcctgggcccatcagcaggccggtcaccatcagccggcctgttggggtcagcaagcccatcggagtgagcaaacctgtcactattggcaaacctgtgggtgtcagcaaacccattggcatcagcaagccagtctcggtcggcagacccatgccagtcaccaaggccatcccggtcactaggcccgtgccagtcaccaaacctgtcacagtcagcaggcccatgcccgtcaccaaggccatgccggtcaccaaacccatcacagtcaccaagtctgtgccggtcaccaaacccgtacctgtcaccaaacccattacggtaacaaagcttgtgacagttacgaaacccgtgccggtcaccaagccagtgacagtcagcaggcccattgtggtcagcaagccggtgacagtcagcaggcccattgctatcagcagacacacaccgccctgcaaaatggtgctgctgaccaggtcggagaacaaagcacctcgtgccacagggaggaacagtggtaagaaaagggctgcggacagcctggacacctgcccaattccacccaagcaggccaggccagagaatggggagtacggcccctcctccatgggccagagctcggccttccagctgagtgcagacaccagcagtggctccttgtcgccaggcagcaggccgtcagggggcatggaggcactgaaggctgcaggccctgcgtccccgcctgaggaggacccggagcgcacaaagcacagaaggaaacagaaaacacccaaaaagtttacaggggagcagccatccatctcagggacctttgggctcaaaggcctggtcaaagctgaggacaaggcccgagttcaccgctccaagaagcaggaggggccaggccctgaggacgcccggaagaaggtgccagctgcccccatcactgtcagcaaggaggcaccggcccctgtggcccacccagctccaggtggccctgaagagcagtggcagagggccatccatgagcgcggggaagccgtctgccccacctgcaacgtggtcacccggaagactctcgtggggcttaagaagcacatggaggtgtgtcagaagcttcaggatgcactcaagtgccagcactgccggaagcagttcaagtccaaagccggcctcaactaccacactatggccgagcacagtgccaagccctctgacgccgaggcctccgaagggggcgagcaggaggagcgcgagaggctgcgcaaggtgctgaagcagatgggacggctgcgctgcccccaggagggttgcggggctgccttctccagcctcatgggctaccagtaccaccagcggcgctgcgggaagccgccctgcgaggtggacagcccctccttcccctgcacccactgtggcaagacgtaccgatccaaggctggccacgactaccacgtgcgctcggagcacacggcccccccccctgaggagcccacagacaagtcccctgaggctgaggacccgctgggtgtggagcggaccccaagcgggcgtgtccgccgcacgtcggcccaggtggcggtgttccacctgcaggagatagcggaggacgagctggcccgcgactggaccaagcggcgcatgaaggatgaccttgtgcccgagaccgcacggctcaactacactcgaccagggctccccacgctgaacccccagctgctagaggcatggaagaatgaagtgaaggagaaaggccacgtcaactgtcccaacgactgctgtgaagccatctactccagcgtgtccggactcaaggctcatctcgccagctgcagtaagggggcccacctggcagggaagtaccgctgtctgctgtgtccgaaggagttcagttctgagagtggcgtcaaataccacatcctgaagacccacgcagagaactggttccgaacatcagcagacccacctcccaaacacaggagccaggactcattggtgcccaagaaggaaaagaagaaaaatctggcaggtggaaagaagcggggccgaaagcccaaggagcggaccccagaggagcctgtggccaagctgcccccgcgccgggacgactggcctccaggatgcagagacaagggggcccggggctccaccggccggaaggtgggagtcagcaaggcgcctgaaaagtgagcatggtgcgtggggcctggcccccatgcagccgccacaccgccctctgttcaaggcagggccagctccgggacctctgtcctccagttctccatcccccacccccgcctcttcatccgtccagtggggcagccagccactctcccttccctgaaggtggcccttcccctgttaaggctgccacagggcacacctgggttggggctccccaaggtgtgcccagcagaagtgcaatagccaggagggttgcccctcctcatgggaatgtgtctggggtcttggtgccacaggggctgcagcgcagagtaggcagatggcctttggccccccggctccgcttcctcaggccctgccgggtcccttccctggctaccccaaggctcaggcatccctggtgacctgtggttctgggctggtgagggcacctgagcaacctggcacgggcagccaccatcctggcctcacctccacccaacactggaactccagcacccccagctacctcccaggacagacccctgtctgaccactgccatgctgacctgacaggctccggcctgcccttggccacccacttggtccccttgcttctgttttctacctctccaggcctgcccactacccccacccctgctcctcctttgtcagtgcgatccctgctgtgctcaggccctgccccccaggcctgtctgtaattctcccagcttggggcaagggaggggttttgcttcttgtacctacagggcagcagaagcttgatgcccttcaacacagctgccagccctgggggtgtggggcccctggagtgtgctctcctccagtgttcagccttctggcactgcaggcctaggttggagcagcctcgtggagtagggacggactagttcgggccctggggtcttgctggggcccataggcatgtggggcaggaagctgggcagagctggcctggctctgagtggccactgggggaaaggcagccttctgtctgccaatctgggtaggcccagtggccaagctctcatgggagccccctccccacttttttttttaacctgcccccattgtttctggttgtgtggtcatttgatatgggaactgaaggccagccaggggaggggcttggccaaagtcacagcaggttgatggcagctccagagctgtctttgcccctttgtggccctgaggacggctgggtctataggtagggcaggggtcaggcagggagtccagggtgcctggaagaggtggccacagcctgtggctccctccctggggtcctgccttccaaccacggcattgcagggaggatgaggctcagagggggtaggtttggagggaggccattttccagggtgggtgggagtgggctgagggctcggccccactgaccctggacgatgagaattttgatgtttgcccgtgtgcgtgtgtctcctgggtgtagtggatgccagtcttgttgctgtgacaagtaacaaccttttttttaaattgttttttatacaaacactcgcaatccgacatttggtgctaagggtttcctggtgcagacggtgggcctgggggctgggctggaccagggcgtgggtctctggggttggggtcccttgctgctcagggaggcagtactgactgggcactgcctctgcccccagcacccaccctcccccattccccagggagaaggggccccactgggcttggcctgcagtagtagggagacaagttccaggagcactttggggactggggttgcagaacacttcctgtctctggcttcatccttgggccagaaggctccaaccctcagcagcccttgccagatgtgccagggagtgggtgtggagacccggactccccccacccacgcacacctcggcctgatgagaggatggaggctggggcagagatgggcgtgacccagcgtcagagggtcgggggaggcattccttcctgtgtcccagagcttcactggtggagctggaggagccggaggtggagggtggggtctggcagctgctgctggggcagcctcatgaggggaggggaggggaggggaggggagcaggcactgggcgggggcctaggtgcactttgtccttgccaccaatggcgggaggagggtggacctgaacacctgcagggtgtggtgcctgccccagcctctcaggtacttggcccttggggagaagagaagagggtctggtttttgctgggggtgagtttccgggacactcccaaagcccacagataatccctggtgtgggaagaggagtcctggataccttgatgtttagcactttaaccccctttgtctttaaggtaggcgtgggggctactgccagaagtggctgttgggtctgaccccctcctttctgccctccctctgccacatgctggtccgcagagccctcctcccaaggggtggggccctgggtggagctcagcagggtctgcccactccctacgctggcccacataggcctccaggagccctcagtgagagggaccagcatagctgacccccagagtgtggtgggcgccggccctgcccgaggcccagtcggggccctttctgcagatctacctctggctcagcgcacgccccctgccctgagaacaggaaagggcccggaagggctgactcaccgggccgacgctcacacgaaaatgggatgcactttatttgctggtgcaaaggcaggtgagggtgcctcctgtgtgaccgttggccctcctgcctggtggcgctgaagggaaggagccagtgagcctgaccccgggaggggccgtccccgtgtgccgcgtttggcggggccccaggcggctcccccaggcccgggtctggggccccaggctttcccctgcctcgcggccgggcgtcccgtgctttgggtttcttggtttgggttttttaatgccagttctcagtacataagtgcattttgaaagaggttccagctatcacttgtaaccatatatatatacatatatattctatctacaaagtgtttatttgcgagatgtttcaacggtgagttcgggccccgcccgccttgtgaccatctgtccccggtcctcgtccccgccccgcgccctggtcccgagtggcgtggggacgggccatcactgtatgtattaaaatgactgtatcaaataaatgtttattgatttttttccagg

SEQ ID NO: 264 - DNA, 4064 bp, Homo sapiens
atgcccgggccccgaggggctgctggcggcctggcccctgagatgcgcggggcgggggcggcggggctgctggcgctgctgctgctgctgctgctgctgctgctgggcctgggcggcagggtcgagggggggccggccggcgagcggggcgcaggcgggggcggggcgctggcccgcgagcgcttcaaggtggtctttgcgccggtgatctgcaagcggacctgtctcaagggccagtgtcgggacagttgtcagcagggctccaacatgacgctcatcggagagaacggccacagcacagacacgctcacgggctccggcttccgcgtggtggtgtgccctctcccctgcatgaatggcggccagtgctcctcgcgaaaccagtgcctgtgtcccccggacttcactgggcgcttctgccaggtgcccgcaggaggagccggtgggggtaccggcggctcaggccccggcctgagcaggacaggggccctgtccacaggggcgctgccgcccctggctccggagggcgactctgtggccagcaagcacgccatctacgccgtccaggtgatcgctgaccctcctgggcccggggaggggcctcctgcccagcacgcagccttcctggtgcccctaggcccgggacagatctcagcagaagtgcaggccccgccccccgtggtgaatgtgcgcgtccatcacccgcccgaggcctcagtccaggtgcaccgcattgagagctcgaacgccgagagcgcagccccctcccagcacctgctgccgcaccccaagccctcgcacccccggccgcccacccagaagcccctgggccgctgctttcaggacactctgcccaagcagccgtgtggcagcaaccccctccccggcctcaccaagcaggaagactgctgcggtagcatcggcactgcctggggccagagcaagtgccacaagtgtccccagctgcagtacacaggagtgcagaagccagggcctgtacgtggggaagtgggcgctgactgtccccagggctacaagaggcttaacagcacccactgccaggacatcaacgagtgcgcaatgccgggcgtgtgtcgccatggtgactgcctcaacaaccctggctcctatcgctgtgtctgcccacctggccatagtttaggcccctcccgtacacagtgcattgcagacaaaccggaggagaagagcctgtgtttccgcctggtgagccctgagcaccagtgccagcacccactgaccacccgcctgacccgccagctctgctgctgcagtgtcggcaaggcctggggcgcgcggtgtcagcgctgcccaacagatggcaccgctgcgttcaaggagatctgcccagctgggaagggataccacattctcacctcccaccagacgctcaccattcagggcgagagtgacttttcccttttcctgcaccctgacgggccacccaagccccagcagcttccggagagccctagccaggctccaccacctgaggacacagaggaagagagaggggtgaccacggactcaccggtgagtgaggagaggtcagtgcagcagagccacccaactgccaccacgactcctgcccggccctaccccgagctgatctcccgtccctcgcccccgaccatgcgctggttcctgccggacttgcctccttcccgcagcgccgtagagatcgctcccactcaggtcacagagactgatgagtgccgactgaaccagaacatctgtggccacggagagtgcgtgccgggcccccctgactactcctgccactgcaaccccggctaccggtcacatccccagcaccgctactgcgtggatgtgaacgagtgcgaggcagagccctgtggcccggggaggggcatctgcatgaacaccggcggctcctacaattgccactgcaaccgcggctaccgcctgcacgtgggcgccggggggcgctcgtgcgtggacctgaacgaatgcgccaagccccacctgtgcggcgacggcggcttctgcatcaactttcccggtcactacaagtgcaactgctaccccggctaccggctcaaagcctcccggcctcctgtgtgcgaagacatcgacgagtgccgggacccaagctcttgcccggatggcaaatgcgagaacaagcccgggagcttcaagtgcatcgcctgtcagcctggctaccgcagccaggggggcggggcctgtcgcgacgtgaacgagtgcgccgagggcagcccctgctcgcctggctggtgcgagaacctcccgggctccttccgctgcacctgtgcccagggctacgcgcccgcgcccgacggccgcagttgcttggatgtggacgagtgtgaggctggggacgtgtgtgacaatggcatctgcagcaacacgccaggatctttccagtgtcagtgcctctctggctaccatctgtccagggaccggagccactgcgaggacattgatgagtgtgacttccctgcagcctgcattgggggtgactgcatcaataccaatggctcctacagatgtctttgcccccaggggcatcggctggtgggtggcaggaaatgccaagacatagatgagtgcagccaggacccgagcctgtgccttccccatggggcctgcaagaaccttcagggctcctatgtgtgtgtctgcgatgagggcttcactcccacccaggaccagcacggttgtgaggaggtggagcagccccaccacaagaaggagtgctacctgaacttcgatgacacagtgttctgcgacagcgtattggccaccaacgtgacccagcaggagtgctgctgctctctgggggccggctggggcgaccactgcgaaatctacccctgcccagtctacagctcagccgagttccacagcctctgcccagacggaaagggctacacccaggacaacaacatcgtcaactacggcatcccagcccaccgtgacatcgacgagtgcatgttgttcgggtcggagatttgcaaggagggcaagtgcgtgaacacgcagcctggctacgagtgctactgcaagcagggcttctactacgacgggaacctgctggaatgcgtggacgtggacgagtgcctggacgagtccaactgccggaacggagtgtgtgagaacacgcgcggcggctaccgctgtgcctgcacgccccctgccgagtacagtcccgcgcagcgccagtgcctgagcccggaagagatggagcgtgccccggagcggcgcgacgtgtgctggagccagcgcggagaggacggcatgtgcgctggccccctggccgggcctgccctcaccttcgacgactgctgctgccgccagggccgcggctggggcgcccaatgccgaccgtgcccgccgcgcggcgcggggtcccattgcccgacatcgcagagcgagagcaattccttctgggacacaagccccctgctgttggggaagcccccaagagatgaggacagttcagaggaggattcagacgagtgtcgctgcgtgagtggccgctgcgtgccgcggccgggcggcgccgtgtgcgagtgtcccggcggcttccagctcgacgcctcccgcgcccgctgcgtggatatcgacgagtgccgagagctgaaccagcgcgggctgctgtgcaagagcgagcgctgcgtgaacaccagcggctccttccgctgcgtctgcaaagccggcttcgcgcgcagccgcccgcacggggcctgcgttccccagcgccgccgctgacgccgccgacgccgccctcggcccagacctcggtgatcactgagggatttccgcgagctcggcctcacttctgccccgacttgtggctcggacccagggaccttcagggcccgcagaccctcccggcgccttgagacccgaggcgcccctaccggcccccctccccggttagcgggcggttgtaaggtctccggcgggcgctgcctgccttcctcccagagggtgtttcctagaaactgataaatcagatcgtgcctctttacccttggctttcgaaaaaaaaaaaaaaaaaa

SEQ ID NO: 265 - DNA, 2131 bp, Homo sapiens
gtcgacgctgggctttcgggtcccgcgcccagagatgggctccaaggcaaagaagcgcgtgctgctgcccacccgcccagcgccccccacggtggagcagatcctggaggatgtgcggggtgcgccggcagaggatccagtgttcaccatcctggccccggaagaccccccagttcccttcaggatgatggaggatgcggaggccccgggagagcagctctaccagcaaagccgggcctacgtggctgccaaccagcggctgcagcaggcgggcaacgtgccgaggctgcctcctcaggctgacctctcggggcctgcaggcttgggcagcgcacaaggtggcctgcacccaggctttccctgggggtccgtcggccccagactggcattcacggggtcccagcccacgtgggtgttgacacaggcgcccctcctgatgctggggctgcggttcatccgtcgtctcattcatgccgagttggtgggacccacccagctggctccgtcctgcgtgacctgagggccccactggggttctggaagaggatagggacattattgctgtactgtgattctgtcgtcagctcacagtggccgtgctctgcagtggggcccctgggagcaggtgccacctccttcctctcccggggcaggcactcgcctgtccacttctgagtccaggtgttgggatcgaggtgttaactgtgattccatccagcgagtgcccacccaatgtcagagcagcccgagggccagcctgagcccctgaccccacttccttctgggccccgggctcctcccacaagccacgttgatcttcacaacgaccctgggccgctggggtcacccaagagaagcagccctgagacccagccaggctgggcctagctccacggcacgggtgtctcccagccactgcccttgctggaggaccgctgtgagtcactggccaggagcccagggtgtcctgagtctcatagccaccctgccagctgcagcaggtcctgggcctgcttccctgcgggttctggccctgggggagggggcgttagtgcggcggagggtcttgccaaaggcttttcatcctaaatagcaacttgagtggaaacctgggcaaggcggcccagaggctgggccctgcacataaagctttcgtgtgtgtctggccgtctgaatggtgcctctgtgagcggctccgtcccggggccccggaagctggggagggatgggtaccggcgaccccgggaaccctgctcagtcctgccgggcactgcatgcagggaccgtccgcctgacccagagacctggggctgcctcaccctctctccagacccacagccagctttgtttcttgaatgtggaagatgtttcttattccctgaagaaagggggcctgccacacacagcctgggaggcgcctcatccagaaactgggacttggctagcccggcctgggccctagggacttctcactggtcatgcttctgaagctgctcacctggccgagggaggtcccggcagtgtcccagggtggaaggtggggagggggccggctcctgccatcccttcccaccctgcacttctgtgctgcttgcagtcatagctttccttgtccccccagctgggccagggctgtgctccctgaagtggctttgacgtggggccgtcccagctcccgcagcccctgtccaccattgactctccccggtagtggctgctgtggctgccccatcccagctgttgcaccagccacagctcctagtggctcatgggtgcctcctgccccacactggggcctgccataataactggcccaggtaccaatgcccaggttggaccccctgtctggggtgctgtgcaccccctggagcctgccctcccttgggaccagggggagactcctggcctcagccagtgcctccccggcccatctgggtggggtgcccacaaaccctgtgcccccagtttctgctttctggctctgcttccagggatctaacctggggggtctcagcaattctgtggcagcacatagacagcgatgaacctacccgcccacagcccattttgaggaagaggtgatggcggcaggcaatgcaagagctcagtttattaaatgtgtgcgagtcgg

SEQ ID NO: 266 - DNA, 3574 bp, Homo sapiens
cttctgcctaggtcccaacgcttcggggcaggggtgcggtcttgcaataggaagccgagcgtcttgcaagcttcccgtcgggcaccagctactcggccccgcaccctacctggtgcattccctagacacctccggggtccctacctggagatccccggagccccccttcctgcgccagccatgcctttaaaccgcactttgtccatgtcctcactgccaggactggaggactgggaggatgaattcgacctggagaacgcagtgctcttcgaagtggcctgggaggtggctaacaaggtgggtggcatctacacggtgctgcagacgaaggcgaaggtgacaggggacgaatggggcgacaactacttcctggtggggccgtacacggagcagggcgtgaggacccaggtggaactgctggaggcccccaccccggccctgaagaggacactggattccatgaacagcaagggctgcaaggtgtatttcgggcgctggctgatcgagggaggccctctggtggtgctcctggacgtgggtgcctcagcttgggccctggagcgctggaagggagagctctgggatacctgcaacatcggagtgccgtggtacgaccgcgaggccaacgacgctgtcctctttggctttctgaccacctggttcctgggtgagttcctggcacagagtgaggagaagccacatgtggttgctcacttccatgagtggttggcaggcgttggactctgcctgtgtcgtgcccggcgactgcctgtagcaaccatcttcaccacccatgccacgctgctggggcgctacctgtgtgccggtgccgtggacttctacaacaacctggagaacttcaacgtggacaaggaagcaggggagaggcagatctaccaccgatactgcatggaaagggcggcagcccactgcgctcacgtcttcactactgtgtcccagatcaccgccatcgaggcacagcacttgctcaagaggaaaccagatattgtgacccccaatgggctgaatgtgaagaagttttctgccatgcatgagttccagaacctccatgctcagagcaaggctcgaatccaggagtttgtgcggggccatttttatgggcatctggacttcaacttggacaagaccttatacttctttatcgccggccgctatgagttctccaacaagggtgctgacgtcttcctggaggcattggctcggctcaactatctgctcagagtgaacggcagcgagcagacagtggttgccttcttcatcatgccagcgcggaccaacaatttcaacgtggaaaccctcaaaggccaagctgtgcgcaaacagctttgggacacggccaacacggtgaaggaaaagttcgggaggaagctttatgaatccttactggttgggagccttcccgacatgaacaagatgctggataaggaagacttcactatgatgaagagagccatctttgcaacgcagcggcagtctttcccccctgtgtgcacccacaatatgctggatgactcctcagaccccatcctgaccaccatccgccgaatcggcctcttcaatagcagtgccgacagggtgaaggtgattttccacccggagttcctctcctccacaagccccctgctccctgtggactatgaggagtttgtccgtggctgtcaccttggagtcttcccctcctactatgagccttggggctacacaccggctgagtgcacggttatgggaatccccagtatctccaccaatctctccggcttcggctgcttcatggaggaacacatcgcagacccctcagcttacggtatctacattcttgaccggcggttccgcagcctggatgattcctgctcgcagctcacctccttcctctacagtttctgtcagcagagccggcggcagcgtatcatccagcggaaccgcacggagcgcctctccgaccttctggactggaaatacctaggccggtactatatgtctgcgcgccacatggcgctgtccaaggcctttccagagcacttcacctacgagcccaacgaggcggatgcggcccaggggtaccgctacccacggccagcctcggtgccaccgtcgccctcgctgtcacgacactccagcccgcaccagagtgaggacgaggaggatccccggaacgggccgctggaggaagacggcgagcgctacgatgaggacgaggaggccgccaaggaccggcgcaacatccgtgcaccagagtggccgcgccgagcgtcctgcacctcctccaccagcggcagcaagcgcaactctgtggacacggccacctccagctcactcagcaccccgagcgagcccctcagccccaccagctccctgggcgaggagcgtaactaagtccgccccaccacactccccgcctgtcctgcctctctgctccagagagaggatgcagaggggtgctgctcctaaacccccgctccagatctgcactgggtgtggccccgcagtgcccccacccagtccgccaaacactccaccccctccagctccagtttccaagttcctgcactccagaatccacaaagccgtgcctttctctggctccagaatatgcataatcagcgccctggagtcccctgggcctggaccgcttcccagaggccaggaatctgccattactctgcggtggtgccagaggttttaggaaacctggcatggtgctttcaggtctggggcttttagagccccccgtgtggcttacaaattctacagcatacagagcaggccacgctcaggcccggcatgcgggccaccaagttctggaaaccacgtggtgtccctgcgaatggggcgatcaagtccagagccggggcactttcagagtttgaaggtaactgagagcagatggtcctccatttcaactccagaagtggggctctgggagggatgttctagccctccctggcatgtcagagccaggctctgcctggaggatccctccatccggctcctgtcatcccctacactttggccaagcaagaggtggtagaaccacttggctgctcattccttctggaggacacacagtctcagtccagatgccttcctgtctttctggccctttctggaccagatcctactcttcctttctaaatctgagatctccctccagggaatccgcctgcagaggacagagctggctgtcttcccccacccctaacctggcttattcccaactgctctgcccactgtgaaaccactaggttctaggtcctggcttctagatctggaaccttaccacgttactgcatactgatccctttcccatgatccagaactgaggtcactgggttctagaacccccacatttacctcgaggctcttccatccccaaactgtgccctgccttcagctttggtgaaagggagggcccctcatgtgtgctgtgctgtgtctgcaccgcttggtttgcagttgagaggggagggcaggaggggtgtgattggagtgtgtccggagatgagatgaaaaaaatacatctatatttaagaatcccaaaaaaaaaaaaaaaaaa

SEQ ID NO: 267 - DNA, 4145 bp, Homo sapiens
gggtggcctggtgtgtgggcgcggcagggcgcaggcgcaggcgcagtgtgcgtccgcgtctgaggggagggatgtgggggaagcgacggcccccggtttgtttgggctgtgggcggtgcgcagcggagagcccgggaaaagcgggaaatggcggcgccgagcgcggggtcttggtccaccttccagcacaaggagctgatggccgctgacaggggacgcaggatattgggagtgtgtggcatgcatcctcatcatcaggaaactctaaaaaagaaccgagtggtgctagccaaacagctgttgttgagcgaattgttagaacatcttctggagaaggacatcatcaccttggaaatgagggagctcatccaggccaaagtgggcagtttcagccagaatgtggaactcctcaacttgctgcctaagaggggtccccaagcttttgatgccttctgtgaagcactgagggagaccaagcaaggccacctggaggatatgttgctcaccaccctttctgggcttcagcatgtactcccaccgttgagctgtgactacgacttgagtctcccttttccggtgtgtgagtcctgtcccctttacaagaagctccgcctgtcgacagatactgtggaacactccctagacaataaagatggtcctgtctgccttcaggtgaagccttgcactcctgaattttatcaaacacacttccagctggcatataggttgcagtctcggcctcgtggcctagcactggtgttgagcaatgtgcacttcactggagagaaagaactggaatttcgctctggaggggatgtggaccacagtactctagtcaccctcttcaagcttttgggctatgacgtccatgttctatgtgaccagactgcacaggaaatgcaagagaaactgcagaattttgcacagttacctgcacaccgagtcacggactcctgcatcgtggcactcctctcgcatggtgtggagggcgccatctatggtgtggatgggaaactgctccagctccaagaggtttttcagctctttgacaacgccaactgcccaagcctacagaacaaaccaaaaatgttcttcatccaggcctgccgtggagatgagactgatcgtggggttgaccaacaagatggaaagaaccacgcaggatcccctgggtgcgaggagagtgatgccggtaaagaaaagttgccgaagatgagactgcccacgcgctcagacatgatatgcggctatgcctgcctcaaagggactgccgccatgcggaacaccaaacgaggttcctggtacatcgaggctcttgctcaagtgttttctgagcgggcttgtgatatgcacgtggccgacatgctggttaaggtgaacgcacttatcaaggatcgggaaggttatgctcctggcacagaattccaccggtgcaaggagatgtctgaatactgcagcactctgtgccgccacctctacctgttcccaggacaccctcccacatgatgtcacctccccatcatccacgccaagtggaagccactggaccacaggaggtgtgatagagcctttgatcttcaggatgcacggtttctgttctgccccctcagggatgtgggaatctcccagacttgtttcctgtgcccatcatctctgcctttgagtgtgggactccaggccagctccttttctgtgaagccctttgcctgtagagccagccttggttggacctattgccaggaatgtttcagctgcagttgaagagcctgacaagtgaagttgtaaacacagtgtggttatggggagagggcatataaattccccatatttgtgttcagttccagcttttgtagatggcactttagtgattgcttttattacattagttaagatgtctgagagaccatctcctatcttttatttcattcatatcctccgccctttttgtcctagagtgagagtttggaaggtgtccaaatttaatgtagacattatcttttggctctgaagaagcaaacatgactagagacgcaccttgctgcagtgtccagaagcggcctgtgcgttcccttcagtactgcagcgccacccagtggaaggacactcttggctcgtttgggctcaaggcaccgcagcctgtcagccaacattgccttgcatttgtaccttattgatctttgcccatggaagtctcaaagatctttcgttggttgtttctctgagctttgttactgaaatgagcctcgtggggagcatcagagaaggccaggaagaatggtgtgtttccctagactctgtaaccacctctctgtctttttccttcctgagaaacgtccatctctctcccttactattcccactttcattcaatcaacctgcacttcatatctagatttctagaaaagcttcctagcttatctccctgcttcatatctctcccttctttaccttcatttcatcctgttggctgctgccaccaaatctgtctagaatcctgctttacaggatcatgtaaatgctcaaagatgtaatgtagttctttgttcctgctttctctttcagtattaaactctcctttgatattatgtggcttttatttcagtgccatacatgttattgttttcaacctagaaacctttatccctgcttatctgaaacttcccaacttccctgttctttaagactttttttttttttttttttttttttgagacagagtctcgctctgtcgcccaggctggagggcagtggcacgatctcagctcactgcaagctccaactcccgggttcacgccattctcctgcctcagccttccaagtagctgggactacaggtgcccgccaccgtgcccggctaatttttttgtatttttagtagagacagggtttcaccatgttagccgggatggtcttgatctcctgacctcatgatccacccacctcagcctcccaaagtgttgggattacaggcgtgagccactgcgcccgggcaagacctttttttaaaaaaaaaaaaaaaaaaacttccattctttcttcctccagtctgttctcacataacagagtagttttggtttttaattttttttggttgtttgctgttttttgttttttaaggtgagttctcactatgtttctcagactggtctcgaactcctggcctcaagccatcttcccgcctcagcctctcaaatagctgggcttacaggcatgagccaccacacctggccaggatttggttgtttaaatataaatctgatcacccccctgcttagaacccttctgctttctattacccctcatttaaaatgtaaactcttcaccttggtttatgagaactggttcttgccttccccttgaacctcattaaatggtgatttcttgctaagctccagcccgagtggtctcctctcagcttctaattttgtgctctttcctgcccttttcctgggccttctcagctctccacccccaccactcttgactcaggtggtgtccttcttcctcaagtcttgacaattcccgggcccttcagtccctgagcagtctacttctgtgtctgtcaccacatcttgtcttttcccctcattgcatttattgcagtttatatatatgctacttttacttgttcatttctgtctcccctaccaggctgtaaatgagggcagaaaccttgtttgttttattcaccatcatgtaccaagtgcttggcacatagtgggccttcattaaatgtttgttgaataaaagagggaagaaggcaagccaaccttagctacaatcctaccttttgataaaatgttccttttgacaatatacacggattattatttgtactttgtttttccatgtgttttgcttttatccactggcatttttagctccttgaagacatatcatgtgtgagataacttccttcacatctcccatggtccctagcaaaatgctaggcctgtagtagtcaaggtgctcaataaatatttgtttgggtggtttgtgagccttgctgccaagtcctgcctttgggtcgacatagtatggaagtatttgagagagagaacctttccactcccactgccaggattttgtattgccatcgggtgccaaataaatgctcatatttattaaaaaaaaaaaaaaaaaaa

SEQ ID NO: 268 - DNA, 3927 bp, Homo sapiens
gggtggcctggtgtgtgggcgcggcagggcgcaggcgcaggcgcagtgtgcgtccgcgtctgaggggagggatgtgggggaagcgacggcccccggtttgtttgggctgtgggcggtgcgcagcggagagcccgggaaaagcgggaaatggcggcgccgagcgcggggtcttggtccaccttccagcacaaggagctgatggccgctgacaggggacgcaggatattgggagtgtgtggcatgcatcctcatcatcaggaaactctaaaaaagaaccgagtggtgctagccaaacagctgttgttgagcgaattgttagaacatcttctggagaaggacatcatcaccttggaaatgagggagctcatccaggccaaagtgggcagtttcagccagaatgtggaactcctcaacttgctgcctaagaggggtccccaagcttttgatgccttctgtgaagccttgcactcctgaattttatcaaacacacttccagctggcatataggttgcagtctcggcctcgtggcctagcactggtgttgagcaatgtgcacttcactggagagaaagaactggaatttcgctctggaggggatgtggaccacagtactctagtcaccctcttcaagcttttgggctatgacgtccatgttctatgtgaccagactgcacaggaaatgcaagagaaactgcagaattttgcacagttacctgcacaccgagtcacggactcctgcatcgtggcactcctctcgcatggtgtggagggcgccatctatggtgtggatgggaaactgctccagctccaagaggtttttcagctctttgacaacgccaactgcccaagcctacagaacaaaccaaaaatgttcttcatccaggcctgccgtggagatgagactgatcgtggggttgaccaacaagatggaaagaaccacgcaggatcccctgggtgcgaggagagtgatgccggtaaagaaaagttgccgaagatgagactgcccacgcgctcagacatgatatgcggctatgcctgcctcaaagggactgccgccatgcggaacaccaaacgaggttcctggtacatcgaggctcttgctcaagtgttttctgagcgggcttgtgatatgcacgtggccgacatgctggttaaggtgaacgcacttatcaaggatcgggaaggttatgctcctggcacagaattccaccggtgcaaggagatgtctgaatactgcagcactctgtgccgccacctctacctgttcccaggacaccctcccacatgatgtcacctccccatcatccacgccaagtggaagccactggaccacaggaggtgtgatagagcctttgatcttcaggatgcacggtttctgttctgccccctcagggatgtgggaatctcccagacttgtttcctgtgcccatcatctctgcctttgagtgtgggactccaggccagctccttttctgtgaagccctttgcctgtagagccagccttggttggacctattgccaggaatgtttcagctgcagttgaagagcctgacaagtgaagttgtaaacacagtgtggttatggggagagggcatataaattccccatatttgtgttcagttccagcttttgtagatggcactttagtgattgcttttattacattagttaagatgtctgagagaccatctcctatcttttatttcattcatatcctccgccctttttgtcctagagtgagagtttggaaggtgtccaaatttaatgtagacattatcttttggctctgaagaagcaaacatgactagagacgcaccttgctgcagtgtccagaagcggcctgtgcgttcccttcagtactgcagcgccacccagtggaaggacactcttggctcgtttgggctcaaggcaccgcagcctgtcagccaacattgccttgcatttgtaccttattgatctttgcccatggaagtctcaaagatctttcgttggttgtttctctgagctttgttactgaaatgagcctcgtggggagcatcagagaaggccaggaagaatggtgtgtttccctagactctgtaaccacctctctgtctttttccttcctgagaaacgtccatctctctcccttactattcccactttcattcaatcaacctgcacttcatatctagatttctagaaaagcttcctagcttatctccctgcttcatatctctcccttctttaccttcatttcatcctgttggctgctgccaccaaatctgtctagaatcctgctttacaggatcatgtaaatgctcaaagatgtaatgtagttctttgttcctgctttctctttcagtattaaactctcctttgatattatgtggcttttatttcagtgccatacatgttattgttttcaacctagaaacctttatccctgcttatctgaaacttcccaacttccctgttctttaagactttttttttttttttttttttttttgagacagagtctcgctctgtcgcccaggctggagggcagtggcacgatctcagctcactgcaagctccaactcccgggttcacgccattctcctgcctcagccttccaagtagctgggactacaggtgcccgccaccgtgcccggctaatttttttgtatttttagtagagacagggtttcaccatgttagccgggatggtcttgatctcctgacctcatgatccacccacctcagcctcccaaagtgttgggattacaggcgtgagccactgcgcccgggcaagacctttttttaaaaaaaaaaaaaaaaaaacttccattctttcttcctccagtctgttctcacataacagagtagttttggtttttaattttttttggttgtttgctgttttttgttttttaaggtgagttctcactatgtttctcagactggtctcgaactcctggcctcaagccatcttcccgcctcagcctctcaaatagctgggcttacaggcatgagccaccacacctggccaggatttggttgtttaaatataaatctgatcacccccctgcttagaacccttctgctttctattacccctcatttaaaatgtaaactcttcaccttggtttatgagaactggttcttgccttccccttgaacctcattaaatggtgatttcttgctaagctccagcccgagtggtctcctctcagcttctaattttgtgctctttcctgcccttttcctgggccttctcagctctccacccccaccactcttgactcaggtggtgtccttcttcctcaagtcttgacaattcccgggcccttcagtccctgagcagtctacttctgtgtctgtcaccacatcttgtcttttcccctcattgcatttattgcagtttatatatatgctacttttacttgttcatttctgtctcccctaccaggctgtaaatgagggcagaaaccttgtttgttttattcaccatcatgtaccaagtgcttggcacatagtgggccttcattaaatgtttgttgaataaaagagggaagaaggcaagccaaccttagctacaatcctaccttttgataaaatgttccttttgacaatatacacggattattatttgtactttgtttttccatgtgttttgcttttatccactggcatttttagctccttgaagacatatcatgtgtgagataacttccttcacatctcccatggtccctagcaaaatgctaggcctgtagtagtcaaggtgctcaataaatatttgtttgggtggtttgtgagccttgctgccaagtcctgcctttgggtcgacatagtatggaagtatttgagagagagaacctttccactcccactgccaggattttgtattgccatcgggtgccaaataaatgctcatatttattaaaaaaaaaaaaaaaaaaa

SEQ ID NO: 269 - DNA, 885 bp, Homo sapiens
agcctacgcacgaaagtgactagggaggaaggatattataaagtgatgcaaacagaaattccaccagcctccatgtatcatcatgtgtcataactcagtcaagctcagtgagcattctcagcacattgcctcaacagcttcaaggtgagccagctcaagactttgctctccaccaggcagaagatgacagactgtgaatttggatatatttacaggctggctcaggactatctgcagtgcgtcctacagataccacaacctggatcaggtccaagcaaaacgtccagagtgctacaaaatgttgcgttctcagtccaaaaagaagtggaaaagaatctgaagtcatgcttggacaatgttaatgttgtgtccgtagacactgccagaacactattcaaccaagtgatggaaaaggagtttgaagacggcatcattaactggggaagaattgtaaccatatttgcatttgaaggtattctcatcaagaaacttctacgacagcaaattgccccggatgtggatacctataaggagatttcatattttgttgcggagttcataatgaataacacaggagaatggataaggcaaaacggaggctgggaaaatggctttgtaaagaagtttgaacctaaatctggctggatgacttttctagaagttacaggaaagatctgtgaaatgctatctctcctgaagcaatactgttgaccagaaaggacactccatattgtgaaaccggcctaatttttctgactgatatggaaacgattgccaacacatacttctacttttaaataaacaactttgatgatgtaacttgaccttccagagttatggaaattttgtccccatgtaatgaataaattgtatgtatttttctct

SEQ ID NO: 270 - DNA, 1334 bp, Homo sapiens
ggaacttgcctcatgtgtgtgtatgtgtgtgtgtgtgattgtgggtgtgggtagtttaacctttttatatcttagctgcctgtaaactcagtgattgctacgttcagatcaaaccttgaacttttttttctggtgccaggagccttcctgtgctccccattgcctgccagaaccaccaccgtttcccatggttactctacagcagcttcactgcctgaaaatgaaaactgaacaaagggattaaattgtgagaacaactgtcaatctattatatatttgtacaatctggtattaaaatgctttccccaaaagatattctgcgaaaagatctgaagttggtccatggttatcccatgacctgtgcttttgcaagcaactgggaaaaaattgaacagttccatagcagaccagatgacattgtgatagccacttatcctaaatcaggtactacttgggttagtgaaattatagacatgattctaaatgatggagatattgaaaaatgtaagcgaggttttattactgaaaaagttccaatgttggaaatgactctccctggattaagaacatcaggtatagaacaattggagaagaatccatcaccccggattgtgaaaacacatctaccgactgatcttcttcctaaatctttctgggaaaacaattgcaagatgatttatctggctcgtaatgccaaggatgtttcagtctcatattaccattttgacttaatgaataatttacagccttttcctggtacctgggaagaatatctggagaaattcttaactggaaaagtggcctatggttcctggtttactcatgttaaaaactggtggaagaaaaaggaagaacacccaatactttttttgtactatgaagatatgaaagagaatccaaaggaggaaatcaagaagatcattagatttctagagaagaacctgaatgatgagatcttggataggatcatccatcacacctcatttgaagtgatgaaggacaatcctttggtaaattatacacatctaccaactacagtgatggatcatagcaaatccccttttatgcgtaaagggacggctggtgactggaagaattacttcaccgtggcccaaaatgagaaatttgatgctatttatgagacagaaatgtccaaaactgcacttcaattccgcacagagatttaaagtgtctaagtcacaaatctgaagaaataagagattgtctgtagttgattgaaacgagggcagttatgaattgatttgggcaatcaaatgaatttataaaggagaataatatgcttttaaaaaaaaaaaaaaaaaaaaaaaaaaaaa

SEQ ID NO: 271 - DNA, 1484 bp, Homo sapiens
ggtggtttgaactttgagccttttgtagtcctgatgaataatttcattttcctcaagtttatgacactcggaacgtcaagaactggaggtttgtgcaatttgagaccggtcggcactgtgcagagatcagagtactaagagacagagattaaaatggcttccagaggaaagacagagacaagcaaattaaagcagaatttagaagaacagttggatagactcatgcaacaattacaagatctggaggaatgcagagaggaacttgatacagatgaatatgaagaaaccaaaaaggaaactctggagcaactaagtgaatttaatgattcactaaagaaaattatgtctggaaatatgactttggtagatgaactaagtggaatgcagctggctattcaggcagctatcagccaggcctttaaaaccccagaggtcatcagattgtttgcaaagaaacaaccaggtcagcttcggacaaggttagcagagatggatagagatctgatggtaggaaagctggaaagagacctgtacactcaacagaaagtggagatactaacagctcttaggaaacttggagagaagctgactgcagatgatgaggccttcttgtcagcaaatgcaggtgctatactcagccagtttgagaaagtctctacagaccttggctctggagacaaaattcttgctctggcaagttttgaggttgaaaaaacaaaaaaatgacatggtgcagaagcttgtaacattgatcacattcttaatgtaaatggtgtctttcttctggggttttcagttattgcaaagaaatgaagagattctggaaatgcatcaataacctaagaaaaagcgacataaaaatatacttatggcttgtgtttatgctcttcatcattgtgcgttgtgtgcggttacctgcttgagtgatcctgaacttgttgcgacagagggactcactggactctgttcgttatgatttgtctgtttaagagagaaaacaaagtggacttgatttttattaaggctgtttgtttttaagtgttgatagtgaacgaaaagatgtgaagtaatgatatttttctgcttacaacttatccccactcattggagtgaacagtgacgcaagctcaatagacttcataagtgttcatagaattttacaattctgagtgatcttagaaatcatttctgtttttacaaacaaggaaactgaggtccagaaagagcaagcgactttgcttaaagtcgcatcagagagctgagggtaagactcaggtgtcctgactcccagtttagtatcttttgaattttatttctgtaccatttaaaaaaaataattaacactatttgtgcaagtcagtgtttttgaaaattcagtgtcccaataaaaagtggactgcacactaaaaaaaaaaaaaaaaaaaaaaaaaaaaaaaaaaaaaaaaaaaaaaaaaaaaaaaaaaaaaaaaaaaaaaaaaaaaaaa

SEQ ID NO: 272 - DNA, 1760 bp, Homo sapiens
ggagagatgatgtttaggtccgggactgtcagtcagtgcgcggccaggtacgggccgacgggcccgcggggccggcgccgccatggcggccgtgtttgatttggatttggagacggaggaaggcagcgagggcgagggcgagccagagctcagccccgcggacgcatgtccccttgccgagttgagggcagctggcctagagcctgtgggacactatgaagaggtggagctgactgagaccagcgtgaacgttggcccagagcgcatcgggccccactgctttgagctgctgcgtgtgctgggcaaggggggctatggcaaggtgttccaggtgcgaaaggtgcaaggcaccaacttgggcaaaatatatgccatgaaagtcctaaggaaggccaaaattgtgcgcaatgccaaggacacagcacacacacgggctgagcggaacattctagagtcagtgaagcacccctttattgtggaactggcctatgccttccagactggtggcaaactctacctcatccttgagtgcctcagtggtggcgagctcttcacgcatctggagcgagagggcatcttcctggaagatacggcctgcttctacctggctgagatcacgctggccctgggccatctccactcccagggcatcatctaccgggacctcaagcccgagaacatcatgctcagcagccagggccacatcaaactgaccgactttggactctgcaaggagtctatccatgagggcgccgtcactcacaccttctgcggcaccattgagtacatggcccctgagattctggtgcgcagtggccacaaccgggctgtggactggtggagcctgggggccctgatccgcccttcaccgcagagaaccggaagaaaaccatggataagatcatcaggggcaagctggcactgcccccctacctcaccccagatgcccgggaccttgtcaaaaagtttctgaaacggaatcccagccagcggattgggggtggcccaggggatgctgctgatgtgcagagacatccctttttccggcacatgaattgggacgaccttctggcctggcgtgtggacccccctttcaggccctgtctgcagtcagaggaggacgtgagccagtttgatacccgcttcacacggcagacgccggtggacagtcctgatgacacagccctcagcgagagtgccaaccaggccttcctgggcttcacatacgtggcgccgtctgtcctggacagcatcaaggagggcttctccttccagcccaagctgcgctcacccaggcgcctcaacagtagcccccgggcccccgtcagccccctcaagttctccccttttgaggggtttcggcccagccccagcctgccggagcccacggagctacctctacctccactcctgccaccgccgccgccctcgaccaccgcccctctccccatccgtcccccctcagggaccaagaagtccaagaggggccgtgggcgtccagggcgctaggaagccgggtgggggtgagggtagcccttgagccctgtccctgcggctgtgagagcagcaggaccctgggccagttccagagacctgggggtgtgtctgggggtggggtgtgagtgcgtatgaaagtgtgtgtctgctggggcagctgtgcccctgaatcatgggcacggagggccgcccgccacgccccgcgctcaactgctcccgtggaagattaaagggctgaatcatggtgctgaaaaaaaaaaaaa

SEQ ID NO: 273 - DNA, 1782 bp, Homo sapiens
ggagagatgatgtttaggtccgggactgtcagtcagtgcgcggccaggtacgggccgacgggcccgcggggccggcgccgccatggcggccgtgtttgatttggatttggagacggaggaaggcagcgagggcgagggcgagccagagctcagccccgcggacgcatgtccccttgccgagttgagggcagctggcctagagcctgtgggacactatgaagaggtggagctgactgagaccagcgtgaacgttggcccagagcgcatcgggccccactgctttgagctgctgcgtgtgctgggcaaggggggctatggcaaggtgttccaggtgcgaaaggtgcaaggcaccaacttgggcaaaatatatgccatgaaagtcctaaggaaggccaaaattgtgcgcaatgccaaggacacagcacacacacgggctgagcggaacattctagagtcagtgaagcacccctttattgtggaactggcctatgccttccagactggtggcaaactctacctcatccttgagtgcctcagtggtggcgagctcttcacgcatctggagcgagagggcatcttcctggaagatacggcctgcttctacctggctgagatcacgctggccctgggccatctccactcccagggcatcatctaccgggacctcaagcccgagaacatcatgctcagcagccagggccacatcaaactgaccgactttggactctgcaaggagtctatccatgagggcgccgtcactcacaccttctgcggcaccattgagtacatggcccctgagattctggtgcgcagtggccacaaccgggctgtggactggtggagcctgggggccctgatgtacgacatgctcactggatcgccgcccttcaccgcagagaaccggaagaaaaccatggataagatcatcaggggcaagctggcactgcccccctacctcaccccagatgcccgggaccttgtcaaaaagtttctgaaacggaatcccagccagcggattgggggtggcccaggggatgctgctgatgtgcagagacatccctttttccggcacatgaattgggacgaccttctggcctggcgtgtggacccccctttcaggccctgtctgcagtcagaggaggacgtgagccagtttgatacccgcttcacacggcagacgccggtggacagtcctgatgacacagccctcagcgagagtgccaaccaggccttcctgggcttcacatacgtggcgccgtctgtcctggacagcatcaaggagggcttctccttccagcccaagctgcgctcacccaggcgcctcaacagtagcccccgggcccccgtcagccccctcaagttctccccttttgaggggtttcggcccagccccagcctgccggagcccacggagctacctctacctccactcctgccaccgccgccgccctcgaccaccgcccctctccccatccgtcccccctcagggaccaagaagtccaagaggggccgtgggcgtccagggcgctaggaagccgggtgggggtgagggtagcccttgagccctgtccctgcggctgtgagagcagcaggaccctgggccagttccagagacctgggggtgtgtctgggggtggggtgtgagtgcgtatgaaagtgtgtgtctgctggggcagctgtgcccctgaatcatgggcacggagggccgcccgccacgccccgcgctcaactgctcccgtggaagattaaagggctgaatcatggtgctgaaaaaaaaaaaaa

SEQ ID NO: 274 - DNA, 1266 bp, Homo sapiens
atgttccgagcggcggctccggggcagctccggcgggcggcctcattgctacgatttcagagtaccctggtaatagctgagcatgcaaatgattccctagcacccattactttaaataccattactgcagccacacgccttggaggtgaagtgtcctgcttagtagctggaaccaaatgtgacaaggtggcacaagatctctgtaaagtagcaggcatagcaaaagttctggtggctcagcatgatgtgtacaaaggcctacttccagaggaactgacaccattgattttggcaactcagaagcagttcaattacacacacatctgtgctggagcatctgccttcggaaagaaccttttgcccagagtagcagccaaacttgaggttgccccgatttctgacatcattgcaatcaagtcacctgacacatttgtgagaactatttatgcaggaaatgctctatgtacagtgaagtgtgatgagaaagtgaaagtgttttctgtccgtggaacatcctttgatgctgcagcaacaagtggcggtagtgccagttcagaaaaggcatcaagtacttcaccagtggaaatatcagagtggcttgaccagaaattaacaaaaagtgatcgaccagagctaacaggtgccaaagtggtggtatctggtggtcgaggcttgaagagtggagagaactttaagttgttatatgacttggcagatcaactacatgctgcagttggtgcttcccgtgctgctgttgatgctggctttgttcccaatgacatgcaagttggacagacgggaaaaatagtagcaccagaactttatattgctgttggaatatctggagccatccaacatttagctgggatgaaagacagcaagacaattgtggcaattaataaagacccagaagctccaattttccaagtggcagattatggaatagttgcagatttatttaaggtagttcctgaaatgactgagatattgaagaaaaaatgaatcaggatcatgccttaaaaagaaaacttttgttaaagtattccactgaaatcacagatatttgtgggtattataacaatcattggaaagcatggagagctacatttcataatttgagggaaaatttctaacagatgccagaatgcttgtttatgggattgctgtgtttccttttaattatttgtggttccaaacaattattgtttgaacttttttaattctgtactaaaatctataataaagcttttccacagctttaaaact

SEQ ID NO: 275 - DNA, 1866 bp, Homo sapiens
gggagccacgtctccgaagaccgatagctgcttcgggattggcgtccgggcggctatctaggggctgctgggaagatggcggactcggtggctagccgatgaggaggccgcggggggaacccggcccccgggccccgagaccgactgagggagcgacctgcgcagggcccggggagtcatggtctccatcacccaactccatgcttcgagtcctgctctctgctcagacctcccctgctcggctgtctggcctgctgctgatccctccagtacagccctgctgtttggggcccagcaaatggggggaccggcctgttggaggaggccccagtgcaggtcctgtgcaaggactgcagcggcttctggaacaggcgaagagccctggggagctgctgcgctggctgggccagaaccccagcaaggtgcgcgcccaccactactcggtggcgcttcgtcgtctgggccagctcttggggtctcggccacggccccctcctgtggagcaggtcacactgcaggacttgagtcagctcatcatccgaaactgcccctcctttgacattcacaccatccacgtgtgtctgcaccttgcagtcttacttggctttccatctgatggtcccctggtgtgtgccctggaacaggagcgaaggctccgcctccctccgaagccacctccccctttgcagccccttctccgaggtgggcaagggttggaagctgctctaagctgcccccgttttctgcggtatccacggcagcatctgatcagcagcctggcagaggcaaggccagaggaactgactccccacgtgatggtgctcctggcccagcacctggcccggcaccggttgcgggagccccagcttctggaagccattgcccacttcctggtggttcaggaaacgcaactcagcagcaaggtggtacagaagttggtcctgccctttgggcgactgaactacctgcccctggaacagcagtttatgccctgccttgagaggatcctggctcgggaagcaggggtggcacccctggctacagtcaacatcttgatgtcactgtgccaactgcggtgcctgcccttcagagccctgcactttgttttttcccctggcttcatcaactacatcagtggcacccctcatgctctgattgtgcgtcgctacctctccctgctggacacggccgtggagctggagctcccaggataccggggtccccgccttccccgaaggcagcaagtgcccatctttccccagcctctcatcaccgaccgtgcccgctgcaagtacagtcacaaggacatagtagctgaggggttgcgccagctgctgggggaggagaaataccgccaggacctgactgtgcctccaggctactgcacagacttcctgctgtgcgccagcagctctggtgctgtgcttcccgtgaggacccaggaccccttcctgccatacccaccaaggtcctgcccacagggccaggctgcctctagcgccactactcgagaccctgcccagagggtggtgctggtgttgcgggaacgctggcatttctgccgggacggccgggtgctgctgggctcgagggccctgagggagcggcacctaggcctgatgggctaccagctcctgccgctacccttcgaggaactggagtcccagagaggcctgccccagctcaagagctacctgaggcagaagctccaggccctgggcctgcgctgggggcctgaagggggctgaggggttgatgtggggttcaggatggcccccccatggggggtggatgatttgcactttggttccctgtgttttgatttctcattaaagttcctttccttccccgtaaaaaaaaaaaaaa

SEQ ID NO: 276 - DNA, 1443 bp, Homo sapiens
gggagccacgtctccgaagaccgatagctgcttcgggattggcgtccgggcggctatctaggggctgctgggaagatggcggactcggtggctagccgatgaggaggccgcggggggaacccggcccccgggccccgagaccgactgagggagcgacctgcgcagggcccggggagtcatgctttccatctgatggtcccctggtgtgtgccctggaacaggagcgaaggctccgcctccctccgaagccacctccccctttgcagccccttctccgaggtgggcaagggttggaagctgctctaagctgcccccgttttctgcggtatccacggcagcatctgatcagcagcctggcagaggcaaggccagaggaactgactccccacgtgatggtgctcctggcccagcacctggcccggcaccggttgcgggagccccagcttctggaagccattgcccacttcctggtggttcaggaaacgcaactcagcagcaaggtggtacagaagttggtcctgccctttgggcgactgaactacctgcccctggaacagcagtttatgccctgccttgagaggatcctggctcgggaagcaggggtggcacccctggctacagtcaacatcttgatgtcactgtgccaactgcggtgcctgcccttcagagccctgcactttgttttttcccctggcttcatcaactacatcagtggcacccctcatgctctgattgtgcgtcgctacctctccctgctggacacggccgtggagctggagctcccaggataccggggtccccgccttccccgaaggcagcaagtgcccatctttccccagcctctcatcaccgaccgtgcccgctgcaagtacagtcacaaggacatagtagctgaggggttgcgccagctgctgggggaggagaaataccgccaggacctgactgtgcctccaggctactgcacagacttcctgctgtgcgccagcagctctggtgctgtgcttcccgtgaggacccaggaccccttcctgccatacccaccaaggtcctgcccacagggccaggctgcctctagcgccactactcgagaccctgcccagagggtggtgctggtgttgcgggaacgctggcatttctgccgggacggccgggtgctgctgggctcgagggccctgagggagcggcacctaggcctgatgggctaccagctcctgccgctacccttcgaggaactggagtcccagagaggcctgccccagctcaagagctacctgaggcagaagctccaggccctgggcctgcgctgggggcctgaagggggctgaggggttgatgtggggttcaggatggcccccccatggggggtggatgatttgcactttggttccctgtgttttgatttctcattaaagttcctttccttccccgtaaaaaaaaaaaaaa

SEQ ID NO: 277 - DNA, 8413 bp, Homo sapiens
tttccagattggggctcgggccgcgcctcctccgggaccctccccttggaccgagccgatcgccgcggggcagttcgggccggctgtcctggcgcgaaaaggtggacaagtcctattttcaagagaagatgacttttaacagttttgaaggatctaaaacttgtgtacctgcagacatcaataaggaagaagaatttgtagaagagtttaatagattaaaaacttttgctaattttccaagtggtagtcctgtttcagcatcaacactggcacgagcagggtttctttatactggtgaaggagataccgtgcggtgctttagttgtcatgcagctgtagatagatggcaatatggagactcagcagttggaagacacaggaaagtatccccaaattgcagatttatcaacggcttttatcttgaaaatagtgccacgcagtctacaaattctggtatccagaatggtcagtacaaagttgaaaactatctgggaagcagagatcattttgccttagacaggccatctgagacacatgcagactatcttttgagaactgggcaggttgtagatatatcagacaccatatacccgaggaaccctgccatgtatagtgaagaagctagattaaagtcctttcagaactggccagactatgctcacctaaccccaagagagttagcaagtgctggactctactacacaggtattggtgaccaagtgcagtgcttttgttgtggtggaaaactgaaaaattgggaaccttgtgatcgtgcctggtcagaacacaggcgacactttcctaattgcttctttgttttgggccggaatcttaatattcgaagtgaatctgatgctgtgagttctgataggaatttcccaaattcaacaaatcttccaagaaatccatccatggcagattatgaagcacggatctttacttttgggacatggatatactcagttaacaaggagcagcttgcaagagctggattttatgctttaggtgaaggtgataaagtaaagtgctttcactgtggaggagggctaactgattggaagcccagtgaagacccttgggaacaacatgctaaatggtatccagggtgcaaatatctgttagaacagaagggacaagaatatataaacaatattcatttaactcattcacttgaggagtgtctggtaagaactactgagaaaacaccatcactaactagaagaattgatgataccatcttccaaaatcctatggtacaagaagctatacgaatggggttcagtttcaaggacattaagaaaataatggaggaaaaaattcagatatctgggagcaactataaatcacttgaggttctggttgcagatctagtgaatgctcagaaagacagtatgcaagatgagtcaagtcagacttcattacagaaagagattagtactgaagagcagctaaggcgcctgcaagaggagaagctttgcaaaatctgtatggatagaaatattgctatcgtttttgttccttgtggacatctagtcacttgtaaacaatgtgctgaagcagttgacaagtgtcccatgtgctacacagtcattactttcaagcaaaaaatttttatgtcttaatctaactctatagtaggcatgttatgttgttcttattaccctgattgaatgtgtgatgtgaactgactttaagtaatcaggattgaattccattagcatttgctaccaagtaggaaaaaaaatgtacatggcagtgttttagttggcaatataatctttgaatttcttgatttttcagggtattagctgtattatccattttttttactgttatttaattgaaaccatagactaagaataagaagcatcatactataactgaacacaatgtgtattcatagtatactgatttaatttctaagtgtaagtgaattaatcatctggattttttattcttttcagataggcttaacaaatggagctttctgtatataaatgtggagattagagttaatctccccaatcacataatttgttttgtgtgaaaaaggaataaattgttccatgctggtggaaagatagagattgtttttagaggttggttgttgtgttttaggattctgtccattttcttttaaagttataaacacgtacttgtgcgaattatttttttaaagtgatttgccatttttgaaagcgtatttaatgatagaatactatcgagccaacatgtactgacatggaaagatgtcaaagatatgttaagtgtaaaatgcaagtggcaaaacactatgtatagtctgagccagatcaaagtatgtatgtttttaatatgcatagaacaaaagatttggaaagatatacaccaaactgttaaatgtggtttctcttcggggagggggggattgggggaggggccccagaggggttttataggggccttttcactttctacttttttcattttgttctgttcgaattttttataagtatgtattacttttgtaatcagaatttttagaaagtattttgctgatttaaaggcttaggcatgttcaaacgcctgcaaaactacttatcactcagctttagtttttctaatccaagaaggcagggcagttaacctttttggtgccaatgtgaaatgtaaatgattttatgtttttcctgctttgtggatgaaaaatatttctgagtggtagttttttgacaggtagaccatgtcttatcttgtttcaaaataagtatttctgattttgtaaaatgaaatataaaatatgtctcagatcttccaattaattagtaaggattcatccttaatccttgctagtttaagcctgcctaagtcactttactaaaagatctttgttaactcagtattttaaacatctgtcagcttatgtaggtaaaagtagaagcatgtttgtacactgcttgtagttatagtgacagctttccatgttgagattctcatatcatcttgtatcttaaagtttcatgtgagtttttaccgttaggatgattaagatgtatataggacaaaatgttaagtctttcctctacctacatttgttttcttggctagtaatagtagtagatacttctgaaataaatgttctctcaagatccttaaaacctcttggaaattataaaaatattggcaagaaaagaagaatagttgtttaaatattttttaaaaaacacttgaataagaatcagtagggtataaactagaagtttaaaaatgcttcatagaacgtccagggtttacattacaagattctcacaacaaacctattgtagaggtgagtaaggcatgttactacagaggaaagtttgagagtaaaactgtaaaaaattatatttttgttgtactttctaagagaaagagtattgttatgttctcctaacttctgttgattactactttaagtgatattcatttaaaacattgcaaatttattttatttatttaattttctttttgagatggagtcttgcttgtcacccaggctggagtgcagtggagtgatctctgctcactgcaacctccgccttctgggttcaagcgattctcgtgcctcagcttcctgagtagctggaattacaggcaggtgccaccatgcccgactaatttttttttatttttagtagagacggggtttcaccatgttggccaggctggtatcaaactcctgacctcaagagatccactcgccttgccctcccaaagtgctgggattacaggcttgagccaccacgcccggctaaaacattgcaaatttaaatgagagttttaaaaattaaataatgactgccctgtttctgttttagtatgtaaatcctcagttcttcacctttgcactgtctgccacttagtttggttatatagtcattaacttgaatttggtctgtatagtctagactttaaatttaaagttttctacaaggggagaaaagtgttaaaatttttaaaatatgttttccaggacacttcacttccaagtcaggtaggtagttcaatctagttgttagccaaggactcaaggactgaattgttttaacataaggcttttcctgttctgggagccgcacttcattaaaattcttctaaaacttgtatgtttagagttaagcaagactttttttcttcctctccatgagttgtgaaatttaatgcacaacgctgatgtggctaacaagtttattttaagaattgtttagaaatgctgttgcttcaggttcttaaaatcactcagcactccaacttctaatcaaatttttggagacttaacagcatttgtctgtgtttgaactataaaaagcaccggatcttttccatctaattccgcaaaaattgatcatttgcaaagtcaaaactatagccatatccaaatcttttccccctcccaagagttctcagtgtctacatgtagactattccttttctgtataaagttcactctaggatttcaagtcaccacttattttacattttagtcatgcaaagattcaagtagttttgcaataagtacttatctttatttgtaataatttagtctgctgatcaaaagcattgtcttaatttttgagaactggttttagcatttacaaactaaattccagttaattaattaatagctttatattgcctttcctgctacatttggttttttcccctgtccctttgattacgggctaaggtagggtagagtgggtgtagtgagtgtatataatgtgatttggccctgtgtattatgatattttgttatttttgttgttatattatttacatttcagtagttgttttttgtgtttccattttagtggataaaatttgtattttgaactatgaatggagactaccgccccagcattagtttcacatgatataccctttaaacccgaatcattgttttatttcctgattacacaggtgttgaatggggaaaggggctagtatatcagtaggatatactatgggatgtatatatatcattgctgttagagaaatgaaataaaatggggctgggctcagtggctcacgcctgtaatcccagcactttgggaggctgaggcaggtggatcacgaggtcaggagatcgagaccatcctggctaacacggtgaaaccccgtctctactaaaaaacagaaaattagccgggcgtggtggcgggcgcctgtagtcccagctactcgggaggctgaggcaggagaatggtgtgaacccgggaggcagagcttgcagtgagccgagatctcgccactgcactccagcctgggcaacagagcaagactctgtctcaaaaaaaaaaaaaaaagaaataagaaaatgggaagcaatatttgacatagttctttttagtcaaatctacttgttaaaaaaagggtagcagtttattcatctgtgaaaggaaaataatacttatcttacaaggttgcaagagctcaaggagaccatgtatgtaaagttcctgctgtaaatatgaactcccatcctaatacccttttacctctctgtgggtttgtcttgacctggaaatttgggctaaaacttagaaaaaattcttacatgataactcagtgatgcttactcatagtttttggtgtttctcatagataagatataaatcagctgggcgcggtggctcatgcctgtaatcccagcactttgggaggccgaggcgggcagatcacctgaggtcgggaggtcgagaccagcctgaccaacatggagaaaccccgtctctactaaaaatacaaaattagctgggcgtggtggctcatgcctgtaatcccagctacttgggaggctgaggcaggagaatcgcttgaacccaggaggcggaggttgtggtgagcgaagatcgtgccattgcactccagcctgggcaacaagagcaaaactctgtctcaaaaaaaaaaaaagatataaatcacaataaataaataggtcaatacaaatgttagccaggcgtggtggcacatgcccatagtcgcagctactctggaggcagaggcaggaggatcacttgagcccatgaatttgaggcagcagtgagctatgattgtgccactgtactccagtctgggtgacagagtgagaccccatctctaaataaataggtcaaacccttaaaaatatttaaattcttaaaaaattgaaaagattattcttctcaaatttagttgagctttctaagagaagcaattggctttttcccacttcaataatcattttcagtttgactcatacagttaacacaatgtgaatttcttcctcagcataacagagttatagaatgacagggctggaagtgaccttagagagtatccagttctttcattttacaggtgaggcaactgagactcaaaggtgatgtaatttgtgcaaagattatagctaattagtagcagagccctgactgggacatagtttgaaggtgaaaaacttcaccaagctacctttcttgaaaggtccaaatgtttatgttttcaactactctttccactgtaccataactttcactacatattaaatgacactttataactaatataataggacaatcatcaatgcatatatagccagcccttcatatctgtgggttttgcatccatggattcaaccaaggaggaattgaaaacactgagaaaaaaaaaaaagaccacacaataaaaaaaaaaaatacaaaataatacaaagaaaaagccaaaattgtcatactgttgttaagcaacagtataacaactatttacatagcattaaggttggtgcaaaaatgcaaaaaaaaaaaaagcaattatttttaaaccaacctaatatattgtattaggtattaaagtcatctggacatgaattaaagtatatgatgccagcctggacaaaaggcaaaaccctgtctctacaaaaaatacaaaaattagctgggcatggtggtgtgtgcctgtagtcctggctactccggagcctgaggtgggaggatcgcttgagtctgggaggcagaggctgcattgagctatgatcatggcactgcattccagcctgggtgacagtgcaagaccttgtctcagaataaataaagtatgtgatgaagatgtgcatacattatatgcaaatactgttttttttttttttaatttaaacagtctcactgtgttgcccaggatggagtgcaatggcacaatcttggctcatggcaaactctgcctcgcaagcagctgggactacaggcatgctccacggtgcccagttaattttttttgtattcttagtagagacagggtttcaccatgttggccaggctagtcttgaatttctgacctcaagtgattcatctcccaaagtgctgggattacaggcgtgagccaccacggccggctaatttttgtattttttagtagtgactggtttcgcggtgttgaccaggctggtctcgaactcctgatctcaggtgatctgcctgcctcggcctcacaaagtgctgggattacaggtgtgaaccactgctcccggccttgtgtgattttatctaagggacttaagcgtcctcaggtcctagggggtcgtgaaaccaaaaccccagggatagcaagggacaattgtatcttcaaagtagacaaatggcgccgggcacggtggctcacgcctgtaatcccagcagtttccgaggctgaggcaggcggctcacctgaggtcaggagttggagaccagcctggccaacatgctgaaaccctgtctgtacaaaaatacaaaaatagctgggcatggtggcgcatgcctgtagtcccagctactagagcgactgaggcaggagaattgcttgaacctgggaggcggaggttgcagggagccaagatggcgccaccgcactccagcctaggtgatagagtgagactccctctcaaaaacaaaacaaaacaaaaaaattagacaaatgctacattaatgtttgggtggtcagattctactttgaatctgaagtttgcagatatgcctatagatttttggagtttaccactttcttattctgtatcattaatgtaatattttaaattactatatatgttaccatttttctggatttagtaagaaatttgcagttttggtttgatgtaacaagggttttaatgtaatttatgttagattttgcatttttttcattactgttatattttaacctgactgactgatctaattgtattagtattgtgaataatcatgtgaaatgttttgagacagagtactatatttgtgaatataattttatggtttttttcacttagaacctttctgtgtggaaaactaagaaaattgctttctgctgtataatctggcattcattgtagattaaagcttatttttctgtgaataaaacgtattcaataaaatactattctttaaaatta

SEQ ID NO: 278 - DNA, 2658 bp, Homo sapiens
gcgcacggcttgcccatgtgtgctgcagccgtcagccggcccagctgagcagcagcaacggaccttgttaacggcgcggcagcctccaccgcctgctgttgccctcctctctcggtggtctgtccgcccagcgcacgtcaccatgggcaagagccggacgaagcgcttcaagcgacctcagttctcccctacgggcgactgtcaggccgaggcggctgcggcggcgaatgggaccggaggcgaggaggacgacgggccggcggcggagctgctggaaaagaaatcccagtgcttgtggaggttttgaagtttgtgatgacatggtgactaaggatatcatgacccctctggttgcgctgctaaaagagtgtagtgctggactggattcaaatgagatgtctctgcaggagaaaaaagatcagaacagaaattctattgagaacatagccaatgagactgtgaacgtgctgtggaatatatgtgaatgcagtagtagagcagtgtctatattcaacaaagaagggtgtttggagattgtgttaaagtatttaagtaggttccctaccaatgttgacctggctatttcagtagcatattgtttgcagacagtgactgaggataacccagagctgctgaagtctttcagtgctacagcattgaacatgctggaatcagcactgctttctcccgtcagttccatggaatctcttctattgaagacattggtagcaggcacaatttggaatctaaaggacattattccatgcaagagtcaagcagaaatcataaatgccttactaaagatcttatctgaagttttgggaatggatgctggtgaaatggttattcaaatgaaagaggctgaaacgcaaaggttaaaaactgctgcagaggctgaggaaatattagagaacactaatggggatgatttgattgaagatgatgaaatggaaggaatttctcataaaagaagagtcagaaggaaaactttcgtttcagatttacttccgcccactgacaaggaactgagagagactatagcattgctgacagcccaacagactgctctggaaattattgtcaacatgtgctgcaatgaagatccctctgatgacgaatgggaagagctttctagcagtgatgaaagtgacgcatttatggagaattccttcagtgagtgcgggggacagctgttttctcccctctgcctctcccatgaagttcacacggctctcaccaactacctcatcccaaagaagatttttgagaaaactgcctttccaaacagcattgcagttgacctatgttctaggaaccctacttggaaacctttgattagaaaaatgaacactattcagtgcagagccctcttctgtctccagagtcttgtgtccctcctggatgtggagcacctgggaggagccgcagcccttcagacgcttgcacagcatctgtcacagctgcttttttctcaaccagattttgctaaacatgttgactttctagaagccataagtagtgctttgagggcccttttgcaaacaatggcctccaagaacatttcccagtgcatgactcctgatcagctgatgacattatgcaaagcaggcattcatagtagtaatgtcggggttagagtgaatgtcgttagcattttaggaatcactggcagcgtccttgccaaagaagatggtacacttgaaactcttaagaacattgggtgctttctgcttgaagttaccaccaaagatccttcccttgtggtagcaggagaagctttggatgccctctttgatgtttttgcagatggtaaagaagccgaaagagcctcgattcaaattaaattattatctgctctgaaagaattccagccggtctttaaaatgaagatacgtaaagaagggagaggtaactatagcacagatcagctgtgtgttcttgacaatgtgaaaatgaatttgcgaagatttattgcttatcaagaaactgttgagaaaagactgacttcttaaacaatccaaaaaagaaaccagttcttcccccaaagtattcaatgcttagaatactaaaaggttttctttgaatgtatatgtttctgaaagtcattttttaatgattacaggcgtgagccaccgtgcctggccagaaactcttttttaagcgatgagatctgtgtggcatttctagcgctctctaaattatgtctctggcatattttaatcactggaaactcaaagagtggaagagtggaagtgcgaaggaatctcaggtagctcttaactaattcgccagcagtgaagaaacttcaaccaatcatgttttccttgaattttgcaaagaaagaaaatccaaagcattgcttggatgttcttttaaggcattttatatcagttgaaccttaaactgaaatatgaagacaagctttataaactagttttttgatatgaagtatatcaattatgtttgccttttgtgaagaagtaaatgagttgaatttgtatttcacttactagattatactaatgagctaatggggtcattgccatcctccctactcatgactttgatgagttattgctgtaacatcacttcttgatttaatttgatatggaatcagaattgggagaaggtatttttaaataaacaactttttaatgg

SEQ ID NO: 279 - DNA, 2590 bp, Homo sapiens
atgtgtgctgcagccgtcagccggcccagctgagcagcagcaacggaccttgttaacggcgcggcagcctccaccgcctgctgttgccctcctctctcggtggtctgtccgcccagcgcacgtcaccatgggcaagagccggacgaagcgcttcaagcgacctcagttctcccctacgggcgactgtcaggccgaggcggctgcggcggcgaatgggaccggaggcgaggaggacgacgggccggcggcggagctgctggaaaagctccagcacccgagcgccgaggtccgcgagtgcgcctgcgcagggctggcccggctggtgcagcagcggccggcactcccgggcctggcgcgacgagacgccgtgcgccgcctcgggccgctgctgctagaccccagcctggccgtcagggagactgcagccggcgcgctgagaaatctcagtgcttgtggaggttttgaagtttgtgatgacatggtgactaaggatatcatgacccctctggttgcgctgctaaaagagtgtagtgctggactggattcaaatgagatgtctctgcaggagaaaaaagatcagaacagaaattctattgagaacatagccaatgagactgtgaacgtgctgtggaatatatgtgaatgcagtagtagagcagtgtctatattcaacaaagaagggtgtttggagattgtgttaaagtatttaagtaggttccctaccaatgttgacctggctatttcagtagcatattgtttgcagacagtgactgaggataacccagagctgctgaagtctttcagtgctacagcattgaacatgctggaatcagcactgctttctcctgtcagttccatggaatctcttctattgaagacattggtagcaggcacaatttggaatctaaaggacattattccatgcaagagtcaagcagaaatcataaatgccttactaaagatcttatctgaagttttgggaatggatgctggtgaaatggttattcaaatgaaagaggctgaaacgcaaaggttaaaaactgctgcagaggctgaggaaatattagagaacactaatggggatgatttgattgaagatgatgaaatggaaggaatttctcataaaagaagagtcagaaggaaaactttcgtttcagatttacttccgcccactgacaaggaactgagagagactatagcattgctgacagcccaacagactgctctggaaattattgtcaacatgtgctgcaatgaagatccctctgatgacgaatgggaagagctttctagcagtgatgaaagtgacgcatttatggagaattccttcagtgagtgcgggggacagctgttttctcccctctgcctctcccatgaagttcacacggctctcaccaactacctcatcccaaagaagatttttgagaaaactgcctttccaaacagcattgcagttgacctatgttctaggaaccctacttggaaacctttgattagaaaaatgaacactattcagtgcagagccctcttctgtctccagagtcttgtgtccctcctggatgtggagcacctgggaggagccgcagcccttcagacgcttgcacagcatctgtcacagctgcttttttctcaaccagattttgctaaacatgttgactttctagaagccataagtagtgctttgagggcccttttgcaaacaatggcctccaagaacatttcccagtgcatgactcctgatcagctgatgacattatgcaaagcaggcattcatagtagtaatgtcggggttagagtgaatgtcgttagcattttaggaatcactggcagcgtccttgccaaagaagatggtacacttgaaactcttaagaacattgggtgctttctgcttgaagttaccaccaaagatccttcccttgtggtagcaggagaagctttggatgccctctttgatgtttttgcagatggtaaagaagccgaaagagcctcgattcaaattaaattattatctgctttgaaagaattccagccggtctttaaaatgaagatacgtaaagaagggagaggtaactatagcacagatcagctgtgtgttcttgacaatgtgaaaatgaatttgcgaagatttattgcttatcaagaaactgttgagaaaagactgacttcttaaacaatccaaaaaagaaaccagttcttcccccaaagtattcaatgcttagaatactaaaaggttttctttgaatgtatatgtttctgaaagtcattttttaatgattacattctgtacattctgtaaaaacttcaaaacctggccaggcatggtggctcacgcctgtgatcccagcaccttgggagaccgaggcgggtggatcacttgaggtcaggagtttggggccagcctggccaacatggtgaaaccgcatgcataagcatggtggcacatgcctgtgatcccagctactcgggaggctgagggaggagaatcggttgagcctgggagacagaggttgcagtgagctgagatcacgctactgcactccagcctgggtgacagagggagaccctgtctccaaaaaaaaaaaaaaaaaaa

SEQ ID NO: 280 - DNA, 2993 bp, Homo sapiens
cagcaggcggggcacccggactggcggcttcgctggcgcaaggtcggtccggcggccagggacctggaaggctgcgaggccctgcgaggtcgaggttcggagtttgctggtcccaggcccggcccgaggccaccggagccgccagctgtttggaactgagctactgcagaaagggaagtggagagtaagggccaggccccgtgggggcagatggccggcagaaggctgaatctgcgctgggcactgagtgtgctttgtgtgctgctaatggcggagacagtgtctgggactaggggctcgtctacaggagctcacattagcccccagtttccagcttcaggtgtgaaccagacccccgtggtagactgccgcaaggtgtgtggcctgaatgtctctgaccgctgtgacttcatccggaccaaccctgactgccacagtgatggggggtacctggactacctggaaggcatcttctgccacttccctcccagcctcctccctctggctgtcactctctacgtttcctggctgctctacctgtttctgattctgggagtcaccgcagccaagtttttctgccccaacttgtcggccatttctaccacactgaagctctcccacaacgtggcaggcgtcaccttcctggcatttgggaatggtgcacctgacatcttcagtgccctggtggccttctctgacccgcacacagccggcctggcccttggggcactgtttggcgctggcgtgctggttaccacagtggtggccggaggcattaccatcctacaccccttcatggctgcctccaggcccttcttcagggacatcgttttctacatggtggctgtgttcctgaccttcctcatgctcttccgtggcagggtcaccctggcatgggctctgggttacctgggcttgtatgtgttctatgtggtcactgtgattctctgcacctggatctaccaacggcaacggagaggatctctgttctgccccatgccagttactccagagatcctctcagactccgaggaggaccgggtatcttctaataccaacagctatgactacggtgatgagtaccggccgctgttcttctaccaggagaccacggctcagatcctggtccgggccctcaatcccctggattacatgaagtggagaaggaaatcagcatactggaaagccctcaaggtgttcaagctgcctgtggagttcctgctgctcctcacagtccccgtcgtggacccggacaaggatgaccagaactggaaacggcccctcaactgtctgcatctggttatcagccccctggttgtggtcctgaccctgcagtcggggacctatggtgtctatgagataggcggcctcgttcccgtctgggtcgtggtggtgatcgcaggcacagccttggcttcagtgaccttttttgccacatctgacagccagccccccaggcttcactggctctttgctttcctgggctttctgaccagcgccctgtggatcaacgcggccgccacagaggtggtgaacatcttgcggtccctgggtgtggtcttccggctgagcaacactgtgctggggctcacgctgctggcctgggggaacagcattggagatgccttctcggatttcacactggctcgccagggctacccacggatggcgttctccgcctgctttggcggcatcatcttcaacatcctcgtgggtgtggggctgggctgcctgctccagatctcccgaagccacacagaagtgaagctggagccagacggactgctggtgtgggtcctggcaggcgccctggggctcagcctcgtcttctccctggtctcagtcccattgcagtgcttccagctcagcagagtctatggcttctgcctgctcctcttctacctgaacttccttgtcgtggccctcctcactgaatttggagtgattcacctgaaaagcatgtgactgaagccgcttagtgctgtggcctcactgcaggcaggagccccgcccctcctgccgggggaggcccagggaccggagcatttctgcaaggcccttgtgggcacgagagtgcggcccttgctgctggagatctgaggtcactgctgtgagctgggagaactgctgtgtacctcttgctgccagcacccaacagccttgccgtggggaccttggaaacctggctttgctctggacaaagggttccagagagaagctagaagtcccccttgaatgacccccagagcccctctgagaagggctggagtttgggggaaggggatggctggatgtgctccaggccatgctggaggtacccccgaggcacaggcactgcccgttccccttgcctgggcttcaggccttctggcaccttctcaggacacaagtggctgcccaaccctgactcagagaatgagggtggcttggacccctgggaatcaggccgccgagggctgagctccagagccgcaccatctgccacaaacagaattcgagacatacttaattttgaatttctccttgccacgttaataaagccaaaagcagcgggtgctattcgtggcaacacacttcactgaacccacttgcttccaaaacgatgccagcccgaggcactgctacgccagcagctgccacatgggatggtggctcaggcgctccctccaggattctgcccctgcctgtccacagactcctttgtgctggaacctgggctcctccagctgccaggcaggagtcggtaggactgtgcctgtgcctccctcagcggggccctgggcggggttccaaggcctgcgagctgggaaaggacagatgaggggacctcgtgccttcttgctgtcatgcaatgaccccgccttatgttgccgaaataagcaactcttaggtttgcctgactgccttatgctggtaaagaaaagggattcaactgtctcttttccaaataaaaaaaaagtcaaaatttcaagtgtaaaaaaaaaaaaaaaaaa

SEQ ID NO: 281 - DNA, 4996 bp, Homo sapiens
ggcctcaggtgatccgccccccgctcagcctcccacagtgctgggattacaggcgtgagccaccgcacccggtagtgaggaggcagaggaaatgttcagaacgtaacagaaaggtgcaagtgaaagtgtaggaaaacatatgcttgaagcgtgcaacaataatctggaaatggcagtcactatgtttttggatggtggaggaatcgctgaagagcccagtaccagttcagcaagtgtctctactgtcagaccacacacagaagaagaagttcgtgccccaattcctcaaaagcaggaaatactggtggaaccagaaccattatttggtgctcctaaaagacgacggcctgcacgttcaatttttgatggtttccgggattttcagactgaaactattcggcaagaacaagaattaagaaatggaggagctatcgataagaaattaactacccttgcagatctattccggccacccattgatttgatgcataaaggcagctttgaaacagccaaagagtgtggccagatgcaaaataagtggctgatgataaacattcaaaatgttcaagactttgcatgtcagtgcctcaaccgcgatgtgtggagcaacgaagctgtgaagaatattatccgggaacatttcattttctggcaggtttatcatgacagtgaggaaggtcagagatacatacagttttataagttaggggatttcccctatgtttccatattggacccacggacaggtcagaagctagtagaatggcaccagttagatgtatcttctttcttggaccaagtgacgggatttctgggtgaacatggacaactggatggactttctagcagtccccccaaaaaatgtgcccgttcagagagccttatagatgcaagtgaagacagccagctagaagctgccatcagagcctccttacaagaaacacattttgattcaacacagacaaaacaggatagccgctcagatgaagaatctgaatctgaacttttttctggcagtgaggagttcatatccgtttgtggctctgatgaagaagaagaggtagagaatcttgccaagtccagaaagtctccccacaaagatttggggcatagaaaagaggagaatagaaggccgctgactgagccaccagtcagaactgatcctggaacagccacaaaccaccaaggattgccagctgtggattcagagatactggagatgccacctgaaaaagcagatggagtagtggaggggatagatgtaaatggaccaaaagcacagctgatgttgcggtatccagatggaaaaagggaacagatcactcttccagagcaagctaaactgctagctttggtgaagcacgtgcagtctaaaggatacccaaatgaacgttttgaacttctcaccaactttcctcgaaggaaattatctcatctggactatgatattacattgcaagaggcaggcctttgtcctcaagagactgtctttgtacaggaaagaaattaacaccatggcttgacctctctcagcttaccccttttttcccttttcctgtgagatacatgtcactaagtatgcattttggctcataggaccacagagccaaagttgggcaagcaagtcaccttccttctcttatttcttgatctctcctataatcagtctctttctccccctttgtttctttctcctcttctgttttctcgctccccactccgtacccttctgcctccccctccccccacacttttctttcttacctaatctggtgaccaaactgaagtgtaaggataagacctctcctagtactagcagcaggaattgtgtgttccagtaagtggtctcttgcacggcacttttttgggatcaaatgttaacgttactccccagactcttcgggcaaaggaatggctagattcagagtaagaacaaccctcccttttttgtaagtccccgtgtttagcagggagaagaaattctctaacatgggtttggttttgttgtgttcttcatgtggaaatgtcgcttaacaaaatatccaggcttttgtttacgtggaaaaagcatcccttgtaatgattgctcatcatacttaaaaacctttttcaaaggattttcatgttcccagctataaggactatttccatgacatgtgttattggcagaatgagtgttaaatatggagcatatagcatggggtgactttcattgtcctaacctgagacagttttccttattactctgtattgatcctgctagtccaagaatggacatgaagtgaacctatcgtggtgactgggataggaaggtgcttgctatttttgccagcacagcatattagttcctttggagccctccattgtctgagtctgcagtgatctgtaggaaggcagctggtcaataatcatgtagtacaatggcttggaattgtaaccactatggttattgattgtcctgtgttgtttcaggcatacttaggtatgtccctggggaaaaagaaaaccattcagctgagagttgctaaccatgttcttttggttagaaataatggttcattttttgcccctggttggaatagtctctaaaaggctctggtgactgaattgaacatgagtccgcatgctgttttctttcaaaaggtatcaaaacggaaagcctctctaaggggaagacctttcaactccattcagaagacaacatttagtaaggaggatggcggaggttactagtaattttcagatgtcttgggctttttctgccaacaaaacccaaaatcaaattagagttggtgaaagctttcttcagtgtttttagaagaggccatcttgaatctgtagaataccatttacacatcaacttcaccctatgctcatttcgtattttgagcttaaatggagtcctctgaagggggggtagtcgtgattctggtggcaaaactagaacttttaacttgtaaaatgaaaaatattaaatggacctttttgtcagttgaggatttagattgattcttttatctgaggagcgtatgttcctcagatgttgcgtagagacctttaggttttcatctactttaagattgctctcttggcaattaggggatttgggaaaagaagaaaaaaagatgccatgtgttgctagtacacagttataggatatggtttctaatggttgaattttgaggaactctccctaaagaatgagttttatatctcctcaaggaaatcatggaaaaatctgtttattcttcagtgagtccttttgaattaatgttcttaaatttttttctaagtctgtgtaagtgcttatgtataagtatataattgtataaatatttataaatatatttatataattacggtttcatttctaccttgagtcaaagttctgtctttagattggtgactgagtaatacttacactttggtgttttttcttaggttcttgaggcttacttaactagcagcttctgatttattgagtgaaagatggttttcatgttaattcctcagttgcatctctgaacttggataacatacttgccgtttgaaaaatagagctgtatactgtcaaaggtgcactggagggtaaaacatttgttggtagtagacaagctcagaaatccaaaaattcagggagggcacagggtaagaagagaggtttgctcagctttgtgctctgatggcacccatctgtactccagcaaagtcatagctgaagcccaaatcgctcaaacgtgtgaagtcaatcatttttcctatagggctctgtttccttttctttaccttctagcttctcttgataaaacagttgggagaactgccaacgtgttcatcagtgagagggtgtggttctttccgatatgttcagcacgtgcatattcatttatgagaaaccaaagtaacttcttcaactcgggttactgtgggatgattaagtagatataaagtgatttaaaagacagcatggtactttcactcagcttaacatgcagctgggatgtctacaatacaagatgtggtgggttttattttattttattttgaggcaggagtgtaattatcttagggttgatataaaggcccatgggaagagttacggattgtacatgggaagaatccataaggagtattgccttgctcaagaatttaatccgctgacagtatgcttcttccagtttgccttacttcctctgcaagtttctttgctccttagggcagaggttttattgaatagattaaatgaggtcagtaagattagttaaaaatagtcattccttgtgggtgttggacacagcttgaaaggagtgtttaaaaaaaaaaagctagggaggaaaagaacaagaaagatagacttcgagagtgataagagaaaaatacagggagatggaatggaaactaccaggaaggccgggcgcggtggctcatgcctgtaatcccaacactttgggaggcggaggtgggcagatcacctaaggtcaggagatcgaggccagcctgagcaacatggtgaaaccccgtctctactaaaaatacaaaaattacctgggtgtggtggcgtgcacctgtaatcccagctactcagaggctgaggcaggggaatggcttgaacctgggaggcagaggttgcagtgagccaagatcgcaccattacactccagcctgggcgacaaagcgacactccatctcaaatttaaaaaaaaaaaagaagaagaagaagaaaactagtgggaaaaaagtgagaggaatacttttttgaaattggtatcggaaggaactggagaagagaaaacaacagtgccaaatgagaaaagaacaggaaacttaatactaattggcatgcaccagatacttttgtgtacatttgcctcttcaatctcccgaagaatcgtacaaaatgtatactttcttcccatgttaagaaaacaggtatagagaacttattcaggactcatagctagtgagtggcaaatcagaattggaatccagagtccat

SEQ ID NO: 282 - DNA, 559 bp, Homo sapiens
gtaagatggctgcccacgggggctccgcggcgtcctcggcgctgaaggggttaattcaacagttcaccaccattaccgagaagaagttcgtgccccaattcctcaaaagcaggaaatactggtggaaccagaaccattatttggtgctcctaaaagacgacggcctgcacgttcaatttttgatggtttccgggattttcagactgaaactattcggcaagaacaagaattaagaaatggaggagctatcgataagaaattaactacccttgcagatctattccggccacccattgatttgatgcataaaggcagctttgaaacagccaaagagtgtggccagatgcaaaataagtggctgatgataaacattcaaaatgttcaagactttgcatgtcagtgcctcaaccgcgatgtgtggagcaacgaagctgtgaagaatattatccgggaacatttcattttctggcaggtttatcatgacagtgaggaaggtcagagatacatacagttttataagttaggggatttcccctatgtttccatattggacccacgg

SEQ ID NO: 283 - DNA, 4809 bp, Homo sapiens
gatggctgcccacgggggctccgcggcgtcctcggcgctgaaggggttaattcaacagttcaccaccattaccgagaagaagttcgtgccccaattcctcaaaagcaggaaatactggtggaaccagaaccattatttggtgctcctaaaagacgacggcctgcacgttcaatttttgatggtttccgggattttcagactgaaactattcggcaagaacaagaattaagaaatggaggagctatcgataagaaattaactacccttgcagatctattccggccacccattgatttgatgcataaaggcagctttgaaacagccaaagagtgtggccagatgcaaaataagtggctgatgataaacattcaaaatgttcaagactttgcatgtcagtgcctcaaccgcgatgtgtggagcaacgaagctgtgaagaatattatccgggaacatttcattttctggcaggtttatcatgacagtgaggaaggtcagagatacatacagttttataagttaggggatttcccctatgtttccatattggacccacggacaggtcagaagctagtagaatggcaccagttagatgtatcttctttcttggaccaagtgacgggatttctgggtgaacatggacaactggatggactttctagcagtccccccaaaaaatgtgcccgttcagagagccttatagatgcaagtgaagacagccagctagaagctgccatcagagcctccttacaagaaacacattttgattcaacacagacaaaacaggatagccgctcagatgaagaatctgaatctgaacttttttctggcagtgaggagttcatatccgtttgtggctctgatgaagaagaagaggtagagaatcttgccaagtccagaaagtctccccacaaagatttggggcatagaaaagaggagaatagaaggccgctgactgagccaccagtcagaactgatcctggaacagccacaaaccaccaaggattgccagctgtggattcagagatactggagatgccacctgaaaaagcagatggagtagtggaggggatagatgtaaatggaccaaaagcacagctgatgttgcggtatccagatggaaaaagggaacagatcactcttccagagcaagctaaactgctagctttggtgaagcacgtgcagtctaaaggatacccaaatgaacgttttgaacttctcaccaactttcctcgaaggaaattatctcatctggactatgatattacattgcaagaggcaggcctttgtcctcaagagactgtctttgtacaggaaagaaattaacaccatggcttgacctctctcagcttaccccttttttcccttttcctgtgagatacatgtcactaagtatgcattttggctcataggaccacagagccaaagttgggcaagcaagtcaccttccttctcttatttcttgatctctcctataatcagtctctttctccccctttgtttctttctcctcttctgttttctcgctccccactccgtacccttctgcctccccctccccccacacttttctttcttacctaatctggtgaccaaactgaagtgtaaggataagacctctcctagtactagcagcaggaattgtgtgttccagtaagtggtctcttgcacggcacttttttgggatcaaatgttaacgttactccccagactcttcgggcaaaggaatggctagattcagagtaagaacaaccctcccttttttgtaagtccccgtgtttagcagggagaagaaattctctaacatgggtttggttttgttgtgttcttcatgtggaaatgtcgcttaacaaaatatccaggcttttgtttacgtggaaaaagcatcccttgtaatgattgctcatcatacttaaaaacctttttcaaaggattttcatgttcccagctataaggactatttccatgacatgtgttattggcagaatgagtgttaaatatggagcatatagcatggggtgactttcattgtcctaacctgagacagttttccttattactctgtattgatcctgctagtccaagaatggacatgaagtgaacctatcgtggtgactgggataggaaggtgcttgctatttttgccagcacagcatattagttcctttggagccctccattgtctgagtctgcagtgatctgtaggaaggcagctggtcaataatcatgtagtacaatggcttggaattgtaaccactatggttattgattgtcctgtgttgtttcaggcatacttaggtatgtccctggggaaaaagaaaaccattcagctgagagttgctaaccatgttcttttggttagaaataatggttcattttttgcccctggttggaatagtctctaaaaggctctggtgactgaattgaacatgagtccgcatgctgttttctttcaaaaggtatcaaaacggaaagcctctctaaggggaagacctttcaactccattcagaagacaacatttagtaaggaggatggcggaggttactagtaattttcagatgtcttgggctttttctgccaacaaaacccaaaatcaaattagagttggtgaaagctttcttcagtgtttttagaagaggccatcttgaatctgtagaataccatttacacatcaacttcaccctatgctcatttcgtattttgagcttaaatggagtcctctgaagggggggtagtcgtgattctggtggcaaaactagaacttttaacttgtaaaatgaaaaatattaaatggacctttttgtcagttgaggatttagattgattcttttatctgaggagcgtatgttcctcagatgttgcgtagagacctttaggttttcatctactttaagattgctctcttggcaattaggggatttgggaaaagaagaaaaaaagatgccatgtgttgctagtacacagttataggatatggtttctaatggttgaattttgaggaactctccctaaagaatgagttttatatctcctcaaggaaatcatggaaaaatctgtttattcttcagtgagtccttttgaattaatgttcttaaatttttttctaagtctgtgtaagtgcttatgtataagtatataattgtataaatatttataaatatatttatataattacggtttcatttctaccttgagtcaaagttctgtctttagattggtgactgagtaatacttacactttggtgttttttcttaggttcttgaggcttacttaactagcagcttctgatttattgagtgaaagatggttttcatgttaattcctcagttgcatctctgaacttggataacatacttgccgtttgaaaaatagagctgtatactgtcaaaggtgcactggagggtaaaacatttgttggtagtagacaagctcagaaatccaaaaattcagggagggcacagggtaagaagagaggtttgctcagctttgtgctctgatggcacccatctgtactccagcaaagtcatagctgaagcccaaatcgctcaaacgtgtgaagtcaatcatttttcctatagggctctgtttccttttctttaccttctagcttctcttgataaaacagttgggagaactgccaacgtgttcatcagtgagagggtgtggttctttccgatatgttcagcacgtgcatattcatttatgagaaaccaaagtaacttcttcaactcgggttactgtgggatgattaagtagatataaagtgatttaaaagacagcatggtactttcactcagcttaacatgcagctgggatgtctacaatacaagatgtggtgggttttattttattttattttgaggcaggagtgtaattatcttagggttgatataaaggcccatgggaagagttacggattgtacatgggaagaatccataaggagtattgccttgctcaagaatttaatccgctgacagtatgcttcttccagtttgccttacttcctctgcaagtttctttgctccttagggcagaggttttattgaatagattaaatgaggtcagtaagattagttaaaaatagtcattccttgtgggtgttggacacagcttgaaaggagtgtttaaaaaaaaaaagctagggaggaaaagaacaagaaagatagacttcgagagtgataagagaaaaatacagggagatggaatggaaactaccaggaaggccgggcgcggtggctcatgcctgtaatcccaacactttgggaggcggaggtgggcagatcacctaaggtcaggagatcgaggccagcctgagcaacatggtgaaaccccgtctctactaaaaatacaaaaattacctgggtgtggtggcgtgcacctgtaatcccagctactcagaggctgaggcaggggaatggcttgaacctgggaggcagaggttgcagtgagccaagatcgcaccattacactccagcctgggcgacaaagcgacactccatctcaaatttaaaaaaaaaaaagaagaagaagaagaaaactagtgggaaaaaagtgagaggaatacttttttgaaattggtatcggaaggaactggagaagagaaaacaacagtgccaaatgagaaaagaacaggaaacttaatactaattggcatgcaccagatacttttgtgtacatttgcctcttcaatctcccgaagaatcgtacaaaatgtatactttcttcccatgttaagaaaacaggtatagagaacttattcaggactcatagctagtgagtggcaaatcagaattggaatccagagtccat

SEQ ID NO: 284 - DNA, 3010 bp, Homo sapiens
atgcgcctgcgcagaccgctggggacgggaggggcggggctcgaggggcggtcaatgcgcctgcgcacaccgcacggcgaagtgggggagggcagtccgtgtgtgtctgtgttgttgttcggcggcggcggcggcggtaagatggctgcccacgggggctccgcggcgtcctcggcgctgaaggggttaattcaacagttcaccaccattaccggtgcaagtgaaagtgtaggaaaacatatgcttgaagcgtgcaacaataatctggaaatggcagtcactatgtttttggatggtggaggaatcgctgaagagcccagtaccagttcagcaagtgtctctactgtcagaccacacacagaagaagaagttcgtgccccaattcctcaaaagcaggaaatactggtggaaccagaaccattatttggtgctcctaaaagacgacggcctgcacgttcaatttttgatggtttccgggattttcagactgaaactattcggcaagaacaagaattaagaaatggaggagctatcgataagaaattaactacccttgcagatctattccggccacccattgatttgatgcataaaggcagctttgaaacagccaaagagtgtggccagatgcaaaataagtggctgatgataaacattcaaaatgttcaagactttgcatgtcagtgcctcaaccgcgatgtgtggagcaacgaagctgtgaagaatattatccgggaacatttcattttctggcaggtttatcatgacagtgaggaaggtcagagatacatacagttttataagttaggggatttcccctatgtttccatattggacccacggacaggtcagaagctagtagaatggcaccagttagatgtatcttctttcttggaccaagtgacgggatttctgggtgaacatggacaactggatggactttctagcagtccccccaaaaaatgtgcccgttcagagagccttatagatgcaagtgaagacagccagctagaagctgccatcagagcctccttacaagaaacacattttgattcaacacagacaaaacaggatagccgctcagatgaagaatctgaatctgaacttttttctggcagtgaggagttcatatccgtttgtggctctgatgaagaagaagaggtagagaatcttgccaagtccagaaagtctccccacaaagatttggggcatagaaaagaggagaatagaaggccgctgactgagccaccagtcagaactgatcctggaacagccacaaaccaccaaggattgccagctgtggattcagagatactggagatgccacctgaaaaagcagatggagtagtggaggggatagatgtaaatggaccaaaagcacagctgatgttgcggtatccagatggaaaaagggaacagatcactcttccagagcaagctaaactgctagctttggtgaagcacgtgcagtctaaaggatacccaaatgaacgttttgaacttctcaccaactttcctcgaaggaaattatctcatctggactatgatattacattgcaagaggcaggcctttgtcctcaagagactgtctttgtacaggaaagaaattaacaccatggcttgacctctctcagcttaccccttttttcccttttcctgtgagatacatgtcactaagtatgcattttgtgctctgatggcacccatctgtactccagcaaagtcatagctgaagcccaaatcgctcaaacgtgtgaagtcaatcatttttcctatagggctctgtttccttttctttaccttctagcttctcttgataaaacagttgggagaactgccaacgtgttcatcagtgagagggtgtggttctttccgatatgttcagcacgtgcatattcatttatgagaaaccaaagtaacttcttcaactcgggttactgtgggatgattaagtagatataaagtgatttaaaagacagcatggtactttcactcagcttaacatgcagctgggatgtctacaatacaagatgtggtgggttttattttattttattttgaggcaggagtgtaattatcttagggttgatataaaggcccatgggaagagttacggattgtacatgggaagaatccataaggagtattgccttgctcaagaatttaatccgctgacagtatgcttcttccagtttgccttacttcctctgcaagtttctttgctccttagggcagaggttttattgaatagattaaatgaggtcagtaagattagttaaaaatagtcattccttgtgggtgttggacacagcttgaaaggagtgtttaaaaaaaaaaagctagggaggaaaagaacaagaaagatagacttcgagagtgataagagaaaaatacagggagatggaatggaaactaccaggaaggccgggcgcggtggctcatgcctgtaatcccaacactttgggaggcggaggtgggcagatcacctaaggtcaggagatcgaggccagcctgagcaacatggtgaaaccccgtctctactaaaaatacaaaaattacctgggtgtggtggcgtgcacctgtaatcccagctactcagaggctgaggcaggggaatggcttgaacctgggaggcagaggttgcagtgagccaagatcgcaccattacactccagcctgggcgacaaagcgacactccatctcaaatttaaaaaaaaaaaaaaagaagaagaagaaaactagtgggaaaaaagtgagaggaatacttttttgaaattggtatcggaaggaactggagaagagaaaacaacagtgccaaatgagaaaagaacaggaaacttaatactaattggcatgcaccagatacttttgtgtacatttgcctcttcaatctcccgaagaatcgtacaaaatgtatactttcttcccatgttaagaaaacaggtatagagaacttattcaggactcatagctagtgagtggcaaatcagaattggaatccagagtccat

SEQ ID NO: 285 - DNA, 2820 bp, Homo sapiens
cggtgacggccctgctcgggaggccctccagtctctgagccagcggcttcgggtgcaggagcaggagatggaactggtaaaggcagccctggcagaagcccttcgcctgctgcggctgcaggtgcccccttcctccctgcagggctctggcacaccagctcctccgggggacagcagtcttgcagcccccccaggactgccacccacgtgcaccccttccttggtgagccgaggcacccagacggagacagaggtggagctcaagtcatcccctggaccccctggcctgagcaatggacccccagcccctcagggggccagcgaagagcctagcgggacccaatctgaaggagggggcagcagcagcagtggtgctggctcccctggccccccggggatcctcaggcccttgcagcccccacagcgtgctgacacgccgcgaagaaattcttcctcctcctcatccccctcagagcggcctcggcagaagctctccaggaaggcaatctcctccgccaacctgttagtgcggtccgggagcacagagagccgtgggggaaaagaccccctctccagccctgggggccctggatctcggaggagcaattacaatttggaaggcatctcagtgaagatgttccttcgagggcgccccattaccatgtacatcccgtctggcatccgcagccttgaggagctgccgagtggcccaccgccagagaccctcagccttgactgggtttatgggtacaggggtcgtgactcccgctctaatctgtttgtgttgcgctctggggaggtggtctactttatcgcctgtgtggtggtgctgtaccggcctggaggaggcccagggggtcctggaggtggcggccagagacattaccgggggcacacagactgcgttcgatgccttgctgttcaccctgatggcgttcgggtagcctcgggacagacagctggagtggataaggatggaaagcccctgcagcctgtggttcacatctgggactcagagacgctgttgaaactgcaggagattggactgggggccttcgagcggggtgttggggccctggccttttcagctgcggatcagggtgcctttctttgtgtggtggataattccaatgagcacatgctgtcggtgtgggactgcagccggggaatgaagctggctgagatcaagagtacaaatgactcagtcctggccgttggcttcaaccctcgtgacagcagctgcatcgtcaccagtgggaaatctcacgtccacttctggaattggagtggtggagtaggggttcctgggaatgggacccttacccggaaacagggtgtctttgggaaatacaagaaacccaagtttatcccttgctttgtgttccttccggatggagacattctcactggagactcagaggggaacattctcacctgggggcggagcccttcagattccaagaccccaggcaggggtggcgccaaagagacctatgggattgtggcccaggctcacgctcatgaaggttctatcttcgccttgtgtctccggagggacgggacagtgctgagtggtggcgggcgggaccgccggctggtacagtgggggcccgggttggtggccctccaggaggctgagattcccgagcacttcggggccgtgcgagccattgctgaagggcttggctctgagctgctggtgggaaccacgaagaatgcattgctgaggggagacctggcccagggcttctcccctgtaatccagggccacactgatgagctctgggggctctgcacacacccctcccagaaccgcttcctcacctgcggccacgaccggcagctctgcctgtgggatggggagagccatgcactggcctggagcatcgacctcaaggagactggtctctgtgctgacttccacccgagtggggcagttgtggccgtaggactgaacacggggaggtggttggttttggacacagagaccagagagatcgtgtctgatgtcattgatggcaatgagcagctctcagtggtccggtacagcccagatgggttgtacctggccattggttcccatgacaacgtgatctacatctatagtgtttccagtgatggtgccaaatccagccgctttggccgctgtatgggtcactccagcttcatcactcatcttgactggtccaaggatgggaatttcatcatgtccaattctggggactatgagattctttactgggacgtggctggaggctgcaagcagctgaagaatcgctatgagagccgagaccgggaatgggctacctacacctgtgtgctgggctttcacgtctacgtacccgtgcgctcgtgccaaggcgccgagccgcatgtacgggggccacggcagccacgtgaccagcgtccgattcacgcacgacgactcgcacctcgtctcgctgggcggcaaggacgccagcatcttccagtggcgagtgctgggcgctgggggcgcggggccggcgcccgccacgccctctcgaaccccctccctgtcccccgcctcctccctcgacgtttgatcgctgcctggcgggaccgactggcccggcggcgtggccccgccccgccctgcccttccctggcccaatcccccacgactaggggccgactctttcctggactgacttcgagacattcccgatcgcgcattttcctggagggcgcgaacggcgcccctgcacacactgtttagacccgctggctgagccgggcagccccagcctaggccttgactcccgctgcctgctgaggggcaataaaccagaaccaaagtcg

SEQ ID NO: 286 - DNA, 1834 bp, Homo sapiens
ttcgccggagcgcgacccggggactcccaggcctgtgggcgggccctgcccaggactgggcggtgccataacccctagtttaaaaactcgcgggtaccggacccaagatcggggacccggcggcggctccgcgggggaaacagcgaggctggcgcagcgccgaggccgcggccctgggggcccgcaatccacgccacggaatccccgagtgagcaggggtgagcgcagccactgcccaacgcaaaccgtgaagaagcttctggaagagcagaggcgccgccagcagcagcagcccgacgctggcggggtgcagggacaatttctccctcccccagagcagcccctgaccccatctgtgaatgaggctgtgactggccaccctcccttcccagcacactcggagactgtgggttctggacctagcagcctgggctttccagactgggaccccaacacgcatgctgcctacactgacagcccctactcttgccctgcttctgctgccgaaaatttcctgcctcctgacttctacccaccctcggacccagggcagccgtgcccatttccccagggcatggaggctggaccctggagagtttctgcacccccttcaggacccccacagttccccgctgtggtccctggaccatcgctggaggtggcccgagctcacatgctggctttggggccacagcagctgctggcccaggatgaggagggggacacgctccttcacctgtttgcggctcgggggctgcgctgggcggcatatgctgcggctgaggtgctccaggtgtaccggcgtcttgacattcgtgagcataagggcaagacccctctcctggtggcggctgctgccaaccagcccctgattgtggaggatctgttgaacctgggagcagagcccaatgccgctgaccatcagggacgttcggtcttgcacgtggccgctacctacgggctcccaggagttctcttggctgtgcttaactctggggtccaggttgacctggaagccagagacttcgagggcctcaccccgctccacacggccatcctggcccttaacgttgctatgcgcccttccgacctctgtccccgggtgctgagcacacaggcccgagacaggctggattgtgtccacatgttgctgcaaatgggtgctaatcacaccagccaggagatcaagagcaacaagacagttctgcacttggccgtgcaggctgccaaccccactctggttcagctgctgctggagctgccccggggagacctgcggacctttgtcaacatgaaggcccacgggaacacagccctccacatggcggctgccctgccccctgggccggcccaggaggccatcgtgcggcacctgttggcagctggggcggaccccacactgcgcaacctggagaatgagcagcccgttcacctgctgcggcccgggccgggccctgaggggctccggcagctgttgaagaggagccgtgtggcgccgccaggcctgtcctcttaggactcaaacccagaccctggactgattttccagtccccaccgtcctgcgggacagccagcgtatgctaatgttgcaaacccatgataatgtatgtggaatatcctgccattggggttttacattaaaaccccagaatggctgcagaggggtgaacaggccccaatatttggggtgctgtgatacccctcttctacccacaaggagccctcttgatgatttctgtgaaatcgaggccccttgattgtttctgtgaaacaccctgcacccctagtcctttccccactgagatctttcgggttctctcccctaactcagct

SEQ ID NO: 287 - DNA, 3236 bp, Homo sapiens
cgtgggagcagtggggttcgacggcgcggccgcgaggccgccatggccgctcacgggaagctgcggcgggagcgggggctgcaggctgagtatgagacgcaagtcaaagagatgcgctggcagctgagcgagcagctgcgctgcctggagctgcagggcgagctgcggcgggagttgctgcaggagctggcagagttcatgcggcgccgcgctgaggtggagctggaatactcccggggcctggaaaagctggccgagcgcttctccagccgtggaggccgcctggggagcagccgggagcaccaaagcttccggaaggagccgtccctcctgtcgcccttgcactgctgggcggtgctgctgcagcacacgcggcagcagagccgggagagcgcggccctgagtgaggtgctggccgggcccctggcccagcgcctgagtcacattgcagaggacgtggggcgcctggtcaagaagagcagggatctggagcagcagctgcaggatgagctcctggaggtggtctcagagctccagacggccaagaagacgtaccaggcatatcacatggagagcgtgaatgccgaggccaagctccgggaggccgagcggcaggaggagaagcgggcaggccggagtgtccccaccaccaccgctggtgccactgaggcagggcccctccgcaagagctccctcaagaagggagggaggctggtggagaagcggcaggccaagttcatggagcacaaactcaagtgcacaaaggcgcgcaacgagtacctgcttagcctggctagtgtcaacgctgctgtcagtaactactacctgcatgacgtcttggacctcatggactgctgtgacacagggttccacctggccctggggcaggtgctccggagctacacggccgctgagagccgcacccaagcctcccaagtgcagggcctgggcagcctggaagaagctgtggaggccctggatcctccaggggacaaagccaaggttctcgaggtgcatgctaccgtcttctgtcccccgctgcgctttgactaccacccccatgatggggatgaggtggctgagatctgcgttgaaatggagctgcgggacgagattctgcccagagcccagaacatccagagccgcctggaccgacagaccattgagacagaggaggtgaacaagactctgaaggcgacactgcaggccctgctggaggtggtggcctcggatgacggggatgtgcttgattccttccagaccagcccctccaccgagtccctcaagtccaccagctcagacccaggcagccggcaggcgggccggaggcgcggccagcagcaggagaccgaaaccttctacctcacgaagctccaggagtatctgagtggacggagcatcctcgccaagctgcaggccaagcacgagaagctgcaggaggcccttcagcgaggtgacaaggaggagcaggaggtgtcttggacccagtacacacagagaaaattccagaagagccgccagccccgccccagctcccagtataaccagagactctttgggggagacatggagaagtttatccagagctcaggccagcctgtgcccctggtggtggagagctgcattcgcttcatcaacctcaatggcctgcagcatgaaggcatcttccgggtatcgggtgcccagctccgggtctcagagatccgtgatgccttcgagagaggggaggacccactggtggagggctgcactgcccatgacctggactcggtggccggggtgctgaagctctacttccggagcctggagcccccactcttccccccagacctgttcggcgagctgctggcttcttcggagctggaggacacagcggagagggtggagcacgtgagccgcctgctgtggcggctgcccgcgccggtgctggtggttctgcgctacctcttcaccttcctcaaccacctggcccagtacagcgatgagaacatgatggacccctacaacctggccgtgtgcttcgggcccacgctgctaccggtgcccgctgggcaggacccggtggcgctgcagggccgggtgaaccagctggtgcagacgctcatagtgcagcccgatcgggtcttcccgcccctgacctcgctgcctggccccgtctacgagaagtgcatggcaccgccttccgccagctgcctgggggacgcccagctggagagcctgggggcggacaatgatccggagctggaagccgagatgcccgcacaggaggatgacctggagggggtcgtggaggctgtggcctgctttgcctacacgggccgcacagcccaggagctgagcttccggcggggggacgtactgcggctgcacgagagggcctcgagcgactggtggcggggggagcacaacggcatgcggggcctcatcccccacaagtatatcacgctgcccgccgggacggagaagcaggtggtgggcgcagggctgcagactgcaggggagtctgggagcagtcccgagggcctcctggcatcggagctggtccaccggccagagccatgcacctcacctgaggccatgggaccctctggacacagacgacgctgcttggtcccagcctccccagagcaacacgtggaggtggataaggctgtggcacagaacatggactctgtgtttaaggagctcttgggaaagacctctgtccgccagggccttgggccagcatctaccacctctcccagtcctgggccccgaagcccaaaggccccgcccagcagccgcctgggcaggaacaaaggcttctcccggggccctggggccccagcctcaccctcagcttcccacccccagggcctagacacgacccccaagccacactgaggtgccgctgctggagatgcgtgcccccggcggctacccgctggaccggccactctccccagcccccttgcttctctccagccctgtccagcaagtgcagggtgcctgcacttcaccctgtgcagagaggtgggatggggccgtgcacacagggtatgcccgctccacatcctgcctgcccctcagccctggcccaggccccttgtggaggcagctgaggaaggatgctggggaaagccctcttctgcagctttgtggaaggctgatcagtggctgctgggtggcgggtacccttgctcagatgcctggcagggctgggtggcgattcataaagacctcgtgttgattccccg

SEQ ID NO: 288 - DNA, 5862 bp, Homo sapiens
gcgtccgagggagcgcgcgacgggccacgcacgtccgggcgtccagttcggggcagcttctccggctggtgggtgggtggggcagcctttcaggcagggtggcaaccaactatatctgaggaccagagccattttggggcaccagagcttgtgacctctccatctccacccagctgggtccaggggccactctcagcactcacctcagcagctgacatcataaagcagacttgggaacctggaagcactctggagaacctttccctgagacatggagctttggggccgaatgctgtgggccctcctgtctggcccagggaggaggggaagtacccggggctgggccttcagctcatggcaaccccaaccacctctggctgggttatccagtgccatagaactggtcagccactggactggggtctttgagaagaggggtatccctgaggcccgggaatccagtgagtacatcgtggctcatgtccttggagccaaaacatttcagagcctgaggccggcactttggacccagcccttgacctctcagcaactacagtgtatccgggagctgagtagccgtcgattgcagaggatgccggtgcagtacatccttggagagtgggacttccaggggctcagcctaaggatggtgcccccagtgtttattcctcggccagaaacagaggaactggttgagtgggtgctggaagaggtggcccagaggtcccatgctgtgggatccccaggcagccccctcattctggaggtgggctgcggatcaggagccatctccctcagcctgctgagccagctcccccagagccgagtcattgctgtggataagcgggaagctgctatctctctgacccatgagaatgctcagaggcttcggttgcaggacaggatttggatcatccacctcgacatgacctcagaaaggagctggacacacctgccctggggccccatggacctgattgtcagcaaccctccctacgtcttccaccaggacatggagcagctggcccctgagatccgcagctatgaagaccccgcggccctggatggtggggaggagggcatggacatcattacccacattctggccttggcaccccggctcctgaaagactctggtagtatcttcttagaagtggacccaaggcacccggagcttgtcagcagctggcttcagagccggcctgacctgtaccttaatcttgtggctgtgcgcagggacttctgtgggaggccccggttcctgcatatccggaggtctgggccatagcatggctgccctgtggatgccttgtcagtgccgccagcctgaccagaggggaggtggatggcactttccagagcccaggttcttatggcatttcccagggttctgtgatttccccatgctctgcatttctaggatatttctaggacacctggattggctccatcacatcagagtggctgagggcagttgctctgtgttggtgaaattgctgtgggggtatcgggggatatggccagtaaagtattgagagactaacaaatggtgacctaatgttttgtccatgacttgcaggtcccctgacccccttactcccaggtagcactggggcaagggtttccttctgccccagcagggctggccgtcagtcccctgcttggtagtggtgtgggggtgcagtgtggaggaaggcacgtgagtcctcactcctggccttggataccatgggtcctggcatagagcagctcactcccagggattgattagtcctccactgccctgggtgcatgcgtacacaattccctggccaagcctggctcgagcacaggaagctcatctgcgttttggctcaaggatgactgcctgctttctggaggggagggtctggaggtctttgctgcacagttcctgggtcgcacatccacgttcatttaactgaaggcttgagccagtgaggggtgtttcctttttatccccatagcttttagctaaaacatccctcccgagttgaccccctggggtttcaaataacccatgtgtccctggttggggctggggagagtgagaagctgagatactgggcacagggttgtggcctccaccccagctctggtctgtgcagactcatggccaccaggaggcctgcagatccagccttcctgtcaacagcgacaggaaatctctaggttggtgagtgctggtgatgtgagcctacatcagggtgggtcctaagaaacatggcaaaccaggctgtctcattccactagactgccccctgccaccctggcacttcccagggcctggcagtatggtctgatgggcagtatggtccaataggcagcatcctctgctgcagctgggagagctgagttccagggctgtgtcctgcagtgggaccttgggcaactcctttccctatgagaagctggctcttctgagtccagggccaacgccaactggcaacctctttactcttagtcaagtggaatgtgcatgctggcatctgaatgtccattcgccaggcatggagagcaagagaaggtatgtactgcctgaggtcacatgacagtgaccaagtggagacagtaagttagatccctccctttggggagcctatattgctggagtcatacccagcctaagtgttgccctgcactatggctggaggacacatttggtagaggtcacactgcagctcccagtgccccagtgtcctgccctgtgcccagccccagctgcatggactctgagctgcccctggcttcctttaaggaggctgctccagaaggaacctgggtggggagggcgaagggggtgcacaaccagggcaaggctccccacttccttagtcccccatgctcacagacctttgcctgctaaggtcctcaccagtattgccctttctgtctttctccttgtgccctttggctcttgctgtcttcagcagcatctcagggtagctgccctgacctcggagcagtctgtcgcccccctacacctcagccagtcctggcttccctgatggtctctccctcctggcctcaggcccattcctgaggaagggccttggcgagcttgtggatgttgcaccagaagagagtgcagtgttggagagtgacactgtcggggcagctggggccacaagcaggagccggcctcgggcacaactttctgcccagaaaaatgtgcagcttgactctgctgaggaaaaggtccaagccaagaggactggcaggcggggcctcaagcctgcagccactggcttgattgggccctggacgttgagcccagatgttggagccacaccagcctggatttcaatcccagaatctgcccctcaccaggatgtgaccttgggcagatgacttcacctcactcagccttggcttctaaggctgagaaatgggacttaatgctttattttataggatgcatgtgaggagcccatggaatgtgcctggcttggcacattgtggcatttttccttgccttcctcggagggcagacacagggaggaaggacccagtgccctcaggcgtccatctgatgcatgggaccaacataaggcaggcagggatacaaggcagtctggaaagaagggaaggcaggagtttcagtcttgggctcttgactcctcactgttgtctagagatggagccagcaggctggtagcctggcagcctacatctcccctcagcctctcctcactatggccccagtgccttgaggcccaggccagggcagccagtggctctagctcagggaaagccaggcccacctgccctatcccctcccttgctcctgaggccaaagccagagactcgaacagcctccccaccaccaccagcatatgtcaaggagcacttgcaggcagaatgggaggaggacatggagctgatggagtccaggctgtgcaagcccctgaggtcttgagagatgtgcccactgcccgtgcagcctccttcagccagagcccagagcatagacaggagtgtaggagtccctgtttgatgtactctgggagagtaattctatctcctcttctgatagttggggaaactgaggccttgtctcacagttggatgcttttcccagttgtcagtgggtttctccatgggtctcatacagctgccttattgaaataggccccgaaccccctaaatgcaaaaaatactcttttttgctcctttacccccacctggaccctgggctattggctgctcccaatccttgccccaaacacttagctggctccccatgacttaagtgtgttctcttgtgtcctatggaatccagttctgaagaggtgggggaggacaactgtgggaaaagccctgggggcccctcccaaggccccatcagtgctctgagtaggctgtcatcagaacaaagggctccactgctgacaaggtttgagaactgctggcttgaggtgagaacccctttaacctctgcgggacagcatgtctttccctatccaccttcgattcttttctcttttttttcttcattggctccttcttagtggattctcttctctactgccctgggcttcagcctttgtgcagtactctcgatgccctgaacacacaccttccctttgcccaggcggtgcaaacaatccacttcttcaagctccaacacaaatgctgcctcctttaggatgcctgctctgtgctctccctgcctcccctagcccatacctctgctggcaccttctgtaccatgccttcagaaaccttcttatccccctcatctctggggccccctgtggatctggcatacccaagttcagtaaatgtctatcagtaagctgatggtacatgcattttctagaatagagctgggacttcccatgtggcccacatctgacctggcagcccatgtattccggtcattagggatgggaagccatgaggacctggccttctgcccgacccaggcagccattcaagttgagcaatggccacttcgaagactcaagtgcacctgatccctgcgcaacagccacaccaggagaacaggctgtccttggcggcagtaggagcaggcgccaggtttcctggagctcttggcttcagccagcccccagccagagtcctggctaggacagtgacctgatctcctcctcatgaccttctgccctggacaagccccctgaactggatttgggactgtcaaagcaactctacccctgctctggtaggctgaacagtgaccccccaaaatggcagtgtcttaatcacctaaaccttaacatgtgactatattaccttcacatagcaaaatggactttgcagatgtgattaaggatcttgagatggaaggagtatcctggatttttcaggtaaactgagtataatcacaagggcctctgtaaaggaggcaggagtgtcagagtgacggaagaaaatgtatgtaacaatggaagcagaggtcagagtgatgcaattgctggaggaagagccatgagccgaggaatgcagacagcctcttctcctctggggcctcaagaagaatgcagtcctgccaataccttgattttaagccctgtgaaactgatttcagattgctgacctccagaacagtaagatcataaatttgtgttgttttcacatgtgtgaaaacacatgtgtgataatttgttacagcagccacgggaaacgaatatagattgtggtgcccaaattagagtgctgctgtaacacacgcctactgattgaagtggctttggaattgcaacgtggaaatgggcagaggctggaagaattttgagagtcatgataaattgccttaaccacctctcttctgataggtgatgtggccaggggaactcttcctcaaccttcagacctaaa

SEQ ID NO: 289 - DNA, 1730 bp, Homo sapiens
ccttcataccggcccttcccctcggctttgcctggacagctcctgcctcccgcagggcccacctgtgtcccccagcgccgctccacccagcaggcctgagcccctctctgctgccagacaccccctgctgcccactctcctgctgctcgggttctgaggcacagcttgtcacaccgaggcggattctctttctctttctctttctcttctggcccacagccgcagcaatggcgctgagttcctctgctggagttcatcctgctagctgggttcccgagctgccggtctgagcctgaggcatggagcctcctggagactgggggcctcctccctggagatccacccccaaaaccgacgtcttgaggctggtgctgtatctcaccttcctgggagccccctgctacgccccagctctgccgtcctgcaaggaggacgagtacccagtgggctccgagtgctgccccaagtgcagtccaggttatcgtgtgaaggaggcctgcggggagctgacgggcacagtgtgtgaaccctgccctccaggcacctacattgcccacctcaatggcctaagcaagtgtctgcagtgccaaatgtgtgacccagccatgggcctgcgcgcgagccggaactgctccaggacagagaacgccgtgtgtggctgcagcccaggccacttctgcatcgtccaggacggggaccactgcgccgcgtgccgcgcttacgccacctccagcccgggccagagggtgcagaagggaggcaccgagagtcaggacaccctgtgtcagaactgccccccggggaccttctctcccaatgggaccctggaggaatgtcagcaccagaccaagtgcagctggctggtgacgaaggccggagctgggaccagcagctcccactgggtatggtggtttctctcagggagcctcgtcatcgtcattgtttgctccacagttggcctaatcatatgtgtgaaaagaagaaagccaaggggtgatgtagtcaaggtgatcgtctccgtccagcggaaaagacaggaggcagaaggtgaggccacagtcattgaggccctgcaggcccctccggacgtcaccacggtggccgtggaggagacaataccctcattcacggggaggagcccaaaccactgacccacagactctgcaccccgacgccagagatacctggagcgacggctgctgaaagaggctgtccacctggcggaaccaccggagcccggaggcttgggggctccgccctgggctggcttccgtctcctccagtggagggagaggtggggcccctgctggggtagagctggggacgccacgtgccattcccatgggccagtgagggcctggggcctctgttctgctgtggcctgagctccccagagtcctgaggaggagcgccagttgcccctcgctcacagaccacacacccagccctcctgggccagcccagagggcccttcagaccccagctgtctgcgcgtctgactcttgtggcctcagcaggacaggccccgggcactgcctcacagccaaggctggactgggttggctgcagtgtggtgtttagtggataccacatcggaagtgattttctaaattggatttgaattcggctcctgttttctatttgtcatgaaacagtgtatttggggagatgctgtgggaggatgtaaatatcttgtttctcctcaaaaaaaaaaaaaaaaaaaaaaaaaa

SEQ ID NO: 290 - DNA, 2247 bp, Homo sapiens
taaatgtgccacgtcttctaagaagggggagtcctgaacttgtctgaagcccttgtccgtaagccttgaactacgttcttaaatctatgaagtcgagggacctttcgctgcttttgtagggacttctttccttgcttcagcaacatgaggcttttcttgtggaacgcggtcttgactctgttcgtcacttctttgattggggctttgatccctgaaccagaagtgaaaattgaagttctccagaagccattcatctgccatcgcaagaccaaaggaggggatttgatgttggtccactatgaaggctacttagaaaaggacggctccttatttcactccactcacaaacataacaatggtcagcccatttggtttaccctgggcatcctggaggctctcaaaggttgggaccagggcttgaaaggaatgtgtgtaggagagaagagaaagctcatcattcctcctgctctgggctatggaaaagaaggaaaaggtaaaattcccccagaaagtacactgatatttaatattgatctcctggagattcgaaatggaccaagatcccatgaatcattccaagaaatggatcttaatgatgactggaaactctctaaagatgaggttaaagcatatttaaagaaggagtttgaaaaacatggtgcggtggtgaatgaaagtcatcatgatgctttggtggaggatatttttgataaagaagatgaagacaaagatgggtttatatctgccagagaatttacatataaacacgatgagttatagagatacatctacccttttaatatagcactcatctttcaagagagggcagtcatctttaaagaacattttatttttatacaatgttctttcttgctttgttttttatttttatatattttttctgactcctatttaaagaaccccttaggtttctaagtacccatttctttctgataagttattgggaagaaaaagctaattggtctttgaatagaagacttctggacaatttttcactttcacagatatgaagctttgttttactttctcacttataaatttaaaatgttgcaactgggaatataccacgacatgagaccaggttatagcacaaattagcaccctatatttctgcttccctctattttctccaagttagaggtcaacatttgaaaagccttttgcaatagcccaaggcttgctattttcatgttataatgaaatagtttatgtgtaactggctctgagtctctgcttgaggaccagaggaaaatggttgttggacctgacttgttaatggctactgctttactaaggagatgtgcaatgctgaagttagaaacaaggttaatagccaggcatggtggctcatgcctgtaatcccagcactttgggaggctgaggcgggcggatcacctgaggttgggagttcgagaccagcctgaccaacacggagaaaccctatctctactaaaaatacaaaagtagccgggcgtggtgatgcgtgcctgtaatcccagctacccaggaaggctgaggcggcagaatcacttgaacccggaggcggaggttgcggtaagccgagatcacctccagcctggacactctgtctcgaaaaaaagaaaagaaacacggttaataacatataaatatgtatgcattgagacatgctacctaggacttaagctgatgaagcttggctcctagtgattggtggcctattatgataaataggacaaatcatttatgtgtgagtttctttgtaataaaatgtatcaatatgttatagatgaggtagaaagttatatttatattcaatatttacttcttaaggctagcggaatatccttcctggttctttaatgggtagtctatagtatattatactacaataacattgtatcataagataaagtagtaaaccagtctacattttcccatttctgtctcatcaaaaactgaagttagctgggtgtggtggctcatgcctgtaatcccagcactttgggggccaaggagggtggatcacttgagatcaggagttcaagaccagcctggccaacatggtgaaaccttgtctctactaaaaatacaaaaattagccaggcgtggtggtgcacacctgtagtcccagctactcgggaggctgagacaggagatttgcttgaacccgggaggcggaggttgcagtgagccaagattgtgccactgcactccagcctgggtgacagagcaagactccatctc

SEQ ID NO: 291 - DNA, 1398 bp, Homo sapiens
agcggaggggcgccctaacgaacccgggatacggtctgttcctagtccgctccggaaatgcaactgcgtacgggctggccgcgtaatcgtgacgacagcgcgccagcgccggctagccggacgccctaggcttccgcgagatcttcggtgggggtacgggtgttttacgccaggacgctgatgcgtttgggttctcgtctgcagaccctctggacctggtcacgattccataatgtaccacaacagtagtcagaagcggcactggaccttctccagcgaggagcagctggcaagactgcgggctgacgccaaccgcaaattcagatgcaaagccgtggccaacgggaaggttcttccgaatgatccagtctttcttgagcctcatgaagaaatgacactctgcaaatactatgagaaaaggttattggaattctgttcggtgtttaagccagcaatgccaagatctgttgtgggtacggcttgtatgtatttcaaacgtttttatcttaataactcagtaatggaatatcaccccaggataataatgctcacttgtgcatttttggcctgcaaagtagatgaattcaatgtatctagtcctcagtttgttggaaacctccgggagagtcctcttggacaggagaaggcacttgaacagatactggaatatgaactacttcttatacagcaacttaatttccaccttattgtccacaatccttacagaccatttgagggcttcctcatcgacttaaagacccgctatcccatattggagaatccagagattttgaggaaaacagctgatgactttcttaatagaattgcattgacggatgcttaccttttatacacaccttcccaaattgccctgactgccattttatctagtgcctccagggctggaattactatggaaagttatttatcagagagtctgatgctgaaagagaacagaacttgcctgtcacagttactagatataatgaaaagcatgagaaacttagtaaagaagtatgaaccacccagatctgaagaagttgctgttctgaaacagaagttggagcgatgtcattctgctgagcttgcacttaacgtaatcacgaagaagaggaaaggctatgaagatgatgattacgtctcaaagaaatccaaacatgaggaggaagaatggactgatgacgacctggtagaatctctctaaccatttgaagttgatttctcaatgctaactaatcaagagaagtaggaagcatatcaaacgtttaactttatttaaaaagtataatgtgaaaacataaaatatattaaaacttttctattgttttctttccctttcacagtaactttatgtaaaataaaccatcttcaaaagagctagaataaaaaaaaaaaaaa

SEQ ID NO: 292 - DNA, 3053 bp, Homo sapiens
gcgatggcggagagtccgactgaggaggcggcaacggcgggcgccggggcggcgggccccggggcgagcagcgttgctggtgttgttggcgttagcggcagcggcggcgggttcgggccgcctttcctgccggatgtgtgggcggcggcggcggcagcgggcggggccgggggcccggggagcggcctggctccgctgcccgggctcccgccctcagccgctgcccacggggccgcgctgcttagccactgggaccccacgctcagctccgactgggacggcgagcgcaccgcgccgcagtgtctactccggatcaagcgggatatcatgtccatttataaggagcctcctccaggaatgttcgttgtacctgatactgttgacatgactaagattcatgcattgatcacaggcccatttgacactccttatgaagggggtttcttcctgttcgtgtttcggtgtccgcccgactatcccatccacccacctcgggtcaaactgatgacaacgggcaataacacagtgaggtttaaccccaacttctaccgcaatgggaaagtctgcttgagtattctaggtacatggactggacctgcctggagcccagcccagagcatctcctcagtgctcatctctatccagtccctgatgactgagaacccctatcacaatgagcccggctttgaacaggagagacatccaggagacagcaaaaactataatgaatgtatccggcacgagaccatcagagttgcagtctgtgacatgatggaaggaaagtgtccctgtcctgaacccctacgaggggtgatggagaagtcctttctggagtattacgacttctatgaggtggcctgcaaagatcgcctgcaccttcaaggccaaactatgcaggacccttttggagagaagcggggccactttgactaccagtccctcttgatgcgcctgggactgatacgtcagaaagtgctggagaggctccataatgagaatgcagaaatggactctgatagcagttcatctgggacagagacagaccttcatgggagcctgagggtttagaccctgctcccatctccccttcccccactcaagagtcccagcagaatcccttccccccaccccagggatggagaggcactgtgtatctccctccagactcgaagtcatcctgcaagatggcaagaaccaagcaagctccgatcccagggtgtgggagtgggggcctgttcccggtctgacctccttggcactggagcatctggggcttcgttcatccattcatcccgtatcaggggccaaggtacctttacaggagcacctagagcgagggcctttggcaaaaacaaaacaaccaacacacctctccacagggccagctccttagggataagtggaagatggaaattgcaattccaagagggagtgtgcccaaatgatttatggggatacctggaagggagcttggggtgggggctgtctgtgacacttaagcagtctgggtggttgtctatttgtctgtcttcagtcttgaagcagggcttcccaatgcccttttcctccctgccttccttcccccattatttcccacaggccagcataattttgtttttcctaatttatagtcactgttctagacagaccaaagagaaggaacagtggtggagtctaggctgctgatcagtaagctttacctagcacctgagcacctttctcccctcccctctttcctcacccttttctagatgtaagacagaaggtaaatgtgactgggacttaaccaaggtcttggtaaagcctgcatggcaccgtaagaagctgaaaatactgtttgttcccgcaatcactgatttgaaaagttcccaacacaggcagctgctgtgtatatgggattagagccactacatagaatagtctcttacagattttcataaatactagtcacaataagggtatttttcttgggggtggagtaagggggagactgatgctagtccttgttgtattttgttgggctgtccttgtgtattttcaccccagcctgtagtcctcctcacttcaaccccagggatttgtggggagcaagggtagccaatggcagagggggttggggctgggactctggaggctcctccccttctttctcttccttctgcctcccccgtgcccccagctgctcttgtcactgtctctgatgggtatttgcctggctttgttgcttctctatctgtatttagctgcagtgatcctttagctggttggctcagaaaaaaaaaaatgtgctttaggtgccctgtaatcctgggcatcaagggaatccatccttcccctttttgatatgttctccccgtacttccagatttattgttatggctcccagtgggtattggcgattcttgtgatgcagggcctcagtcagtgtccagccatgcataagggagaggatagtgtgtacctgccctgccctctgctatgaaggtctctgccttgtggatcatgggactccccttggaggatctgtgcaaaggggggctgggcacaaaggagaatgtcctatttgggagggcaggaagcaaaggaactggacagggattggtgggcttggggaacggaagtttatcttggatacccttgaagaggctgggtctcttcacatgaagatcgaaaagggaccctgcttccaatttccctcttccattcctcgagctactccagggcttagaagaatgctcttggtctgtgggtccagtgttgtctgtcatccatttaagtgttcccactttcaagtgacaatcctctccttggccctgccatagggcagagcatgtctggcatagcagcctgacttttatgccctaatcttgagttgaggaaatatatgcacaggagtcaaagagatgtctttatatctgactgtatataaatgaagtttttttgttttttttgttttcctttttggtgcaataaagtttgttttggcagaaaaaaaaaaaaaaaaaaaaaaaaaaaaaaaaaaaaaaaaaaaaaaaaaaaaaaaaaaaaaaaaa

SEQ ID NO: 293 - DNA, 2893 bp, Homo sapiens
aagaaacttctctcctcttttctcacaatgtgcgctcacctagacggccgggcagttaggatcgtctattggatgtgaaaccagagatgcccgccaacctggaatagagaggaagagagcaagcagatttgaacctatctgctttcaagctggtcatcatgatgaaacttagacacaaaaataaaaagccaggtgaaggttccaagggccacaagaagataagttggccctaccctcagcctgcaaagcaaaatgggaagaaagcaacctccaaagtgccctctgcacctcattttgttcaccccaatgatcatgccaatcgagaggctgaattaaagaagaagtgggttgaggagatgagggagaagcagcaagccgcccgggagcaagaaagacaaaaacgcaggaccattgagagctactgtcaggatgtcctaagacgccaggaggagtttgagcataaggaggaagttttgcaggaattaaatatgtttcctcagctggatgacgaggccacgaggaaggcttattacaaggagttccgtaaggtggtggaatactctgatgtgattctggaagtcctggatgccagagacccattaggctgccgctgcttccaaatggaggaggctgtcctgcgagcacaaggcaacaagaagctggtcctggtcttgaacaagattgacctggtccccaaggaggttgtggagaaatggctggattaccttcggaatgagttgccaaccgtggctttcaaggccagtacccagcatcaggtcaaaaacctgaatcgttgcagtgtgccagtagatcaggcctctgagtcactgctgaaaagcaaagcctgctttggagctgaaaacctcatgagggttctggggaactattgccgccttggtgaagtgcgcacccacattcgtgtgggtgttgtgggtcttcccaatgttgggaagagcagcctgatcaatagcctgaagcgcagccgcgcatgcagcgtgggagctgttcctggaattaccaaattcatgcaggaggtctacctggacaagttcatccggctcttggatgctccaggcattgtcccagggcccaactcagaggtgggcaccatcctgcgtaactgcgtccacgtgcagaagctggcagaccctgtgaccccagtggagaccatcctgcagcgctgcaacctggaggagatttccaactattatggcgtctctgggttccagaccactgagcactttctgacggcagtggcccaccgtttggggaagaagaagaagggaggcttatatagtcaggaacaggcggccaaagctgtcctagctgactgggtgagcgggaagatcagcttctatataccaccaccagccactcacactctgcccacccatctcagtgctgagatcgttaaggaaatgaccgaggtctttgacatcgaggatactgagcaggccaatgaagacaccatggaatgcttggccaccggagaatctgatgagctgttgggtgacacggacccacttgaaatggagatcaagttgctccattctccgatgacgaaaatagcagatgccattgaaaataaaaccaccgtgtataagattggagatctcactgggtattgcaccaatccgaaccgtcatcagatggggtgggctaaacgcaatgtggaccaccgccctaagagcaacagtatggtggatgtctgctcagtggaccgccgctcagtgctgcagaggatcatggagacggaccccctgcaacagggccaggctctggcatctgccctgaaaaataagaagaagatgcagaaacgtgcagataaaatcgccagcaagctgtctgattccatgatgtctgctctcgacctctctggcaatgctgatgatggtgttggtgactaatcgactgatctcacttcccttccgctccaagcaccagttccggtggtacgggggaataccagtgaaatagtttggttctccctgaagcatctgcatattgaaagaacgctttccccactgtgtgtcttctccccctcctcgggtgatccgctcgcttcggcctcccggggtgctgggattataggcgtgagccactgtgcccagcctcacagctgcatcttaaccttacctttgcctctgcctctcaagctggtacctcctaatttacatcctaagagtggaaccatgtgacaaggactggagtgccattggctgtggactgttcaggcagggaagtacgagaccactcttgtattcaggggcaaccaaaggagagaattacgtacttgttgagtacaaactgcaccaagccctggagacccattaccaccgttaaccctcaatacagctctgctagtaagggattcgtctccccaaatgaaaaaaaaaagtaatctcagaatgttggccgggcatggtggctcacacctgtggtctcagcctcccgagtagctgggattatgggcgcccgccaccacgcccagctaatttttgtatttttggtagagatggggtttcactgttttggccaggctggtctcgaactcctgacctcatgatcctcctgcctcggcctcccaaagtgctgggattataggcatgaaccaccgtgtccggccatatattttcgtcttttgaagactgttatatacatgaaattatatggtatgtagcattttgagagcgacttcttttgctatgagtaatacatttgagattcatccatatttctcagtatattaatagttcttatttctgagtcactccattgtgtggatttactactgtttgttccccagttgaaggatgtttaggatctttgcagttttggacaattacaagtaaagctgctataaacatttgtatgcaaaaaaaaaaaaaaaaaa

SEQ ID NO: 294 - DNA, 4605 bp, Homo sapiens
gcggtagcggcggcggcggcggcggcggcggcggcggcggcggcggcgcggcgtgtggagcgagggagcggcgcgagcggcggcatgacgcggaggcggagcaggccgagcggcggtgcgggcaggcgcgagcgggctcgggccgcggggccgcagaagccccaggcgcccgagcccccgccgccgccaagcctggaggcgggagcgggtgcaggccctccggaggcgccggcggagcccgaccacgacggccccagggaggatgacgaacccaacctggtgcccggcccgcaggtaggagcgagcggggagacttcggcggctcgggcgctttcaccttccccgagcgggagcgggagtggggcggggttggggatgggccatcctgccgcggctggggtagcagccttcccccgggtccggcgccgaagctttctcccccggggcgggaatggaggctggacccctctccccaaagccgaggctcggtccgcgctcctgcgactaggctgaagctgctcccctctccccgccgcctccgggcgttccggccgtacacccacactgggactgggactgggactgggctgtgatcccgaggccgcagctccgctctcggcccgccacctcccccgggcccacctgctccctcagccacaggccatctcggggctctgggactggacgactgcagcctcttccctctgcccccgggaacggctccactccgtcccctgcagcgcctgcagccgcggccccctcagcagctgtgtctcctggcgcctcctcgccatacccagcagagcagttggagcagacagccaggctgcccggaggagtttttggtggggtttctgcactgaggtggaaacccagcagaacctgcccttcttccctcccctgctccgcaaggcagcccaccccgaccttgagatcccaggtttggagaatcctgctgagagcgaacagtaggaggattccccaaagcttccagcttgccacctggaagaaggtcactttcttttgagcaaaggagataacgggaggtaccctgccaaagttcactgagaggcgggggtgacatgggccacggttgctctgggagggttgtggcactcggggctgggtggctctccctaagcttgctctgacaaaagagttttgagttggtcttttggctgagcctgcccaggaaggcaggctcctgcaggagtcttggagggtcggatgcggcgccggatgaggatgaggcgtggcggaagatgcgtttggctctgcagacactgcatcgggcagcaggggactctgggaggctggtgcagccagaaggcatggctcttgacagccttctagtagaatctctggaattgtgcatatgaagaaacagaaactcagagcaactaaacatttgcccaaatgactccaactgtaggtgtcagacaaaagaaaagaaaaggacttttaggtcccccccgcctccagccagcctgtgcagacttgctgcctgctgtgtcaccgggaacgcaaaggctgggaagaaggcccttctcaaaatggactggtgttgcagggtgagaagctgccccctgacttcatgccaaagctcgtcaagaatctcctaggcgagatgcctctgtgggtctgccagagttgccgaaagagcatggaggaagatgaaaggcagacaggtcgagaacatgcagtggcgatctccttgtcacacacatcctgcaaatcacagtcttgtggagatgactctcattcgtcctcgtcttcctcctcatcatcctcatcctcgtcctcctcttcctgccctgggaactcgggagactgggatcctagctcgttcctgtcggcacataagctctcgggcctctggaattccccacattccagtggggccatgccaggcagctctcttgggagtcctcctaccatccccggtgaggctttccccgtctcggagcaccaccagcactcagacctcactgctccccctaacagccccaccggccaccacccgcagccagcatctctaatcccgtctcaccccagctcctttggctccccaccccacccacacctgctgcccaccaccccggcagcacctttccctgcccaggcttcagagtgccctgttgctgctgccactgccccccacactccagggccatgtcagagctcccatctaccctccaccagcatgccgctcctgaagatgcccccaccattctcggggtgcagccacccctgcagcgggcactgtggtgggcactgcagtgggcctctcctcccacccccgagctctcagccactccctagcactcacagggatcccgggtgcaaggggcacaagtttgcacacagtggcctggcttgccagctgccccagccctgcgaggcagatgaggggctgggtgaggaagaggatagcagctctgagcgaagctcctgcacctcatcctccacccaccagagagatgggaagttctgtgactgctgctactgtgagttcttcggccacaatgcggcaaaaggaaaggaaatggcagagagaaagctatgattctgatgagtatgtatacgtgtgtaatcccagagaagtgaacgcttgggagtgatgaaggcagagtggaagcaaaaaggctctcagtcccccaagtgtgacagccagccgagggacaggccgtgagcacagacggcgccaggaaggaggctcagatcagagggcatgctggctctggccagggggaggaagcagtgcagaagtctcataagccacccgctgccccgacgagtcggaactataccgagatccgggagaagctccgctcgaggctgaccaggcggaaagaggagctgcccatgaaggggggcaccctgggcgggatccctggggagcccgccgtggaccaccgagatgtggatgagctgctggaattcatcaacagcacggagcccaaagtccccaacagcgccagggccgccaagcgggcccggcacaagctgaaaaagaaggaaaaggagaaggcccagttggcagcagaagctctaaagcaggcaaatcgtgtttctggaagccgggagccaaggcctgccagggagaggctcttggagtggcccgaccgggaactggatcgggtcaacagcttcctgagcagccgtctgcaggagatcaaaaacactgtcaaagactccatccgtgccagcttcagtgtgtgtgagctcagcatggacagcaatggcttctctaaggagggggctgctgagcctgagcctcagagtctacccccctcaaacctcagtggctcctcagagcagcagcctgacatcaaccttgacctgtcccctttgactttgggctcccctcagaaccacacgttacaagctccaggcgagccagccccaccatgggcagaaatgagaggcccccacccaccatggacagaggtgagggggccccctcccggtatcgtccccgagaacgggctcgtgaggagactcaacaccgtgcccaacctatcccgggtgatctgggtcaagacacccaagccgggctaccccagctccgaggagccaagctcaaaggaagttcccagttgcaagcaggagctgcctgagcctgtgtcctcaggtgggaagccacagaagggcaagaggcagggcagtcaggccaagaagagcgaggcaagcccagccccccggcccccagccagcctagaggttcccagtgccaagggccaggtcgctggccccaagcagccaggcagggtcctagagcttcccaaagtaggcagctgtgctgaggctggagaggggagccgggggagccggccaggaccaggttgggctggcagtcccaaaactgagaaggagaagggcagctcctggcgaaactggccaggcgaggccaaggcacggcctcaggagcaggagtctgtgcagcccccaggcccagcaaggccacagagcttgccccagggcaagggccgcagccgccggagccgcaacaagcaggagaagccagcctcctccttggacgatgtgttcctgcccaaggacatggacggggtggagatggatgagactgaccgagaggtggagtactttaagaggttctgtttggattctgcaaagcagactcgtcagaaagttgctgtgaactggaccaacttcagcctcaagaaaaccactcctagcacagctcagtgaggccctgcccaggctgagctgcttcagggcatcctgaggccctgactgccagctgaaggcgtataatttttccctccgtgtgccccacctacccgtccaagaccctctgtgctccccaccatcctggaccaaccaaaagctgaacggatgccacactgtgctggggccccttgacctcagcagagccgcttcctggtgctacgcagcctccacactcagagcccgtggactgggctggcctaagggccagggctgatggtactgctggcccaacactgctctctttgtgtttggtttttttgtttttgtttttattttgtttttttccaattctttacttttgatactgtgaagatctttcgtgccgaaagataaagcaacatttggacacag

SEQ ID NO: 295 - DNA, 2215 bp, Homo sapiens
cgcggcgcatgttcggcgtgtcggtcttcaggcgcctgatgagttcatagttgggcggtggtgtcagcggtttcgctggcgttcgtgggcctcccccggacccacacacggaaacacgcaaccattcggggatccagacgcccgtttacacgcaccacccctgggcgggctgtgcggctcaggccctcccccgggaccggcccgtgtcccgccccgtgtcccgccccgtatttgtgcggcgccagctggccccgcagcctgcggcgcagagaggctgggcttgcaggcgcagtagctccagaggtcgcgctgggctgagagtgcgggccggcagaggctggcggggagcagccggggttatgctgggcaaggattacatgctggccatcattctggtcaactgcgatgatgacttgtggggggaccacagtctggaggtggaggctggcctgcctcctggctggaggaagatccacgatgctgcaggtacttactactggcatgtacccagcggtagcacccagtggcagcgcccaacctgggaactaggagatgcagaggacccaggcacgggaacggaggggatctggggactgcggccccccaaagggagatccttctccagcctggagagttcactggaccggagtaactctctgtcctggtatggtggggaatcctacatccagagcatggagccaggggctaagtgctttgcagtccgctctctgggctgggtagaggtacctgaagaggacctggcaccggggaagagcagtattgcagtcaataactgtatccagcagctggcccagacccgcagccggagccagcctccagatggtgcctggggtgagggccagaacatgctgatgatcctgaagaaggatgccatgagcctagtgaatcccctggaccacagtctgatccactgccagcctctggtgcacatccgtgtgtggggcgtggggagctccaagggccgtgacagccccatctctgcccctgctagggacttcgcttttgtggcaagtgacaaagatagctgtatgctcaagtgccatgtgtttcgctgtgatgtccctgccaaggccattgccagtgccctacatgggctttgtgcccagatcttgtcagagcgagtagaggtcagtggtgatgcctcttgctgctccccagaccccatctctcctgaagacctgccacggcaagtggagctgctggatgcggtaagccaagctgctcagaagtacgaggcactgtatatggggacactgccagtcaccaaggccatgggcatggatgtgctgaacgaggccattggtaccctcaccgccaggggggaccggaatgcctgggtccccaccatgctcagtgtgtctgactctctcatgactgcacatcccattcaggcagaggccagtacagaggaggagccattgtggcagtgccctgtgcgccttgtgacatttattggtgttggccgcgacccacacacctttggcctcatcgctgacctgggccgtcagagcttccagtgcgcagccttctggtgccagccccatgcagggggactctctgaagctgtgcaggctgcctgtatggttcagtaccagaagtgtcttgtggcctctgcagctcgaggcaaggcctggggtgcccaggcccgtgcccgcctgcggctcaagcggaccagctccatggattccccaggaggtcccctgcccctccccctgctcaaaggaggggttggcggtgcaggggcaacccctcgaaagcggggtgtcttctcttttcttgatgccttccggctgaaaccctctctgctccatatgccctaaacttatctgggaaggctggggaagtaggctctgggtccatgcctaactctgtaccgttttattcctcaaggcctatagcctgtcactccttgaagccttctctgcctgtccctccgatccttgtccaccgtctatttattgcccaatttattgtttatacggatgactgggaggcactgcaccacaacgtaggaccctggctcccctttccttgggtccttgtgttccttgcccctgtccaaccctggacagttggctctacctcagtaacactttatagcaaaatcagtgcaaataaaaatccctcagtgacctcaaaaaaaaaaaaaaaaaaaaaaaaaaaaaaaaaaaaaaaaaaaaaaaaaaaaaaaaaa

SEQ ID NO: 296 - DNA, 2209 bp, Homo sapiens
cgcggcgcatgttcggcgtgtcggtcttcaggcgcctgatgagttcatagttgggcggtggtgtcagcggtttcgctggcgttcgtgggcctcccccggacccacacacggaaacacgcaaccattcggggatccagacgcccgtttacacgcaccacccctgggcgggctgtgcggctcaggccctcccccgggaccggcccgtgtcccgccccgtgtcccgccccgtatttgtgcggcgccagctggccccgcagcctgcggcgcagagaggctgggcttgcaggcgcagtagctccagaggtcgcgctgggctgagagtgcgggccggcagaggctggcggggagcagccggggttatgctgggcaaggattacatgctggccatcattctggtcaactgcgatgatgacttgtggggggaccacagtctggaggtggaggctggcctgcctcctggctggaggaagatccacgatgctgcaggtacttactactggcatgtacccagcggtagcacccagtggcagcgcccaacctgggaactaggagatgcagaggacccaggcacgggaacggaggggatctggggactgcggccccccaaagggagatccttctccagcctggagagttcactggaccggagtaactctctgtcctggtatggtggggaatcctacatccagagcatggagccaggggctaagtgctttgcagtccgctctctgggctgggtagaggtacctgaagaggacctggcaccggggaagagcagtattgcagtcaataactgtatccagcagctggcccagacccgcagccggagccagcctccagatggtgcctggggtgagggccagaacatgctgatgatcctgaagaaggatgccatgagcctagtgaatcccctggaccacagtctgatccactgccagcctctggtgcacatccgtgtgtggggcgtggggagctccaagggccgccccatctctgcccctgctagggacttcgcttttgtggcaagtgacaaagatagctgtatgctcaagtgccatgtgtttcgctgtgatgtccctgccaaggccattgccagtgccctacatgggctttgtgcccagatcttgtcagagcgagtagaggtcagtggtgatgcctcttgctgctccccagaccccatctctcctgaagacctgccacggcaagtggagctgctggatgcggtaagccaagctgctcagaagtacgaggcactgtatatggggacactgccagtcaccaaggccatgggcatggatgtgctgaacgaggccattggtaccctcaccgccaggggggaccggaatgcctgggtccccaccatgctcagtgtgtctgactctctcatgactgcacatcccattcaggcagaggccagtacagaggaggagccattgtggcagtgccctgtgcgccttgtgacatttattggtgttggccgcgacccacacacctttggcctcatcgctgacctgggccgtcagagcttccagtgcgcagccttctggtgccagccccatgcagggggactctctgaagctgtgcaggctgcctgtatggttcagtaccagaagtgtcttgtggcctctgcagctcgaggcaaggcctggggtgcccaggcccgtgcccgcctgcggctcaagcggaccagctccatggattccccaggaggtcccctgcccctccccctgctcaaaggaggggttggcggtgcaggggcaacccctcgaaagcggggtgtcttctcttttcttgatgccttccggctgaaaccctctctgctccatatgccctaaacttatctgggaaggctggggaagtaggctctgggtccatgcctaactctgtaccgttttattcctcaaggcctatagcctgtcactccttgaagccttctctgcctgtccctccgatccttgtccaccgtctatttattgcccaatttattgtttatacggatgactgggaggcactgcaccacaacgtaggaccctggctcccctttccttgggtccttgtgttccttgcccctgtccaaccctggacagttggctctacctcagtaacactttatagcaaaatcagtgcaaataaaaatccctcagtgacctcaaaaaaaaaaaaaaaaaaaaaaaaaaaaaaaaaaaaaaaaaaaaaaaaaaaaaaaaaa

SEQ ID NO: 297 - DNA, 2194 bp, Homo sapiens
cgcggcgcatgttcggcgtgtcggtcttcaggcgcctgatgagttcatagttgggcggtggtgtcagcggtttcgctggcgttcgtgggcctcccccggacccacacacggaaacacgcaaccattcggggatccagacgcccgtttacacgcaccacccctgggcgggctgtgcggctcaggccctcccccgggaccggcccgtgtcccgccccgtgtcccgccccgtatttgtgcggcgccagctggccccgcagcctgcggcgcagagaggctgggcttgcaggcgcagtagctccagaggtcgcgctgggctgagagtgcgggccggcagaggctggcggggagcagccggggttatgctgggcaaggattacatgctggccatcattctggtcaactgcgatgatgacttgtggggggaccacagtctggaggtggaggctggcctgcctcctggctggaggaagatccacgatgctgcaggtacttactactggcatgtacccagcggtagcacccagtggcagcgcccaacctgggaactaggagatgcagaggacccaggcacgggaacggaggggatctggggactgcggccccccaaagggagatccttctccagcctggagagttcactggaccggagtaactctctgtcctggtatggtggggaatcctacatccagagcatggagccaggggctaagtgctttgcagtccgctctctgggctgggtagaggtacctgaagaggacctggcaccggggaagagcagtattgcagtcaataactgtatccagcagctggcccagacccgcagccggagccagcctccagatggtgcctggggtgagggccagaacatgctgatgatcctgaagaaggatgccatgagcctagtgaatcccctggaccacagtctgatccactgccagcctctggtgcacatccgtgtgtggggcgtggggagctccaagggccgtgacagggacttcgcttttgtggcaagtgacaaagatagctgtatgctcaagtgccatgtgtttcgctgtgatgtccctgccaaggccattgccagtgccctacatgggctttgtgcccagatcttgtcagagcgagtagaggtcagtggtgatgcctcttgctgctccccagaccccatctctcctgaagacctgccacggcaagtggagctgctggatgcggtaagccaagctgctcagaagtacgaggcactgtatatggggacactgccagtcaccaaggccatgggcatggatgtgctgaacgaggccattggtaccctcaccgccaggggggaccggaatgcctgggtccccaccatgctcagtgtgtctgactctctcatgactgcacatcccattcaggcagaggccagtacagaggaggagccattgtggcagtgccctgtgcgccttgtgacatttattggtgttggccgcgacccacacacctttggcctcatcgctgacctgggccgtcagagcttccagtgcgcagccttctggtgccagccccatgcagggggactctctgaagctgtgcaggctgcctgtatggttcagtaccagaagtgtcttgtggcctctgcagctcgaggcaaggcctggggtgcccaggcccgtgcccgcctgcggctcaagcggaccagctccatggattccccaggaggtcccctgcccctccccctgctcaaaggaggggttggcggtgcaggggcaacccctcgaaagcggggtgtcttctcttttcttgatgccttccggctgaaaccctctctgctccatatgccctaaacttatctgggaaggctggggaagtaggctctgggtccatgcctaactctgtaccgttttattcctcaaggcctatagcctgtcactccttgaagccttctctgcctgtccctccgatccttgtccaccgtctatttattgcccaatttattgtttatacggatgactgggaggcactgcaccacaacgtaggaccctggctcccctttccttgggtccttgtgttccttgcccctgtccaaccctggacagttggctctacctcagtaacactttatagcaaaatcagtgcaaataaaaatccctcagtgacctcaaaaaaaaaaaaaaaaaaaaaaaaaaaaaaaaaaaaaaaaaaaaaaaaaaaaaaaaaa

SEQ ID NO: 298 - DNA, 2188 bp, Homo sapiens
cgcggcgcatgttcggcgtgtcggtcttcaggcgcctgatgagttcatagttgggcggtggtgtcagcggtttcgctggcgttcgtgggcctcccccggacccacacacggaaacacgcaaccattcggggatccagacgcccgtttacacgcaccacccctgggcgggctgtgcggctcaggccctcccccgggaccggcccgtgtcccgccccgtgtcccgccccgtatttgtgcggcgccagctggccccgcagcctgcggcgcagagaggctgggcttgcaggcgcagtagctccagaggtcgcgctgggctgagagtgcgggccggcagaggctggcggggagcagccggggttatgctgggcaaggattacatgctggccatcattctggtcaactgcgatgatgacttgtggggggaccacagtctggaggtggaggctggcctgcctcctggctggaggaagatccacgatgctgcaggtacttactactggcatgtacccagcggtagcacccagtggcagcgcccaacctgggaactaggagatgcagaggacccaggcacgggaacggaggggatctggggactgcggccccccaaagggagatccttctccagcctggagagttcactggaccggagtaactctctgtcctggtatggtggggaatcctacatccagagcatggagccaggggctaagtgctttgcagtccgctctctgggctgggtagaggtacctgaagaggacctggcaccggggaagagcagtattgcagtcaataactgtatccagcagctggcccagacccgcagccggagccagcctccagatggtgcctggggtgagggccagaacatgctgatgatcctgaagaaggatgccatgagcctagtgaatcccctggaccacagtctgatccactgccagcctctggtgcacatccgtgtgtggggcgtggggagctccaagggccgggacttcgcttttgtggcaagtgacaaagatagctgtatgctcaagtgccatgtgtttcgctgtgatgtccctgccaaggccattgccagtgccctacatgggctttgtgcccagatcttgtcagagcgagtagaggtcagtggtgatgcctcttgctgctccccagaccccatctctcctgaagacctgccacggcaagtggagctgctggatgcggtaagccaagctgctcagaagtacgaggcactgtatatggggacactgccagtcaccaaggccatgggcatggatgtgctgaacgaggccattggtaccctcaccgccaggggggaccggaatgcctgggtccccaccatgctcagtgtgtctgactctctcatgactgcacatcccattcaggcagaggccagtacagaggaggagccattgtggcagtgccctgtgcgccttgtgacatttattggtgttggccgcgacccacacacctttggcctcatcgctgacctgggccgtcagagcttccagtgcgcagccttctggtgccagccccatgcagggggactctctgaagctgtgcaggctgcctgtatggttcagtaccagaagtgtcttgtggcctctgcagctcgaggcaaggcctggggtgcccaggcccgtgcccgcctgcggctcaagcggaccagctccatggattccccaggaggtcccctgcccctccccctgctcaaaggaggggttggcggtgcaggggcaacccctcgaaagcggggtgtcttctcttttcttgatgccttccggctgaaaccctctctgctccatatgccctaaacttatctgggaaggctggggaagtaggctctgggtccatgcctaactctgtaccgttttattcctcaaggcctatagcctgtcactccttgaagccttctctgcctgtccctccgatccttgtccaccgtctatttattgcccaatttattgtttatacggatgactgggaggcactgcaccacaacgtaggaccctggctcccctttccttgggtccttgtgttccttgcccctgtccaaccctggacagttggctctacctcagtaacactttatagcaaaatcagtgcaaataaaaatccctcagtgacctcaaaaaaaaaaaaaaaaaaaaaaaaaaaaaaaaaaaaaaaaaaaaaaaaaaaaaaaaaa

SEQ ID NO: 299 - DNA, 2350 bp, Homo sapiens
cgcggcgcatgttcggcgtgtcggtcttcaggcgcctgatgagttcatagttgggcggtggtgtcagcggtttcgctggcgttcgtgggcctcccccggacccacacacggaaacacgcaaccattcggggatccagacgcccgtttacacgcaccacccctgggcgggctgtgcggctcaggccctcccccgggaccggcccgtgtcccgccccgtgtcccgccccgtatttgtgcggcgccagctggccccgcagcctgcggcgcagagaggctgggcttgcaggcgcagtagctccagaggtcgcgctgggctgagagtgcgggccggcagaggctggcggggagcagccggggttatgctgggcaaggattacatgctggccatcattctggtcaactgcgatgatgacttgtggggggaccacagtctggaggtggaggctggcctgcctcctggctggaggaagatccacgatgctgcaggtacttactactggcatgtacccagcggtagcacccagtggcagcgcccaacctgggaactaggagatgcagaggacccaggcacgggaacggaggggatctggggactgcggccccccaaagggagatccttctccagcctggagagttcactggaccggagtaactctctgtcctggtatggtggggaatcctacatccagagcatggagccaggggctaagtgctttgcagtccgctctctgggctgggtagaggtacctgaagaggacctggcaccggggaagagcagtattgcagtcaataactgtatccagcagctggcccagacccgcagccggagccagcctccagatggtgcctggggtgagggccagaacatgctgatgatcctgaagaaggatgccatgagcctagtgaatcccctggaccacagtctgatccactgccagcctctggctgtgatccccactgatgctgatccccagtacttgaacccctggacacagatcctctgatgtggacccaggactgcttcccctgcctggtccagccctggttggggagggtgggcccagctcagcagggacagtttggggagagtccgagaggctgggctgattcccttctgtgctcccacatgcttccggaacagtgacagggacttcgcttttgtggcaagtgacaaagatagctgtatgctcaagtgccatgtgtttcgctgtgatgtccctgccaaggccattgccagtgccctacatgggctttgtgcccagatcttgtcagagcgagtagaggtcagtggtgatgcctcttgctgctccccagaccccatctctcctgaagacctgccacggcaagtggagctgctggatgcggtaagccaagctgctcagaagtacgaggcactgtatatggggacactgccagtcaccaaggccatgggcatggatgtgctgaacgaggccattggtaccctcaccgccaggggggaccggaatgcctgggtccccaccatgctcagtgtgtctgactctctcatgactgcacatcccattcaggcagaggccagtacagaggaggagccattgtggcagtgccctgtgcgccttgtgacatttattggtgttggccgcgacccacacacctttggcctcatcgctgacctgggccgtcagagcttccagtgcgcagccttctggtgccagccccatgcagggggactctctgaagctgtgcaggctgcctgtatggttcagtaccagaagtgtcttgtggcctctgcagctcgaggcaaggcctggggtgcccaggcccgtgcccgcctgcggctcaagcggaccagctccatggattccccaggaggtcccctgcccctccccctgctcaaaggaggggttggcggtgcaggggcaacccctcgaaagcggggtgtcttctcttttcttgatgccttccggctgaaaccctctctgctccatatgccctaaacttatctgggaaggctggggaagtaggctctgggtccatgcctaactctgtaccgttttattcctcaaggcctatagcctgtcactccttgaagccttctctgcctgtccctccgatccttgtccaccgtctatttattgcccaatttattgtttatacggatgactgggaggcactgcaccacaacgtaggaccctggctcccctttccttgggtccttgtgttccttgcccctgtccaaccctggacagttggctctacctcagtaacactttatagcaaaatcagtgcaaataaaaatccctcagtgacctcaaaaaaaaaaaaaaaaaaaaaaaaaaaaaaaaaaaaaaaaaaaaaaaaaaaaaaaaaa

SEQ ID NO: 300 - DNA, 2340 bp, Homo sapiens
cgcggcgcatgttcggcgtgtcggtcttcaggcgcctgatgagttcatagttgggcggtggtgtcagcggtttcgctggcgttcgtgggcctcccccggacccacacacggaaacacgcaaccattcggggatccagacgcccgtttacacgcaccacccctgggcgggctgtgcggctcaggccctcccccgggaccggcccgtgtcccgccccgtgtcccgccccgtatttgtgcggcgccagctggccccgcagcctgcggcgcagagaggctgggcttgcaggcgcagtagctccagaggtcgcgctgggctgagagtgcgggccggcagaggctggcggggagcagccggggttatgctgggcaaggattacatgctggccatcattctggtcaactgcgatgatgacttgtggggggaccacagtctggaggtggaggctggcctgcctcctggctggaggaagatccacgatgctgcaggtacttactactggcatgtacccagcggtagcacccagtggcagcgcccaacctgggaactaggagatgcagaggacccaggcacgggaacggaggggatctggggactgcggccccccaaagggagatccttctccagcctggagagttcactggaccggagtaactctctgtcctggtatggtggggaatcctacatccagagcatggagccaggggctaagtgctttgcagtccgctctctgggctgggtagaggtacctgaagaggacctggcaccggggaagagcagtattgcagtcaataactgtatccagcagctggcccagacccgcagccggagccagcctccagatggtgcctggggtgagggccagaacatgctgatgatcctgaagaaggatgccatgagcctagtgaatcccctggaccacagtctgatccactgccagcctctggtgcacatccgtgtgtggggcgtggggagctccaagggccgatcctctgatgtggacccaggactgcttcccctgcctggtccagccctggttggggagggtgggcccagctcagcagggacagtttggggagagtccgagaggctgggctgattcccttctgtgctcccacatgcttccggaacagtgacagggacttcgcttttgtggcaagtgacaaagatagctgtatgctcaagtgccatgtgtttcgctgtgatgtccctgccaaggccattgccagtgccctacatgggctttgtgcccagatcttgtcagagcgagtagaggtcagtggtgatgcctcttgctgctccccagaccccatctctcctgaagacctgccacggcaagtggagctgctggatgcggtaagccaagctgctcagaagtacgaggcactgtatatggggacactgccagtcaccaaggccatgggcatggatgtgctgaacgaggccattggtaccctcaccgccaggggggaccggaatgcctgggtccccaccatgctcagtgtgtctgactctctcatgactgcacatcccattcaggcagaggccagtacagaggaggagccattgtggcagtgccctgtgcgccttgtgacatttattggtgttggccgcgacccacacacctttggcctcatcgctgacctgggccgtcagagcttccagtgcgcagccttctggtgccagccccatgcagggggactctctgaagctgtgcaggctgcctgtatggttcagtaccagaagtgtcttgtggcctctgcagctcgaggcaaggcctggggtgcccaggcccgtgcccgcctgcggctcaagcggaccagctccatggattccccaggaggtcccctgcccctccccctgctcaaaggaggggttggcggtgcaggggcaacccctcgaaagcggggtgtcttctcttttcttgatgccttccggctgaaaccctctctgctccatatgccctaaacttatctgggaaggctggggaagtaggctctgggtccatgcctaactctgtaccgttttattcctcaaggcctatagcctgtcactccttgaagccttctctgcctgtccctccgatccttgtccaccgtctatttattgcccaatttattgtttatacggatgactgggaggcactgcaccacaacgtaggaccctggctcccctttccttgggtccttgtgttccttgcccctgtccaaccctggacagttggctctacctcagtaacactttatagcaaaatcagtgcaaataaaaatccctcagtgacctcaaaaaaaaaaaaaaaaaaaaaaaaaaaaaaaaaaaaaaaaaaaaaaaaaaaaaaaaaa

SEQ ID NO: 301 - DNA, 1837 bp, Homo sapiens
ggaacatggggctgtacgctgcggtggcaggcgtgctggccggcgtggagagccgccagggctctatcaaggggctggtgtactccagcaacttccagaacgtgaagcagctgtacgcgctggtgtgcgaaacgcagcgctactccgccgtgctggatgccgtgatctccagcgccggcctcctcagtgcgaagaagctgcagccgcacctggccaagggtaggggcggggcggggaagtgaaccccgacggtcagcgctttgtcatctggtttcagccccgctgccgtgcacggcgggactggagcaagtcgctcacctgaaatgagtgctagtgtatgagttgttgggaaagggctttcgagggggtgggggccaatggaaggctctgttgggacggcaccaggcgaggtgttgagttggctcggctcaaggttcttcggggtgtgagctggcatgaggacctgttggaagtgggatccaggcctggtccagcctcccagctgcctcgatttgtgcgtgtgaacactctcaagacctgctccgtttatgtagttatttcaagagacaaggtttctcctatcagggtcgggcttccaggctggatggagtgccctggcgcgatctcggctcaccgcaacctctgcctcctgggttcaagcgattctcctgcttcagccttctgagcagctgggattatgaaggggtggcctgcccctccacatctgtgggatatctcatcagccttgatgacttacaagccctcaaggggaagcattttctcctggactccttgatgccggagctgctggtgtttcccgcccagacagatctgcatgaacacccactgtaccgggccggacacctcattctgcaggacagggccagctgtctcccagccatgctgctggacccccgccaggctcccatgtcatcgatgcctgtgccgccccaggcaataagaccagtcacttggctgctcttctgaagaaccaagggaagatctttgcctttgacctggatgccaagcggctggcatccatggccacgctgctggcctgggttggcgtctcctgctgtgagctggctgaggaggacttcctggcggtctcccccttagatccgcgctatcgtgaggtccactatgtcctgctggatccttcctgcagtggctcgggtgagatggtatgccgagcagacagctggaggatcccggggcagggacacctagcccggtgcgtctgcatgccctggcagggttccagcagcgagccctgtgccacgcgctcactttcccttccctgcagcggctcgtctactccatgtgctccctctgccaggaggagaatgaagacatggtaccagatgcgctgcagcagaacccgggcgccttcaggctagctcccgccctgcctgcccggccccaccgaggcctgagcacgttcccgggtgccgagcactgcctccgggcttcccccaagaccacgcttagcggtggcttcttcgttgctgtaattgaacgggtcgagatgccgacctcagcctcacaggccaaagcatcagcaccagaacgcacacccagcccagccccaaagagaaagaagagacagcaaagagccgcagccggtgcttgcacaccgccttgcacatagcagaggctccaggctgactccttcctggtgggaaaggaagatgcctgtcctctccgtggaggaccctgggccctcaccgcaggcagcagtttgcattttgaaaggttattgggtcccttcctcgggctgtgttcttgctggtgagcaaaagtgttgcctgcagaaataaaatgcagaacgtactct

SEQ ID NO: 302 - DNA, 1313 bp, Homo sapiens
ggaacatggggctgtacgctgcggtggcaggcgtgctggccggcgtggagagccgccagggctctatcaaggggctggtgtactccagcaacttccagaacgtgaagcagctgtacgcgctggtgtgcgaaacgcagcgctactccgccgtgctggatgccgtgatctccagcgccggcctcctcagtgcgaagaagctgcagccgcacctggccaaggccttgatgacttacaagccctcaaggggaagcattttctcctggactccttgatgccggagctgctggtgtttcccgcccagacagatctgcatgaacacccactgtaccgggccggacacctcattctgcaggacagggccagctgtctcccagccatgctgctggacccccgccaggctcccatgtcatcgatgcctgtgccgccccaggcaataagaccagtcacttggctgctcttctgaagaaccaagggaagatctttgcctttgacctggatgccaagcggctggcatccatggccacgctgctggcctgggttggcgtctcctgctgtgagctggctgaggaggacttcctggcggtctcccccttagatccgcgctatcgtgaggtccactatgtcctgctggatccttcctgcagtggctcgggtgagatggtatgccgagcagacagctggaggatcccggggcagggacacctagcccggtgcgtctgcatgccctggcagggttccagcagcgagccctgtgccacgcgctcactttcccttccctgcagcggctcgtctactccatgtgctccctctgccaggaggagaatgaagacatggtaccagatgcgctgcagcagaacccgggcgccttcaggctagctcccgccctgcctgcccggccccaccgaggcctgagcacgttcccgggtgccgagcactgcctccgggcttcccccaagaccacgcttagcggtggcttcttcgttgctgtaattgaacgggtcgagatgccgacctcagcctcacaggccaaagcatcagcaccagaacgcacacccagcccagccccaaagagaaagaagagacagcaaagagccgcagccggtgcttgcacaccgccttgcacatagcagaggctccaggctgactccttcctggtgggaaaggaagatgcctgtcctctccgtggaggaccctgggccctcaccgcaggcagcagtttgcattttgaaaggttattgggtcccttcctcgggctgtgttcttgctggtgagcaaaagtgttgcctgcagaaataaaatgcagaacgtactct

SEQ ID NO: 303 - DNA, 1729 bp, Homo sapiens
ggaacatggggctgtacgctgcggtggcaggcgtgctggccggcgtggagagccgccagggctctatcaaggggctggtgtactccagcaacttccagaacgtgaagcagctgtacgcgctggtgtgcgaaacgcagcgctactccgccgtgctggatgccgtgatctccagcgccggcctcctcagtgcgaagaagctgcagccgcacctggccaagggtgctagtgtatgagttgttgggaaagggctttcgagggggtgggggccaatggaaggctctgttgggacggcaccaggcgaggtgttgagttggctcggctcaaggttcttcggggtgtgagctggcatgaggacctgttggaagtgggatccaggcctggtccagcctcccagctgcctcgatttgtgcgtgtgaacactctcaagacctgctccgtttatgtagttatttcaagagacaaggtttctcctatcagggtcgggcttccaggctggatggagtgccctggcgcgatctcggctcaccgcaacctctgcctcctgggttcaagcgattctcctgcttcagccttctgagcagctgggattatgaaggggtggcctgcccctccacatctgtgggatatctcatcagccttgatgacttacaagccctcaaggggaagcattttctcctggactccttgatgccggagctgctggtgtttcccgcccagacagatctgcatgaacacccactgtaccgggccggacacctcattctgcaggacagggccagctgtctcccagccatgctgctggacccccgccaggctcccatgtcatcgatgcctgtgccgccccaggcaataagaccagtcacttggctgctcttctgaagaaccaagggaagatctttgcctttgacctggatgccaagcggctggcatccatggccacgctgctggcctgggttggcgtctcctgctgtgagctggctgaggaggacttcctggcggtctcccccttagatccgcgctatcgtgaggtccactatgtcctgctggatccttcctgcagtggctcgggtgagatggtatgccgagcagacagctggaggatcccggggcagggacacctagcccggtgcgtctgcatgccctggcagggttccagcagcgagccctgtgccacgcgctcactttcccttccctgcagcggctcgtctactccatgtgctccctctgccaggaggagaatgaagacatggtaccagatgcgctgcagcagaacccgggcgccttcaggctagctcccgccctgcctgcccggccccaccgaggcctgagcacgttcccgggtgccgagcactgcctccgggcttcccccaagaccacgcttagcggtggcttcttcgttgctgtaattgaacgggtcgagatgccgacctcagcctcacaggccaaagcatcagcaccagaacgcacacccagcccagccccaaagagaaagaagagacagcaaagagccgcagccggtgcttgcacaccgccttgcacatagcagaggctccaggctgactccttcctggtgggaaaggaagatgcctgtcctctccgtggaggaccctgggccctcaccgcaggcagcagtttgcattttgaaaggttattgggtcccttcctcgggctgtgttcttgctggtgagcaaaagtgttgcctgcagaaataaaatgcagaacgtactct

SEQ ID NO: 304 - DNA, 1189 bp, Homo sapiens
gacaaggtgaacccgcagccggacttctgctgcactggggctccgaatgacccagaatctggggagtgagatggcctcaatcttgcgaagccctcaggctctccagctcactctagccctgatcaagcctgacgcagtcgcccatccactgattctggaggctgttcatcagcagattctaagcaacaagttcctgattgtacgaatgagagaactactgtggagaaaggaagattgccagaggttttaccgagagcatgaagggcgttttttctatcagaggctggtggagttcatggccagcgggccaatccgagcctacatccttgcccacaaggatgccatccagctctggaggacgctcatgggacccaccagagtgttccgagcacgccatgtggccccagattctatccgtgggagtttcggcctcactgacacccgcaacaccacccatggttcggactctgtggtttcagccagcagagagattgcagccttcttccctgacttcagtgaacagcgctggtatgaggaggaagagccccagttgcgctgtggccctgtgtgctatagcccagagggaggtgtccactatgtagctggaacaggaggcctaggaccagcctgatgcaggtctatgaagaccagtggtagtgcccagacttctcctagacatctagtctaaaacattctcctaggaccagggaagcctggcttacagtgccatttctgctgggcaccaccacctgcctgagggcctagctcaccacagcacatcctccaggatctagccttctatctacctcttctctggaatgtttatggtggttcagaagaatgatgactcctctttgctgagaactgttcatccttcttcaagaagaagcttgccaggccgggcacggtggctcacgcctataatcccagcactttgggaggccgaggcaggcggatcacaaggtcaggaattcgagaccagcctgaccaacatggtgaaaccccatctctactaaaaatacaacaattagccaggcatggtggtgcatgcctgtaatcccagctactcagaggctgaggcaggagaattgcttgaacctgggaggcagagggtgcagtgagccgagatcgtgccattgcactccagcctgggcgacattctgtctcaaaaaaaaaaaaaaaaaaaaaa

SEQ ID NO: 305 - DNA, 1629 bp, Homo sapiens
atctctccttctcgaaccctgctatgcctttgcatacgctgttttctccacctgccacgttctcaccccttcttcttccactgcaaactcctatgcagccgtcaaggccccattctcctctggaaagccttcccgatccccttggcaacaaccaccaccaatatttattcactgagcccactttgtgccaagcattgttctagacacggagaggaggaagctcctgccggctgagcgggcctggaggaagtgagcagcggggctcctgcctcccggcctggtccccgaagaccccagaagaacccggaacttgcttccattcggaatccagggaccaccctttgcactcagtaggcctttgttttcctgcgtggaaagcggttgggcttgggaggcgatggagccggagttcttgtacgacctgctgcagctccccaagggggtggagcccccagcggaggaggagctctcaaaaggaggaaagaagaaatacctgccacccacttcccggaaggaccccaaatttgaagaactgcagaaggtgttgatggagtggatcaatgccactcttctccccgagcacattgtggtccgcagcctggaggaggacatgttcgacgggctcatcctacaccacctattccagaggctggcggcgctcaagctggaagcagaggacatcgccctgacagccacaagccagaagcacaagctcacagtggtgctggaggccgtgaaccggagtctgcagctggaggagtggcaggccaagtggagcgtggagagcatcttcaacaaggacctgttgtctaccctgcacctccttgtggccctggccaagcgcttccagcccgacctctccctcccaaccaacgtccaggtggaggtcatcactatcgagagcaccaaaagtggtctgaagtcagagaagttggtggaacagctcactgaatacagcacagacaaggacgagcctccaaaggacgtctttgatgaattatttaagctggctccggagaaagtgaacgcagtgaaagaggccatcgtgaactttgtcaaccagaagctggaccgcctgggcctgtctgtgcagaatctggacacccagtttgcagatggggtcatcttactcttgctgattggacaacttgaaggcttcttcctgcacttaaaggaattctacctcactcccaactctcctgcagaaatgctgcacaacgtcaccctggcgctggagctgctgaaggacgagggcctgctcagctgccctgtcagccctgaagatatcgtgaacaaggatgccaagagcacactgagggtgctctatggtctgttctgcaagcacacgcagaaggcacacagggacaggacgccccatggagccccgaattgaccctcactgcctccaaagcccagagcctgcctgtcagcccagctggagggcccgaggctgcagggtgtcctcccacagtcccgctgtttcctgtgcattcgtgacccgcttccctcccaccctgtctcctgtctccatcgttggattatctttgaacccccttgtgtggatcattttgagccgcctggccttgctcagtttattttaataaaagtatttctgggagggaaaaaaaa

SEQ ID NO: 306 - DNA, 1479 bp, Homo sapiens
ggaagccattgcctgtttaatagttgctgttgctgcacttccgcttctctcccagcgagagagagacacgagtggccaggcccagccgcagccgcagcagcagccgccgcggcggcacggaggagccagacacaaagagaggggctgtttgcggggtggggtggggggttcgctatgtcggatgacgattcgagggccagcaccagctcctcctcatcttcgtcttccaaccagcaaaccgagaaagaaacaaacacccccaagaagaaggagagtaaagtcagcatgagcaaaaactccaaactcctctccaccagcgccaagagaattcagaaggagctggcggacatcactttagaccctccacctaattgcagtgctggtcccaaaggcgataacatctatgaatggagatcaaccattctagggcctccaggatccgtgtatgagggtggtgtattctttctcgatatcacttttacaccagaatatcccttcaagcctccaaaggttacatttcggacaagaatctatcattgtaatattaacagtcaaggtgttatttgcttggacatattgaaagataattggagtccagcactaaccatttctaaagtcctcctttctatctgctcacttcttacagactgtaatcctgccgaccccttggtgggaagtattgccactcagtatatgaccaacagagcagaacatgacagaatggccagacagtggaccaagagatacgctacataaattggggtttcacaattcttacattatttgtctgtcacagaagagagctgcttatgattttgaaggggtcagggagggtgggagttggtaaagagtagggtatttctataacagatattattcagtcttatttcctaagattttgttgtaacttaaggtatcttgctacagtagacagaattggtaatagcaacttttaaaattgtcattagttctgcaatattagctgaaatgtagtacagaaaagaatgtacatttagacatttgggttcagttgcttgtagtctgtaaatttaaaacagcttaatttggtacaggttacacatatggccatttatgtaaagtccctctaagactacatactttttgtttaaaacaaaattggaatttgttttcccttcttggaagggaacattgatatttaacagagtttttagagattgtcatctcatatatataaaatggacacgtggctataaaacaccatataagagatgagtagtgcgttttattttatatgccaatctactttgtttaaaaaaggtctgaatcaggacttgtgaaaacctgtagtgaaataccttaagctgttaactaactgtaaggcgtggaataggagttgctcagtggattggttctatgttgtggactacttaagtctgcatttgttactgtgctaataaacaatattaaaaaccacctaataaacaaaaaaaaaaaaaa

SEQ ID NO: 307 - DNA, 1428 bp, Homo sapiens
ggaagccattgcctgtttaatagttgctgttgctgcacttccgcttctctcccagcgagagagagacacgagtggccaggcccagccgcagccgcagcagcagccgccgcggcggcacggaggagccagacacaaagagaggggctgtttgcggggtggggtggggggttcgctatgtcggatgacgattcgagggccagcaccagctcctcctcatcttcgtcttccaaccagcaaaccgagaaagaaacaaacacccccaagaagaaggagagtaaagtcagcatgagcaaaaactccaaactcctctccaccagcgccaagagtgctggtcccaaaggcgataacatctatgaatggagatcaaccattctagggcctccaggatccgtgtatgagggtggtgtattctttctcgatatcacttttacaccagaatatcccttcaagcctccaaaggttacatttcggacaagaatctatcattgtaatattaacagtcaaggtgttatttgcttggacatattgaaagataattggagtccagcactaaccatttctaaagtcctcctttctatctgctcacttcttacagactgtaatcctgccgaccccttggtgggaagtattgccactcagtatatgaccaacagagcagaacatgacagaatggccagacagtggaccaagagatacgctacataaattggggtttcacaattcttacattatttgtctgtcacagaagagagctgcttatgattttgaaggggtcagggagggtgggagttggtaaagagtagggtatttctataacagatattattcagtcttatttcctaagattttgttgtaacttaaggtatcttgctacagtagacagaattggtaatagcaacttttaaaattgtcattagttctgcaatattagctgaaatgtagtacagaaaagaatgtacatttagacatttgggttcagttgcttgtagtctgtaaatttaaaacagcttaatttggtacaggttacacatatggccatttatgtaaagtccctctaagactacatactttttgtttaaaacaaaattggaatttgttttcccttcttggaagggaacattgatatttaacagagtttttagagattgtcatctcatatatataaaatggacacgtggctataaaacaccatataagagatgagtagtgcgttttattttatatgccaatctactttgtttaaaaaaggtctgaatcaggacttgtgaaaacctgtagtgaaataccttaagctgttaactaactgtaaggcgtggaataggagttgctcagtggattggttctatgttgtggactacttaagtctgcatttgttactgtgctaataaacaatattaaaaaccacctaataaacaaaaaaaaaaaaaa

SEQ ID NO: 308 - DNA, 3404 bp, Homo sapiens
agacacggaagtgctgggaggcgccgggagcccgttcggttgcgggtgtctctggccctgcggtcagccctgggaacgtcccggagagctagattcctagaggcccgattccgctagcccggaacagacaaagccagcgctcccgcccgctccccgacttaggatccgatgccggcagcgtcctggggcccccgtagcggggctggaccatgagcctgctggacggcctcgcttcctcgccgcgggctccgctgcagtccagcaaggccaggatgaaaaagctcccgaagaagagccagaatgagaagtaccggctgaagtacctgcggctgcgcaaagcggccaaggccacggtgtttgaaaatgctgctatttgtgatgaaattgctcgtcttgaggaaaaatttcttaaagcaaaagaagaaagaaggtacttgctaaagaagctcctccagcttcaggctctaactgaaggggaagtacaggctgcagctccttcccacagttccagtttgcccctgacttatggtgtggccagctctgtgggaactatacagggagctgggcctatttcagggcccagcactggggctgaggaaccatttgggaagaaaactaagaaggagaaaaaagaaaaaggcaaagagaacaacaaactggaagatcatcaccgaccgacctggctttcatgatgagagtgccatctaccccgtgggctattgcagtactcgaatatatgccagcatgaagtgcccagaccagaagtgtctatatacctgtcagatcaaggatggtggtgtgcagcctcagtttgaaattgttcctgaagatgacccccagaatgccattgtcagctcttctgcagatgcttgtcatgcagaactgctcaggactataagcactactatggggaaactaatgcctaacctgcttccagctggagctgacttttttggattttctcatccagccatccacaacctgatccagagctgtccaggagctcgaaaatgcatcaattaccagtgggtgaaatttgatgtgtgcaaacctggagatgggcagctacctgaggggctgccggagaatgatgcagctatgagctttgaagcctttcagagacagatctttgatgaagatcagaatgatccccttctgccaggatccttggacctcccagagcttcagcctgcagcctttgtgtcttcttaccagcccatgtacctgacacatgaacccttggtagatactcacctgcagcacttgaagtctccatcacagggtagcccaattcagtcttcagattgaacaagaagggatcagatgccacatcgtttttgtcgtgattaatttaacttaaactaaaattttgggtatatgaaagaaggcagcaattcagaagtaaagaagatactaacgtatttcatcatggaaggtcctgtggtgatggttttccctgggaaaaccttcagctgctttatttttagtaataaatttctcttgtcaattctgtttactttcatcttgtaatcgggatgtaatcttttttgcttagctctgcctgaggtaaagtaaacttcagcctcttataaacaagagtgatagagagctgcaggctgctacaacaaataccatagacaggttggtttataaataacatgaatttatttctcacagttctggatgctgggaagtccaagttcaaggagcgcagattcaatgtctggtgagggcccacttcctagttcttagacagctgtcttcctgcagtgtcctcacgtggtagaagaggaaggcagctctccggggtcccttttataagatcactaagccggttcatgagaggtctgctctcatgacctaatcacctcccaaaggccccacctcccaataccatcacattaggggttaggatttaacatgaattttggggacatataaacattaagtctgtagtagcagcagctgactaacgagggagatagggagattctgacaaacttctactcttgattgtgatcctaattcaaggaatatcaagtcccagcccctgcaacccaggctgctgcttaattttcatgtcagtatcatcaaaatccaatgttctgcttaaactcaagatggaaagtccagtccaaggtacactgttcatctttttcttcacattttgcacatccttcaaggggatctttaacctctttaacctttgtattgcacctcagataatgtgctttttagctcagtacactgaaaccatatgataacacaaattcacatataattgggggttagtcccatactctataacagacttagtcctgtcttttcattagccatgtaataatataactccatgttccatgcaactggatttttggaccctgttaatagcattaaggtagaggtttactctatcacctaacacctcaacactacctgtgggatgccttagttacccagcagcaggttaccaagggctgtctggaaagggagggacaaaaggacccagaagtagaagaatggggatggagtggtgagaattgaatggttaatgcactgccattcataattgccaattgaggacaacacaaatgggattggtactttatagtaataaatctgaccagcagagggagggatcaggcagcagtgtttagagcacaccacactggccactgtaaactgagaagctaagttaactggtattttatgattttgagtatagtctttttataagttgtatacactttacaatgtaaaagaaacaaactttgtataatagcaaatcgggaaggggactgcttaaaatgttaatgcagtgtttttctttttttctctgcataaatggcttgagcatactggcatttacacagaaatgatatatgctgcttttatcatataacaaatattttcccactattacagcctgagtaatacccgtattaaaagagcctcattttagaaagacatttaaaatttttggaacataccacatgtagaaaggttgaactggtttttcagctataatgcatatacaactatagtgtgtacgtataccacatatacatatacttgtatgaagatatgtgtaaaatgtttttactaaggatcatggatttaagaaacttgaaaagctgggcacggtggctcacgcctgtaatcccagcactttgggaggctgaggcgggtggatcaagaggtcaggagatcgagaccatcctggctaagtcggtctctaataaaaatacaaaaaattagccaggcgtggtggcacgcgcctgtagtcccagctactcgggaggctgaggcaggaagaatcgcttgaacccgggaggcagaggttgcagtgagccgagaccgcgccactgcactccagcctgggcaacagagcaaaactccaactc

SEQ ID NO: 309 - DNA, 6607 bp, Homo sapiens
caaacctatggatctgctgttaaggtgttaaacagccagtcagaaagcagtgctttaacaaatcaacagccacaaaataacggagaggtgcagaacagcaaaaaccagtcagtgaataagtagcagatcctggactcacatcaagatctgtctgactccaaagatatgcttgtaaccaccatgctgtgctttggcaacatacaggatgtgattggtaatgaggaagaggacacaaatatataaaccacagtacttcaggatcccattatgaaaattcccagcggggacctgtgtcttctacaagtgattctagcacaaactgtaagaatgctgttgtaagtgacttgtcggaaaaagaagcatggccctcagcccctggcagtgatccggagttggcttcagaatgtatggatgctgattctgcctccagttctgaatcagagagaaacatcactatcatggcttcagggaacacaggtggtgaaaaagatggccttcggaatagcactggacttggttcccaaaacaagtttgtagttggtagcagcagcaataatgtgggccatggaagtagtactgggccatggggtttttcccatggagccataataagcacatgtcaggtctctgtggatgctcctgaaagcaaatctgaaagtagcaacaatagaatgaatgcttggggcactgtaagttcttcatcaaatggagggttaaatccaagcactttgaattcagctagcaaccatggtgcctggccagtattagagaacaatggacttgccctaaaagggcctgtagggagtggtagttctggcattaatattcagtgcagtactataggccagatgcctaacaatcagagtattaactctaaagtgagtggtggttctacccatggtacctggggaagccttcaggaaacttgtgaatctgaagtaagtggtacacagaaggtttcattcagtggtcaacctcaaaatattaccactgaaatgactggaccaaataacactactaactttatgacctctagtttaccaaactccggttcagtgcagaataatgagctgcctagtagtaacacaggggcctggcgtgtgagcacaatgaatcatcctcagatgcaggctccatcaggtatgaatggcacttccctttctcaccttagcaatggagagtcaaaaagtggaggctcttatggtactacatggggtgcctatggttctaattactctggagacaaatgttcaggccctaatggccaagctaatggtgacactgtgaatgcaactctaatgcagcctggcgtaaatggtcctatgggcactaactttcaagttaacacaaacaaaggaggtggtgtgtgggaatctggtgcagcaaactcccagagtacatcatggggaagtggaaatggcgcaaattctggaggaagtcgaagaggatggggaacccctgcacaaaacactggcactaatttacccagcgttgagtggaacaaactgcctagcaatcagcattccaatgatagtgcaaatggcaatggtaagacgtttacaaatggatggaaatctactgaggaagaggatcagggttctgccacatctcagacaaatgagcaaagcagtgtgtgggccaaaacaggaggtacagtggagagcgatggtagtacagaaagcactggacgccttgaggaaaaaggaactggggaaagtcagagtagagacagaagaaaaattgatcagcacacattactccaaagcattgtaaacagaactgacttagatccacgtgtcctgtccaactctggttggggacagactcctattaagcagaatactgcctgggatacagaaacatcacctagaggggaacgaaagactgacaatgggacagaggcctggggaagctctgcaacacagacttttaactcaggggcatgtatagataagactagccctaatggtaatgatacctcatctgtatcagggtggggcgatcccaaacctgctctgaggtggggagattccaaaggctcaaactgccagggggggtgggaagatgattctgctgctacaggaatggtcaagagcaatcagtgggggaattgcaaagaggagaaggctgcatggaatgactcgcaaaagaataaacagggatggggtgatggacaaaaatcaagccaagggtggtctgtttctgccagtgataactggggagaaacttcaaggaataaccattggggtgaggccaataagaaatccagctcaggaggtagtgacagtgacaggtccgtttccggttggaacgaacttggtaaaactagttctttcacttggggaaacaacataaatccaaataattcatcaggatgggatgaatcttctaaacctactccttcccagggatggggagaccctccaaagtctaatcagtctctaggttggggagattcgtcaaagccagtcagctctccagactggaacaagcaacaagacattgttggatcttggggaatcccaccagctacaggcaaacctcctggtacaggctggctggggggacctataccagccccagcaaaagaagaagaacccacaggctgggaggaaccatccccagaatctatacgtcgcaaaatggagattgatgatggaacttcagcttggggagatccaagcaaatacaactacaaaaatgtgaacatgtggaacaaaaacgtcccaaatggcaacagccgttcagaccagcaagcacaggtacatcagctgctaacgcctgcaagtgccatctcaaacaaagaggcaagcagtggctctggctggggtgagccctggggggagccttctactccagccacaactgtggataatggtacttcagcatggggtaagcccatagacagtggtcccagctggggggaacccattgctgcggcatccagcacatccacgtggggctccagctctgttggtccacaagcattaagcaaatctgggccaaaatctatgcaagatggctggtgtggtgatgatatgccattgcctggaaatcgccccactggctgggaagaggaagaggatgtggagattggaatgtggaatagtaattcatctcaagagcttaactcatctttaaattggccaccatatacaaagaaaatgtcatcgaagggtctgagtggcaaaaaaaggagaagggaaaggggaatgatgaaaggtggaaacaaacaagaagaagcgtggataaatccatttgttaaacagttttcaaacatcagtttttcgagagactcaccagaggaaaatgtacaaagcaataagatggacctttctggaggaatgttacaagacaaacgaatggagatagataaacatagcctaaatattggtgattacaatcgaacggtcgggaaaggccctggttctcggcctcagatttccaaagagtcttccatggagcgcaatccttattttgataaggatggcattgtagcagatgaatcccaaaacatgcagtttatgtccagtcaaagcatgaagcttcccccttcaaatagtgcactacctaaccaggcccttggctccatagcagggctgggtatgcaaaacttgaattctgttagacagaatggcaatcccagtatgtttggtgttggaaacacagcagcacaaccccggggcatgcagcagcctccagcacaacctcttagttcatctcagcctaatctccgtgctcaagtgcctcctccattactctcccctcaggttccagtttcattgctgaagtatgcaccaaacaacggtggcctgaatccactctttggccctcaacaggtagccatgctgaaccagctatcccagctaaaccagctttctcagatctcccagttacagcgattgttagcgcagcagcaaagggcgcagagtcagagaagcgtgccttctgggaaccggccgcagcaagaccagcagggtcgacctcttagtgtgcagcagcaaatgatgcaacaatctcgtcaacttgatccaaacctgttggtgaagcagcagactccaccatctcagcagcagccactccatcagccagccatgaagtctttccttgacaatgtcatgccccacactacacctgagctgcaaaaagggccatcaccaataaatgctttcagcaacttccctataggcttgaactcaaacttgaatgtaaatatggatatgaacagtattaaagagccacagtcaagactaaggaagtggacgacagtggacagcatttctgtgaacacatctttggatcaaaactccagcaaacatggtgctatttcaagtggtttcaggctggaagagtctccatttgttccctatgactttatgaacagcagtacttcaccagccagtcctccaggttcaataggagatggctggccacgtgccaaatcgcctaacggctctagcagtgttaattggccaccagaatttcgtcctggtgagccatggaaaggttatccaaacattgaccctgaaactgacccttacgtcactcctggcagtgtcataaacaatctttcaattaatactgtgcgggaagttgaccacctcagggacaggaacagtgggtcatcctcatccttgaacaccacgctgccttcaactagtgcctggtcatccattcgtgcctccaactacaacgttcccctcagcagtacagcacaaagcacttcagccagaaatagtgattccaaattgacatggtctcctggttcagttacaaacacctctctggctcatgagctgtggaaggtccctttgccacctaaaaacatcactgctccgtcccgcccacctccgggactgactggtcagaagccacccttgtctacgtgggataattctccccttcgtataggtggaggatggggaaattctgacgccagatataccccaggttccagctggggtgagagcagctcagggagaataacaaattggcttgttctaaaaaaccttacacctcagatcgatggctcaactctgcgcactctgtgcatgcagcacggcccgctgatcacattccacctgaacctccctcacggaaatgctctggtccgctacagttcaaaagaagaggtagtgaaggcacaaaagtctctgcacatgtgtgtactggggaacactactattcttgctgagtttgccagtgaagaggagatcagtcgtttctttgcacaaagccagtctctgaccccttctcccggctggcagtctctcgggtccagccagagccggctgggctccctcgactgttcccactcattctccagccggaccgatctcaatcactggaatggtgctgggctgtcgggaactaactgtggagaccttcacggcacttcactctgggggaccccgcattattccacaagcctgtggggtcccccaagcagcagcgacccccgaggaattagcagcccatctcccattaacgcttttctttctgttgaccacctgggtgggggtggagagtccatgtaacagtgtagatgcagactcaccgaccgggacctcagacgcgagggaaaggagcactaagtggggctcgccgcctgcagccaggggccgcctgtgggaacagctattctctgcacattttccactttgttttccccaaaacatatcagtttgaatacttgaatcatgcaggccaatattataatgtgaaaaggtatctactctatttacactcccaaatagcgccatacatgctaaaccgtagagaatgagctcgcttgtgtctattcatcatgtttagcctttggattctttttttttttttccttctattcctccccaacccccccccccgcccctttttttctctcttgcaaaaccattttttgggctgataacgtatgagcttttccctttgcactgaatgatgttctctccgtctcatcggcagtatggggggcagctgtcccagtgtcaatgtttactcaagggtgttcttaggaggcgtgcgctctctactatgccttgatgttgcctaccttattgtggtatcgtggagttttaaaagatcaagttaggatgctgacttaggattattaatgaaagtgttgcaccagttttttcatgttgtaaaactaaagaatttcgctctgcagtttgaaaaactgtggccacagctgtgacttgcagcccacctgccacccaggacgggccctgcactttgaataggctttccattttgttttggaggttctcactttgaaccttcttgtttacagatttttttgtttgttttttcagaaaaaaaaatgtttactcttccatcatttaaaaaaaatgtaaaagacaaaaaaaaaatggaggatgatttaaaagatgctttctatctctgggaaaaaggagcagcatttggccatgttcttttgtttttctattcctgtcccaaatcaaagagcatggttctcaggaaaaccagttccccagtttaaaaaaaaaaaaaaaaaattccttgtagtttcttagaggaaaaaaagaaaaaccccaacttttagcactgatactacatattgctctgttaaagaattttctctgcc

SEQ ID NO: 310 - DNA, 5889 bp, Homo sapiens
atgagagaattggaagctaaagctaccaaagacgtagaaagaaatcttagcagggatttagtgcaagaagaagaacagttgatggaagaaacagaaaaagaaaaagacgacaagaaaaagaaggaagctgctcaaaagaaggccactgaacaaaaaatcaaagtgccagaacagataaagcccagtgtaagccagcctcagcctgccaactctaataacggcacttccacagcaaccagcactaataataatgccaagcgagctacagccaacaatcagcagccacagcagcagcagcaacagcagcagccgcagcagcagcagccacagcagcagccacagccgcagccgcagcagcagcagccacagcagcagccacaggccttgcctcggtatcctcgtgaagtacctccacgatttcgccaccaggaacacaaacagcttctaaagaggggtcagcattttcctgttatagcagcaaaccttggatctgctgttaaggtgttaaacagccagtcagaaagcagtgctttaacaaatcaacagccacaaaataacggagaggtgcagaacagcaaaaaccagtcagatataaaccacagtacttcaggatcccattatgaaaattcccagcggggacctgtgtcttctacaagtgattctagcacaaactgtaagaatgctgttgtaagtgacttgtcggaaaaagaagcatggccctcagcccctggcagtgatccggagttggcttcagaatgtatggatgctgattctgcctccagttctgaatcagagagaaacatcactatcatggcttcagggaacacaggtggtgaaaaagatggccttcggaatagcactggacttggttcccaaaacaagtttgtagttggtagcagcagcaataatgtgggccatggaagtagtactgggccatggggtttttcccatggagccataataagcacatgtcaggtctctgtggatgctcctgaaagcaaatctgaaagtagcaacaatagaatgaatgcttggggcactgtaagttcttcatcaaatggagggttaaatccaagcactttgaattcagctagcaaccatggtgcctggccagtattagagaacaatggacttgccctaaaagggcctgtagggagtggtagttctggcattaatattcagtgcagtactataggccagatgcctaacaatcagagtattaactctaaagtgagtggtggttctacccatggtacctggggaagccttcaggaaacttgtgaatctgaagtaagtggtacacagaaggtttcattcagtggtcaacctcaaaatattaccactgaaatgactggaccaaataacactactaactttatgacctctagtttaccaaactccggttcagtgcagaataatgagctgcctagtagtaacacaggggcctggcgtgtgagcacaatgaatcatcctcagatgcaggctccatcaggtatgaatggcacttccctttctcaccttagcaatggagagtcaaaaagtggaggctcttatggtactacatggggtgcctatggttctaattactctggagacaaatgttcaggccctaatggccaagctaatggtgacactgtgaatgcaactctaatgcagcctggcgtaaatggtcctatgggcactaactttcaagttaacacaaacaaaggaggtggtgtgtgggaatctggtgcagcaaactcccagagtacatcatggggaagtggaaatggcgcaaattctggaggaagtcgaagaggatggggaacccctgcacaaaacactggcactaatttacccagcgttgagtggaacaaactgcctagcaatcagcattccaatgatagtgcaaatggcaatggtaagacgtttacaaatggatggaaatctactgaggaagaggatcagggttctgccacatctcagacaaatgagcaaagcagtgtgtgggccaaaacaggaggtacagtggagagcgatggtagtacagaaagcactggacgccttgaggaaaaaggaactggggaaagtcagagtagagacagaagaaaaattgatcagcacacattactccaaagcattgtaaacagaactgacttagatccacgtgtcctgtccaactctggttggggacagactcctattaagcagaatactgcctgggatacagaaacatcacctagaggggaacgaaagactgacaatgggacagaggcctggggaagctctgcaacacagacttttaactcaggggcatgtatagataagactagccctaatggtaatgatacctcatctgtatcagggtggggcgatcccaaacctgctctgaggtggggagattccaaaggctcaaactgccagggggggtgggaagatgattctgctgctacaggaatggtcaagagcaatcagtgggggaattgcaaagaggagaaggctgcatggaatgactcgcaaaagaataaacagggatggggtgatggacaaaaatcaagccaagggtggtctgtttctgccagtgataactggggagaaacttcaaggaataaccattggggtgaggccaataagaaatccagctcaggaggtagtgacagtgacaggtccgtttccggttggaacgaacttggtaaaactagttctttcacttggggaaacaacataaatccaaataattcatcaggatgggatgaatcttctaaacctactccttcccagggatggggagaccctccaaagtctaatcagtctctaggttggggagattcgtcaaagccagtcagctctccagactggaacaagcaacaagacattgttggatcttggggaatcccaccagctacaggcaaacctcctggtacaggctggctggggggacctataccagccccagcaaaagaagaagaacccacaggctgggaggaaccatccccagaatctatacgtcgcaaaatggagattgatgatggaacttcagcttggggagatccaagcaaatacaactacaaaaatgtgaacatgtggaacaaaaacgtcccaaatggcaacagccgttcagaccagcaagcacaggtacatcagctgctaacgcctgcaagtgccatctcaaacaaagaggcaagcagtggctctggctggggtgagccctggggggagccttctactccagccacaactgtggataatggtacttcagcatggggtaagcccatagacagtggtcccagctggggggaacccattgctgcggcatccagcacatccacgtggggctccagctctgttggtccacaagcattaagcaaatctgggccaaaatctatgcaagatggctggtgtggtgatgatatgccattgcctggaaatcgccccactggctgggaagaggaagaggatgtggagattggaatgtggaatagtaattcatctcaagagcttaactcatctttaaattggccaccatatacaaagaaaatgtcatcgaagggtctgagtggcaaaaaaaggagaagggaaaggggaatgatgaaaggtggaaacaaacaagaagaagcgtggataaatccatttgttaaacagttttcaaacatcagtttttcgagagactcaccagaggaaaatgtacaaagcaataagatggacctttctggaggaatgttacaagacaaacgaatggagatagataaacatagcctaaatattggtgattacaatcgaacggtcgggaaaggccctggttctcggcctcagatttccaaagagtcttccatggagcgcaatccttattttgataaggatggcattgtagcagatgaatcccaaaacatgcagtttatgtccagtcaaagcatgaagcttcccccttcaaatagtgcactacctaaccaggcccttggctccatagcagggctgggtatgcaaaacttgaattctgttagacagaatggcaatcccagtatgtttggtgttggaaacacagcagcacaaccccggggcatgcagcagcctccagcacaacctcttagttcatctcagcctaatctccgtgctcaagtgcctcctccattactctcccctcaggttccagtttcattgctgaagtatgcaccaaacaacggtggcctgaatccactctttggccctcaacaggtagccatgctgaaccagctatcccagctaaaccagctttctcagatctcccagttacagcgattgttagcgcagcagcaaagggcgcagagtcagagaagcgtgccttctgggaaccggccgcagcaagaccagcagggtcgacctcttagtgtgcagcagcaaatgatgcaacaatctcgtcaacttgatccaaacctgttggtgaagcagcagactccaccatctcagcagcagccactccatcagccagccatgaagtctttccttgacaatgtcatgccccacactacacctgagctgcaaaaagggccatcaccaataaatgctttcagcaacttccctataggcttgaactcaaacttgaatgtaaatatggatatgaacagtattaaagagccacagtcaagactaaggaagtggacgacagtggacagcatttctgtgaacacatctttggatcaaaactccagcaaacatggtgctatttcaagtggtttcaggctggaagagtctccatttgttccctatgactttatgaacagcagtacttcaccagccagtcctccaggttcaataggagatggctggccacgtgccaaatcgcctaacggctctagcagtgttaattggccaccagaatttcgtcctggtgagccatggaaaggttatccaaacattgaccctgaaactgacccttacgtcactcctggcagtgtcataaacaatctttcaattaatactgtgcgggaagttgaccacctcagggacaggaacagtgggtcatcctcatccttgaacaccacgctgccttcaactagtgcctggtcatccattcgtgcctccaactacaacgttcccctcagcagtacagcacaaagcacttcagccagaaatagtgattccaaattgacatggtctcctggttcagttacaaacacctctctggctcatgagctgtggaaggtccctttgccacctaaaaacatcactgctccgtcccgcccacctccgggactgactggtcagaagccacccttgtctacgtgggataattctccccttcgtataggtggaggatggggaaattctgacgccagatataccccaggttccagctggggtgagagcagctcagggagaataacaaattggcttgttctaaaaaaccttacacctcagatcgatggctcaactctgcgcactctgtgcatgcagcacggcccgctgatcacattccacctgaacctccctcacggaaatgctctggtccgctacagttcaaaagaagaggtagtgaaggcacaaaagtctctgcacatgtgtgtactggggaacactactattcttgctgagtttgccagtgaagaggagatcagtcgtttctttgcacaaagccagtctctgaccccttctcccggctggcagtctctcgggtccagccagagccggctgggctccctcgactgttcccactcattctccagccggaccgatctcaatcactggaatggtgctgggctgtcgggaactaactgtggagaccttcacggcacttcactctgggggaccccgcattattccacaagcctgtggggtcccccaagcagcagcgacccccgaggaattagcagcccatctcccattaacgcttttctttctgttgaccacctgggtgggggtggagagtccatgtaa

SEQ ID NO: 311 - DNA, 1590 bp, Homo sapiens
gcccgtcagtgctgggaggggcggtggcgacgcacataccagcatcacctccgccaggccgggccccacgccggccgcggattggctccctccaagggcacgcacgcccggggactcgttggcggcgtggaggggcgccggtggccacgttggtgtcaacctccttcgtgaagctcacacctcccccgccccgggaggggtttgcccgccactgtcgctgaatgattgcatcatcgaaagcagaaaaccacttttgcatccttcggcctctggcgtgcctgccatgacgtcatagctctgcggaggtggaagttggggagctttgaggacctcatggatcccagggggaccaagagaggagctgagaagacagaggtagctgagcctcggaacaaactacctcgtccagcaccttctctgcccacagaccctgccctctactctgggccctttcctttctaccggcgcccttcggaactgggctgcttctccctggatgctcaacgccagtaccatggagatgcccgagccctgcgctactatagcccaccccccactaacggtccaggccccaactttgacctcagagacggatacccggatcgataccagccccgggacgaggaggtccaggaaaggctggaccacctgctgtgctggctcctggaacaccgaggccggttggaggggggtccaggctggctggcagaggccatagtgacgtggcgggggcacctgacaaaactgctgacgacaccgtatgagcggcaggagggctggcagctggcagcctcccggttccagggaacactatacctgagtgaagtggagacaccgaacgctcgggcccagaggcttgctcggccaccgctcctccgggagcttatgtacatgggatacaaatttgagcagtacatgtgtgcagacaaacctggaagctccccagacccctctggggaggttaacaccaacgtggccttctgctctgtgctacgcagccgcctgggaagccaccctctgctcttctcaggggaggtagactgcacagacccccaagccccatccacacagcccccaacctgctatgtggagctcaagacctccaaggagatgcacagccctggccaatggaggagtttctacagacacaagctcctgaaatggtgggctcagtcattcctcccaggggtcccgaatgttgttgctggcttccgtaacccagacggttttgtctcttccctcaagacctttcctaccatgaagatgtttgaatatgtcaggaatgaccgtgacggctggaatccctctgtgtgcatgaacttctgtgccgccttccttagctttgcccagagcacggttgtccaggatgaccccaggctcgttcatctcttctcttgggagcctggcggcccagtcaccgtgtctgtacaccaagatgcaccttacgccttcctgcccatatggtatgtggaagctatgactcaggacctcccatcaccccccaagactccctctcccaaatagtaatgctttagagggaggcagtcatatctctgtgtgcagataataaaagcatatttctaagaggtt

SEQ ID NO: 312 - DNA, 11353 bp, Homo sapiens
cgaggattccgggacccgcgagcggagcggcgcgtgggtcggttgcggtcggccccggcaggatgggaaggccattgtgactatgtggtgattacagttgtcttactactgagtttcctactgaaatcatggaggagaaacagcagattatattggctaatcaagatggtggaacagtggcaggagcagcacctaccttctttgtcatcttaaagcagccaggaaatggcaaaactgatcaaggaattttggttactaatcaggatgcctgtgctttggctagtagtgtgtcatcaccagtaaaatctaaagggaagatttgccttccagctgattgtactgtgggtggaatcactgttaccctcgataacaatagtatgtggaatgagttctatcatcgaagcacagagatgattctgaccaagcaaggaagacgcatgtttccttactgtcgttattggataacaggtttagattcaaatttgaagtatattcttgtcatggatatatctcctgtggataaccatcgttataagtggaatggtcgttggtgggaacctagtgggaaggctgaacctcatgttttggggagggttttcattcatccagaatctccttccacaggtcattattggatgcatcaaccagtatctttctataaactcaaacttaccaacaatacactggaccaagaagggcatatcatcttgcactctatgcatcgttacctgccgaggcttcatttggtgcctgcagaaaaggctgtggaggtgatacaattaaatggccctggtgtccacacttttaccttcccacagactgaattctttgcagtaacagcttatcagaacattcagattactcagctgaaaatagattacaatccatttgccaaaggctttcgggatgatgggctgaataataagccccagagagatggaaaacaaaagaacagctctgaccaagaagggaataatatttccagttcttctggtcatcgggtccgtcttacagaaggtcaggggtcagagatacaaccaggtgatttggatcctttgtcaaggggtcatgaaacatcaggcaagggtttggagaagacttcccttaatataaaacgagactttcttggtttcatggatactgattcagcacttagtgaagttcctcaattgaagcaagagatttctgaatgtcttattgccagcagttttgaagatgactcccgtgtagcctcaccgttagaccagaacggaagcttcaatgttgttattaaagaggaacctctagatgattatgactacgaacttggtgagtgcccagaaggggtcactgtgaaacaggaagagacagatgaagagacggatgtatactcaaacagtgatgatgatcctatactagagaaacagctaaagaggcacaataaagttgacaacccagaagctgaccatctatcttctaaatggcttccaagcagcccatcaggtgttgctaaagctaaaatgttcaaattagacactggaaagatgccagtagtctatctggagccctgtgctgtcaccagaagcacagttaagatttctgaactccccgataacatgctttccacatctcgaaaggataaatcttctatgttggcagaattggaatatttgcctacatacattgaaaattccaatgagactgccttctgcttaggcaaggaatcagaaaatggtcttagaaaacattcaccagatctcagagtggtacaaaaatatcccttactgaaagagcctcagtggaaatatcctgatatatctgacagcattagcacagaaagaatactcgacgattcaaaggattcagttggagactcactttcaggaaaagaggacttgggcagaaagagaacaactatgcttaagattgcaacagccgcaaaggtagtgaatgctaatcagaatgcctctccaaatgtccctggaaaaagaggaaggccacgaaaattgaaactctgtaaggcaggacgaccacctaagaacacaggaaagtctttaatttctacaaagaatacacctgtaagccctgggagtacctttccagatgtgaagcctgatctggaagatgtggatggtgttctctttgtttcctttgaatcaaaggaagctctagacattcatgcagttgatgggacaacagaagaatcttctagtctccaggcatcaaccacaaatgactcaggttacagagcaagaatttcccagttggaaaaggaattgatagaagatttgaagactttgcggcacaagcaggtgatacatcctggtcttcaagaagtgggcttaaaattgaattcagtggatccaacaatgagcattgatcttaaatacttgggagtacagttacctttggctccagctactagctttcctttttggaaccttacaggaaccaaccctgcctctcctgatgcgggatttccctttgtttctaggacagggaaaaccaatgatttcactaagatcaagggatggaggggaaaatttcatagtgcttctgcatctaggaatgaaggtggaaattcagaaagttcactgaaaaatcgttctgctttctgtagtgataagctagatgaatacttggaaaatgaaggcaagctgatggaaacaagcatgggtttttcttctaatgctcccacatctcctgtggtgtaccagcttcccactaagagtaccagttatgtacgaacacttgatagtgtactaaagaagcaatctactatttccccttctacctcttattctttgaaacctcattctgtaccccctgtctctcgaaaggcaaagtctcaaaacagacaggcaactttcagtggccgaactaaatcatcttataaatccattttaccataccctgtttcaccaaagcagaaatactctcatgtgattctaggagataaggttaccaagaattcttcaggcatcatctcagaaaatcaggcgaataactttgttgtgccaactttggatgaaaatatatttccaaagcagattagtttgcggcaggcacagcagcagcagcaacagcaacagggaagtcgccctccaggcttgtctaaatctcaggtgaagctaatggacctggaagactgtgcactttgggaaggaaaaccaaggacatacatcacagaagagcgagcagatgtatccttaacaactctacttacagctcaagcatccctcaaaactaaacctatccacacaatcataaggaaacgagcccctccctgcaacaatgacttctgtcgactgggttgtgtatgttccagtctagctttggagaagcgccaacctgctcactgccgccgaccagactgcatgtttggttgtacttgtttgaaaagaaaagttgtacttgttaaaggaggatccaaaactaagcattttcagaggaaggctgctcatcgagatccagtattttatgatactctgggagaggaggcaagggaggaggaagaaggaatcagggaggaggaggaacaattgaaagagaaaaagaagagaaagaagctagaatacactatatgtgagacagagcctgaacagcctgttcgacattacccattatgggtaaaagtagaaggtgaagtagatccagaaccagtttatatccccacgccttctgtcattgagcctatgaaaccattgttattgcctcagccagaagttttatctcctactgtgaagggcaaactgctcactggaattaaatctccacggtcatatactcccaaacccaatcctattcgggaagaggacaaagatccagtctacttgtactttgaaagtatgatgacttgtgctcgagttcgagtatatgagcgaaaaaaagaggaccagagacaaccatcttcctcctcctccccatctccatcatttcagcagcaaacttcatgtcattctagccctgagaaccataataatgcaaaggaacctgattctgaacagcagcccttaaaacaactcacctgtgacttggaggatgattctgataaattacaagaaaagagctggaagtcttcctgcaatgaaggagaatcctcttctacttcttatatgcatcagaggtcacctggtggtcccaccaaactgattgagatcatctcagactgcaactgggaggaagatcggaacaagattttgagcatcttatcccagcacatcaatagcaacatgccacaatcacttaaggtgggcagcttcatcattgagttggcttctcagcgaaagagccggggtgagaagaaccctcctgtttattcttctcgtgtgaaaatctctatgccatcatgtcaagaccaagatgatatggctgagaaatctggatcagagactcctgatggtccattgtcccctgggaaaatggaggatatctctcctgtgcagacagatgccctggattcagtgagggagagattacatggaggcaaaggtctgcctttttatgcagggctttctcctgcagggaagcttgtggcctataaacgtaaacccagttcaagtacatctgggcttatccaggtagcatccaatgccaaggtggctgcatccaggaaaccacgtaccctgttgccttcaacatccaattccaaaatggcatcctcctctggcactgcaacaaatcgccctgggaagaatctgaaggcgtttgtcccagcaaaacggccaattgaaaatgctgctcaaattccagtggctactccacaggtctctcctaacacagtgaaacgtgctggacctcgattgttgttgattccagtgcagcagggttctcctactcttagacctgtctcaaacacacaacttcagggacatcggatggtcttgcagcctgttaggagtccaagtggaatgaacttattcaggcaccctaatgggcagattgtccagcttctacctttgcatcagcttcgaggctctaatacccagcccaacttacagcctgtcatgtttcggaacccagggtctgtgatgggaatccggttacctgctccttccaaaccctctgagactccgccatcttccacttcgtcctctgctttctctgtcatgaatcctgtaattcaagctgttgggtcttcttcagcagtgaatgttatcactcaggcaccatcattgctttcctctggagctagttttgtgtctcaggctggtacattgaccctgaggatttctcctcctgaaccacaaagctttgcaagtaaaacaggctctgaaaccaaaataacttatagctcaggaggacagcctgttggtacagccagtcttattcctctccagtctggtagttttgccttgttacagctcccaggacaaaagcctgttcctagctccattcttcagcatgttgcttcccttcagatgaagagagaatctcagaatccagaccagaaagatgaaacaaactcaataaaaagagagcaagaaacgaagaaggttctacagtcagaaggagaggctgtagaccctgaggctaatgtaataaaacaaaactcaggagctgctacctcagaagaaactctgaatgattccttggaagataggggtgatcatttggatgaagaatgccttccagaagaaggttgtgcaactgtcaaaccatctgagcattcctgtatcactgggtcacatacagatcaagattataaagatgttaatgaagaatatggggctaggaatcgtaagagttccaaagaaaaagtggctgttctggaagttaggaccatttctgaaaaagccagtaataagacagtccaaaatttaagtaaagtacagcatcaaaaacttggtgatgtgaaggtggaacagcagaaaggatttgacaatccagaagaaaactcaagtgaatttccagtcacctttaaggaagaaagtaaatttgaattgtcaggaagcaaagttatggagcagcaatctaatctacagccagaggccaaagagaaggaatgtggagactctctggagaaagacagggaaagatggagaaaacatctgaagggccccttaaccaggaaatgtgttggagcttcacaggaatgtaagaaagaggcagacgagcagttaattaaagaaacaaagacatgtcaggaaaattcagatgtgtttcagcaagaacaaggcatctctgacttacttggaaaaagtggaattactgaagatgccagagttttgaaaactgaatgtgattcttggagtaggatttctaatccttcagccttctccattgttcctaggagagctgcaaaaagcagcagagggaatggacattttcagggtcacttactgctacctggagaacagatacaaccaaagcaagagaagaagggtgggagaagcagtgctgacttcactgttttggatttggaagaagatgatgaagatgataatgagaaaactgatgattctattgatgaaattgtggatgttgtttctgactaccagagtgaggaggttgatgatgtagaaaagaataactgtgtagaatacattgaggatgatgaggagcacgtggacattgagactgtagaagagctctcagaggaaattaatgttgctcacctgaagaccacagcggcccacacacagtcattcaaacagccgtcctgtactcacatctctgcagatgaaaaagcagctgaaaggagtcgaaaggctccaccaattcctctaaaactgaagcctgattactggagtgacaaactacagaaagaagcagaagcgtttgcttattatcgccggacacacactgccaatgagcggcggcggcgtggtgaaatgagggatctctttgagaaattaaagatcacattgggattacttcattcttccaaggtttccaaaagtctcattcttactcgagccttcagtgaaattcagggactaacagatcaggcagacaaattgataggacagaaaaatctcctgactcgaaaacggaatattctgatacggaaagtatcgtctctttcaggtaagacagaagaagtggtcctgaagaagctagagtatatttatgcaaaacagcaagcactagaggcacaaaaaagaaaaaagaagatgggatcagatgagtttgacatatctcccagaattagcaaacagcaggaaggatcttctgcatcatctgtagatcttggacagatgtttataaataacaggagggggaaacctttgattctttccagaaaaaaagaccaggccacagaaaatacctcacccttgaacactccacacacctctgccaaccttgtgatgactccgcaagggcaattgctcaccctaaaaggtcccctattctcaggaccagtggtagctgtttctcctgatctcttagaatctgatcttaagcctcaagttgccggtagtgctgtggctctaccagaaaatgacgacttatttatgatgccacgaattgttaatgtgacatcattggccacagagggaggtttggtagatatgggtggcagcaaatatcctcatgaagttcctgatagcaagccatctgaccatctgaaagacaccgtcaggaatgaagataattccttagaggataagggtagaatctcttccagaggaaacagagatggcagagtgacgttgggtccaacgcaggtttttctggcaaacaaagattctggttatccacaaatagttgacgtttccaatatgcagaaagcacaagagttcttacctaaaaagatttctggtgatatgagagggattcagtataaatggaaagagagtgaatcaagaggggagagagtgaagtcaaaggattcttcatttcataaattaaagatgaaagatctcaaggactcaagcatagagatggaactgaggaaagtaacatcagctatagaggaagcagctcttgattccagtgaactgctgactaacatggaagatgaggatgatactgatgagacactgacttcactgctcaatgaaattgcctttcttaatcaacaactaaatgatgactctgttggcctggctgaactacccagctctatggatacagagttcccaggggatgctcggcgggcttttattagtaaggttcctcctggaagcagagcaactttccaggttgagcacttgggaactggtttgaaagagttgcctgatgttcaaggggagagtgactctatcagtcccctcctcttgcacttggaagacgatgacttttctgagaatgaaaaacaacttgcagaaccagcctctgagccagatgtccttaagattgttattgactctgaaataaaggattccctcctttccaacaagaaagctattgatggagggaagaatacttctggcctccctgcagagcccgaaagtgtgtcctcaccccccaccctacacatgaagactggcttggagaacagcaacagcacagacactttgtggaggcctatgccaaagttggcccctctaggtttaaaagtagctaatccttccagtgatgcagatggtcagagtctcaaggtgatgccttgtttggcacctatagctgccaaagttgggtcagttggacacaaaatgaacttaacagggaatgaccaggaaggccgggaaagcaaggtgatgcctacattggcacctgttgtggctaaattgggcaactcgggggcctcaccaagttctgcagggaaatgaacttacttgtccttaagcagaagccaggctgtgaggggaaatagatctcacctcctttctctgcaggcatctgtttgtttgtgtcttagaacttggatccttgacttcaatgatgcagtggataatgatgggagaaagggggtagggtgctgaccctggtataagaagtactctgaaattctgatcatgttaaaatgtgttacctcacttgtggtgctgggtcccctcatcctctctaagaagatgtgatccattactgaacatgaggtgcccctcttacccaaggaatttataacatgactctggctccacagtggtttctagttcttcccccacaagcgaaagagctgtttgcaactttggagttgctgtagactgaactgtagcttgtagctgttgaattaagtccaaaatctaaggaatgcgatggacttgtgcaaagggatccagaagagacactttttagttgatgtttcaagaatagggagagagaggatgggtaccatggaataccaaagtgaaggactttgtgtcattcagtaaaattttcttttttcatatcctaagtagctcccattccctcaccttttcaatcagaattaacaaattcaagccttcagtaaagtagggatgcttttaacttttattattaattattttgagatcttaaaaaaatagtagttctcccttattatttttgtgggcattgaaaagctcatttcacagtaccagagatttttactgggagtatatattttggaggtaggcatagagggagccctaccccttccacaaattacgttactcaagagacagctaaaataaaatgcattatctccccagaccagagacagtggccaaaataaaaaatcatggggctggaaatttcccaaatcaaaccagcctcctggtgcttgaaggtttcattcactattacctgcacaggatgtaaagaaaagtcacagtaggcactctttaccagggaaataaggcagtatttgaatcacaagatatattttttatctgcaaccatggatccaatgatctgtagagctttttcactcattaactgtcaggatatgaaggactgacagtctgtaaagatatttatatttttgtatagttgttttcatagatttctcaaaggctgaagttttcaacctagaagatgagatttgtattgagtatagaaatgatgtttcctatctagtttgtaaataatcatggtgcacttgaggggtctcttggaaactcctagggggtcaagaatcactattctgaaactgtatagactgggatttagctgctgcattttgcctttcttaaataattatattttggaatgtaacccctgttctgtcttcattgacaggatttgcttgtgttgttaaaacactaacacaagagcttccagtgcctgggccgtgcctaggtgatgctatttcttctatatctcctgtcttctttatcccaaatcccactcagcatatcttcagacctaggttgtaagaccaactttggattggatctagccagtgaattattatttccatggttggttccctttctgttaactctggtaatcaacagattgaaaacggtggaagaacttctgaaaattgcagtgggagcaaattcttgttggttttgtgctgcttgcctttctagatctgctcatcagcacttaaccttccctcctctaaaggttactaaagaagcctgaagtaggtaaagagtgctcctcagcttcttatccttccactctttacccagcagatttcattcaatgccttagccaaggagtccagcacctgtctcccctgctaataattgtccttagagatgctagtactttaatccaggtatagcagtttcccgttattttcttgcttgtcgttcccctacatttcctcctgatttcccaagactctctttgtggcttttgagggtcagccaaggagcaggcaagtgagtgaacaatcctcaggaaaagaaggaccattttagcttaacacttccttttttttttttttttttttaagaagaatataggtaaacaggtaatgattcttgattggagataccatttgactcttgatgagagttgtacgaagatggaaatgagggatgattccaggcgttttagggggaaggctgcagataccattctaacccccaagatactgtgttctcaagacctcttagaactaggtgttgtcagggataatttgaggagggcttagtcttcagaacaatcctgcagtcttgacagaaatctaaaatctccaaaaactcctaccctttaaccttaccctagggggaactgatctatgaatattacatgtgtgattatgaaaggtgaagttgagtgagaggagttgaggaacgtggaagacagtgagctctcaccctaacactataagaagcatgatctcaatagaccaataattcacctttttatacatctgtaaataaatggaatgtttttaagaatataattatgtcagatttagcattttcttttatatattaaatatatatatctttccttttctgctttcgaaaagtgactatttttttagaaatctaagaacagaagtttggtgattgaaaggtagaatatataaacctgaaataaagcagttaaaacaattaaa

SEQ ID NO: 313 - DNA, 11400 bp, Homo sapiens
gcgcaggctcttcagctggagcggacacacggtgtgcgaaccgaacagaataacccgcccccagcgggatgtgaaggactccgggtgaggccggccacgccccgcacggatgggaaggccattgtgactatgtggtgattacagttgtcttactactgagtttcctactgaaatcatggaggagaaacagcagattatattggctaatcaagatggtggaacagtggcaggagcagcacctaccttctttgtcatcttaaagcagccaggaaatggcaaaactgatcaaggaattttggttactaatcaggatgcctgtgctttggctagtagtgtgtcatcaccagtaaaatctaaagggaagatttgccttccagctgattgtactgtgggtggaatcactgttaccctcgataacaatagtatgtggaatgagttctatcatcgaagcacagagatgattctgaccaagcaaggaagacgcatgtttccttactgtcgttattggataacaggtttagattcaaatttgaagtatattcttgtcatggatatatctcctgtggataaccatcgttataagtggaatggtcgttggtgggaacctagtgggaaggctgaacctcatgttttggggagggttttcattcatccagaatctccttccacaggtcattattggatgcatcaaccagtatctttctataaactcaaacttaccaacaatacactggaccaagaagggcatatcatcttgcactctatgcatcgttacctgccgaggcttcatttggtgcctgcagaaaaggctgtggaggtgatacaattaaatggccctggtgtccacacttttaccttcccacagactgaattctttgcagtaacagcttatcagaacattcagattactcagctgaaaatagattacaatccatttgccaaaggctttcgggatgatgggctgaataataagccccagagagatggaaaacaaaagaacagctctgaccaagaagggaataatatttccagttcttctggtcatcgggtccgtcttacagaaggtcaggggtcagagatacaaccaggtgatttggatcctttgtcaaggggtcatgaaacatcaggcaagggtttggagaagacttcccttaatataaaacgagactttcttggtttcatggatactgattcagcacttagtgaagttcctcaattgaagcaagagatttctgaatgtcttattgccagcagttttgaagatgactcccgtgtagcctcaccgttagaccagaacggaagcttcaatgttgttattaaagaggaacctctagatgattatgactacgaacttggtgagtgcccagaaggggtcactgtgaaacaggaagagacagatgaagagacggatgtatactcaaacagtgatgatgatcctatactagagaaacagctaaagaggcacaataaagttgacaacccagaagctgaccatctatcttctaaatggcttccaagcagcccatcaggtgttgctaaagctaaaatgttcaaattagacactggaaagatgccagtagtctatctggagccctgtgctgtcaccagaagcacagttaagatttctgaactccccgataacatgctttccacatctcgaaaggataaatcttctatgttggcagaattggaatatttgcctacatacattgaaaattccaatgagactgccttctgcttaggcaaggaatcagaaaatggtcttagaaaacattcaccagatctcagagtggtacaaaaatatcccttactgaaagagcctcagtggaaatatcctgatatatctgacagcattagcacagaaagaatactcgacgattcaaaggattcagttggagactcactttcaggaaaagaggacttgggcagaaagagaacaactatgcttaagattgcaacagccgcaaaggtagtgaatgctaatcagaatgcctctccaaatgtccctggaaaaagaggaaggccacgaaaattgaaactctgtaaggcaggacgaccacctaagaacacaggaaagtctttaatttctacaaagaatacacctgtaagccctgggagtacctttccagatgtgaagcctgatctggaagatgtggatggtgttctctttgtttcctttgaatcaaaggaagctctagacattcatgcagttgatgggacaacagaagaatcttctagtctccaggcatcaaccacaaatgactcaggttacagagcaagaatttcccagttggaaaaggaattgatagaagatttgaagactttgcggcacaagcaggtgatacatcctggtcttcaagaagtgggcttaaaattgaattcagtggatccaacaatgagcattgatcttaaatacttgggagtacagttacctttggctccagctactagctttcctttttggaaccttacaggaaccaaccctgcctctcctgatgcgggatttccctttgtttctaggacagggaaaaccaatgatttcactaagatcaagggatggaggggaaaatttcatagtgcttctgcatctaggaatgaaggtggaaattcagaaagttcactgaaaaatcgttctgctttctgtagtgataagctagatgaatacttggaaaatgaaggcaagctgatggaaacaagcatgggtttttcttctaatgctcccacatctcctgtggtgtaccagcttcccactaagagtaccagttatgtacgaacacttgatagtgtactaaagaagcaatctactatttccccttctacctcttattctttgaaacctcattctgtaccccctgtctctcgaaaggcaaagtctcaaaacagacaggcaactttcagtggccgaactaaatcatcttataaatccattttaccataccctgtttcaccaaagcagaaatactctcatgtgattctaggagataaggttaccaagaattcttcaggcatcatctcagaaaatcaggcgaataactttgttgtgccaactttggatgaaaatatatttccaaagcagattagtttgcggcaggcacagcagcagcagcaacagcaacagggaagtcgccctccaggcttgtctaaatctcaggtgaagctaatggacctggaagactgtgcactttgggaaggaaaaccaaggacatacatcacagaagagcgagcagatgtatccttaacaactctacttacagctcaagcatccctcaaaactaaacctatccacacaatcataaggaaacgagcccctccctgcaacaatgacttctgtcgactgggttgtgtatgttccagtctagctttggagaagcgccaacctgctcactgccgccgaccagactgcatgtttggttgtacttgtttgaaaagaaaagttgtacttgttaaaggaggatccaaaactaagcattttcagaggaaggctgctcatcgagatccagtattttatgatactctgggagaggaggcaagggaggaggaagaaggaatcagggaggaggaggaacaattgaaagagaaaaagaagagaaagaagctagaatacactatatgtgagacagagcctgaacagcctgttcgacattacccattatgggtaaaagtagaaggtgaagtagatccagaaccagtttatatccccacgccttctgtcattgagcctatgaaaccattgttattgcctcagccagaagttttatctcctactgtgaagggcaaactgctcactggaattaaatctccacggtcatatactcccaaacccaatcctattcgggaagaggacaaagatccagtctacttgtactttgaaagtatgatgacttgtgctcgagttcgagtatatgagcgaaaaaaagaggaccagagacaaccatcttcctcctcctccccatctccatcatttcagcagcaaacttcatgtcattctagccctgagaaccataataatgcaaaggaacctgattctgaacagcagcccttaaaacaactcacctgtgacttggaggatgattctgataaattacaagaaaagagctggaagtcttcctgcaatgaaggagaatcctcttctacttcttatatgcatcagaggtcacctggtggtcccaccaaactgattgagatcatctcagactgcaactgggaggaagatcggaacaagattttgagcatcttatcccagcacatcaatagcaacatgccacaatcacttaaggtgggcagcttcatcattgagttggcttctcagcgaaagagccggggtgagaagaaccctcctgtttattcttctcgtgtgaaaatctctatgccatcatgtcaagaccaagatgatatggctgagaaatctggatcagagactcctgatggtccattgtcccctgggaaaatggaggatatctctcctgtgcagacagatgccctggattcagtgagggagagattacatggaggcaaaggtctgcctttttatgcagggctttctcctgcagggaagcttgtggcctataaacgtaaacccagttcaagtacatctgggcttatccaggtagcatccaatgccaaggtggctgcatccaggaaaccacgtaccctgttgccttcaacatccaattccaaaatggcatcctcctctggcactgcaacaaatcgccctgggaagaatctgaaggcgtttgtcccagcaaaacggccaattgaaaatgctgctcaaattccagtggctactccacaggtctctcctaacacagtgaaacgtgctggacctcgattgttgttgattccagtgcagcagggttctcctactcttagacctgtctcaaacacacaacttcagggacatcggatggtcttgcagcctgttaggagtccaagtggaatgaacttattcaggcaccctaatgggcagattgtccagcttctacctttgcatcagcttcgaggctctaatacccagcccaacttacagcctgtcatgtttcggaacccagggtctgtgatgggaatccggttacctgctccttccaaaccctctgagactccgccatcttccacttcgtcctctgctttctctgtcatgaatcctgtaattcaagctgttgggtcttcttcagcagtgaatgttatcactcaggcaccatcattgctttcctctggagctagttttgtgtctcaggctggtacattgaccctgaggatttctcctcctgaaccacaaagctttgcaagtaaaacaggctctgaaaccaaaataacttatagctcaggaggacagcctgttggtacagccagtcttattcctctccagtctggtagttttgccttgttacagctcccaggacaaaagcctgttcctagctccattcttcagcatgttgcttcccttcagatgaagagagaatctcagaatccagaccagaaagatgaaacaaactcaataaaaagagagcaagaaacgaagaaggttctacagtcagaaggagaggctgtagaccctgaggctaatgtaataaaacaaaactcaggagctgctacctcagaagaaactctgaatgattccttggaagataggggtgatcatttggatgaagaatgccttccagaagaaggttgtgcaactgtcaaaccatctgagcattcctgtatcactgggtcacatacagatcaagattataaagatgttaatgaagaatatggggctaggaatcgtaagagttccaaagaaaaagtggctgttctggaagttaggaccatttctgaaaaagccagtaataagacagtccaaaatttaagtaaagtacagcatcaaaaacttggtgatgtgaaggtggaacagcagaaaggatttgacaatccagaagaaaactcaagtgaatttccagtcacctttaaggaagaaagtaaatttgaattgtcaggaagcaaagttatggagcagcaatctaatctacagccagaggccaaagagaaggaatgtggagactctctggagaaagacagggaaagatggagaaaacatctgaagggccccttaaccaggaaatgtgttggagcttcacaggaatgtaagaaagaggcagacgagcagttaattaaagaaacaaagacatgtcaggaaaattcagatgtgtttcagcaagaacaaggcatctctgacttacttggaaaaagtggaattactgaagatgccagagttttgaaaactgaatgtgattcttggagtaggatttctaatccttcagccttctccattgttcctaggagagctgcaaaaagcagcagagggaatggacattttcagggtcacttactgctacctggagaacagatacaaccaaagcaagagaagaagggtgggagaagcagtgctgacttcactgttttggatttggaagaagatgatgaagatgataatgagaaaactgatgattctattgatgaaattgtggatgttgtttctgactaccagagtgaggaggttgatgatgtagaaaagaataactgtgtagaatacattgaggatgatgaggagcacgtggacattgagactgtagaagagctctcagaggaaattaatgttgctcacctgaagaccacagcggcccacacacagtcattcaaacagccgtcctgtactcacatctctgcagatgaaaaagcagctgaaaggagtcgaaaggctccaccaattcctctaaaactgaagcctgattactggagtgacaaactacagaaagaagcagaagcgtttgcttattatcgccggacacacactgccaatgagcggcggcggcgtggtgaaatgagggatctctttgagaaattaaagatcacattgggattacttcattcttccaaggtttccaaaagtctcattcttactcgagccttcagtgaaattcagggactaacagatcaggcagacaaattgataggacagaaaaatctcctgactcgaaaacggaatattctgatacggaaagtatcgtctctttcaggtaagacagaagaagtggtcctgaagaagctagagtatatttatgcaaaacagcaagcactagaggcacaaaaaagaaaaaagaagatgggatcagatgagtttgacatatctcccagaattagcaaacagcaggaaggatcttctgcatcatctgtagatcttggacagatgtttataaataacaggagggggaaacctttgattctttccagaaaaaaagaccaggccacagaaaatacctcacccttgaacactccacacacctctgccaaccttgtgatgactccgcaagggcaattgctcaccctaaaaggtcccctattctcaggaccagtggtagctgtttctcctgatctcttagaatctgatcttaagcctcaagttgccggtagtgctgtggctctaccagaaaatgacgacttatttatgatgccacgaattgttaatgtgacatcattggccacagagggaggtttggtagatatgggtggcagcaaatatcctcatgaagttcctgatagcaagccatctgaccatctgaaagacaccgtcaggaatgaagataattccttagaggataagggtagaatctcttccagaggaaacagagatggcagagtgacgttgggtccaacgcaggtttttctggcaaacaaagattctggttatccacaaatagttgacgtttccaatatgcagaaagcacaagagttcttacctaaaaagatttctggtgatatgagagggattcagtataaatggaaagagagtgaatcaagaggggagagagtgaagtcaaaggattcttcatttcataaattaaagatgaaagatctcaaggactcaagcatagagatggaactgaggaaagtaacatcagctatagaggaagcagctcttgattccagtgaactgctgactaacatggaagatgaggatgatactgatgagacactgacttcactgctcaatgaaattgcctttcttaatcaacaactaaatgatgactctgttggcctggctgaactacccagctctatggatacagagttcccaggggatgctcggcgggcttttattagtaaggttcctcctggaagcagagcaactttccaggttgagcacttgggaactggtttgaaagagttgcctgatgttcaaggggagagtgactctatcagtcccctcctcttgcacttggaagacgatgacttttctgagaatgaaaaacaacttgcagaaccagcctctgagccagatgtccttaagattgttattgactctgaaataaaggattccctcctttccaacaagaaagctattgatggagggaagaatacttctggcctccctgcagagcccgaaagtgtgtcctcaccccccaccctacacatgaagactggcttggagaacagcaacagcacagacactttgtggaggcctatgccaaagttggcccctctaggtttaaaagtagctaatccttccagtgatgcagatggtcagagtctcaaggtgatgccttgtttggcacctatagctgccaaagttgggtcagttggacacaaaatgaacttaacagggaatgaccaggaaggccgggaaagcaaggtgatgcctacattggcacctgttgtggctaaattgggcaactcgggggcctcaccaagttctgcagggaaatgaacttacttgtccttaagcagaagccaggctgtgaggggaaatagatctcacctcctttctctgcaggcatctgtttgtttgtgtcttagaacttggatccttgacttcaatgatgcagtggataatgatgggagaaagggggtagggtgctgaccctggtataagaagtactctgaaattctgatcatgttaaaatgtgttacctcacttgtggtgctgggtcccctcatcctctctaagaagatgtgatccattactgaacatgaggtgcccctcttacccaaggaatttataacatgactctggctccacagtggtttctagttcttcccccacaagcgaaagagctgtttgcaactttggagttgctgtagactgaactgtagcttgtagctgttgaattaagtccaaaatctaaggaatgcgatggacttgtgcaaagggatccagaagagacactttttagttgatgtttcaagaatagggagagagaggatgggtaccatggaataccaaagtgaaggactttgtgtcattcagtaaaattttcttttttcatatcctaagtagctcccattccctcaccttttcaatcagaattaacaaattcaagccttcagtaaagtagggatgcttttaacttttattattaattattttgagatcttaaaaaaatagtagttctcccttattatttttgtgggcattgaaaagctcatttcacagtaccagagatttttactgggagtatatattttggaggtaggcatagagggagccctaccccttccacaaattacgttactcaagagacagctaaaataaaatgcattatctccccagaccagagacagtggccaaaataaaaaatcatggggctggaaatttcccaaatcaaaccagcctcctggtgcttgaaggtttcattcactattacctgcacaggatgtaaagaaaagtcacagtaggcactctttaccagggaaataaggcagtatttgaatcacaagatatattttttatctgcaaccatggatccaatgatctgtagagctttttcactcattaactgtcaggatatgaaggactgacagtctgtaaagatatttatatttttgtatagttgttttcatagatttctcaaaggctgaagttttcaacctagaagatgagatttgtattgagtatagaaatgatgtttcctatctagtttgtaaataatcatggtgcacttgaggggtctcttggaaactcctagggggtcaagaatcactattctgaaactgtatagactgggatttagctgctgcattttgcctttcttaaataattatattttggaatgtaacccctgttctgtcttcattgacaggatttgcttgtgttgttaaaacactaacacaagagcttccagtgcctgggccgtgcctaggtgatgctatttcttctatatctcctgtcttctttatcccaaatcccactcagcatatcttcagacctaggttgtaagaccaactttggattggatctagccagtgaattattatttccatggttggttccctttctgttaactctggtaatcaacagattgaaaacggtggaagaacttctgaaaattgcagtgggagcaaattcttgttggttttgtgctgcttgcctttctagatctgctcatcagcacttaaccttccctcctctaaaggttactaaagaagcctgaagtaggtaaagagtgctcctcagcttcttatccttccactctttacccagcagatttcattcaatgccttagccaaggagtccagcacctgtctcccctgctaataattgtccttagagatgctagtactttaatccaggtatagcagtttcccgttattttcttgcttgtcgttcccctacatttcctcctgatttcccaagactctctttgtggcttttgagggtcagccaaggagcaggcaagtgagtgaacaatcctcaggaaaagaaggaccattttagcttaacacttccttttttttttttttttttttaagaagaatataggtaaacaggtaatgattcttgattggagataccatttgactcttgatgagagttgtacgaagatggaaatgagggatgattccaggcgttttagggggaaggctgcagataccattctaacccccaagatactgtgttctcaagacctcttagaactaggtgttgtcagggataatttgaggagggcttagtcttcagaacaatcctgcagtcttgacagaaatctaaaatctccaaaaactcctaccctttaaccttaccctagggggaactgatctatgaatattacatgtgtgattatgaaaggtgaagttgagtgagaggagttgaggaacgtggaagacagtgagctctcaccctaacactataagaagcatgatctcaatagaccaataattcacctttttatacatctgtaaataaatggaatgtttttaagaatataattatgtcagatttagcattttcttttatatattaaatatatatatctttccttttctgctttcgaaaagtgactatttttttagaaatctaagaacagaagtttggtgattgaaaggtagaatatataaacctgaaataaagcagttaaaacaattaaa

SEQ ID NO: 314 - DNA, 4853 bp, Homo sapiens
cactgttggcattgtaagagttagatttgaaggaaggatagactggtagtaagatgaccaattgagaggctgttacaacagtccagacaaaaggtaatgagtgcctgaaatagggcagtgtcatttgaaacagagtaagagggccaactacatgttcaagatgtttaggaggcaatcttgtttggacaggctccaccaattcctctaaaactgaagcctgattactggagtgacaaactacagaaagaagcagaagcgtttgcttattatcgccggacacacactgccaatgagcggcggcggcgtggtgaaatgagggatctctttgagaaattaaagatcacattgggattacttcattcttccaaggtttccaaaagtctcattcttactcgagccttcagtgaaattcagggactaacagatcaggcagacaaattgataggacagaaaaatctcctgactcgaaaacggaatattctgatacggaaagtatcgtctctttcaggtaagacagaagaagtggtcctgaagaagctagagtatatttatgcaaaacagcaagcactagaggcacaaaaaagaaaaaagaagatgggatcagatgagtttgacatatctcccagaattagcaaacagcaggaaggatcttctgcatcatctgtagatcttggacagatgtttataaataacaggagggggaaacctttgattctttccagaaaaaaagaccaggccacagaaaatacctcacccttgaacactccacacacctctgccaaccttgtgatgactccgcaagggcaattgctcaccctaaaaggtcccctattctcaggaccagtggtagctgtttctcctgatctcttagaatctgatcttaagcctcaagttgccggtagtgctgtggctctaccagaaaatgacgacttatttatgatgccacgaattgttaatgtgacatcattggccacagagggaggtttggtagatatgggtggcagcaaatatcctcatgaagttcctgatagcaagccatctgaccatctgaaagacaccgtcaggaatgaagataattccttagaggataagggtagaatctcttccagaggaaacagagatggcagagtgacgttgggtccaacgcaggtttttctggcaaacaaagattctggttatccacaaatagttgacgtttccaatatgcagaaagcacaagagttcttacctaaaaagatttctggtgatatgagagggattcagtataaatggaaagagagtgaatcaagaggggagagagtgaagtcaaaggattcttcatttcataaattaaagatgaaagatctcaaggactcaagcatagagatggaactgaggaaagtaacatcagctatagaggaagcagctcttgattccagtgaactgctgactaacatggaagatgaggatgatactgatgagacactgacttcactgctcaatgaaattgcctttcttaatcaacaactaaatgatgactctgttggcctggctgaactacccagctctatggatacagagttcccaggggatgctcggcgggcttttattagtaaggttcctcctggaagcagagcaactttccaggttgagcacttgggaactggtttgaaagagttgcctgatgttcaaggggagagtgactctatcagtcccctcctcttgcacttggaagacgatgacttttctgagaatgaaaaacaacttgcagaaccagcctctgagccagatgtccttaagattgttattgactctgaaataaaggattccctcctttccaacaagaaagctattgatggagggaagaatacttctggcctccctgcagagcccgaaagtgtgtcctcaccccccaccctacacatgaagactggcttggagaacagcaacagcacagacactttgtggaggcctatgccaaagttggcccctctaggtttaaaagtagctaatccttccagtgatgcagatggtcagagtctcaaggtgatgccttgtttggcacctatagctgccaaagttgggtcagttggacacaaaatgaacttaacagggaatgaccaggaaggccgggaaagcaaggtgatgcctacattggcacctgttgtggctaaattgggcaactcgggggcctcaccaagttctgcagggaaatgaacttacttgtccttaagcagaagccaggctgtgaggggaaatagatctcacctcctttctctgcaggcatctgtttgtttgtgtcttagaacttggatccttgacttcaatgatgcagtggataatgatgggagaaagggggtagggtgctgaccctggtataagaagtactctgaaattctgatcatgttaaaatgtgttacctcacttgtggtgctgggtcccctcatcctctctaagaagatgtgatccattactgaacatgaggtgcccctcttacccaaggaatttataacatgactctggctccacagtggtttctagttcttcccccacaagcgaaagagctgtttgcaactttggagttgctgtagactgaactgtagcttgtagctgttgaattaagtccaaaatctaaggaatgcgatggacttgtgcaaagggatccagaagagacactttttagttgatgtttcaagaatagggagagagaggatgggtaccatggaataccaaagtgaaggactttgtgtcattcagtaaaattttcttttttcatatcctaagtagctcccattccctcaccttttcaatcagaattaacaaattcaagccttcagtaaagtagggatgcttttaacttttattattaattattttgagatcttaaaaaaatagtagttctcccttattatttttgtgggcattgaaaagctcatttcacagtaccagagatttttactgggagtatatattttggaggtaggcatagagggagccctaccccttccacaaattacgttactcaagagacagctaaaataaaatgcattatctccccagaccagagacagtggccaaaataaaaaatcatggggctggaaatttcccaaatcaaaccagcctcctggtgcttgaaggtttcattcactattacctgcacaggatgtaaagaaaagtcacagtaggcactctttaccagggaaataaggcagtatttgaatcacaagatatattttttatctgcaaccatggatccaatgatctgtagagctttttcactcattaactgtcaggatatgaaggactgacagtctgtaaagatatttatatttttgtatagttgttttcatagatttctcaaaggctgaagttttcaacctagaagatgagatttgtattgagtatagaaatgatgtttcctatctagtttgtaaataatcatggtgcacttgaggggtctcttggaaactcctagggggtcaagaatcactattctgaaactgtatagactgggatttagctgctgcattttgcctttcttaaataattatattttggaatgtaacccctgttctgtcttcattgacaggatttgcttgtgttgttaaaacactaacacaagagcttccagtgcctgggccgtgcctaggtgatgctatttcttctatatctcctgtcttctttatcccaaatcccactcagcatatcttcagacctaggttgtaagaccaactttggattggatctagccagtgaattattatttccatggttggttccctttctgttaactctggtaatcaacagattgaaaacggtggaagaacttctgaaaattgcagtgggagcaaattcttgttggttttgtgctgcttgcctttctagatctgctcatcagcacttaaccttccctcctctaaaggttactaaagaagcctgaagtaggtaaagagtgctcctcagcttcttatccttccactctttacccagcagatttcattcaatgccttagccaaggagtccagcacctgtctcccctgctaataattgtccttagagatgctagtactttaatccaggtatagcagtttcccgttattttcttgcttgtcgttcccctacatttcctcctgatttcccaagactctctttgtggcttttgagggtcagccaaggagcaggcaagtgagtgaacaatcctcaggaaaagaaggaccattttagcttaacacttccttttttttttttttttttttaagaagaatataggtaaacaggtaatgattcttgattggagataccatttgactcttgatgagagttgtacgaagatggaaatgagggatgattccaggcgttttagggggaaggctgcagataccattctaacccccaagatactgtgttctcaagacctcttagaactaggtgttgtcagggataatttgaggagggcttagtcttcagaacaatcctgcagtcttgacagaaatctaaaatctccaaaaactcctaccctttaaccttaccctagggggaactgatctatgaatattacatgtgtgattatgaaaggtgaagttgagtgagaggagttgaggaacgtggaagacagtgagctctcaccctaacactataagaagcatgatctcaatagaccaataattcacctttttatacatctgtaaataaatggaatgtttttaagaatataattatgtcagatttagcattttcttttatatattaaatatatatatctttccttttctgctttcgaaaagtgactatttttttagaaatctaagaacagaagtttggtgattgaaaggtagaatatataaacctgaaataaagcagttaaaacaattaaa

SEQ ID NO: 315 - DNA, 7424 bp, Homo sapiens
aaggtagcatccaatgccaaggtggctgcatccaggaaaccacgtaccctgttgccttcaacatccaattccaaaatggcatcctcctctggcactgcaacaaatcgccctgggaagaatctgaaggcgtttgtcccagcaaaacggccaattgcggctcgaccctctcctggtggtgtgttcacacagtttgtgatgagtaaagttggagccttgcagcagaagatacctggagttagcacaccccaaaccctggcagggacacagaagttcagtatcagaccttctccagtaatggtcgtcacacctgtggtttcttctgagccagttcaggtgtgcagccctgtgactgctgctgtcactactaccacccctcaagtgtttttagaaaatactactgctgtgacacctatgactgctatttctgacgtggaaactaaagaaactacttattcttctggtgccaccactacaggggttgttgaggtctctgaaactaataccagcacctctgtaacatctacccagtctacagccactgtgaaccttaccaaaaccactgggataactacccctgtggcttcagttgcttttcctaagtctttggtagcatctccttcaaccataactcttcctgttgcttccactgcttccacctccttagtcgtggtgactgcagctgcatcttcctccatggtgaccacaccaacttcatctctgggctctgttcctattatactctcaggaattaatgggagtccaccagtgagccagagaccagaaaatgctgctcaaattccagtggctactccacaggtctctcctaacacagtgaaacgtgctggacctcgattgttgttgattccagtgcagcagggttctcctactcttagacctgtctcaaacacacaacttcagggacatcggatggtcttgcagcctgttaggagtccaagtggaatgaacttattcaggcaccctaatgggcagattgtccagcttctacctttgcatcagcttcgaggctctaatacccagcccaacttacagcctgtcatgtttcggaacccagggtctgtgatgggaatccggttacctgctccttccaaaccctctgagactccgccatcttccacttcgtcctctgctttctctgtcatgaatcctgtaattcaagctgttgggtcttcttcagcagtgaatgttatcactcaggcaccatcattgctttcctctggagctagttttgtgtctcaggctggtacattgaccctgaggatttctcctcctgaaccacaaagctttgcaagtaaaacaggctctgaaaccaaaataacttatagctcaggaggacagcctgttggtacagccagtcttattcctctccagtctggtagttttgccttgttacagctcccaggacaaaagcctgttcctagctccattcttcagcatgttgcttcccttcagatgaagagagaatctcagaatccagaccagaaagatgaaacaaactcaataaaaagagagcaagaaacgaagaaggttctacagtcagaaggagaggctgtagaccctgaggctaatgtaataaaacaaaactcaggagctgctacctcagaagaaactctgaatgattccttggaagataggggtgatcatttggatgaagaatgccttccagaagaaggttgtgcaactgtcaaaccatctgagcattcctgtatcactgggtcacatacagatcaagattataaagatgttaatgaagaatatggggctaggaatcgtaagagttccaaagaaaaagtggctgttctggaagttaggaccatttctgaaaaagccagtaataagacagtccaaaatttaagtaaagtacagcatcaaaaacttggtgatgtgaaggtggaacagcagaaaggatttgacaatccagaagaaaactcaagtgaatttccagtcacctttaaggaagaaagtaaatttgaattgtcaggaagcaaagttatggagcagcaatctaatctacagccagaggccaaagagaaggaatgtggagactctctggagaaagacagggaaagatggagaaaacatctgaagggccccttaaccaggaaatgtgttggagcttcacaggaatgtaagaaagaggcagacgagcagttaattaaagaaacaaagacatgtcaggaaaattcagatgtgtttcagcaagaacaaggcatctctgacttacttggaaaaagtggaattactgaagatgccagagttttgaaaactgaatgtgattcttggagtaggatttctaatccttcagccttctccattgttcctaggagagctgcaaaaagcagcagagggaatggacattttcagggtcacttactgctacctggagaacagatacaaccaaagcaagagaagaagggtgggagaagcagtgctgacttcactgttttggatttggaagaagatgatgaagatgataatgagaaaactgatgattctattgatgaaattgtggatgttgtttctgactaccagagtgaggaggttgatgatgtagaaaagaataactgtgtagaatacattgaggatgatgaggagcacgtggacattgagactgtagaagagctctcagaggaaattaatgttgctcacctgaagaccacagcggcccacacacagtcattcaaacagccgtcctgtactcacatctctgcagatgaaaaagcagctgaaaggagtcgaaaggctccaccaattcctctaaaactgaagcctgattactggagtgacaaactacagaaagaagcagaagcgtttgcttattatcgccggacacacactgccaatgagcggcggcggcgtggtgaaatgagggatctctttgagaaattaaagatcacattgggattacttcattcttccaaggtttccaaaagtctcattcttactcgagccttcagtgaaattcagggactaacagatcaggcagacaaattgataggacagaaaaatctcctgactcgaaaacggaatattctgatacggaaagtatcgtctctttcaggtaagacagaagaagtggtcctgaagaagctagagtatatttatgcaaaacagcaagcactagaggcacaaaaaagaaaaaagaagatgggatcagatgagtttgacatatctcccagaattagcaaacagcaggaaggatcttctgcatcatctgtagatcttggacagatgtttataaataacaggagggggaaacctttgattctttccagaaaaaaagaccaggccacagaaaatacctcacccttgaacactccacacacctctgccaaccttgtgatgactccgcaagggcaattgctcaccctaaaaggtcccctattctcaggaccagtggtagctgtttctcctgatctcttagaatctgatcttaagcctcaagttgccggtagtgctgtggctctaccagaaaatgacgacttatttatgatgccacgaattgttaatgtgacatcattggccacagagggaggtttggtagatatgggtggcagcaaatatcctcatgaagttcctgatagcaagccatctgaccatctgaaagacaccgtcaggaatgaagataattccttagaggataagggtagaatctcttccagaggaaacagagatggcagagtgacgttgggtccaacgcaggtttttctggcaaacaaagattctggttatccacaaatagttgacgtttccaatatgcagaaagcacaagagttcttacctaaaaagatttctggtgatatgagagggattcagtataaatggaaagagagtgaatcaagaggggagagagtgaagtcaaaggattcttcatttcataaattaaagatgaaagatctcaaggactcaagcatagagatggaactgaggaaagtaacatcagctatagaggaagcagctcttgattccagtgaactgctgactaacatggaagatgaggatgatactgatgagacactgacttcactgctcaatgaaattgcctttcttaatcaacaactaaatgatgactctgttggcctggctgaactacccagctctatggatacagagttcccaggggatgctcggcgggcttttattagtaaggttcctcctggaagcagagcaactttccaggttgagcacttgggaactggtttgaaagagttgcctgatgttcaaggggagagtgactctatcagtcccctcctcttgcacttggaagacgatgacttttctgagaatgaaaaacaacttgcagaaccagcctctgagccagatgtccttaagattgttattgactctgaaataaaggattccctcctttccaacaagaaagctattgatggagggaagaatacttctggcctccctgcagagcccgaaagtgtgtcctcaccccccaccctacacatgaagactggcttggagaacagcaacagcacagacactttgtggaggcctatgccaaagttggcccctctaggtttaaaagtagctaatccttccagtgatgcagatggtcagagtctcaaggtgatgccttgtttggcacctatagctgccaaagttgggtcagttggacacaaaatgaacttaacagggaatgaccaggaaggccgggaaagcaaggtgatgcctacattggcacctgttgtggctaaattgggcaactcgggggcctcaccaagttctgcagggaaatgaacttacttgtccttaagcagaagccaggctgtgaggggaaatagatctcacctcctttctctgcaggcatctgtttgtttgtgtcttagaacttggatccttgacttcaatgatgcagtggataatgatgggagaaagggggtagggtgctgaccctggtataagaagtactctgaaattctgatcatgttaaaatgtgttacctcacttgtggtgctgggtcccctcatcctctctaagaagatgtgatccattactgaacatgaggtgcccctcttacccaaggaatttataacatgactctggctccacagtggtttctagttcttcccccacaagcgaaagagctgtttgcaactttggagttgctgtagactgaactgtagcttgtagctgttgaattaagtccaaaatctaaggaatgcgatggacttgtgcaaagggatccagaagagacactttttagttgatgtttcaagaatagggagagagaggatgggtaccatggaataccaaagtgaaggactttgtgtcattcagtaaaattttcttttttcatatcctaagtagctcccattccctcaccttttcaatcagaattaacaaattcaagccttcagtaaagtagggatgcttttaacttttattattaattattttgagatcttaaaaaaatagtagttctcccttattatttttgtgggcattgaaaagctcatttcacagtaccagagatttttactgggagtatatattttggaggtaggcatagagggagccctaccccttccacaaattacgttactcaagagacagctaaaataaaatgcattatctccccagaccagagacagtggccaaaataaaaaatcatggggctggaaatttcccaaatcaaaccagcctcctggtgcttgaaggtttcattcactattacctgcacaggatgtaaagaaaagtcacagtaggcactctttaccagggaaataaggcagtatttgaatcacaagatatattttttatctgcaaccatggatccaatgatctgtagagctttttcactcattaactgtcaggatatgaaggactgacagtctgtaaagatatttatatttttgtatagttgttttcatagatttctcaaaggctgaagttttcaacctagaagatgagatttgtattgagtatagaaatgatgtttcctatctagtttgtaaataatcatggtgcacttgaggggtctcttggaaactcctagggggtcaagaatcactattctgaaactgtatagactgggatttagctgctgcattttgcctttcttaaataattatattttggaatgtaacccctgttctgtcttcattgacaggatttgcttgtgttgttaaaacactaacacaagagcttccagtgcctgggccgtgcctaggtgatgctatttcttctatatctcctgtcttctttatcccaaatcccactcagcatatcttcagacctaggttgtaagaccaactttggattggatctagccagtgaattattatttccatggttggttccctttctgttaactctggtaatcaacagattgaaaacggtggaagaacttctgaaaattgcagtgggagcaaattcttgttggttttgtgctgcttgcctttctagatctgctcatcagcacttaaccttccctcctctaaaggttactaaagaagcctgaagtaggtaaagagtgctcctcagcttcttatccttccactctttacccagcagatttcattcaatgccttagccaaggagtccagcacctgtctcccctgctaataattgtccttagagatgctagtactttaatccaggtatagcagtttcccgttattttcttgcttgtcgttcccctacatttcctcctgatttcccaagactctctttgtggcttttgagggtcagccaaggagcaggcaagtgagtgaacaatcctcaggaaaagaaggaccattttagcttaacacttccttttttttttttttttttttaagaagaatataggtaaacaggtaatgattcttgattggagataccatttgactcttgatgagagttgtacgaagatggaaatgagggatgattccaggcgttttagggggaaggctgcagataccattctaacccccaagatactgtgttctcaagacctcttagaactaggtgttgtcagggataatttgaggagggcttagtcttcagaacaatcctgcagtcttgacagaaatctaaaatctccaaaaactcctaccctttaaccttaccctagggggaactgatctatgaatattacatgtgtgattatgaaaggtgaagttgagtgagaggagttgaggaacgtggaagacagtgagctctcaccctaacactataagaagcatgatctcaatagaccaataattcacctttttatacatctgtaaataaatggaatgtttttaagaatataattatgtcagatttagcattttcttttatatattaaatatatatatctttccttttctgctttcgaaaagtgactatttttttagaaatctaagaacagaagtttggtgattgaaaggtagaatatataaacctgaaataaagcagttaaaacaattaaa

SEQ ID NO: 316 - DNA, 11356 bp, Homo sapiens
cgaggattccgggacccgcgagcggagcggcgcgtgggtcggttgcggtcggccccggcaggatgggaaggccattgtgactatgtggtgattacagttgtcttactactgagtttcctactgaaatcatggaggagaaacagcagattatattggctaatcaagatggtggaacagtggcaggagcagcacctaccttctttgtcatcttaaagcagccaggaaatggcaaaactgatcaaggaattttggttactaatcaggatgcctgtgctttggctagtagtgtgtcatcaccagtaaaatctaaagggaagatttgccttccagctgattgtactgtgggtggaatcactgttaccctcgataacaatagtatgtggaatgagttctatcatcgaagcacagagatgattctgaccaagcaaggaagacgcatgtttccttactgtcgttattggataacaggtttagattcaaatttgaagtatattcttgtcatggatatatctcctgtggataaccatcgttataagtggaatggtcgttggtgggaacctagtgggaaggctgaacctcatgttttggggagggttttcattcatccagaatctccttccacaggtcattattggatgcatcaaccagtatctttctataaactcaaacttaccaacaatacactggaccaagaagggcatatcatcttgcactctatgcatcgttacctgccgaggcttcatttggtgcctgcagaaaaggctgtggaggtgatacaattaaatggccctggtgtccacacttttaccttcccacagactgaattctttgcagtaacagcttatcagaacattcagattactcagctgaaaatagattacaatccatttgccaaaggctttcgggatgatgggctgaataataagccccagagagatggaaaacaaaagaacagctctgaccaagaagggaataatatttccagttcttctggtcatcgggtccgtcttacagaaggtcaggggtcagagatacaaccaggtgatttggatcctttgtcaaggggtcatgaaacatcaggcaagggtttggagaagacttcccttaatataaaacgagactttcttggtttcatggatactgattcagcacttagtgaagttcctcaattgaagcaagagatttctgaatgtcttattgccagcagttttgaagatgactcccgtgtagcctcaccgttagaccagaacggaagcttcaatgttgttattaaagaggaacctctagatgattatgactacgaacttggtgagtgcccagaaggggtcactgtgaaacaggaagagacagatgaagagacggatgtatactcaaacagtgatgatgatcctatactagagaaacagctaaagaggcacaataaagttgacaacccagaagctgaccatctatcttctaaatggcttccaagcagcccatcaggtgttgctaaagctaaaatgttcaaattagacactggaaagatgccagtagtctatctggagccctgtgctgtcaccagaagcacagttaagatttctgaactccccgataacatgctttccacatctcgaaaggataaatcttctatgttggcagaattggaatatttgcctacatacattgaaaattccaatgagactgccttctgcttaggcaaggaatcagaaaatggtcttagaaaacattcaccagatctcagagtggtacaaaaatatcccttactgaaagagcctcagtggaaatatcctgatatatctgacagcattagcacagaaagaatactcgacgattcaaaggattcagttggagactcactttcaggaaaagaggacttgggcagaaagagaacaactatgcttaagattgcaacagccgcaaaggtagtgaatgctaatcagaatgcctctccaaatgtccctggaaaaagaggaaggccacgaaaattgaaactctgtaaggcaggacgaccacctaagaacacaggaaagtctttaatttctacaaagaatacacctgtaagccctgggagtacctttccagatgtgaagcctgatctggaagatgtggatggtgttctctttgtttcctttgaatcaaaggaagctctagacattcatgcagttgatgggacaacagaagaatcttctagtctccaggcatcaaccacaaatgactcaggttacagagcaagaatttcccagttggaaaaggaattgatagaagatttgaagtctttgcggcacaagcaggtgatacatcctggtcttcaagaagtgggcttaaaattgaattcagtggatccaacaatgagcattgatcttaaatacttgggagtacagttacctttggctccagctactagctttcctttttggaaccttacaggaaccaaccctgcctctcctgatgcgggatttccctttgtttctaggacagggaaaaccaatgatttcactaagatcaagggatggaggggaaaatttcatagtgcttctgcatctaggaatgaaggtggaaattcagaaagttcactgaaaaatcgttctgctttctgtagtgataagctagatgaatacttggaaaatgaaggcaagctgatggaaacaagcatgggtttttcttctaatgctcccacatctcctgtggtgtaccagcttcccactaagagtaccagttatgtacgaacacttgatagtgtactaaagaagcaatctactatttccccttctacctcttattctttgaaacctcattctgtaccccctgtctctcgaaaggcaaagtctcaaaacagacaggcaactttcagtggccgaactaaatcatcttataaatccattttaccataccctgtttcaccaaagcagaaatactctcatgtgattctaggagataaggttaccaagaattcttcaggcatcatctcagaaaatcaggcgaataactttgttgtgccaactttggatgaaaatatatttccaaagcagattagtttgcggcaggcacagcagcagcagcaacagcaacagggaagtcgccctccaggcttgtctaaatctcaggtgaagctaatggacctggaagactgtgcactttgggaaggaaaaccaaggacatacatcacagaagagcgagcagatgtatccttaacaactctacttacagctcaagcatccctcaaaactaaacctatccacacaatcataaggaaacgagcccctccctgcaacaatgacttctgtcgactgggttgtgtatgttccagtctagctttggagaagcgccaacctgctcactgccgccgaccagactgcatgtttggttgtacttgtttgaaaagaaaagttgtacttgttaaaggaggatccaaaactaagcattttcagaggaaggctgctcatcgagatccagtattttatgatactctgggagaggaggcaagggaggaggaagaaggaatcagggaggaggaggaacaattgaaagagaaaaagaagagaaagaagctagaatacactatatgtgagacagagcctgaacagcctgttcgacattacccattatgggtaaaagtagaaggtgaagtagatccagaaccagtttatatccccacgccttctgtcattgagcctatgaaaccattgttattgcctcagccagaagttttatctcctactgtgaagggcaaactgctcactggaattaaatctccacggtcatatactcccaaacccaatcctattcgggaagaggacaaagatccagtctacttgtactttgaaagtatgatgacttgtgctcgagttcgagtatatgagcgaaaaaaagaggaccagagacaaccatcttcctcctcctccccatctccatcatttcagcagcaaacttcatgtcattctagccctgagaaccataataatgcaaaggaacctgattctgaacagcagcccttaaaacaactcacctgtgatttggaggatgattctgataaattacaagaaaagagctggaagtcttcctgcaatgaaggagaatcctcttctacttcttatatgcatcagaggtcacctggtggtcccaccaaactgattgagatcatctcagactgcaactgggaggaagatcggaacaagattttgagcatcttatcccagcacatcaatagcaacatgccacaatcacttaaggtgggcagcttcatcattgagttggcttctcagcgaaagagccggggtgagaagaaccctcctgtttattcttctcgtgtgaaaatctctatgccatcatgtcaagaccaagatgatatggctgagaaatctggatcagagactcctgatggtccattgtcccctgggaaaatggaggatatctctcctgtgcagacagatgccctggattcagtgagggagagattacatggaggcaaaggtctgcctttttatgcagggctttctcctgcagggaagcttgtggcctataaacgtaaacccagttcaagtacatctgggcttatccaggtagcatccaatgccaaggtggctgcatccaggaaaccacgtaccctgttgccttcaacatccaattccaaaatggcatcctcctctggcactgcaacaaatcgccctgggaagaatctgaaggcgtttgtcccagcaaaacggccaattgaaaatgctgctcaaattccagtggctactccacaggtctctcctaacacagtgaaacgtgctggacctcgattgttgttgattccagtgcagcagggttctcctactcttagacctgtctcaaacacacaacttcagggacatcggatggtcttgcagcctgttaggagtccaagtggaatgaacttattcaggcaccctaatgggcagattgtccagcttctacctttgcatcagcttcgaggctctaatacccagcccaacttacagcctgtcatgtttcggaacccagggtctgtgatgggaatccggttacctgctccttccaaaccctctgagactccgccatcttccacttcgtcctctgctttctctgtcatgaatcctgtaattcaagctgttgggtcttcttcagcagtgaatgttatcactcaggcaccatcattgctttcctctggagctagttttgtgtctcaggctggtacattgaccctgaggatttctcctcctgaaccacaaagctttgcaagtaaaacaggctctgaaaccaaaataacttatagctcaggaggacagcctgttggtacagccagtcttattcctctccagtctggtagttttgccttgttacagctcccaggacaaaagcctgttcctagctccattcttcagcatgttgcttcccttcagatgaaaagagaatctcagaatccagaccagaaagatgaaacaaactcaataaaaagagagcaagaaacgaagaaggttctacagtcagaaggagaggctgtagaccctgaggctaatgtaataaaacaaaactcaggagctgctacctcagaagaaactctgaatgattccttggaagataggggtgatcatttggatgaagaatgccttccagaagaaggttgtgcaactgtcaaaccatctgagcattcctgtatcactgggtcacatacagatcaagattataaagatgttaatgaagaatatggggctaggaatcgtaagagttccaaagaaaaagtggctgttctggaagttaggaccatttctgaaaaagccagtaataagacagtccaaaatttaagtaaagtacagcatcaaaaacttggtgatgtgaaggtggaacagcagaaaggatttgacaatccagaagaaaactcaagtgaatttccagtcacctttaaggaagaaagtaaatttgaattgtcaggaagcaaagttatggagcagcaatctaatctacagccagaggccaaagagaaggaatgtggagactctctggagaaagacagggaaagatggagaaaacatctgaagggccccttaaccaggaaatgtgttggagcttcacaggaatgtaagaaagaggcagacgagcagttaattaaagaaacaaagacatgtcaggaaaattcagatgtgtttcagcaagaacaaggcatctctgacttacttggaaaaagtggaattactgaagatgccagagttttgaaaactgaatgtgattcttggagtaggatttctaatccttcagccttctccattgttcctaggagagctgcaaaaagcagcagagggaatggacattttcagggtcacttactgctacctggagaacagatacaaccaaagcaagagaagaagggtgggagaagcagtgctgacttcactgttttggatttggaagaagatgatgaagatgataatgagaaaactgatgattctattgatgaaattgtggatgttgtttctgactaccagagtgaggaggttgatgatgtagaaaagaataactgtgtagaatacattgaggatgatgaggagcacgtggacattgagactgtagaagagctctcagaggaaattaatgttgctcacctgaagaccacagcggcccacacacagtcattcaaacagccgtcctgtactcacatctctgcagatgaaaaagcagctgaaaggagtcgaaaggctccaccaattcctctaaaactgaagcctgattactggagtgacaaactacagaaagaagcagaagcgtttgcttattatcgccggacacacactgccaatgagcggcggcggcgtggtgaaatgagggatctctttgagaaattaaagatcacattgggattacttcattcttccaaggtttccaaaagtctcattcttactcgagccttcagtgaaattcagggactaacagatcaggcagacaaattgataggacagaaaaatctcctgactcgaaaacggaatattctgatacggaaagtatcgtctctttcaggtaagacagaagaagtggtcctgaagaagctagagtatatttatgcaaaacagcaagcactagaggcacaaaaaagaaaaaagaagatgggatcagatgagtttgacatatctcccagaattagcaaacagcaggaaggatcttctgcatcatctgtagatcttggacagatgtttataaataacaggagggggaaacctttgattctttccagaaaaaaagaccaggccacagaaaatacctcacccttgaacactccacacacctctgccaaccttgtgatgactccgcaagggcaattgctcaccctaaaaggtcccctattctcaggaccagtggtagctgtttctcctgatctcttagaatctgatcttaagcctcaagttgccggtagtgctgtggctctaccagaaaatgacgacttatttatgatgccacgaattgttaatgtgacatcattggccacagagggaggtttggtagatatgggtggcagcaaatatcctcatgaagttcctgatagcaagccatctgaccatctgaaagacaccgtcaggaatgaagataattccttagaggataagggtagaatctcttccagaggaaacagagatggcagagtgacgttgggtccaacgcaggtttttctggcaaacaaagattctggttatccacaaatagttgacgtttccaatatgcagaaagcacaagagttcttacctaaaaagatttctggtgatatgagagggattcagtataaatggaaagagagtgaatcaagaggggagagagtgaagtcaaaggattcttcatttcataaattaaagatgaaagatctcaaggactcaagcatagagatggaactgaggaaagtaacatcagctatagaggaagcagctcttgattccagtgaactgctgactaacatggaagatgaggatgatactgatgagacactgacttcactgctcaatgaaattgcctttcttaatcaacaactaaatgatgactctgttggcctggctgaactacccagctctatggatacagagttcccaggggatgctcggcgggcttttattagtaaggttcctcctggaagcagagcaactttccaggttgagcacttgggaactggtttgaaagagttgcctgatgttcaaggggagagtgactctatcagtcccctcctcttgcacttggaagacgatgacttttctgagaatgaaaaacaacttgcagaaccagcctctgagccagatgtccttaagattgttattgactctgaaataaaggattccctcctttccaacaagaaagctattgatggagggaagaatacttctggcctccctgcagagcccgaaagtgtgtcctcaccccccaccctacacatgaagactggcttggagaacagcaacagcacagacactttgtggaggcctatgccaaagttggcccctctaggtttaaaagtagctaatccttccagtgatgcagatggtcagagtctcaaggtgatgccttgtttggcacctatagctgccaaagttgggtcagttggacacaaaatgaacttaacagggaatgaccaggaaggccgggaaagcaaggtgatgcctacattggcacctgttgtggctaaattgggcaactcgggggcctcaccaagttctgcagggaaatgaacttacttgtccttaagcagaagccaggctgtgaggggaaattgatctcacctcctttctctgcaggcatctgtttgtttgtgtcttagaacttggatccttgacttcaatgatgcagtggataatgatgggagaaagggggtagggtgctgaccctggtataagaagtactctgaaattctgatcatgttaaaatgtgttacctcacttgtggtgctgggtcccctcatcctctctaagaagatgtgatccattactgaacatgaggtgcccctcttacccaaggaatttataacatgactctggctccacagtggtttctagttcttcccccacaagcgaaagagctgtttgcaactttggagttgctgtagactgaactgtagcttgtagctgttgaattaagtccaaaatctaaggaatgcgatggacttgtgcaaagggatccagaagagacactttttagttgatgtttcaagaatagggagagagaggatgggtaccatggaataccaaagtgaaggactttgtgtcattcagtaaaattttcttttttcatatcctaagtagctcccattccctcaccttttcaatcagaattaacaaattcaagccttcagtaaagtagggatgcttttaacttttattattaattattttgagatcttaaaaaaatagtagttctcccttattatttttgtgggcattgaaaagctcatttcacagtaccagagatttttactgggagtatatattttggaggtaggcatagagggagccctaccccttccacaaattacgttactcaagagacagctaaaataaaatgcattatctccccagaccagagacagtggccaaaataaaaaatcatggggctggaaatttcccaaatcaaaccagcctcctggtgcttgaaggtttcattcactattacctgcacaggatgtaaagaaaagtcacagtaggcactctttaccagggaaataaggcagtatttgaatcacaagatatattttttatctgcaaccatggatccaatgatctgtagagctttttcactcattaactgtcaggatatgaaggactgacagtctgtaaagatatttatatttttgtatagttgttttcatagatttctcaaaggctgaagttttcaacctagaagatgagatttgtattgagtatagaaatgatgtttcctatctagtttgtaaataatcatggtgcacttgaggggtctcttggaaactcctagggggtcaagaatcactattctgaaactgtatagactgggatttagctgctgcattttgcctttcttaaataattatattttggaatgtaacccctgttctgtcttcattgacaggatttgcttgtgttgttaaaacactaacacaagagcttccagtgcctgggccgtgcctaggtgatgctatttcttctatatctcctgtcttctttatcccaaatcccactcagcatatcttcagacctaggttgtaagaccaactttggattggatctagccagtgaattattatttccatggttggttccctttctgttaactctggtaatcaacagattgaaaacggtggaagaacttcttctgaaaattgcagtgggagcaaattcttgttggttttgtgctgcttgcctttctagatctgctcatcagcacttaaccttccctcctctaaaggttactaaagaagcctgaagtaggtaaagagtgctcctcagcttcttatccttccactctttacccagcagatttcattcaatgccttagccaaggagtccagcacctgtctcccctgctaataattgtccttagagatgctagtactttaatccaggtatagcagtttcccgttattttcttgcttgtcgttcccctacatttcctcctgatttcccaagactctctttgtggcttttgagggtcagccaaggagcaggcaagtgagtgaacaatcctcaggaaaagaaggaccattttagcttaacacttccttttttttttttttttttttaagaagaatataggtaaacaggtaatgattcttgattggagataccatttgactcttgatgagagttgtacgaagatggaaatgagggatgattccaggcgttttagggggaaggctgcagataccattctaacccccaagatactgtgttctcaagacctcttagaactaggtgttgtcagggataatttgaggagggcttagtcttcagaacaatcctgcagtcttgacagaaatctaaaatctccaaaaactcctaccctttaaccttaccctagggggaactgatctatgaatattacatgtgtgattatgaaaggtgaagttgagtgagaggagttgaggaacgtggaagacagtgagctctcaccctaacactataagaagcatgatctcaatagaccaataattcacctttttatacatctgtaaataaatggaatgtttttaagaatataattatgtcagatttagcattttcttttatatattaaatatatatatctttccttttctgctttcgaaaagtgactatttttttagaaatctaagaacagaagtttggtgattgaaaggtagaatatataaacctgaaataaagcagttaaaacaattaaa

SEQ ID NO: 317 - DNA, 11403 bp, Homo sapiens
gcgcaggctcttcagctggagcggacacacggtgtgcgaaccgaacagaataacccgcccccagcgggatgtgaaggactccgggtgaggccggccacgccccgcacggatgggaaggccattgtgactatgtggtgattacagttgtcttactactgagtttcctactgaaatcatggaggagaaacagcagattatattggctaatcaagatggtggaacagtggcaggagcagcacctaccttctttgtcatcttaaagcagccaggaaatggcaaaactgatcaaggaattttggttactaatcaggatgcctgtgctttggctagtagtgtgtcatcaccagtaaaatctaaagggaagatttgccttccagctgattgtactgtgggtggaatcactgttaccctcgataacaatagtatgtggaatgagttctatcatcgaagcacagagatgattctgaccaagcaaggaagacgcatgtttccttactgtcgttattggataacaggtttagattcaaatttgaagtatattcttgtcatggatatatctcctgtggataaccatcgttataagtggaatggtcgttggtgggaacctagtgggaaggctgaacctcatgttttggggagggttttcattcatccagaatctccttccacaggtcattattggatgcatcaaccagtatctttctataaactcaaacttaccaacaatacactggaccaagaagggcatatcatcttgcactctatgcatcgttacctgccgaggcttcatttggtgcctgcagaaaaggctgtggaggtgatacaattaaatggccctggtgtccacacttttaccttcccacagactgaattctttgcagtaacagcttatcagaacattcagattactcagctgaaaatagattacaatccatttgccaaaggctttcgggatgatgggctgaataataagccccagagagatggaaaacaaaagaacagctctgaccaagaagggaataatatttccagttcttctggtcatcgggtccgtcttacagaaggtcaggggtcagagatacaaccaggtgatttggatcctttgtcaaggggtcatgaaacatcaggcaagggtttggagaagacttcccttaatataaaacgagactttcttggtttcatggatactgattcagcacttagtgaagttcctcaattgaagcaagagatttctgaatgtcttattgccagcagttttgaagatgactcccgtgtagcctcaccgttagaccagaacggaagcttcaatgttgttattaaagaggaacctctagatgattatgactacgaacttggtgagtgcccagaaggggtcactgtgaaacaggaagagacagatgaagagacggatgtatactcaaacagtgatgatgatcctatactagagaaacagctaaagaggcacaataaagttgacaacccagaagctgaccatctatcttctaaatggcttccaagcagcccatcaggtgttgctaaagctaaaatgttcaaattagacactggaaagatgccagtagtctatctggagccctgtgctgtcaccagaagcacagttaagatttctgaactccccgataacatgctttccacatctcgaaaggataaatcttctatgttggcagaattggaatatttgcctacatacattgaaaattccaatgagactgccttctgcttaggcaaggaatcagaaaatggtcttagaaaacattcaccagatctcagagtggtacaaaaatatcccttactgaaagagcctcagtggaaatatcctgatatatctgacagcattagcacagaaagaatactcgacgattcaaaggattcagttggagactcactttcaggaaaagaggacttgggcagaaagagaacaactatgcttaagattgcaacagccgcaaaggtagtgaatgctaatcagaatgcctctccaaatgtccctggaaaaagaggaaggccacgaaaattgaaactctgtaaggcaggacgaccacctaagaacacaggaaagtctttaatttctacaaagaatacacctgtaagccctgggagtacctttccagatgtgaagcctgatctggaagatgtggatggtgttctctttgtttcctttgaatcaaaggaagctctagacattcatgcagttgatgggacaacagaagaatcttctagtctccaggcatcaaccacaaatgactcaggttacagagcaagaatttcccagttggaaaaggaattgatagaagatttgaagtctttgcggcacaagcaggtgatacatcctggtcttcaagaagtgggcttaaaattgaattcagtggatccaacaatgagcattgatcttaaatacttgggagtacagttacctttggctccagctactagctttcctttttggaaccttacaggaaccaaccctgcctctcctgatgcgggatttccctttgtttctaggacagggaaaaccaatgatttcactaagatcaagggatggaggggaaaatttcatagtgcttctgcatctaggaatgaaggtggaaattcagaaagttcactgaaaaatcgttctgctttctgtagtgataagctagatgaatacttggaaaatgaaggcaagctgatggaaacaagcatgggtttttcttctaatgctcccacatctcctgtggtgtaccagcttcccactaagagtaccagttatgtacgaacacttgatagtgtactaaagaagcaatctactatttccccttctacctcttattctttgaaacctcattctgtaccccctgtctctcgaaaggcaaagtctcaaaacagacaggcaactttcagtggccgaactaaatcatcttataaatccattttaccataccctgtttcaccaaagcagaaatactctcatgtgattctaggagataaggttaccaagaattcttcaggcatcatctcagaaaatcaggcgaataactttgttgtgccaactttggatgaaaatatatttccaaagcagattagtttgcggcaggcacagcagcagcagcaacagcaacagggaagtcgccctccaggcttgtctaaatctcaggtgaagctaatggacctggaagactgtgcactttgggaaggaaaaccaaggacatacatcacagaagagcgagcagatgtatccttaacaactctacttacagctcaagcatccctcaaaactaaacctatccacacaatcataaggaaacgagcccctccctgcaacaatgacttctgtcgactgggttgtgtatgttccagtctagctttggagaagcgccaacctgctcactgccgccgaccagactgcatgtttggttgtacttgtttgaaaagaaaagttgtacttgttaaaggaggatccaaaactaagcattttcagaggaaggctgctcatcgagatccagtattttatgatactctgggagaggaggcaagggaggaggaagaaggaatcagggaggaggaggaacaattgaaagagaaaaagaagagaaagaagctagaatacactatatgtgagacagagcctgaacagcctgttcgacattacccattatgggtaaaagtagaaggtgaagtagatccagaaccagtttatatccccacgccttctgtcattgagcctatgaaaccattgttattgcctcagccagaagttttatctcctactgtgaagggcaaactgctcactggaattaaatctccacggtcatatactcccaaacccaatcctattcgggaagaggacaaagatccagtctacttgtactttgaaagtatgatgacttgtgctcgagttcgagtatatgagcgaaaaaaagaggaccagagacaaccatcttcctcctcctccccatctccatcatttcagcagcaaacttcatgtcattctagccctgagaaccataataatgcaaaggaacctgattctgaacagcagcccttaaaacaactcacctgtgatttggaggatgattctgataaattacaagaaaagagctggaagtcttcctgcaatgaaggagaatcctcttctacttcttatatgcatcagaggtcacctggtggtcccaccaaactgattgagatcatctcagactgcaactgggaggaagatcggaacaagattttgagcatcttatcccagcacatcaatagcaacatgccacaatcacttaaggtgggcagcttcatcattgagttggcttctcagcgaaagagccggggtgagaagaaccctcctgtttattcttctcgtgtgaaaatctctatgccatcatgtcaagaccaagatgatatggctgagaaatctggatcagagactcctgatggtccattgtcccctgggaaaatggaggatatctctcctgtgcagacagatgccctggattcagtgagggagagattacatggaggcaaaggtctgcctttttatgcagggctttctcctgcagggaagcttgtggcctataaacgtaaacccagttcaagtacatctgggcttatccaggtagcatccaatgccaaggtggctgcatccaggaaaccacgtaccctgttgccttcaacatccaattccaaaatggcatcctcctctggcactgcaacaaatcgccctgggaagaatctgaaggcgtttgtcccagcaaaacggccaattgaaaatgctgctcaaattccagtggctactccacaggtctctcctaacacagtgaaacgtgctggacctcgattgttgttgattccagtgcagcagggttctcctactcttagacctgtctcaaacacacaacttcagggacatcggatggtcttgcagcctgttaggagtccaagtggaatgaacttattcaggcaccctaatgggcagattgtccagcttctacctttgcatcagcttcgaggctctaatacccagcccaacttacagcctgtcatgtttcggaacccagggtctgtgatgggaatccggttacctgctccttccaaaccctctgagactccgccatcttccacttcgtcctctgctttctctgtcatgaatcctgtaattcaagctgttgggtcttcttcagcagtgaatgttatcactcaggcaccatcattgctttcctctggagctagttttgtgtctcaggctggtacattgaccctgaggatttctcctcctgaaccacaaagctttgcaagtaaaacaggctctgaaaccaaaataacttatagctcaggaggacagcctgttggtacagccagtcttattcctctccagtctggtagttttgccttgttacagctcccaggacaaaagcctgttcctagctccattcttcagcatgttgcttcccttcagatgaaaagagaatctcagaatccagaccagaaagatgaaacaaactcaataaaaagagagcaagaaacgaagaaggttctacagtcagaaggagaggctgtagaccctgaggctaatgtaataaaacaaaactcaggagctgctacctcagaagaaactctgaatgattccttggaagataggggtgatcatttggatgaagaatgccttccagaagaaggttgtgcaactgtcaaaccatctgagcattcctgtatcactgggtcacatacagatcaagattataaagatgttaatgaagaatatggggctaggaatcgtaagagttccaaagaaaaagtggctgttctggaagttaggaccatttctgaaaaagccagtaataagacagtccaaaatttaagtaaagtacagcatcaaaaacttggtgatgtgaaggtggaacagcagaaaggatttgacaatccagaagaaaactcaagtgaatttccagtcacctttaaggaagaaagtaaatttgaattgtcaggaagcaaagttatggagcagcaatctaatctacagccagaggccaaagagaaggaatgtggagactctctggagaaagacagggaaagatggagaaaacatctgaagggccccttaaccaggaaatgtgttggagcttcacaggaatgtaagaaagaggcagacgagcagttaattaaagaaacaaagacatgtcaggaaaattcagatgtgtttcagcaagaacaaggcatctctgacttacttggaaaaagtggaattactgaagatgccagagttttgaaaactgaatgtgattcttggagtaggatttctaatccttcagccttctccattgttcctaggagagctgcaaaaagcagcagagggaatggacattttcagggtcacttactgctacctggagaacagatacaaccaaagcaagagaagaagggtgggagaagcagtgctgacttcactgttttggatttggaagaagatgatgaagatgataatgagaaaactgatgattctattgatgaaattgtggatgttgtttctgactaccagagtgaggaggttgatgatgtagaaaagaataactgtgtagaatacattgaggatgatgaggagcacgtggacattgagactgtagaagagctctcagaggaaattaatgttgctcacctgaagaccacagcggcccacacacagtcattcaaacagccgtcctgtactcacatctctgcagatgaaaaagcagctgaaaggagtcgaaaggctccaccaattcctctaaaactgaagcctgattactggagtgacaaactacagaaagaagcagaagcgtttgcttattatcgccggacacacactgccaatgagcggcggcggcgtggtgaaatgagggatctctttgagaaattaaagatcacattgggattacttcattcttccaaggtttccaaaagtctcattcttactcgagccttcagtgaaattcagggactaacagatcaggcagacaaattgataggacagaaaaatctcctgactcgaaaacggaatattctgatacggaaagtatcgtctctttcaggtaagacagaagaagtggtcctgaagaagctagagtatatttatgcaaaacagcaagcactagaggcacaaaaaagaaaaaagaagatgggatcagatgagtttgacatatctcccagaattagcaaacagcaggaaggatcttctgcatcatctgtagatcttggacagatgtttataaataacaggagggggaaacctttgattctttccagaaaaaaagaccaggccacagaaaatacctcacccttgaacactccacacacctctgccaaccttgtgatgactccgcaagggcaattgctcaccctaaaaggtcccctattctcaggaccagtggtagctgtttctcctgatctcttagaatctgatcttaagcctcaagttgccggtagtgctgtggctctaccagaaaatgacgacttatttatgatgccacgaattgttaatgtgacatcattggccacagagggaggtttggtagatatgggtggcagcaaatatcctcatgaagttcctgatagcaagccatctgaccatctgaaagacaccgtcaggaatgaagataattccttagaggataagggtagaatctcttccagaggaaacagagatggcagagtgacgttgggtccaacgcaggtttttctggcaaacaaagattctggttatccacaaatagttgacgtttccaatatgcagaaagcacaagagttcttacctaaaaagatttctggtgatatgagagggattcagtataaatggaaagagagtgaatcaagaggggagagagtgaagtcaaaggattcttcatttcataaattaaagatgaaagatctcaaggactcaagcatagagatggaactgaggaaagtaacatcagctatagaggaagcagctcttgattccagtgaactgctgactaacatggaagatgaggatgatactgatgagacactgacttcactgctcaatgaaattgcctttcttaatcaacaactaaatgatgactctgttggcctggctgaactacccagctctatggatacagagttcccaggggatgctcggcgggcttttattagtaaggttcctcctggaagcagagcaactttccaggttgagcacttgggaactggtttgaaagagttgcctgatgttcaaggggagagtgactctatcagtcccctcctcttgcacttggaagacgatgacttttctgagaatgaaaaacaacttgcagaaccagcctctgagccagatgtccttaagattgttattgactctgaaataaaggattccctcctttccaacaagaaagctattgatggagggaagaatacttctggcctccctgcagagcccgaaagtgtgtcctcaccccccaccctacacatgaagactggcttggagaacagcaacagcacagacactttgtggaggcctatgccaaagttggcccctctaggtttaaaagtagctaatccttccagtgatgcagatggtcagagtctcaaggtgatgccttgtttggcacctatagctgccaaagttgggtcagttggacacaaaatgaacttaacagggaatgaccaggaaggccgggaaagcaaggtgatgcctacattggcacctgttgtggctaaattgggcaactcgggggcctcaccaagttctgcagggaaatgaacttacttgtccttaagcagaagccaggctgtgaggggaaattgatctcacctcctttctctgcaggcatctgtttgtttgtgtcttagaacttggatccttgacttcaatgatgcagtggataatgatgggagaaagggggtagggtgctgaccctggtataagaagtactctgaaattctgatcatgttaaaatgtgttacctcacttgtggtgctgggtcccctcatcctctctaagaagatgtgatccattactgaacatgaggtgcccctcttacccaaggaatttataacatgactctggctccacagtggtttctagttcttcccccacaagcgaaagagctgtttgcaactttggagttgctgtagactgaactgtagcttgtagctgttgaattaagtccaaaatctaaggaatgcgatggacttgtgcaaagggatccagaagagacactttttagttgatgtttcaagaatagggagagagaggatgggtaccatggaataccaaagtgaaggactttgtgtcattcagtaaaattttcttttttcatatcctaagtagctcccattccctcaccttttcaatcagaattaacaaattcaagccttcagtaaagtagggatgcttttaacttttattattaattattttgagatcttaaaaaaatagtagttctcccttattatttttgtgggcattgaaaagctcatttcacagtaccagagatttttactgggagtatatattttggaggtaggcatagagggagccctaccccttccacaaattacgttactcaagagacagctaaaataaaatgcattatctccccagaccagagacagtggccaaaataaaaaatcatggggctggaaatttcccaaatcaaaccagcctcctggtgcttgaaggtttcattcactattacctgcacaggatgtaaagaaaagtcacagtaggcactctttaccagggaaataaggcagtatttgaatcacaagatatattttttatctgcaaccatggatccaatgatctgtagagctttttcactcattaactgtcaggatatgaaggactgacagtctgtaaagatatttatatttttgtatagttgttttcatagatttctcaaaggctgaagttttcaacctagaagatgagatttgtattgagtatagaaatgatgtttcctatctagtttgtaaataatcatggtgcacttgaggggtctcttggaaactcctagggggtcaagaatcactattctgaaactgtatagactgggatttagctgctgcattttgcctttcttaaataattatattttggaatgtaacccctgttctgtcttcattgacaggatttgcttgtgttgttaaaacactaacacaagagcttccagtgcctgggccgtgcctaggtgatgctatttcttctatatctcctgtcttctttatcccaaatcccactcagcatatcttcagacctaggttgtaagaccaactttggattggatctagccagtgaattattatttccatggttggttccctttctgttaactctggtaatcaacagattgaaaacggtggaagaacttcttctgaaaattgcagtgggagcaaattcttgttggttttgtgctgcttgcctttctagatctgctcatcagcacttaaccttccctcctctaaaggttactaaagaagcctgaagtaggtaaagagtgctcctcagcttcttatccttccactctttacccagcagatttcattcaatgccttagccaaggagtccagcacctgtctcccctgctaataattgtccttagagatgctagtactttaatccaggtatagcagtttcccgttattttcttgcttgtcgttcccctacatttcctcctgatttcccaagactctctttgtggcttttgagggtcagccaaggagcaggcaagtgagtgaacaatcctcaggaaaagaaggaccattttagcttaacacttccttttttttttttttttttttaagaagaatataggtaaacaggtaatgattcttgattggagataccatttgactcttgatgagagttgtacgaagatggaaatgagggatgattccaggcgttttagggggaaggctgcagataccattctaacccccaagatactgtgttctcaagacctcttagaactaggtgttgtcagggataatttgaggagggcttagtcttcagaacaatcctgcagtcttgacagaaatctaaaatctccaaaaactcctaccctttaaccttaccctagggggaactgatctatgaatattacatgtgtgattatgaaaggtgaagttgagtgagaggagttgaggaacgtggaagacagtgagctctcaccctaacactataagaagcatgatctcaatagaccaataattcacctttttatacatctgtaaataaatggaatgtttttaagaatataattatgtcagatttagcattttcttttatatattaaatatatatatctttccttttctgctttcgaaaagtgactatttttttagaaatctaagaacagaagtttggtgattgaaaggtagaatatataaacctgaaataaagcagttaaaacaattaaa

SEQ ID NO: 318 - DNA, 4856 bp, Homo sapiens
cactgttggcattgtaagagttagatttgaaggaaggatagactggtagtaagatgaccaattgagaggctgttacaacagtccagacaaaaggtaatgagtgcctgaaatagggcagtgtcatttgaaacagagtaagagggccaactacatgttcaagatgtttaggaggcaatcttgtttggacaggctccaccaattcctctaaaactgaagcctgattactggagtgacaaactacagaaagaagcagaagcgtttgcttattatcgccggacacacactgccaatgagcggcggcggcgtggtgaaatgagggatctctttgagaaattaaagatcacattgggattacttcattcttccaaggtttccaaaagtctcattcttactcgagccttcagtgaaattcagggactaacagatcaggcagacaaattgataggacagaaaaatctcctgactcgaaaacggaatattctgatacggaaagtatcgtctctttcaggtaagacagaagaagtggtcctgaagaagctagagtatatttatgcaaaacagcaagcactagaggcacaaaaaagaaaaaagaagatgggatcagatgagtttgacatatctcccagaattagcaaacagcaggaaggatcttctgcatcatctgtagatcttggacagatgtttataaataacaggagggggaaacctttgattctttccagaaaaaaagaccaggccacagaaaatacctcacccttgaacactccacacacctctgccaaccttgtgatgactccgcaagggcaattgctcaccctaaaaggtcccctattctcaggaccagtggtagctgtttctcctgatctcttagaatctgatcttaagcctcaagttgccggtagtgctgtggctctaccagaaaatgacgacttatttatgatgccacgaattgttaatgtgacatcattggccacagagggaggtttggtagatatgggtggcagcaaatatcctcatgaagttcctgatagcaagccatctgaccatctgaaagacaccgtcaggaatgaagataattccttagaggataagggtagaatctcttccagaggaaacagagatggcagagtgacgttgggtccaacgcaggtttttctggcaaacaaagattctggttatccacaaatagttgacgtttccaatatgcagaaagcacaagagttcttacctaaaaagatttctggtgatatgagagggattcagtataaatggaaagagagtgaatcaagaggggagagagtgaagtcaaaggattcttcatttcataaattaaagatgaaagatctcaaggactcaagcatagagatggaactgaggaaagtaacatcagctatagaggaagcagctcttgattccagtgaactgctgactaacatggaagatgaggatgatactgatgagacactgacttcactgctcaatgaaattgcctttcttaatcaacaactaaatgatgactctgttggcctggctgaactacccagctctatggatacagagttcccaggggatgctcggcgggcttttattagtaaggttcctcctggaagcagagcaactttccaggttgagcacttgggaactggtttgaaagagttgcctgatgttcaaggggagagtgactctatcagtcccctcctcttgcacttggaagacgatgacttttctgagaatgaaaaacaacttgcagaaccagcctctgagccagatgtccttaagattgttattgactctgaaataaaggattccctcctttccaacaagaaagctattgatggagggaagaatacttctggcctccctgcagagcccgaaagtgtgtcctcaccccccaccctacacatgaagactggcttggagaacagcaacagcacagacactttgtggaggcctatgccaaagttggcccctctaggtttaaaagtagctaatccttccagtgatgcagatggtcagagtctcaaggtgatgccttgtttggcacctatagctgccaaagttgggtcagttggacacaaaatgaacttaacagggaatgaccaggaaggccgggaaagcaaggtgatgcctacattggcacctgttgtggctaaattgggcaactcgggggcctcaccaagttctgcagggaaatgaacttacttgtccttaagcagaagccaggctgtgaggggaaattgatctcacctcctttctctgcaggcatctgtttgtttgtgtcttagaacttggatccttgacttcaatgatgcagtggataatgatgggagaaagggggtagggtgctgaccctggtataagaagtactctgaaattctgatcatgttaaaatgtgttacctcacttgtggtgctgggtcccctcatcctctctaagaagatgtgatccattactgaacatgaggtgcccctcttacccaaggaatttataacatgactctggctccacagtggtttctagttcttcccccacaagcgaaagagctgtttgcaactttggagttgctgtagactgaactgtagcttgtagctgttgaattaagtccaaaatctaaggaatgcgatggacttgtgcaaagggatccagaagagacactttttagttgatgtttcaagaatagggagagagaggatgggtaccatggaataccaaagtgaaggactttgtgtcattcagtaaaattttcttttttcatatcctaagtagctcccattccctcaccttttcaatcagaattaacaaattcaagccttcagtaaagtagggatgcttttaacttttattattaattattttgagatcttaaaaaaatagtagttctcccttattatttttgtgggcattgaaaagctcatttcacagtaccagagatttttactgggagtatatattttggaggtaggcatagagggagccctaccccttccacaaattacgttactcaagagacagctaaaataaaatgcattatctccccagaccagagacagtggccaaaataaaaaatcatggggctggaaatttcccaaatcaaaccagcctcctggtgcttgaaggtttcattcactattacctgcacaggatgtaaagaaaagtcacagtaggcactctttaccagggaaataaggcagtatttgaatcacaagatatattttttatctgcaaccatggatccaatgatctgtagagctttttcactcattaactgtcaggatatgaaggactgacagtctgtaaagatatttatatttttgtatagttgttttcatagatttctcaaaggctgaagttttcaacctagaagatgagatttgtattgagtatagaaatgatgtttcctatctagtttgtaaataatcatggtgcacttgaggggtctcttggaaactcctagggggtcaagaatcactattctgaaactgtatagactgggatttagctgctgcattttgcctttcttaaataattatattttggaatgtaacccctgttctgtcttcattgacaggatttgcttgtgttgttaaaacactaacacaagagcttccagtgcctgggccgtgcctaggtgatgctatttcttctatatctcctgtcttctttatcccaaatcccactcagcatatcttcagacctaggttgtaagaccaactttggattggatctagccagtgaattattatttccatggttggttccctttctgttaactctggtaatcaacagattgaaaacggtggaagaacttcttctgaaaattgcagtgggagcaaattcttgttggttttgtgctgcttgcctttctagatctgctcatcagcacttaaccttccctcctctaaaggttactaaagaagcctgaagtaggtaaagagtgctcctcagcttcttatccttccactctttacccagcagatttcattcaatgccttagccaaggagtccagcacctgtctcccctgctaataattgtccttagagatgctagtactttaatccaggtatagcagtttcccgttattttcttgcttgtcgttcccctacatttcctcctgatttcccaagactctctttgtggcttttgagggtcagccaaggagcaggcaagtgagtgaacaatcctcaggaaaagaaggaccattttagcttaacacttccttttttttttttttttttttaagaagaatataggtaaacaggtaatgattcttgattggagataccatttgactcttgatgagagttgtacgaagatggaaatgagggatgattccaggcgttttagggggaaggctgcagataccattctaacccccaagatactgtgttctcaagacctcttagaactaggtgttgtcagggataatttgaggagggcttagtcttcagaacaatcctgcagtcttgacagaaatctaaaatctccaaaaactcctaccctttaaccttaccctagggggaactgatctatgaatattacatgtgtgattatgaaaggtgaagttgagtgagaggagttgaggaacgtggaagacagtgagctctcaccctaacactataagaagcatgatctcaatagaccaataattcacctttttatacatctgtaaataaatggaatgtttttaagaatataattatgtcagatttagcattttcttttatatattaaatatatatatctttccttttctgctttcgaaaagtgactatttttttagaaatctaagaacagaagtttggtgattgaaaggtagaatatataaacctgaaataaagcagttaaaacaattaaa

SEQ ID NO: 319 - DNA, 7427 bp, Homo sapiens
aaggtagcatccaatgccaaggtggctgcatccaggaaaccacgtaccctgttgccttcaacatccaattccaaaatggcatcctcctctggcactgcaacaaatcgccctgggaagaatctgaaggcgtttgtcccagcaaaacggccaattgcggctcgaccctctcctggtggtgtgttcacacagtttgtgatgagtaaagttggagccttgcagcagaagatacctggagttagcacaccccaaaccctggcagggacacagaagttcagtatcagaccttctccagtaatggtcgtcacacctgtggtttcttctgagccagttcaggtgtgcagccctgtgactgctgctgtcactactaccacccctcaagtgtttttagaaaatactactgctgtgacacctatgactgctatttctgacgtggaaactaaagaaactacttattcttctggtgccaccactacaggggttgttgaggtctctgaaactaataccagcacctctgtaacatctacccagtctacagccactgtgaaccttaccaaaaccactgggataactacccctgtggcttcagttgcttttcctaagtctttggtagcatctccttcaaccataactcttcctgttgcttccactgcttccacctccttagtcgtggtgactgcagctgcatcttcctccatggtgaccacaccaacttcatctctgggctctgttcctattatactctcaggaattaatgggagtccaccagtgagccagagaccagaaaatgctgctcaaattccagtggctactccacaggtctctcctaacacagtgaaacgtgctggacctcgattgttgttgattccagtgcagcagggttctcctactcttagacctgtctcaaacacacaacttcagggacatcggatggtcttgcagcctgttaggagtccaagtggaatgaacttattcaggcaccctaatgggcagattgtccagcttctacctttgcatcagcttcgaggctctaatacccagcccaacttacagcctgtcatgtttcggaacccagggtctgtgatgggaatccggttacctgctccttccaaaccctctgagactccgccatcttccacttcgtcctctgctttctctgtcatgaatcctgtaattcaagctgttgggtcttcttcagcagtgaatgttatcactcaggcaccatcattgctttcctctggagctagttttgtgtctcaggctggtacattgaccctgaggatttctcctcctgaaccacaaagctttgcaagtaaaacaggctctgaaaccaaaataacttatagctcaggaggacagcctgttggtacagccagtcttattcctctccagtctggtagttttgccttgttacagctcccaggacaaaagcctgttcctagctccattcttcagcatgttgcttcccttcagatgaaaagagaatctcagaatccagaccagaaagatgaaacaaactcaataaaaagagagcaagaaacgaagaaggttctacagtcagaaggagaggctgtagaccctgaggctaatgtaataaaacaaaactcaggagctgctacctcagaagaaactctgaatgattccttggaagataggggtgatcatttggatgaagaatgccttccagaagaaggttgtgcaactgtcaaaccatctgagcattcctgtatcactgggtcacatacagatcaagattataaagatgttaatgaagaatatggggctaggaatcgtaagagttccaaagaaaaagtggctgttctggaagttaggaccatttctgaaaaagccagtaataagacagtccaaaatttaagtaaagtacagcatcaaaaacttggtgatgtgaaggtggaacagcagaaaggatttgacaatccagaagaaaactcaagtgaatttccagtcacctttaaggaagaaagtaaatttgaattgtcaggaagcaaagttatggagcagcaatctaatctacagccagaggccaaagagaaggaatgtggagactctctggagaaagacagggaaagatggagaaaacatctgaagggccccttaaccaggaaatgtgttggagcttcacaggaatgtaagaaagaggcagacgagcagttaattaaagaaacaaagacatgtcaggaaaattcagatgtgtttcagcaagaacaaggcatctctgacttacttggaaaaagtggaattactgaagatgccagagttttgaaaactgaatgtgattcttggagtaggatttctaatccttcagccttctccattgttcctaggagagctgcaaaaagcagcagagggaatggacattttcagggtcacttactgctacctggagaacagatacaaccaaagcaagagaagaagggtgggagaagcagtgctgacttcactgttttggatttggaagaagatgatgaagatgataatgagaaaactgatgattctattgatgaaattgtggatgttgtttctgactaccagagtgaggaggttgatgatgtagaaaagaataactgtgtagaatacattgaggatgatgaggagcacgtggacattgagactgtagaagagctctcagaggaaattaatgttgctcacctgaagaccacagcggcccacacacagtcattcaaacagccgtcctgtactcacatctctgcagatgaaaaagcagctgaaaggagtcgaaaggctccaccaattcctctaaaactgaagcctgattactggagtgacaaactacagaaagaagcagaagcgtttgcttattatcgccggacacacactgccaatgagcggcggcggcgtggtgaaatgagggatctctttgagaaattaaagatcacattgggattacttcattcttccaaggtttccaaaagtctcattcttactcgagccttcagtgaaattcagggactaacagatcaggcagacaaattgataggacagaaaaatctcctgactcgaaaacggaatattctgatacggaaagtatcgtctctttcaggtaagacagaagaagtggtcctgaagaagctagagtatatttatgcaaaacagcaagcactagaggcacaaaaaagaaaaaagaagatgggatcagatgagtttgacatatctcccagaattagcaaacagcaggaaggatcttctgcatcatctgtagatcttggacagatgtttataaataacaggagggggaaacctttgattctttccagaaaaaaagaccaggccacagaaaatacctcacccttgaacactccacacacctctgccaaccttgtgatgactccgcaagggcaattgctcaccctaaaaggtcccctattctcaggaccagtggtagctgtttctcctgatctcttagaatctgatcttaagcctcaagttgccggtagtgctgtggctctaccagaaaatgacgacttatttatgatgccacgaattgttaatgtgacatcattggccacagagggaggtttggtagatatgggtggcagcaaatatcctcatgaagttcctgatagcaagccatctgaccatctgaaagacaccgtcaggaatgaagataattccttagaggataagggtagaatctcttccagaggaaacagagatggcagagtgacgttgggtccaacgcaggtttttctggcaaacaaagattctggttatccacaaatagttgacgtttccaatatgcagaaagcacaagagttcttacctaaaaagatttctggtgatatgagagggattcagtataaatggaaagagagtgaatcaagaggggagagagtgaagtcaaaggattcttcatttcataaattaaagatgaaagatctcaaggactcaagcatagagatggaactgaggaaagtaacatcagctatagaggaagcagctcttgattccagtgaactgctgactaacatggaagatgaggatgatactgatgagacactgacttcactgctcaatgaaattgcctttcttaatcaacaactaaatgatgactctgttggcctggctgaactacccagctctatggatacagagttcccaggggatgctcggcgggcttttattagtaaggttcctcctggaagcagagcaactttccaggttgagcacttgggaactggtttgaaagagttgcctgatgttcaaggggagagtgactctatcagtcccctcctcttgcacttggaagacgatgacttttctgagaatgaaaaacaacttgcagaaccagcctctgagccagatgtccttaagattgttattgactctgaaataaaggattccctcctttccaacaagaaagctattgatggagggaagaatacttctggcctccctgcagagcccgaaagtgtgtcctcaccccccaccctacacatgaagactggcttggagaacagcaacagcacagacactttgtggaggcctatgccaaagttggcccctctaggtttaaaagtagctaatccttccagtgatgcagatggtcagagtctcaaggtgatgccttgtttggcacctatagctgccaaagttgggtcagttggacacaaaatgaacttaacagggaatgaccaggaaggccgggaaagcaaggtgatgcctacattggcacctgttgtggctaaattgggcaactcgggggcctcaccaagttctgcagggaaatgaacttacttgtccttaagcagaagccaggctgtgaggggaaattgatctcacctcctttctctgcaggcatctgtttgtttgtgtcttagaacttggatccttgacttcaatgatgcagtggataatgatgggagaaagggggtagggtgctgaccctggtataagaagtactctgaaattctgatcatgttaaaatgtgttacctcacttgtggtgctgggtcccctcatcctctctaagaagatgtgatccattactgaacatgaggtgcccctcttacccaaggaatttataacatgactctggctccacagtggtttctagttcttcccccacaagcgaaagagctgtttgcaactttggagttgctgtagactgaactgtagcttgtagctgttgaattaagtccaaaatctaaggaatgcgatggacttgtgcaaagggatccagaagagacactttttagttgatgtttcaagaatagggagagagaggatgggtaccatggaataccaaagtgaaggactttgtgtcattcagtaaaattttcttttttcatatcctaagtagctcccattccctcaccttttcaatcagaattaacaaattcaagccttcagtaaagtagggatgcttttaacttttattattaattattttgagatcttaaaaaaatagtagttctcccttattatttttgtgggcattgaaaagctcatttcacagtaccagagatttttactgggagtatatattttggaggtaggcatagagggagccctaccccttccacaaattacgttactcaagagacagctaaaataaaatgcattatctccccagaccagagacagtggccaaaataaaaaatcatggggctggaaatttcccaaatcaaaccagcctcctggtgcttgaaggtttcattcactattacctgcacaggatgtaaagaaaagtcacagtaggcactctttaccagggaaataaggcagtatttgaatcacaagatatattttttatctgcaaccatggatccaatgatctgtagagctttttcactcattaactgtcaggatatgaaggactgacagtctgtaaagatatttatatttttgtatagttgttttcatagatttctcaaaggctgaagttttcaacctagaagatgagatttgtattgagtatagaaatgatgtttcctatctagtttgtaaataatcatggtgcacttgaggggtctcttggaaactcctagggggtcaagaatcactattctgaaactgtatagactgggatttagctgctgcattttgcctttcttaaataattatattttggaatgtaacccctgttctgtcttcattgacaggatttgcttgtgttgttaaaacactaacacaagagcttccagtgcctgggccgtgcctaggtgatgctatttcttctatatctcctgtcttctttatcccaaatcccactcagcatatcttcagacctaggttgtaagaccaactttggattggatctagccagtgaattattatttccatggttggttccctttctgttaactctggtaatcaacagattgaaaacggtggaagaacttcttctgaaaattgcagtgggagcaaattcttgttggttttgtgctgcttgcctttctagatctgctcatcagcacttaaccttccctcctctaaaggttactaaagaagcctgaagtaggtaaagagtgctcctcagcttcttatccttccactctttacccagcagatttcattcaatgccttagccaaggagtccagcacctgtctcccctgctaataattgtccttagagatgctagtactttaatccaggtatagcagtttcccgttattttcttgcttgtcgttcccctacatttcctcctgatttcccaagactctctttgtggcttttgagggtcagccaaggagcaggcaagtgagtgaacaatcctcaggaaaagaaggaccattttagcttaacacttccttttttttttttttttttttaagaagaatataggtaaacaggtaatgattcttgattggagataccatttgactcttgatgagagttgtacgaagatggaaatgagggatgattccaggcgttttagggggaaggctgcagataccattctaacccccaagatactgtgttctcaagacctcttagaactaggtgttgtcagggataatttgaggagggcttagtcttcagaacaatcctgcagtcttgacagaaatctaaaatctccaaaaactcctaccctttaaccttaccctagggggaactgatctatgaatattacatgtgtgattatgaaaggtgaagttgagtgagaggagttgaggaacgtggaagacagtgagctctcaccctaacactataagaagcatgatctcaatagaccaataattcacctttttatacatctgtaaataaatggaatgtttttaagaatataattatgtcagatttagcattttcttttatatattaaatatatatatctttccttttctgctttcgaaaagtgactatttttttagaaatctaagaacagaagtttggtgattgaaaggtagaatatataaacctgaaataaagcagttaaaacaattaaa

SEQ ID NO: 320 - DNA, 4179 bp, Homo sapiens
ggcggaggcggtgagcgcgggcggcgcggacggcagcggttggcgggcgggtcctccgctgttgcggccgctgcggcctccttgcccgggcttggggcgccgcgctggggaaagccgggggcccggacacattggcgtgagacctgggagtacgttgtgccaaatcattgccacttgccacatgagtgtaaatgatggcggatgccaagtatgtcctctgccgatgggaaaagcgattatggcctgcgaaggttttggcccgaaccgcgacttcaacaaaaaataagagaagaaaggaatattttctagctgtgcaaatcctctctctagaggaaaaaattaaggtgaaaagcactgaagttgagatcctagagaagtctcaaattgaagccattgcttcctcgttagcctcacagaatgaggttcctgcggcacccctggaagaactggcctacagacggtcgcttcgcgtggctctggacgttctgagcgagggctcgatttggagtcaagaaagctctgcagggacaggtagagctgaccggtctctgcgagggaagcccatggagcatgtctcctcgccctgtgattcgaactcctcatctcttccccgcggagacgtgttgggcagttccagacctcacaggaggaggccatgtgtgcaacaaagcctgtcaagttcgttcacttgtgaaaaggaccccgagtgcaaagtggaccacaagaaggggctcaggaaaagtgaaaacccaagaggcccgttggtcctcccagctggaggtggtgcccaagatgagagtgggtccagaatccaccacaaaaattggactcttgcaagtaagaggggaggaaactcagcgcagaaggctagcttgtgcctgaatggatcttccctttcagaggacgacacggagagagacatggggagcaaaggaggcagctgggcagccccgtccttgccctccggggtcagggaggacgatccctgtgccaacgctgagggacacgaccccggtctgccgttgggcagcctcactgcgcccccagcccctgagccctcggcctgctcagagcctggagaatgccctgcgaaaaagaggccgcgcctggatggcagccaaaggccgcctgccgtgcagctggagcccatggcagcaggggccgcaccatcccccgggccggggccagggcccagagagtctgtgaccccgcgcagcaccgccaggctgggcccgcctccctcccacgcctctgcggatgcaaccagatgtcttccttgcccggattcccagaagctggagaaagagtgccagtcttccgaagagtccatggggtctaattccatgcgttctatcctggaggaagacgaggaagacgaggagccaccaagagtccttttataccacgaaccacgttcgtttgaagtaggaatgctagtctggcataaacataaaaaataccccttctggccagcagtggtcaaaagcgtcaggcagagagataagaaagcaagtgtgctatacatcgaaggacacatgaacccgaaaatgaaaggtttcacagtgtctcttaaaagtttaaagcactttgattgtaaagagaaacagacgcttctgaatcaagccagggaggacttcaaccaggacatcggctggtgtgtctccctcatcaccgactacagggtccggttaggctgcgggtcttttgctggctctttcctggaatattacgcggctgatataagctatcctgtccgaaaatccatccagcaggacgtcttggggaccaagcttcctcaactgagcaaggggagccccgaggagcccgtggtggggtgccccctggggcagaggcagccctgccggaaaatgctccccgaccgctcgcgggccgcccgggaccgggccaaccagaagctggtggagtacattgtgaaggccaagggcgcggagagccacctgcgggccatcctaaagagcaggaagccatctcgctggctgcagaccttcctgagctccagccagtacgtgacctgtgtggagacctacctggaggatgaggggcagctggacctggtggtgaagtacctgcagggcgtctaccaggaggtgggggccaaggtgctccagcgcaccaacggcgaccggatccggttcattctggacgtgcttctgcccgaggccatcatctgtgcgatctctgcggtggacgaggtggactacaagacggctgaggagaagtacatcaaggggccttcgctgagctaccgggaaaaagaaatatttgacaaccagctccttgaagagcggaaccggcgccgtcggtgagggagcagccggctgtgctgtcagcggggcctggcggtggaagcgcctccagtgtgcatgagcgtgtctgaagatggggggctcagggggcacgtttgcgtttggacctgtctgtgcgttctcctgcgtggcagtcctgatttccatgcttctggagaatccatttcgttaacactgaaagccagttctcttttcctggcagtttttttcattttatttttggcattttttacaagataccgttcgggaaaggcttttgaaaggacggaagcgtattcactgtgcgccagtactcctggctgtgctgtggtttctcccgacgtgcacatcgatctcgtatgtgtggcatctgatattaaacgggaggttttaagaagcgtctgccgtgatcatggagcttcggaagcgggaatggttcttccgggtttgctgttttgtctgtttcccccttgtgtggtttccgcctgcgacagttccagaatttgctctcccactcagtgtgctctgcagctgtgaggaaacagccttcgttagaggcgggagcagagacgagccgctgctctgtgtcgtgtttgctgtggccgcagggagaggagcaggacacgcacctttccaggggcctctgtgtcccgcactgtgtgtgagtggaccgcagcgcgcagccacatgccctggctgccatgggccagaccgcctccacctcccccgcccgcctggcctgtcctgagtgcatttccctgcactgtgtcgtcactgcacagccagtcaccgcggtctcagtcatcggcgcggatggctatgctggggtcccagggtggccgcagcagtcagggtcactgtgggagccctggggtggagtgacaaaccgcattgtcctgtgcccgccatggcagaagcgcagcctttgtatggaggcccaaccgcgctcccgtctggagaagcggcttccggggtgtggctgccgggtcggctctggtccacagcacggtgccggggctgcaggttgttgagggctgtgactccgtggggctcagccaggctccagcagggtcagacgtgctgttaagagcaaagccacagacgatgacttgtccattctcagtggatgctccaggctgtgcctacacagcagtgctggtgacatgtccagggttccagggcccggtggcctgggagctgctttctccccactggctgggctgcatctggccctggctggaggccttgctttgaggggctgtgaccctcttcccccaggccctccccagccgacgacagccaccggagaggagatcggaacacgattgtctcagatgcagggcgctgtgcgggacgaagccgcaaggactctcgtatcgggcccttgggactcgggaggtgccagaggcggcggctgctctggacctcggtgttcactgacctttgtttcacttgcctctgctcgactccgagagcaggaaacccggccgtggcctggcagctccgcctcccatgcccgcacgctggggtctgtcttgtctggagcagtggggcacaccccggaggaggcgggggtcagggctgtcggccttggccccctgctggtcgctgtttcggggactcggggcggccagtaccaccgcctgaggcggggctcagcagcgttgcatgtacgggcctcgtactgcctcatggaaaatcctccggagccgccctccattgtgggttcctgagagtaggacacattgccatggttttgtgggaatcacgcgcccctgatggaacttttctgctgttgtgaagtacttttatccatttgcttctctgctgaccttgccaagttgttcgaggtggaattaaacacctcccagac

SEQ ID NO: 321 - DNA, 3483 bp, Homo sapiens
atggagaagtgggaggagctgaacagccatcagccaggagaggagtacgaccccagcaaagcgacctttgtgaaggtggtgccaacccccaacaatggctccacggagctcgtggccctgcaccgcaatgagggcgaagacgggcttgaggtgctgtccttcgaattccagaagatcaagtattcctacgatgccctggagaagaagcagtttctccccgtggcctttcctgtgggaaacgccttctcatactatcagagcaacagaggcttccaggaagactcagagatccgagcagctgagaagaaatttgggagcaacaaggccgagatggtggtgcctgacttctcggagcttttcaaggagagagccacagcccccttctttgtatttcaggtgttctgtgtggggctctggtgcctggatgagtactggtactacagcgtctttacgctatccatgctggtggcgttcgaggcctcgctggtgcagcagcagatgcggaacatgtcggagatccggaagatgggcaacaagccccacatgatccaggtctaccgaagccgcaagtggaggcccattgccagtgatgagatcgtaccaggggacatcgtctccatcggccgctccccacaggagaacctggtgccatgtgacgtgcttctgctgcgaggccgctgcatcgtagacgaggccatgctcacgggggagtccgtgccacagatgaaggagcccatcgaagacctcagcccagaccgggtgctggacctccaggctgattcccggctgcacgtcatcttcgggggcaccaaggtggtgcagcacatccccccacagaaagccaccacgggcctgaagccggttgacagcgggtgcgtggcctacgtcctgcggaccggattcaacacatcccagggcaagctgctgcgcaccatcctcttcggggtcaagagggtgactgcgaacaacctggagaccttcatcttcatcctcttcctcctggtgtttgccatcgctgcagctgcctatgtatggattgaaggtaccaaggaccccagccggaaccgctacaagctgtttctggagtgcaccctgatcctcacctcggtcgtgcctcctgagctgcccatcgagctgtccctggccgtcaacacctccctcatcgccctggccaagctctacatgtactgcacagagcccttccggatcccctttgctggcaaggtcgaggtgtgctgctttgacaagacggggacgttgaccagtgacagcctggtggtgcgcggtgtggccgggctgagagacgggaaggaggtgaccccagtgtccagcatccctgtagaaacacaccgggccctggcctcgtgccactcgctcatgcagctggacgacggcaccctcgtgggtgaccctctagagaaggccatgctgacggccgtggactggacgctgaccaaagatgagaaagtattcccccgaagtattaaaactcaggggctgaaaattcaccagcgctttcattttgccagtgccctgaagcgaatgtccgtgcttgcctcgtatgagaagctgggctccaccgacctctgctacatcgcggccgtgaagggggcccccgaaactctgcactccatgttctcccagtgcccgcccgactaccaccacatccacaccgagatctcccgggaaggagcccgcgtcctggcgctggggtacaaggagctgggacacctcactcaccagcaggcccgggaggtcaagcgggaggccctggagtgcagcctcaagttcgtcggcttcattgtggtctcctgcccgctcaaggctgactccaaggccgtgatccgggagatccagaatgcgtcccaccgggtggtcatgatcacgggagacaacccgctcactgcatgccacgtggcccaggagctgcacttcattgaaaaggcccacacgctgatcctgcagcctccctccgagaaaggccggcagtgcgagtggcgctccattgacggcagcatcgtgctgcccctggcccggggctccccaaaggcactggccctggagtacgcactgtgcctcacaggcgacggcttggcccacctgcaggccaccgacccccagcagctgctccgcctcatcccccatgtgcaggtgttcgcccgtgtggctcccaagcagaaggagtttgtcatcaccagcctgaaggagctgggctacgtgaccctcatgtgtggggatggcaccaacgacgtgggcgccctgaagcatgctgacgtgggtgtggcgctcttggccaatgcccctgagcgggttgtcgagcggcgacggcggccccgggacagcccaaccctgagcaacagtggcatcagagccacctccaggacagccaagcagcggtcggggctccctccctccgaggagcagccaacctcccagagggaccgcctgagccaggtgctgcgagacctcgaggacgagagtacgcccattgtgaaactgggggatgccagcatcgcagcacccttcacctccaagctctcatccatccagtgcatctgccacgtgatcaagcagggccgctgcacgctggtgaccacgctacagatgttcaagatcctggcgctcaatgccctcatcctggcctacagccagagcgtcctctacctggagggagtcaagttcagtgacttccaggccaccctacaggggctgctgctggccggctgcttcctcttcatctcccgttccaagcccctcaagaccctctcccgagaacggcccctgcccaacatcttcaacctgtacaccatcctcaccgtcatgctccagttctttgtgcacttcctgagccttgtctacctgtaccgtgaggcccaggcccggagccccgagaagcaggagcagttcgtggacttgtacaaggagtttgagccaagcctggtcaacagcaccgtctacatcatggccatggccatgcagatggccaccttcgccatcaattacaaaggcccgcccttcatggagagcctgcccgagaacaagcccctggtgtggagtctggcagtttcactcctggccatcattggcctgctcctcggctcctcgcccgacttcaacagccagtttggcctcgtggacatccctgtggagttcaagctggtcattgcccaggtcctgctcctggacttctgcctggcgctcctggccgaccgcgtcctgcagttcttcctggggaccccgaagctgaaagtgccttcctgagatggcagtgctggtacccactgcccaccctggctgccgctgggcgggaaccccaacagggccccgggagggaaccctgcccccaaccccccacagcaaggctgtacagtctcgcccttggaagactgagctgggacccccacagccatccgctggcttggccagcagaaccagccccaagccagcacctttggtaaataaagcagcatctgagattttaaa

SEQ ID NO: 322 - DNA, 2835 bp, Homo sapiens
aagcctcccattacggagcacgagagagtccatgaaggtccccgcgactcccggactggagaaaacggctcttgcgatggggcgaagtccgagctgcggcgggcgttggtccgtgcagggaagtgggaatcgttaggttcgttctggacccgccgccccatggcccaggcgtctcgctcaggtagcctgcctccactcgttatcgtgcccccgctgagggcgcaacccgggggcactggggaggagcagtgggagagaagtcgaacgggcggtcttcgctgggaggttcactgctggccgagcggaacttctggagggacgccgtggtggccgacgccggcggatgtgagcgaggactacgaggctgatgctgcggcctggaggcgggggcccgcaggtggcggcccgatccctcccgcgctgcagcgtctccgggcggtgttgctgcggctgcatcgcgagcgggagcagctcctccaggcccgagactgcgcctaccacctacagtcggctgtgcgactcatgaagaccctgagtcctggctcgccatccggcggccctagccccttgccccagtggtaccgcgacctgcagctgcacccttcccaaggggcggttctgcgaatcggccctggggagactctcgagccgctgctgctagcgcgccccatcggactagccgcccagtgcctggaggctgtcatcgagatgcagcttcgcgctctcggccgggagcccgccagcccgggcctgtcgtcccaactcgccgagctgctctttgcacttcccgcctaccacacactacagagaaaagccttgagccacgtcccaggggccgcacgtcctttccccacgtcccgtgtgctccgcctcttgacgggggagcggggttgccaggtggcaagtcggctggacgaggcgctccaaggatcggcgttgagggaccagctccgcaggcggtgccaagaggagggggatctgctaccagggctgctgggcctggtcgggggcgtggcgggttcagccagctgtggactagggctcggaggggctggggccttgtggtgccaatactggaccctgctgtgggcagcctgtgctcagagtctggacctaaatctgggaccctggagggaccccagggcaacagcgcaacagctgagtcaggcactgggtcaggcatccctgcctcaggagtgtgagaaggagctggcatctttgtgtcacagactacttcatcagtcgcttatctggagctgggaccaaggtttctgccaggccttgggatcagctcttgggggtcagagcagccttcccacatcctctggcactgctgaacttttgcagcagctctttcctcctctcttggatgcccttcgagagcccaggttacgacggattttctgccagcctgcaggtctctgtacccttcagaccaccttgctctggttcctgggcagagctcagcagtacttggcagcatgggacccagcttccttcctgctcctgatccaaaaggacttacctcctctgttgcatgaggcagaagctttgtatagcctggcctcagaggaaagcttagctctggaagtggagcagcagctgggcctggagatccagaagctgactgcacagatccagctcctgcctgaagagtcactaagtgtcttttctcaagaatgtcataaacaagccatgcaaggtttcaagctctacatgccacggggtcggtactggcggcttcgtctctgtcctgaacctcccagtgctcctagtgagtatgctggtttagtggtccgcaccgtactggagcctgtgttgcaaggattgcaagggttgccacctcaagcccaggcccctgcccttggtcaggctctgacggccatcgtgggtgcctggcttgaccacattcttacccatgggattcggttcagcctgcagggagcgctgcagctcaaacaagactttggagtggtcagggagttgctggaagaggagcagtggagcctgtcccctgatctccgccagaccctgctcatgctcagcatcttccagcagctggatggggccctactgtgtctgttgcagcagcccctgcccaagtctcaagtccacaggaggcccccctgttgctgtgcttgtcaggaggtccagaccacgaaattgcccagcagctgcctcaatagcctggagagcttggagcccccgctccagcctggaacatctccagcccagacaggtcagctgcaaagcacactaggaggaaggggacctagcccggagggctacctggtgggaaatcagcaggcctggcttgccctcaggcaacaccagcgaccccgttggcacctgccgtttttttcctgcctgggaaccagtcctgaatcctaaggagcctgggaccaggagccagaaagttaagagctccccatctctagctggaaaatccagacatttggaattgcatattaaggaagcccagaactggaagcttggaggaaagcatactggagaataagctacaaagagcctgggcttaagaatccaagattaggggctgggcgaggtggctcacgcctgtaatccagcactttgggagaccgaggcaggcggatcatgaggtcaggagatcaagaccatcctggctaacacggtgaaaccctgtttccactaaaaatacaaaaaattagccgggcgtggtggcgggtgcctgtagtcccagctactcgggaggctgaggcaggagaatggtgtgaacctgggaggcggagcttgcagtgagctgagatccagccacagcactccagcctgggtgacagagcaagactctgtctc

SEQ ID NO: 323 - DNA, 1354 bp, Homo sapiens
ccagggctggaatggggccgcccggctccccatggcagtgggtgacgctgctgctggggctgctgctccctcctgccgcccccttctggctcctcaatgtgctcttccccccgcacaccacgcccaaggctgagctcagtaaccacacacggcccgtcatcctcgtgcccggctgcctggggaatcagctagaagccaagctggacaaaccagatgtggtgaactggatgtgctaccgcaagacagaggacttcttcaccatctggctggatctcaacatgttcctaccccttggggtagactgctggatcgataacaccagggttgtctacaaccggagctctgggctcgtgtccaacgcccctggtgtccagatccgcgtccctggctttggcaagacctactctgtggagtacctggacagcagcaagctggcagggtacctgcacacactggtgcagaacctggtcaacaatggctacgtgcgggacgagactgtgcgcgccgccccctatgactggcggctggagcccggccagcaggaggagtactaccgcaagctcgcagggctggtggaggagatgcacgctgcctatgggaagcctgtcttcctcattggccacagcctcggctgtctacacttgctctatttcctgctgcgccagccccaggcctggaaggaccgctttattgatggcttcatctctcttggggctccctggggtggctccatcaagcccatgctggtcttggcctcaggtgacaaccagggcatccccatcatgtccagcatcaagctgaaagaggagcagcgcataaccaccacctccccctggatgtttccctctcgcatggcgtggcctgaggaccacgtgttcatttccacacccagcttcaactacacaggccgtgacttccaacgcttctttgcagacctgcactttgaggaaggctggtacatgtggctgcagtcacgtgacctcctggcaggactcccagcacctggtgtggaagtatactgtctttacggcgtgggcctgcccacgccccgcacctacatctacgaccacggcttcccctacacggaccctgtgggtgtgctctatgaggatggtgatgacacggtggcgacccgcagcaccgagctctgtggcctgtggcagggccgccagccacagcctgtgcacctgctgcccctgcacgggatacagcatctcaacatggtcttcagcaacctgaccctggagcacatcaatgccatcctgctgggtgcctaccgccagggtccccctgcatccccgactgccagcccagagcccccgcctcctgaataaagaccttcctttgctaccgt

SEQ ID NO: 324 - DNA, 1603 bp, Homo sapiens
gtcacggcggatcttattgtctacgatgtgacgatccgtggagaaagtagcagatgggcagattttcatttggggagaatgagggagaaaagaacgggcattccgagccaagagcactgcatgagcaaggagttgggaggttgcttacttgttgaacatatttgttgcgtatttgcatatttgctaaacaggtagtgttaggagctaatccatgaaaggttttcgtaacaccccagggcctgtaaggtttggtgtttccctttcaagatgccactttcagactttattctggctctgaaggacaatccctactttggggctggatttgggctggtgggtgtgggcacagccctggccctggcccggaagggtgtccaactgggcctggtggcattccggcgccattacatgatcacactggaagtccctgctcgagacaggagctatgcctggttgcttagctggctcacccgccacagtacccgtactcagcacctcagtgtcgagacttcgtaccttcagcatgagagtggccgcatttccactaagtttgaatttgtccccagccctggaaaccattttatctggtatcgggggaaatggattcgggtagaacgaagtcgagagatgcagatgatagacttgcagacggggactccttgggaatctgtcaccttcacggccctgggcactgaccgaaaggttttcttcaacatcctggaggaagctcgagagctagccttgcagcaggaggaagggaagaccgtgatgtacacagctgtgggctctgaatggcgtccctttggctatccacgccgccggcgaccactgaattctgtggttctacaacagggtctggctgaccgaattgtcagagacgtccaggaattcatcgataaccccaagtggtacactgacagaggcattccttacagacgtggctacctgctttatgggccccctggttgcggaaagagcagttttatcacagccctggctggggaactggagcacagcatctgcctgctgagcctcacggactccagcctctctgatgaccgactcaaccacctgctgagcgtggccccgcagcagagcctggtactcctggaggatgtggatgctgcttttctcagtcgagacttggctgtggagaacccagtaaagtaccaaggcctaggtcgcctcaccttcagtggactgctcaatgccttggatggtgtggcttccaccgaggcccgcatcgtgttcatgaccaccaaccacgttgacaggctggaccctgccctgatacgcccggggcgagtggacctgaaggagtacgtgggctactgctcacactggcagctgacccagatgttccagaggttctatccagggcaggcaccttccttagctgagaactttgcagaacatgtccttcgagctacaaaccagatcagtcctgcccaggtgcagggctacttcatgctgtataaaaatgaccctgtaggggcaattcacaatgctgagtctctgaggaggtgatcaggctgggctcagctcagctctcctcctctagctcaataaacatctgccacactaaaaaaaaaaaaaaaaaaaa

SEQ ID NO: 325 - DNA, 3773 bp, Homo sapiens
ccgtcccggggcggacgggcgcgggcgggaggatggagctgaactccctgctgatcctgctggaggcggccgagtacctggagcgcagggatcgagaggccgagcacggctacgcctcggtgctgcccttcgacggcgacttcgccagggagaaaacaaaggcggccggcctggtgcgcaaggccccgaacaacaggtcttcacacaacgagctagaaaagcacagacgagccaaactcaggctgtaccttgagcagctcaagcaactggtgcccctgggccccgacagcacccgccacaccacgctgagcctcctgaagcgggccaaggtgcacatcaagaaactggaggagcaggaccgccgggcactgagcatcaaggagcagctgcagcaggagcatcgtttcctgaagcggcgcctggagcagctgtcggtgcagagcgtggagcgcgtgcgcacagatagcacgggctctgctgtctccacggacgactcagagcaagaagtggacatagagggcatggagtttggccctggtgagctggacagtgttggcagcagcagtgacgcggacgaccactacagcctgcagagtggcaccggcggcgacagtggcttcgggccccactgccggcggctgggccgccccgccctctcgtaggcccgtgccctctgctccttggcctgcctgcccgccagccacgcgtgtcagccctccagttctccttcagttgacgccagcctctccacaggcccactgctgtgccattctggaagctccagctgctgctgggctgcctggcactgcccgcttgccggtcagggcctgccgagctgcctgccccttccagctgggcagagtcccctgcaaggaggcagggcccagcttccacatccggagccctggtcagcatagccgcccacggtctgttctcagattcctaatcattccagaagtattaaacgtcattgctgcaaacctcggcaggtgccgtgtgaggggcttaatgaccaccacagggagctcagaccccaaccctggatcccaggagaaaggagtggaccgaggaaggaaggaaggcaaggctgtctgtccatccgtccgtctgtccacctacctgtcagtccacataggctcctggcgtggacaaggggtctgtgaagggcgggaactgggtgagcacctggggcaggtgggtggttaaggtccttcccacttcgcaggtgtcagaacctagggctgggctctcggggccaggcaggccagcccagcccacgccgagctgggcagcgtctgctctggtaggactgtcagacgcacacgcgcacgcacctagacacacccactcatgtacatgctcacacatgcagacacacctgggcgtcccgaggtcacatgttctggggatgatggccttcaggggtcatctggcaaacagcccctgggctgtgcctggatccccctctagctcctgctcacccacgcccacccagtagtcctgcctgtctgcacaggagaggggcttctcttcctggctggggctggggtgaactggaggctggttaagttgcagccgctgggtcctcgggggcttactcatctcccttttttaaacaaaaagcaaaaaagtaaaatgctgcactgcccagcagcccggttagggctcctggagccaccttaggaaagggcttctcatgagctctgctgcggcagcttcagctggcagagaggctttcccagaaaaaaaaaaaaaaccatttttaaaaagaagaaagcctaaagactctcggcctagggacgtccgtgtgtgccgcctctgtttcctgtaccagatttttgtattctattttcctagctgttgttgcgtccttgtttgctgaggggtgggagccacccagcgtctcagggacctgtccctccgtcacgtcgtcaaagtgtgccttgtgtcttgtgtcaggccttgcccttcccaccagcatgtccctcgtggctcagggtgccccaggcctgcccagctagtgctgtcctcccatctcctgtgggcagcccctcccggcagccagggcttcctggaggcgatgcagccaggcccctgtgggtggcacggaggggctgtgacctggtccccagtgttgccctccccagtggctggcaggggcctgcttgctcactagagagatggattctcacctgtcacctgactcgagccccctgcttcctggcctaggcgagggttccaggtttcagacactggcagccaatgaagactgtgctcgctgggtggtgcaggcctggcaccaggaggcttgcacccgcctttccttcctgacgtcctctgtccttggggctggcccatagcagtgcctgccgtgcctctggtacatctgtagccaattcccatatcatggggaaaattcgtgtctattttcagtcgtacgcatagacgccccaggatggggggcccactgtggcggaagggggtccctggaaacaactctggcacagaacctgccctgcaggctgtagggggcatggtgcctggagctgaggggcatccgaacgcgttgcgggtggttgtgaggaggcctgtctgcatctccttccggccccactggggtccaggggtgcccagaaaggagcttcccctgcctgcctgagtctgtccccccaggcttcatttcaaacaccgtggcacctccgagcaaggcgggccgtgtgtaaaagcttgcttccccagccagcactgcagggccctgaggtggtcgtgtccctgccctcaattcttgaagcaccagctccctgccccaccctccagtgcctgaggcagctaggggcttctgctctcatctctgaccagcagaatccacccggtgaccagtggtggcccctcagcccaccctcccggcagctcagcctgtggctcttgaggccgtggttcccacgtggactgggaggcagtctcagccacccggggtgctgttcagctgcccctccctgccatcagcaggtgggtgaggggttgcccactgggtgggggcccgtgctaggagtcaccacatgctccaacctcccactgctccctgtcaggggcccaggctgccatcactggaggctgcagggaccaagaggccatcaccgtgtctatagagagcagacagaagcagaacagagcccggggctcctgagcctctgcgtgtgccctcccagcccacaccagtgctctcggccactgagcacccagactcaggcttgggttccccagccttattggaaggcagctcccgcataccaggataacccccgcaaaccacatagcagacccccgccatcctcgcagagtgggagaggctgcagcaaggctttgcctctgcagaccccatcttagtggcacggtgcttgggcctgtgtccccgggtggtggaaccctgtaccggtctgtggccctagggtccctgctctgtctgccccggcccgtgctgtccgctgggtgaggcaggctcccccgtgccctgcctccctctgtcagggaacctgggaccccctccccactgcctgcacagaggaccctgaccctcggccagcagggtggccccaggtccatgttgggcactagggcaggttccgtgccagagtcgggggccacacgagggcctggtgccggtgaggggggcgtgcgctagagggggaaaggggcccccggccacctgtccaccgtgtgggccgtgctgtgtccttatgtcattgtaatataaatacagatttttatatctc

SEQ ID NO: 326 - DNA, 1209 bp, Homo sapiens
acactttcatggaggcggtgaaggcggaagcgtgggagggggccgcggtggcccaggacctgctggctctggggtatggaggtgtcccgggggcggcgtcgcggggcgcctcatgcccagacttcagggggctgtgcgtgcggctggcggcggagctggcgacgctgggcgccctcgagcagcagcgagaggcgggcgcggaggtgctgagcgccggcgacggccctggcgcggaggaggactttctgcggcagctcggcagcctgctgcgggagctgcactgcccggatcgcgcgctctgcggcggggatggcgcggctgcgcttcgggaacccggtgccggactgcgcctgctgcgctttctctgctcagagctccaagccacccgcctcctgtgcctccgctctctgctggatccgagtcctaggccaccccttggtgaaggggtagtggagggagccggcatggtccaagaactggaccttaccctccaagccctggggctgcccagacctgcaccagggacccccgccagccagctgctgcaggagttgcatgctaagatctcagagctgcagccttctctgcccccagggtccctgcagcccctcctcagctgctcgctagatgcacccagatgggaagcgttggagtctctgtcccaaagcctcagagatcagtaccgctgccgccgctgcctcctcctcaagcgccttgacctcactacatctgctttccactggagtgaccgggcagaggcccaaggagaggccatgagggcagtgctgatcccaattcgagaggttctgaccccagaatcggacatctccattgcacacgttctggctgcccgagccgacctgtcgtgcttatgggcaacgttccagaccgggggggccgcccaaatgagctggagcctcccatgcccacctggaggagccgaagagaggatggaggcccccagtgttggggtcgcaagaagaagaagaagaagtaaagggggactggtggtcgggggcggggggtcctccatgagatgctaatgctatcggtaatctctggggagtccgtttaaggctttccttggtatttggcacccaagccccccatctcctattcctgagtccccaaatgccctgctcccattcacgtcaataccaagaaccatgttctccagagaataaatttaatttatgacagcaaaaaaac

SEQ ID NO: 327 - DNA, 1908 bp, Homo sapiens
agcgccgccgccgccgctgctgcagcagcagctgctctgcagagtggtggccggggccagggccggggtgccctccctcccaccttctcccgccatgagccagggaagtccgggggactgggcccccctagatcccacccccggacccccagcatcccccaaccccttcgtgcatgagttacatctctctcgcctccagagggttaagttctgcctcctgggggcattgctggcccccatccgagtgcttctggcctttatcgtcctctttctcctctggccctttgcctggcttcaagtggccggtcttagtgaggagcagcttcaggagccaattacaggatggaggaagactgtgtgccacaacggggtgctaggcctgagccgcctgctgtttttcctgctgggcttcctccggattcgcgttcgtggccagcgagcctctcgccttcaagcccctgtccttgttgctgccccacactccactttctttgaccccattgttctgctgccctgtgacctgcccaaagttgtgtcccgagctgagaacctttccgttcctgtcattggagcccttcttcgattcaaccaagccatcctggtatcccggcatgacccggcttctcgacgcagagtggtggaggaggtccgaaggcgggccacctcaggaggcaagtggccgcaggtgctattctttcctgagggcacctgttccaacaagaaggctttgcttaagttcaaaccaggagccttcatcgcaggggtgcctgtgcagcctgtcctcatccgctaccccaacagtctggacaccaccagctgggcatggaggggtcctggagtactcaaagtcctctggctcacagcctctcagccctgcagcattgtggatgtggagttccttcctgtgtatcaccccagccctgaggagagcagggaccccaccctctatgccaacaatgttcagagggtcatggcacaggctctgggcattccagccaccgaatgtgagtttgtagggagcttacctgtgattgtggtgggccggctgaaggtggcgttggaaccacagctctgggaactgggaaaagtgcttcggaaggctgggctgtccgctggctatgtggacgctggggcagagccaggccggagtcgaatgatcagccaggaagagtttgccaggcagctacagctctctgatcctcagacggtggctggtgcctttggctacttccagcaggataccaagggtttggtggacttccgagatgtggcccttgcactagcagctctggatgggggcaggagcctggaagagctaactcgtctggcctttgagctctttgctgaagagcaagcagagggtcccaaccgcctgctgtacaaagacggcttcagcaccatcctgcacctgctgctgggttcaccccaccctgctgccacagctttgcatgctgagctgtgccaggcaggatccagccaaggcctctccctctgtcagttccagaacttctccctccatgacccactctatgggaaactcttcagcacctacctgcgccccccacacacctctcgaggcacctcccagacaccaaatgcctcatccccaggcaaccccactgctctggccaatgggactgtgcaagcacccaagcagaagggagactgagtgcctcagcctctcaccccctcctcctcagggcagcgctaggggcctcccctatgcctcagccccatctctgctcctgtttgaattttgttattgttgtttggttgttgtttttttaagttgattttaattttttgtttggttgatttttttgtaaaaaactattttatatataaatataaatctatatctatatctattaaaaaaaatgaagtccagtcatattgatgttaccatta

SEQ ID NO: 328 - DNA, 649 bp, Homo sapiens
atgtgggacgtggatgcagacgcaggcggaggcgccaactgcggggatggctagggtgatcacagctgccccgggggcgcggacaccccggcagctccggccagcggagctcccccaccgcacgtgtcaggtcctagcagaaacgcagcgtctgtggccaagggccaggaatgcggccgcacatattcaccctcagcgtgcctttcccgacccccttagaggtggaaattgcccatgggtccctggctccagatgccgaaccccaccaaagggtggttgggaaggatctcacagtgagcggcaggatcctggccgtccgctggaaagctgaagactgttgcctgctccgaatttcccttatcaactttctcgaccatctttctctggtggtgcggaccctgcagcactttgggcccccagtttcccgctaagcctggcctgggaaaatggggcgaggtctaaccttgcgtctcctcctaggcagtgcatccatcctccctagggcagggaattcccacagttgctactttcccgggagggcctcatggtcggcctgtactgcctttgtgtgctcaggggtcccttgttttctctggttcttaaatgtttgttaccacagaaaataaaactgagctactattaaaaagaa

SEQ ID NO: 329 - DNA, 2863 bp, Homo sapiens
gcgtttgcgcttgagcgccgataatttggtggcggcgtccggagggtgctggtttgttctcggtgaacggcgcgcggggtctctcctgagtgcgagctacgggaccttcgccatgccggggatggtactcttcggccggcgctgggccatcgccagcgacgacttggtcttcccagggttcttcgagctggtcgtgcgagtgctgtggtggattggcattctgacgttgtatctcatgcacagaggaaagctggactgtgctggtggagccttgctcagcagttacttgatcgtcctcatgattctcctggcagttgtcatatgtactgtgtcagccatcatgtgtgtcagcatgagaggaacgatttgtaaccctggaccgcggaagtctatgtctaagctgctttacatccgcctggcgctgttttttccagagatggtctgggcctctctgggggctgcctgggtggcagatggtgttcagtgcgacaggacagttgtaaacggcatcatcgcaaccgtcgtggtcagttggatcatcatcgctgccacagtggtttccattatcattgtctttgaccctcttggggggaaaatggctccatattcctctgccggccccagccacctggatagtcatgattcaagccagttacttaatggcctcaagacagcagctacaagcgtgtgggaaaccagaatcaagctcttgtgctgttgcattgggaaagacgaccatactcgggttgctttttcgagtacggcagagcttttctcaacctacttttcagacacagatctggtgcccagcgacattgcggcgggcctcgccctgcttcatcagcaacaggacaatatcaggaacaaccaagagcctgcccaggtggtctgccatgccccagggagctcccaggaagctgatctggatgcagaattagaaaactgccatcattacatgcagtttgcagcagcggcctatgggtggcccctctacatctacagaaaccccctcacggggctgtgcaggattggtggtgactgctgcagaagcagaaccacagactatgacttggtcggaggcgatcagctcaactgtcacttcggctccatcctgcacaccacagggctgcagtacagggacttcatccacgtcagcttccatgacaaggtttacgagctgccgtttttagtggctctggatcacaggaaagagtctgttgtggtcgctgtgagggggaccatgtctctgcaggatgtccttacggacctgtcagcggagagtgaggtgctggacgtggagtgtgaggtgcaggaccgcctggcacacaagggtatttctcaagctgccagatacgtttaccaacgactcatcaacgacgggattttgagccaagccttcagcattgctcctgagtaccggctggtcatagtgggccacagcctcgggggcggggcggccgccctgctggccaccatgctcagagccgcctacccgcaggtcaggtgctacgccttctccccaccccgggggctgtggagcaaagctctgcaggaatattctcagagcttcatcgtgtcactcgtcctggggaaggatgtgattcccaggctcagtgtgaccaacttggaagatctgaagagaagaatcttgcgagtggtcgcgcactgcaataaacccaagtacaagatcttgctgcacggtttgtggtacgaactgtttggaggaaaccccaacaacttgcccacggagctggacgggggcgaccaggaagtcctgacacagcctcttctgggggagcagagcctactgacgcgctggtccccggcctacagcttctccagcgactctccactggactcttctcccaagtacccccctctctaccctcccggcaggatcatccacctgcaggaggagggcgcctcggggcggtttggctgctgctctgctgctcactatagcgccaagtggtcacacgaagcggaattcagcaaaatactcataggtccgaagatgctcaccgaccacatgccagacatcctgatgcgggccttggacagcgtggtctccgacagagcggcctgcgtctcctgtccagcacaaggggtctccagtgtggacgtggcctgaccagggccactggaaactgtcccaggaacgatggactcacgcttttgtccttaaactgacttaccatccgaggagttcccatgacgccaaaacagcgaatgtccatcaacaggaatcggatgggaacagaattccatggtctcaatgacttaagtttatgggaagtcattgtggccataatggtagcagaagtagtgagcacgctcaggtgataggacgactcctgagacccagcgaccgtggagacagcctcgggaagccctggcccgtggatggatcccttggctgtctgaggactgctccagaagtgcgggaatccagggcccacccagaagaccgtgaacagttccttagcctcccaccccccaaggcagctcttttcatccaactcagtttacaggcgtggtttgtttttcaaactgggcttcctggatgtacaaatggaactgtggtgagggtgcgggctggggttttctcctgggcgtcaccaagggcagccctgggctctggctggggatgaagacgaaacccgatcgggaaagtaagtggagcccccggccccgccgagccacagccccccaactgcctattcccactgcccagttgtttgtccacatcaggagttgctgattgaattcttgctactcttctggctctggggtcggccagtggattcaggagttgaaacaataaagcgcgcgtcaccataaaaaaaaaaaaaaaaaaaaaaaa

SEQ ID NO: 330 - DNA, 8307 bp, Homo sapiens
ggttctctgtgcgagtgaactccactgagcttttccacgtggatcggcatgtgtggacgacgctgaaggggcgggatgggcttcagggcccaagggagcgagccttccacacagccagtgttctgggcaattacatggtggtctatgggggcaatgtgcacacccattaccaggaggaaaagtgctacgaagatggcatcttcttctaccaccttggctgccatcaatgggtgtcaggagctgagcttgccccgccaggaacccctgagggccgagcagcgcctcccagtggtcggtactcacatgtagctgcggtgcttggtggcagcgtcctgttggtggctggggggtacagcggccggccccgtggggacttgatggcgtacaaggtgcccccctttgtgttccaggcacctgcccctgactaccacttggactactgctccatgtacacagaccacagcgtctgctcccgggacccggaatgcagttggtgccaaggagcctgccaagctgcaccccctcctgggacccccttgggggcttgtccagccgccagctgcctgggcctgggccgcctcctgggtgactgccaggcctgcctggccttcagcagccccacagcccctccacggggacctggcaccctgggctggtgcgtgcacaatgagagctgcctccctaggcctgagcaggcccgctgccgaggggagcagatctcaggcactgtgggctggtgggggcctgcgcctgtcttcgtcacgtccctggaggcctgcgtcacccagagcttcctgcctggcctgcacttgctcacctttcagcagccgcccaatacctcccagcctgacaaggtctcaattgtccgcagcacgaccatcaccctaacacccagcgcagagacagatgtgtccctggtctaccgtggcttcatctacccaatgctgcctggagggccaggtggaccaggggctgaggacgtggccgtgtggacgcgggcccagcgcctacacgtcctggcccggatggcccgtggccctgacacggagaacatggaggaggtggggcgctgggtggctcatcaggagaaggagacgcggcggctgcagcgccctgggtctgctcgcctcttccctctgcctgggcgggaccacaagtatgcagtagagatccagggccagctcaatggctcggcaggccctgggcacagcgagctaactctgctgtgggatcggactggtgtgccaggaggcagcgagatctccttcttcttcctggagccctaccgctcgtcgtcctgcacctcctattcttcctgcctgggctgcttggcagaccagggctgtggctggtgcctgaccagtgccacctgccacctgcgccagggcggagcccattgcggggatgacggggctggtgggtccctgctggtgctggtgcctaccctctgcccactctgcgaggagcatcgggactgccacgcctgcacccaggaccccttctgtgagtggcatcagagcaccagccgcaaaggggacgcggcatgcagccggcggggccggggtcggggtgccctgaagagtccagaggagtgtcccccgctctgcagccagcgactgacctgtgaggactgcctggccaactctagccagtgcgcctggtgccagtccacccacacctgcttcctgtttgctgcctacttggcccggtacccacacgggggctgtcgaggctgggacgacagtgtacactcggagccacggtgccggagctgcgatggcttcctgacctgccatgagtgtctgcagagccacgagtgtggctggtgtggcaatgaggacaaccccacactgggacggtgcctacagggggacttctcagggcccctcggtgggggtaactgctccctgtgggtgggggagggcctggggcttcccgtggccctccctgcccgctgggcatacgcccgctgtcctgacgtggatgagtgtcgcctgggcctggcccggtgccacccgcgggcgacctgcctgaacacgcccctcagctacgagtgtcactgccagcggggctaccagggtgatggcatctcacactgcaaccgcacgtgcttggaggactgtggccatggtgtgtgcagtggccccccggactttacctgcgtgtgtgacctaggctggacatcagacctgccccctcccacacccgccccgggtccgccagccccccgctgctcccgggactgtggctgcagcttccacagccactgccgcaagcggggccctggcttctgcgacgagtgccaggactggacatggggggagcactgcgaacgatgccggcccggcagcttcggcaacgccacaggctctaggggctgccggccctgccagtgcaacgggcacggggacccacgccgtggccactgcgacaacctcagtgggctctgcttctgccaggaccacaccgagggtgcccactgccagctctgctccccaggctattatggggatccccgggccggtggttcctgctttcgggagtgtgggggtcgcgccctcctcaccaacgtgtcctcagtggcactgggctcacgccgggtcggggggctgctgcctccaggtggcggggctgcaagagccgggcctggcctgtcctactgtgtgtgggttgtctcggccactgaggagctacagccctgtgctcccgggaccctctgtcccccactcaccctcaccttctcccccgacagcagcaccccctgcacgctgagctacgtcctggcgtttgatggattcccacgcttcctggacactggtgttgtccagtcggaccgcagcctcatagctgccttctgcggccagcgacgggacaggcccctcactgttcaggccctgtctgggctgctcgtgctgcactgggaggccaatggctcctcatcctggggcttcaatgcttcggtgggctctgcccgctgtgggtcagggggccccgggagctgtcccgtcccccaggaatgcgtgccccaggacggtgctgcaggtgcggggctctgccgatgtcctcagggctgggctggcccacactgccgcatggctctgtgtcctgagaactgcaatgcccacactggggcaggaacttgtaaccagagcctgggtgtgtgcatctgtgccgagggcttcgggggccccgactgcgccaccaagctggatggcgggcagctggtctgggagaccctcatggacagccgcctctcagccgacactgccagccgcttcctgcaccgcctgggccacaccatggtggatggacccgatgccaccttgtggatgtttgggggcctgggcctgccccaggggctgctgggaaacctgtacaggtactcagtgagtgagcggcggtggacacagatgctggcgggagccgaggacgggggcccaggcccatcgccccgctccttccatgcagccgcatatgtgcccgctggccgtggtgccatgtatctgctggggggacttaccgctggaggcgtcacccgtgatttctgggtcctcaacctcaccaccctgcaatggcggcaggagaaggccccccagaccgtggagctgccagccgttgctggtcacacccttactgcccgccgaggcctgtctctgctcctggtgggcggttactccccggaaaatggcttcaaccagcagctgctggagtaccagctggcaaccggcacctgggtgtcaggagcccagagtgggacaccccccacaggtctctatggtcactctgctgtctaccacgaggccaccgactccctctacgtgtttggggggttccgattccatgtggagctggcggccccatcccccgagctctactccctgcactgtcctgaccgcacctggagtctgctggccccttctcagggggcaaagcgagatcgtatgaggaatgtgcgtggctcatctcggggtctgggccaagttcctggggagcagcctgggtcatgggggttccgggaagtcaggaagaagatggctctgtgggctgctcttgctggtacaggaggtttcctggaggaaatctcacctcacctgaaggagccccgcccccggcttttccacgcctcagccctgttaggggacaccatggtggttcttggggggcgctcggaccctgacgagttcagcagcgacgttctgctctaccaggtcaactgcaatgcctggcttctgcccgacctcacccgctcggcctctgtggggcccccaatggaggagtctgtggcccatgctgtggcagcagtcgggagccgcctgtatatctctgggggtttcgggggagtggccctgggccgcctgctggcactgaccctgccccctgacccctgccgcctgctgtcctcacctgaagcttgtaaccagtctggggcctgcacctggtgccatggggcctgcttgtccggggatcaggcccacaggctgggctgcgggggctccccctgctccccaatgcctcgctccccggaggaatgtcgacgtctccggacctgcagtgagtgcctggcccgccatcctcggaccctgcaacctggagatggagaggcgtccaccccccgctgtaagtggtgtaccaactgccccgaaggtgcttgcattggacgcaatgggtcctgcacctctgagaatgactgtcggatcaaccagcgagaggtcttctgggcagggaactgctccgaggctgcgtgcggggctgctgactgcgagcagtgcacgcgggagggcaagtgcatgtggacgcggcagttcaagaggacaggggagacccgccgcatcctctccgtgcagcccacctatgactggacgtgcttcagccactctctgctgaatgtgtcccccatgccggtggaatcatcacccccactgccctgccccaccccttgtcacctcctacccaactgtacctcctgcctggactctaagggagcagatgggggctggcagcactgtgtttggagcagcagcctgcagcagtgtctgagcccttcctacctgcccctgcgatgtatggccggaggctgtgggcggctgctccggggacctgagagctgctccctgggctgtgctcaggcaactcagtgcgccttgtgcctgcggcgcccccattgcggctggtgtgcctgggggggccaggatgggggtggccgctgcatggagggtggactcagcggcccccgtgatgggctgacatgtgggcgtccgggggcctcctgggccttcctgtcctgcccccctgaggacgagtgtgcaaacgggcaccacgactgcaacgagacgcagaattgccacgaccagccccacggctatgagtgcagctgcaagaccggctataccatggacaacatgacagggctgtgccgccctgtgtgcgcccagggctgcgtgaacggctcatgtgtggagcccgaccactgccgctgccactttggctttgtgggccgcaactgctccacggaatgccgctgcaaccgccacagtgaatgcgctggtgttggggcgcgtgaccactgcttgctctgccgcaaccacaccaagggcagccactgtgagcagtgcctcccgctgtttgtgggttcagctgtcggaggcgggacctgccggccctgccacgccttttgtcgtggaaatagccacatctgcatctccaggaaggagttacaaatgtccaagggagagccaaagaagtactcactggacccagaggagattgaaaactgggtgacagagggtcctagtgaagacgaggccgtgtgcgtgaactgccagaataacagctatggggagaaatgcgagagctgcctgcagggctacttcctcctggacgggaagtgcaccaaatgccagtgtaatggccacgcggacacatgtaacgagcaggatgggacgggctgtccatgtcagaataacacagagacgggcacatgccagggcagctcccccagtgaccgtcgagactgctacaagtaccagtgcgccaagtgccgggaatcatttcacgggagtccgctgggcggccagcagtgctaccgcctcatctcggtggagcaggagtgctgcctggaccccacgtcccagaccaactgcttccatgagcccaaacgccgggcgctaggccccggccgcactgtcctctttggcgtgcagcccaaattcaccaacgtggacatccgcctgacgctggacgtgaccttcggggccgtggacctctatgtctccacctcctatgacaccttcgtggtccgtgtggcccctgacactggcgtccatactgtacacatccagccacccccagccccaccacctccaccaccccctgcagatggtgggccccggggggctggggatccaggaggagcaggggccagcagtgggccgggcgccccagcagagccacgggtacgggaggtatggccgcggggcctgattacctacgtgacggtgacggagccgtcggcagtgctggtggtccgcggcgtgcgggaccggctggtcatcacctacccacacgagcaccatgccctcaagtcgagccgcttctacctgctgctgctgggcgtgggagacccaagtgggcccggcgccaacggctcagccgactcgcagggcctgctcttcttccggcaggaccaggcccacattgacctgtttgtcttcttctccgtcttcttctcctgcttcttcctcttcctctcactctgtgtgctcctctggaaggccaagcaggctctggaccagcggcaggagcagcgccggcacttgcaggagatgaccaagatggccagccgccccttcgccaaggtcaccgtctgcttcccacctgaccctactgccccggcctccgcctggaagccggctgggctcccacctcccgccttccgccgctctgagcccttcctggcacccctgctgctgacaggggccggtgggccctggggacccatgggagggggctgctgcccaccagccatccccgccaccactgctgggctgcgagctgggcccatcactctcgagcccacagaagatggcatggctggcgtggccacactgctgctccagctgcctggcgggccccatgcacccaacggcgcctgcctggggtcagccctcgtcacactgcggcacaggctgcacgagtactgtgggggtggtgggggtgctgggggcagtgggcatgggactggtgcgggccggaagggactgttgagccaggacaacctcaccagcatgtccctctgacatgcccagggttctcatccacagcagctgggtcacctgatagggccgccctggacttggggtccctccacctgggggcccctggacactgtctacttggagaccactggcccccttcccccagggttgcccagatggggcctcctttgttctgcattcagcagctatttatcgagtacctactctgtcaggcactgtcataggcgtggggcaaagcaggaaccaagagacgaggttccctgatctcatgggacttaggttctggtgaagggagacaatcagtgcacatgcacacaccccacacgcatacacacatgaacacatgcacatgtgcacacacaagtaagatggcttcagagagggagaagcactgtgaggcctccagaggatgtggcagtgagggacgatggggtgaagtcagctgggcattcaaagaagctagactgagaacgcctgagaagaaccagctacgggaagagctttgggaagcaaaggcagaggccctggggtgggagcaggcttgttttattggaaggaccagaaaactggtaagtgtgacccagatcaagtgtgaggagatgaggctggggatagtcaggggctggatcacccagggccttgtgggccccacatagggttttgggttttattctcagggcaatgggaagctgttggatggtttgatgtaaggggagtgacaggatccgatgtacctatttaagaatttaagagggtcgggtgcggtggctcatgcctataatcctagcactttgagaggccaaggtgggctgatcacaaggtcaagagttcgtgaccagcctggccaatatggtgaaaccccatgtctactaaaaatacaaaaattagctgggcatggtggcacacacttgtagtccgagctactcgggaggctgaggcagaagaatcgcttgaacccaggaggcggaggttgcagtgagctcagattgcgtcactgcactccaacctgggtgacagagcgagactccacctc

SEQ ID NO: 331 - DNA, 6642 bp, Homo sapiens
agagactgttggccatttctgaaaccaattaaaaagatggggtcttcagaactactagcagataatttggggggacttcatattcagaagtctatataaaggattcctcatgtccataacatgttggatgaggctctgcagctcacccccactctcagagtggtcagtctccattaattggaccccgtgatttccaatctctgctgtgttggacgtcatgagcattgcaatccctctgggagtcaccacatcagatacatcctactcagatatggctgctggatcagaccctgaatctgtggaggctagtccagcagttaatgagaagagcgtgtattccactcataattatgggaccactcagaggcatgggtgtcgaggactgccttatgctacgatcatccctcgttctgacctgaatggcctgccgtcgcctgtagaggaacgctgtggagacagcccgaactctgaaggagaaactgtacctacctggtgtccttgtggtctttctcaggatggcttccttctcaactgtgacaagtgcaggggaatgagcagggggaaggttattagacttcatcggcggaagcaggacaacatatcaggtggggatagcagtgcaacagaaagctgggatgaggagctttctccttccactgtgttgtatacagcaacacagcacacacctacaagcatcaccttaactgttagaagaaccaaacccaagaagcggaaaaagagtccagaaaagggtcgtgcagcaccaaagacgaagaaaatcaaggcatttcgagagggatcccggaagtccttgcggatgaagaattctccctctgaagcacagaatttagatgagaatacaactgagggctgggaaaatcggataagactatggactgaccagtatgaagaagctttcactaatcagtacagtgcagatgtacagaacgcgcttgaacaacacctacattctagcaaggaatttgtgggcaaacctactattttagacactattaataagactgaattggcctgtaataacacagttattggttcccaaatgcagttacagctgggaagagtcactcgtgttcaaaagcaccggaagatcctgagggctgcaagagatttggctttggacactcttataatagagtatcgtgggaaagtcatgttacgacagcaatttgaggtcaatgggcatttcttcaaaaaaccatacccctttgtgctcttctactcaaaattcaatggtgtagagatgtgtgtggatgcccgtactttcggtaatgatgctcggttcatcagaagatcatgtacaccaaatgcagaggtgcgacacatgattgcagatgggatgattcacctgtgcatctatgctgtgtctgccatcaccaaggatgctgaggtcaccatagcatttgattatgagtatagtaactgtaattataaagtggactgtgcctgtcacaagggaaaccggaattgtcctatacaaaaaaggaatcctaatgctacagaactgccactcctaccacctcctccaagcctacccaccattggagcagagactagacgtagaaaagcacgacggaaagagctagagatggagcagcagaatgaggcttcagaggagaataatgaccagcaatcacaagaagttccagaaaaagtaactgtatccagtgatcatgaggaagtagacaatccagaagaaaaaccagaagaagagaaagaagaggttatagatgaccaggagaacctagctcatagcaggaggaccagggaagatagaaaggtagaagccatcatgcatgcttttgaaaacttagagaaaagaaagaagcggcgggatcagcccttggaacagagcaactctgatgtagagattactacaaccacctcagagactcctgttggtgaagagacaaaaactgaagcccctgaatctgaagttagcaactctgtttcaaatgttaccatcccaagcaccccacagagtgttggtgtgaatacccggaggtcttcccaagcaggggatattgctgcagaaaaactagtccccaagccacctccagcaaagccttctaggccccggccgaagagtcgaatttctcggtacaggaccagttcagcccaaagactaaagcgtcagaagcaggccaatgcacagcaggcagaattgtcacaagctgccttggaagagggaggaagtaacagtttagtaactcctactgaagctggaagtctagacagttcaggagaaaacaggccattaacagggtctgacccaactgtggtgtcaattactggatcccatgtcaaccgtgctgcatctaaataccccaaaaccaaaaagtatctagttacagaatggttgaatgacaaagcagagaagcaagagtgccctgttgagtgccctttacgtatcacaacggatccaactgtactggcaacgaccctaaacatgttaccaggtcttatccattccccgttaatttgcaccacccccaaacactacattcgctttggctcaccctttatccctgagagacgtcgaaggccccttctgcctgatggcacattcagctcctgtaagaagcgctggataaaacaagccttagaagaagggatgactcaaacatcatctgtaccccaagagactagaactcagcacctataccaaagcaatgagaatagtagctcttctagtatctgcaaagacaatgcagacttgttgagcccattaaagaaatggaagtctcgctatctgatggagcagaatgtcaccaagttacttcggcctctgtctccagtcacaccaccccctcccaattcaggctcaaagagtccccagctggccacacctggctcatctcacccaggagaagaggagtgtcgaaatggatacagcctcatgttttcaccagtcacatctcttactactgctagtcgctgcaacactcctctacagtttgagctttgtcaccgaaaagacctggatttggcaaaagtaggataccttgactccaacactaacagctgtgctgatagaccttccctactcaactcaggtcattctgacctggctcctcatccctccctcggacccacttctgagactggtttcccaagcagaagtggagatggacatcagaccctcgtgagaaactcagaccaggcatttcggacagagttcaacttgatgtatgcctactcccctttgaatgctatgcctcgagcagatggactgtatcgaggatctcctctagtgggggataggaagcctttacatttggatgggggatattgttcccctgcagaaggattttccagcagatatgaacatggcttaatgaaagacctctctcgtggatccttgtcacctggtggtgaaagggcctgtgaaggagtcccatctgccccccagaacccaccacagaggaaaaaagtatccctgctggagtaccgaaaacggaaacaagaagctaaggaaaattctgctggtgggggaggtgactctgcacagagcaaaagcaagtctgcaggagctgggcaaggcagcagtaactccgtttccgacactggtgcccatggtgtgcagggatcctcagcccgaactccatcttcccctcacaaaaaattctccccatctcattcctctatgtcccatttggaggcggtaagcccatcagattccagaggcacttcttcatctcactgcagacctcaagagaatatcagcagtaggtggatggttcccacatcagtagaacgactccgagaaggagggagcatccccaaggtcctccgaagcagcgtgagggtggcccaaaagggagagccctctcccacatgggagagtaacatcacagagaaagactcagaccctgcagatggagaaggcccagagacattaagctcagcactctctaaaggagcaacagtttacagcccttccagatacagctaccagctcctgcagtgtgatagtcctcggacagaatcacaaagcctccttcagcagagttcctcccccttcagaggacatcctacacagtctccaggatacagttatcgaactactgcactgagacctggaaaccccccctctcacggttcttcagaatcatccctctcttccacgtcctattccagccccgcccaccctgtgtccacagactcgttggccccatttacggggacaccagggtattttagcagccagccacattctggaaacagcactggcagcaatcttccaaggaggagctgcccttctagtgctgctagccctaccctgcagggaccctcagactcgccaacctcagattcagtttctcagtccagcacaggaactctgagttccacctcctttcctcagaactctaggtcgtcattgccatcagacttacggactatcagtctgcccagtgctgggcagtcagctgtctaccaggcctccagggtatctgcggtttccaattcacagcactacccacaccgtgggagtgggggtgtgcaccagtaccgactccagccactgcaagggtcaggagtcaagactcagacgggactttcctagggcttctggatttgggcaaacagaactgaatgagcccatagctgcttccttccagctgcctctggaacctaggccgagcatattgctgaggaacggggggtacaaggtgccagaggattgggtctggtggacaagaaacaagacttgtggtcacaattggcctctggccttggagaaagctgtaaatcttgtctgaagcagagactataaagaagtttctccctgctgtcaagggtacattgttgacaagcaaatggtgtttcggttagtaacggttctaagtgcaatgagttgtgttgaagcctccgtctcccatccttgcctgtagcccgtagtcacttgtgcagtgaggacatctttttaaatttaaaaaaaaaaaaaaaaaaagttttcaaaggaaaaaaagttaaaagagccaatctcaaagccccaagccatctgagtactgttagggttttatgcacttaagaaaaaaggtaggtatgtaaatgttcatcctaagacaaccattccaaaagcaggtatctggccaatgtgtgtccaccaagaatactgtttatctttgtcttaagatcaccaagaaataggcaaggatagtaaagcttggaacctgcaccaactggagggtgcctggctctttgaagaaaagctcatggtcagctcttgattattcgggagcagattatttgagtagattgtctgagcctccaactgttaccatcctactcccccttcccaagctatttcacagctcagtaacccatgaagtaagtagacaagaaaaggaggaatgagacatgatataggccaattgcattgctacttaccagcttttggcaataaatttcattaggaaggataccgagtggtttgggaatgcttcgaattttattttttctactcccaattaatcaggagttgatgatcccatgagcaggaccgcctccatgattggggagcatgcacttgtgactgcagggtaagagtgggaagataggtttgtggagtggcaccgacaggactgtgattgtgtgtgggcctgccccacatttctctgggggatgcttatgtgagagtgggcccagtgaaagagttaccaagccacccacacccctaacactgttctggatgagagatgagagcagaccggcttctccccatcagtgcattgtgcctgttgtacacccctggaggagccctggagccagcccaggtggggtacacaatctttttaaattccatatggttgccagcttatttctttcacttgtttactgtaatatctggcgtgtttttatttatctaattttgtattcagttataaccatggtaggggtagtgaatatatgacaggtgtaatccctggtgctgcagtggaccttcttttcttttggacaagataatactgtgagtttccctccttccttccctctaatttgttttccttttttccccagcctcttgcatccccttcttttctaccctgtcctacaactatcatatgcacagtcttctctctttgtgtgtgactgttacaaaatttcacttttcaaaatcgaaatcaggtgtttgctcaaatgaggggagattttttttttttttttttttttaaatgctgagacctcagcagagtacttttctttttgttgtttcccccacaaacccatcagtctgggagagcattgggagtggaaatcatgttgcctgggatgctggtttctttgtatattatataaaacgtatgtaaatgtctctccatttgggctggggtttgcattctccccttggctatttaaccaaggggagaggccagcgggcaggcggccctcaccctgcctggcacgtgcagagaccccagccactctgtgtgggcagggtgctgtcaagaccagacctcttgggggggtaggggcgggggggtggggggaactcttggaagggaagaagtatcacttctttctcaagtggagtgtttacaccttgctgtaacatttgaactttcacaagagatgtaataattttgataataaaattcttaaccataataatcataaagt

SEQ ID NO: 332 - DNA, 6798 bp, Homo sapiens
gtcccgccagtccgccaacacagtagtgccggcccccctctttccctggccctgccccccctccccgcctttggctcgctccgcctttctgccccccacccccacctcacgggtacgggccattcccggccaggaaacgccgtggcgccgcgttgggcctaactcgagtcctgccgcctcccgggagtgccgtgcgccgcagcccgggcccaggccccggcagcgcctgggacaaggtcttcagaactactagcagataatttggggggacttcatattcagaagtctatataaaggattcctcatgtccataacatgttggatgaggctctgcagctcacccccactctcagagtggtcagtctccattaattggaccccgtgatttccaatctctgctgtgttggacgtcatgagcattgcaatccctctgggagtcaccacatcagatacatcctactcagatatggctgctggatcagaccctgaatctgtggaggctagtccagcagttaatgagaagagcgtgtattccactcataattatgggaccactcagaggcatgggtgtcgaggactgccttatgctacgatcatccctcgttctgacctgaatggcctgccgtcgcctgtagaggaacgctgtggagacagcccgaactctgaaggagaaactgtacctacctggtgtccttgtggtctttctcaggatggcttccttctcaactgtgacaagtgcaggggaatgagcagggggaaggttattagacttcatcggcggaagcaggacaacatatcaggtggggatagcagtgcaacagaaagctgggatgaggagctttctccttccactgtgttgtatacagcaacacagcacacacctacaagcatcaccttaactgttagaagaaccaaacccaagaagcggaaaaagagtccagaaaagggtcgtgcagcaccaaagacgaagaaaatcaagaattctccctctgaagcacagaatttagatgagaatacaactgagggctgggaaaatcggataagactatggactgaccagtatgaagaagctttcactaatcagtacagtgcagatgtacagaacgcgcttgaacaacacctacattctagcaaggaatttgtgggcaaacctactattttagacactattaataagactgaattggcctgtaataacacagttattggttcccaaatgcagttacagctgggaagagtcactcgtgttcaaaagcaccggaagatcctgagggctgcaagagatttggctttggacactcttataatagagtatcgtgggaaagtcatgttacgacagcaatttgaggtcaatgggcatttcttcaaaaaaccatacccctttgtgctcttctactcaaaattcaatggtgtagagatgtgtgtggatgcccgtactttcggtaatgatgctcggttcatcagaagatcatgtacaccaaatgcagaggtgcgacacatgattgcagatgggatgattcacctgtgcatctatgctgtgtctgccatcaccaaggatgctgaggtcaccatagcatttgattatgagtatagtaactgtaattataaagtggactgtgcctgtcacaagggaaaccggaattgtcctatacaaaaaaggaatcctaatgctacagaactgccactcctaccacctcctccaagcctacccaccattggagcagagactagacgtagaaaagcacgacggaaagagctagagatggagcagcagaatgaggcttcagaggagaataatgaccagcaatcacaagaagttccagaaaaagtaactgtatccagtgatcatgaggaagtagacaatccagaagaaaaaccagaagaagagaaagaagaggttatagatgaccaggagaacctagctcatagcaggaggaccagggaagatagaaaggtagaagccatcatgcatgcttttgaaaacttagagaaaagaaagaagcggcgggatcagcccttggaacagagcaactctgatgtagagattactacaaccacctcagagactcctgttggtgaagagacaaaaactgaagcccctgaatctgaagttagcaactctgtttcaaatgttaccatcccaagcaccccacagagtgttggtgtgaatacccggaggtcttcccaagcaggggatattgctgcagaaaaactagtccccaagccacctccagcaaagccttctaggccccggccgaagagtcgaatttctcggtacaggaccagttcagcccaaagactaaagcgtcagaagcaggccaatgcacagcaggcagaattgtcacaagctgccttggaagagggaggaagtaacagtttagtaactcctactgaagctggaagtctagacagttcaggagaaaacaggccattaacagggtctgacccaactgtggtgtcaattactggatcccatgtcaaccgtgctgcatctaaataccccaaaaccaaaaagtatctagttacagaatggttgaatgacaaagcagagaagcaagagtgccctgttgagtgccctttacgtatcacaacggatccaactgtactggcaacgaccctaaacatgttaccaggtcttatccattccccgttaatttgcaccacccccaaacactacattcgctttggctcaccctttatccctgagagacgtcgaaggccccttctgcctgatggcacattcagctcctgtaagaagcgctggataaaacaagccttagaagaagggatgactcaaacatcatctgtaccccaagagactagaactcagcacctataccaaagcaatgagaatagtagctcttctagtatctgcaaagacaatgcagacttgttgagcccattaaagaaatggaagtctcgctatctgatggagcagaatgtcaccaagttacttcggcctctgtctccagtcacaccaccccctcccaattcaggctcaaagagtccccagctggccacacctggctcatctcacccaggagaagaggagtgtcgaaatggatacagcctcatgttttcaccagtcacatctcttactactgctagtcgctgcaacactcctctacagtttgagctttgtcaccgaaaagacctggatttggcaaaagtaggataccttgactccaacactaacagctgtgctgatagaccttccctactcaactcaggtcattctgacctggctcctcatccctccctcggacccacttctgagactggtttcccaagcagaagtggagatggacatcagaccctcgtgagaaactcagaccaggcatttcggacagagttcaacttgatgtatgcctactcccctttgaatgctatgcctcgagcagatggactgtatcgaggatctcctctagtgggggataggaagcctttacatttggatgggggatattgttcccctgcagaaggattttccagcagatatgaacatggcttaatgaaagacctctctcgtggatccttgtcacctggtggtgaaagggcctgtgaaggagtcccatctgccccccagaacccaccacagaggaaaaaagtatccctgctggagtaccgaaaacggaaacaagaagctaaggaaaattctgctggtgggggaggtgactctgcacagagcaaaagcaagtctgcaggagctgggcaaggcagcagtaactccgtttccgacactggtgcccatggtgtgcagggatcctcagcccgaactccatcttcccctcacaaaaaattctccccatctcattcctctatgtcccatttggaggcggtaagcccatcagattccagaggcacttcttcatctcactgcagacctcaagagaatatcagcagtaggtggatggttcccacatcagtagaacgactccgagaaggagggagcatccccaaggtcctccgaagcagcgtgagggtggcccaaaagggagagccctctcccacatgggagagtaacatcacagagaaagactcagaccctgcagatggagaaggcccagagacattaagctcagcactctctaaaggagcaacagtttacagcccttccagatacagctaccagctcctgcagtgtgatagtcctcggacagaatcacaaagcctccttcagcagagttcctcccccttcagaggacatcctacacagtctccaggatacagttatcgaactactgcactgagacctggaaaccccccctctcacggttcttcagaatcatccctctcttccacgtcctattccagccccgcccaccctgtgtccacagactcgttggccccatttacggggacaccagggtattttagcagccagccacattctggaaacagcactggcagcaatcttccaaggaggagctgcccttctagtgctgctagccctaccctgcagggaccctcagactcgccaacctcagattcagtttctcagtccagcacaggaactctgagttccacctcctttcctcagaactctaggtcgtcattgccatcagacttacggactatcagtctgcccagtgctgggcagtcagctgtctaccaggcctccagggtatctgcggtttccaattcacagcactacccacaccgtgggagtgggggtgtgcaccagtaccgactccagccactgcaagggtcaggagtcaagactcagacgggactttcctagggcttctggatttgggcaaacagaactgaatgagcccatagctgcttccttccagctgcctctggaacctaggccgagcatattgctgaggaacggggggtacaaggtgccagaggattgggtctggtggacaagaaacaagacttgtggtcacaattggcctctggccttggagaaagctgtaaatcttgtctgaagcagagactataaagaagtttctccctgctgtcaagggtacattgttgacaagcaaatggtgtttcggttagtaacggttctaagtgcaatgagttgtgttgaagcctccgtctcccatccttgcctgtagcccgtagtcacttgtgcagtgaggacatctttttaaatttaaaaaaaaaaaaaaaaaaagttttcaaaggaaaaaaagttaaaagagccaatctcaaagccccaagccatctgagtactgttagggttttatgcacttaagaaaaaaggtaggtatgtaaatgttcatcctaagacaaccattccaaaagcaggtatctggccaatgtgtgtccaccaagaatactgtttatctttgtcttaagatcaccaagaaataggcaaggatagtaaagcttggaacctgcaccaactggagggtgcctggctctttgaagaaaagctcatggtcagctcttgattattcgggagcagattatttgagtagattgtctgagcctccaactgttaccatcctactcccccttcccaagctatttcacagctcagtaacccatgaagtaagtagacaagaaaaggaggaatgagacatgatataggccaattgcattgctacttaccagcttttggcaataaatttcattaggaaggataccgagtggtttgggaatgcttcgaattttattttttctactcccaattaatcaggagttgatgatcccatgagcaggaccgcctccatgattggggagcatgcacttgtgactgcagggtaagagtgggaagataggtttgtggagtggcaccgacaggactgtgattgtgtgtgggcctgccccacatttctctgggggatgcttatgtgagagtgggcccagtgaaagagttaccaagccacccacacccctaacactgttctggatgagagatgagagcagaccggcttctccccatcagtgcattgtgcctgttgtacacccctggaggagccctggagccagcccaggtggggtacacaatctttttaaattccatatggttgccagcttatttctttcacttgtttactgtaatatctggcgtgtttttatttatctaattttgtattcagttataaccatggtaggggtagtgaatatatgacaggtgtaatccctggtgctgcagtggaccttcttttcttttggacaagataatactgtgagtttccctccttccttccctctaatttgttttccttttttccccagcctcttgcatccccttcttttctaccctgtcctacaactatcatatgcacagtcttctctctttgtgtgtgactgttacaaaatttcacttttcaaaatcgaaatcaggtgtttgctcaaatgaggggagattttttttttttttttttttttaaatgctgagacctcagcagagtacttttctttttgttgtttcccccacaaacccatcagtctgggagagcattgggagtggaaatcatgttgcctgggatgctggtttctttgtatattatataaaacgtatgtaaatgtctctccatttgggctggggtttgcattctccccttggctatttaaccaaggggagaggccagcgggcaggcggccctcaccctgcctggcacgtgcagagaccccagccactctgtgtgggcagggtgctgtcaagaccagacctcttgggggggtaggggcgggggggtggggggaactcttggaagggaagaagtatcacttctttctcaagtggagtgtttacaccttgctgtaacatttgaactttcacaagagatgtaataattttgataataaaattcttaaccataataatcataaagt

SEQ ID NO: 333 - DNA, 6673 bp, Homo sapiens
tatattattcacagttttaaaatttttagtcttttgtatcccttctcttttaagttgtccgagattccccctgctcacagattccccctcttgtccttttacctcccttgtacccaatcttccttgcttacagaaaggaagtggaagccccctacctttcaagacgaagtggcactacaccaggatgtgaaagtccagcgaaagagacccaaggggcctagggggcagcacacccccagaagccaagtctattccaggcagtaccagggattagggtctgggctggaaaaatcctggtgttttgaatatgttcaggtccagttcagactcttgatcccacagccacttcttgagtgagccctgaatctgtggaggctagtccagcagttaatgagaagagcgtgtattccactcataattatgggaccactcagaggcatgggtgtcgaggactgccttatgctacgatcatccctcgttctgacctgaatggcctgccgtcgcctgtagaggaacgctgtggagacagcccgaactctgaaggagaaactgtacctacctggtgtccttgtggtctttctcaggatggcttccttctcaactgtgacaagtgcaggggaatgagcagggggaaggttattagacttcatcggcggaagcaggacaacatatcaggtggggatagcagtgcaacagaaagctgggatgaggagctttctccttccactgtgttgtatacagcaacacagcacacacctacaagcatcaccttaactgttagaagaaccaaacccaagaagcggaaaaagagtccagaaaagggtcgtgcagcaccaaagacgaagaaaatcaagaattctccctctgaagcacagaatttagatgagaatacaactgagggctgggaaaatcggataagactatggactgaccagtatgaagaagctttcactaatcagtacagtgcagatgtacagaacgcgcttgaacaacacctacattctagcaaggaatttgtgggcaaacctactattttagacactattaataagactgaattggcctgtaataacacagttattggttcccaaatgcagttacagctgggaagagtcactcgtgttcaaaagcaccggaagatcctgagggctgcaagagatttggctttggacactcttataatagagtatcgtgggaaagtcatgttacgacagcaatttgaggtcaatgggcatttcttcaaaaaaccatacccctttgtgctcttctactcaaaattcaatggtgtagagatgtgtgtggatgcccgtactttcggtaatgatgctcggttcatcagaagatcatgtacaccaaatgcagaggtgcgacacatgattgcagatgggatgattcacctgtgcatctatgctgtgtctgccatcaccaaggatgctgaggtcaccatagcatttgattatgagtatagtaactgtaattataaagtggactgtgcctgtcacaagggaaaccggaattgtcctatacaaaaaaggaatcctaatgctacagaactgccactcctaccacctcctccaagcctacccaccattggagcagagactagacgtagaaaagcacgacggaaagagctagagatggagcagcagaatgaggcttcagaggagaataatgaccagcaatcacaagaagttccagaaaaagtaactgtatccagtgatcatgaggaagtagacaatccagaagaaaaaccagaagaagagaaagaagaggttatagatgaccaggagaacctagctcatagcaggaggaccagggaagatagaaaggtagaagccatcatgcatgcttttgaaaacttagagaaaagaaagaagcggcgggatcagcccttggaacagagcaactctgatgtagagattactacaaccacctcagagactcctgttggtgaagagacaaaaactgaagcccctgaatctgaagttagcaactctgtttcaaatgttaccatcccaagcaccccacagagtgttggtgtgaatacccggaggtcttcccaagcaggggatattgctgcagaaaaactagtccccaagccacctccagcaaagccttctaggccccggccgaagagtcgaatttctcggtacaggaccagttcagcccaaagactaaagcgtcagaagcaggccaatgcacagcaggcagaattgtcacaagctgccttggaagagggaggaagtaacagtttagtaactcctactgaagctggaagtctagacagttcaggagaaaacaggccattaacagggtctgacccaactgtggtgtcaattactggatcccatgtcaaccgtgctgcatctaaataccccaaaaccaaaaagtatctagttacagaatggttgaatgacaaagcagagaagcaagagtgccctgttgagtgccctttacgtatcacaacggatccaactgtactggcaacgaccctaaacatgttaccaggtcttatccattccccgttaatttgcaccacccccaaacactacattcgctttggctcaccctttatccctgagagacgtcgaaggccccttctgcctgatggcacattcagctcctgtaagaagcgctggataaaacaagccttagaagaagggatgactcaaacatcatctgtaccccaagagactagaactcagcacctataccaaagcaatgagaatagtagctcttctagtatctgcaaagacaatgcagacttgttgagcccattaaagaaatggaagtctcgctatctgatggagcagaatgtcaccaagttacttcggcctctgtctccagtcacaccaccccctcccaattcaggctcaaagagtccccagctggccacacctggctcatctcacccaggagaagaggagtgtcgaaatggatacagcctcatgttttcaccagtcacatctcttactactgctagtcgctgcaacactcctctacagtttgagctttgtcaccgaaaagacctggatttggcaaaagtaggataccttgactccaacactaacagctgtgctgatagaccttccctactcaactcaggtcattctgacctggctcctcatccctccctcggacccacttctgagactggtttcccaagcagaagtggagatggacatcagaccctcgtgagaaactcagaccaggcatttcggacagagttcaacttgatgtatgcctactcccctttgaatgctatgcctcgagcagatggactgtatcgaggatctcctctagtgggggataggaagcctttacatttggatgggggatattgttcccctgcagaaggattttccagcagatatgaacatggcttaatgaaagacctctctcgtggatccttgtcacctggtggtgaaagggcctgtgaaggagtcccatctgccccccagaacccaccacagaggaaaaaagtatccctgctggagtaccgaaaacggaaacaagaagctaaggaaaattctgctggtgggggaggtgactctgcacagagcaaaagcaagtctgcaggagctgggcaaggcagcagtaactccgtttccgacactggtgcccatggtgtgcagggatcctcagcccgaactccatcttcccctcacaaaaaattctccccatctcattcctctatgtcccatttggaggcggtaagcccatcagattccagaggcacttcttcatctcactgcagacctcaagagaatatcagcagtaggtggatggttcccacatcagtagaacgactccgagaaggagggagcatccccaaggtcctccgaagcagcgtgagggtggcccaaaagggagagccctctcccacatgggagagtaacatcacagagaaagactcagaccctgcagatggagaaggcccagagacattaagctcagcactctctaaaggagcaacagtttacagcccttccagatacagctaccagctcctgcagtgtgatagtcctcggacagaatcacaaagcctccttcagcagagttcctcccccttcagaggacatcctacacagtctccaggatacagttatcgaactactgcactgagacctggaaaccccccctctcacggttcttcagaatcatccctctcttccacgtcctattccagccccgcccaccctgtgtccacagactcgttggccccatttacggggacaccagggtattttagcagccagccacattctggaaacagcactggcagcaatcttccaaggaggagctgcccttctagtgctgctagccctaccctgcagggaccctcagactcgccaacctcagattcagtttctcagtccagcacaggaactctgagttccacctcctttcctcagaactctaggtcgtcattgccatcagacttacggactatcagtctgcccagtgctgggcagtcagctgtctaccaggcctccagggtatctgcggtttccaattcacagcactacccacaccgtgggagtgggggtgtgcaccagtaccgactccagccactgcaagggtcaggagtcaagactcagacgggactttcctagggcttctggatttgggcaaacagaactgaatgagcccatagctgcttccttccagctgcctctggaacctaggccgagcatattgctgaggaacggggggtacaaggtgccagaggattgggtctggtggacaagaaacaagacttgtggtcacaattggcctctggccttggagaaagctgtaaatcttgtctgaagcagagactataaagaagtttctccctgctgtcaagggtacattgttgacaagcaaatggtgtttcggttagtaacggttctaagtgcaatgagttgtgttgaagcctccgtctcccatccttgcctgtagcccgtagtcacttgtgcagtgaggacatctttttaaatttaaaaaaaaaaaaaaaaaaagttttcaaaggaaaaaaagttaaaagagccaatctcaaagccccaagccatctgagtactgttagggttttatgcacttaagaaaaaaggtaggtatgtaaatgttcatcctaagacaaccattccaaaagcaggtatctggccaatgtgtgtccaccaagaatactgtttatctttgtcttaagatcaccaagaaataggcaaggatagtaaagcttggaacctgcaccaactggagggtgcctggctctttgaagaaaagctcatggtcagctcttgattattcgggagcagattatttgagtagattgtctgagcctccaactgttaccatcctactcccccttcccaagctatttcacagctcagtaacccatgaagtaagtagacaagaaaaggaggaatgagacatgatataggccaattgcattgctacttaccagcttttggcaataaatttcattaggaaggataccgagtggtttgggaatgcttcgaattttattttttctactcccaattaatcaggagttgatgatcccatgagcaggaccgcctccatgattggggagcatgcacttgtgactgcagggtaagagtgggaagataggtttgtggagtggcaccgacaggactgtgattgtgtgtgggcctgccccacatttctctgggggatgcttatgtgagagtgggcccagtgaaagagttaccaagccacccacacccctaacactgttctggatgagagatgagagcagaccggcttctccccatcagtgcattgtgcctgttgtacacccctggaggagccctggagccagcccaggtggggtacacaatctttttaaattccatatggttgccagcttatttctttcacttgtttactgtaatatctggcgtgtttttatttatctaattttgtattcagttataaccatggtaggggtagtgaatatatgacaggtgtaatccctggtgctgcagtggaccttcttttcttttggacaagataatactgtgagtttccctccttccttccctctaatttgttttccttttttccccagcctcttgcatccccttcttttctaccctgtcctacaactatcatatgcacagtcttctctctttgtgtgtgactgttacaaaatttcacttttcaaaatcgaaatcaggtgtttgctcaaatgaggggagattttttttttttttttttttttaaatgctgagacctcagcagagtacttttctttttgttgtttcccccacaaacccatcagtctgggagagcattgggagtggaaatcatgttgcctgggatgctggtttctttgtatattatataaaacgtatgtaaatgtctctccatttgggctggggtttgcattctccccttggctatttaaccaaggggagaggccagcgggcaggcggccctcaccctgcctggcacgtgcagagaccccagccactctgtgtgggcagggtgctgtcaagaccagacctcttgggggggtaggggcgggggggtggggggaactcttggaagggaagaagtatcacttctttctcaagtggagtgtttacaccttgctgtaacatttgaactttcacaagagatgtaataattttgataataaaattcttaaccataataatcataaagt

SEQ ID NO: 334 - DNA, 3406 bp, Homo sapiens
gactacaggcgcccaccaccatgcccagctaatttttcgtatttttattttagagatgtgtgtggatgcccgtactttcggtaatgatgctcggttcatcagaagatcatgtacaccaaatgcagaggtgcgacacatgattgcagatgggatgattcacctgtgcatctatgctgtgtctgccatcaccaaggatgctgaggtcaccatagcatttgattatgagtatagtaactgtaattataaagtggactgtgcctgtcacaagggaaaccggaattgtcctatacaaaaaaggaatcctaatgctacagaactgccactcctaccacctcctccaagcctacccaccattggagcagagactagacgtagaaaagcacgacggaaagagctagagatggagcagcagaatgaggcttcagaggagaataatgaccagcaatcacaagaagttccagaaaaagtaactgtatccagtgatcatgaggaagtagacaatccagaagaaaaaccagaagaagagaaagaagaggttatagatgaccaggagaacctagctcatagcaggaggaccagggaagatagaaaggtagaagccatcatgcatgcttttgaaaacttagagaaaagaaagaagcggcgggatcagcccttggaacagagcaactctgatgtagagattactacaaccacctcagagactcctgttggtgaagagacaaaaactgaagcccctgaatctgaagttagcaactctgtttcaaatgttaccatcccaagcaccccacagagtgttggtgtgaatacccggaggtcttcccaagcaggggatattgctgcagaaaaactagtccccaagccacctccagcaaagccttctaggccccggccgaagagtcgaatttctcggtacaggaccagttcagcccaaagactaaagcgtcagaagcaggccaatgcacagcaggcagaattgtcacaagctgccttggaagagggaggaagtaacagtttagtaactcctactgaagctggaagtctagacagttcaggagaaaacaggccattaacagggtctgacccaactgtggtgtcaattactggatcccatgtcaaccgtgctgcatctaaataccccaaaaccaaaaagtatctagttacagaatggttgaatgacaaagcagagaagcaagagtgccctgttgagtgccctttacgtatcacaacggatccaactgtactggcaacgaccctaaacatgttaccaggtcttatccattccccgttaatttgcaccacccccaaacactacattcgctttggctcaccctttatccctgagagacgtcgaaggccccttctgcctgatggcacattcagctcctgtaagaagcgctggataaaacaagccttagaagaagggatgactcaaacatcatctgtaccccaagagactagaactcagcacctataccaaagcaatgagaatagtagctcttctagtatctgcaaagacaatgcagacttgttgagcccattaaagaaatggaagtctcgctatctgatggagcagaatgtcaccaagttacttcggcctctgtctccagtcacaccaccccctcccaattcaggctcaaagagtccccagctggccacacctggctcatctcacccaggagaagaggagtgtcgaaatggatacagcctcatgttttcaccagtcacatctcttactactgctagtcgctgcaacactcctctacagtttgagctttgtcaccgaaaagacctggatttggcaaaagtaggataccttgactccaacactaacagctgtgctgatagaccttccctactcaactcaggtcattctgacctggctcctcatccctccctcggacccacttctgagactggtttcccaagcagaagtggagatggacatcagaccctcgtgagaaactcagaccaggcatttcggacagagttcaacttgatgtatgcctactcccctttgaatgctatgcctcgagcagatggactgtatcgaggatctcctctagtgggggataggaagcctttacatttggatgggggatattgttcccctgcagaaggattttccagcagatatgaacatggcttaatgaaagacctctctcgtggatccttgtcacctggtggtgaaagggcctgtgaaggagtcccatctgccccccagaacccaccacagaggaaaaaagtatccctgctggagtaccgaaaacggaaacaagaagctaaggaaaattctgctggtgggggaggtgactctgcacagagcaaaagcaagtctgcaggagctgggcaaggcagcagtaactccgtttccgacactggtgcccatggtgtgcagggatcctcagcccgaactccatcttcccctcacaaaaaattctccccatctcattcctctatgtcccatttggaggcggtaagcccatcagattccagaggcacttcttcatctcactgcagacctcaagagaatatcagcagtaggtggatggttcccacatcagtagaacgactccgagaaggagggagcatccccaaggtcctccgaagcagcgtgagggtggcccaaaagggagagccctctcccacatgggagagtaacatcacagagaaagactcagaccctgcagatggagaaggcccagagacattaagctcagcactctctaaaggagcaacagtttacagcccttccagatacagctaccagatatgtgactaagacagttgaaggagccactctagattggttggtcaagaaaagtctctgaggagttgacatttaaactgagacttcagtgacaaggaggcagtcctgggacgatgtgagtgaaattcattcttgaacgttgcagactctgtggtagaaaaagcttggttaagatgtaataaatggatggggctgggaaagaggatagaagatcctgtaagagggagataggggacagatcatgtagagcaggagtcggcaaactctttctataaagggccagatagtaaatatttagactttgcaagccatgtatggtctctgtcataactattcagccctttggctgggtgcgaatcatgcctgtaattccagcactttgggaggcccaagagagcagatcacttgaggtcagaagttcgagaccagcctggccaacatggcaaaaccctgtctactaaaaatacaaaaattaaccaggtgtggtggtgcgcacctgtaatcccagctactcaggaggctgaggcaggagaatctcttgaacctgggaggaggaggttatagtgaaccaaggtcactccactgcactccagcctgggtgatggagcgagactctgtctcaaaaaaaaaaaaaaa

SEQ ID NO: 335 - DNA, 2142 bp, Homo sapiens
gtcccgccagtccgccaacacagtagtgccggcccccctctttccctggccctgccccccctccccgcctttggctcgctccgcctttctgccccccacccccacctcacgggtacgggccattcccggccaggaaacgccgtggcgccgcgttgggcctaactcgagtcctgccgcctcccgggagtgccgtgcgccgcagcccgggcccaggccccggcagcgcctgggacaaggtcttcagaactactagcagataatttggggggacttcatattcagaagtctatataaaggattcctcatgtccataacatgttggatgaggctctgcagctcacccccactctcagagtggtcagtctccattaattggaccccgtgatttccaatctctgctgtgttggacgtcatgagcattgcaatccctctgggagtcaccacatcagatacatcctactcagatatggctgctggatcagaccctgaatctgtggaggctagtccagcagttaatgagaagagcgtgtattccactcataattatgggaccactcagaggcatgggtgtcgaggactgccttatgctacgatcatccctcgttctgacctgaatggcctgccgtcgcctgtagaggaacgctgtggagacagcccgaactctgaaggagaaactgtacctacctggtgtccttgtggtctttctcaggatggcttccttctcaactgtgacaagtgcaggggaatgagcagggggaaggttattagacttcatcggcggaagcaggacaacatatcaggtggggatagcagtgcaacagaaagctgggatgaggagctttctccttccactgtgttgtatacagcaacacagcacacacctacaagcatcaccttaactgttagaagaaccaaacccaagaagcggaaaaagagtccagaaaagggtcgtgcagcaccaaagacgaagaaaatcaaggcatttcgagagggatcccggaagtccttgcggatgaagaattctccctctgaagcacagaatttagatgagaatacaactgagggctgggaaaatcggataagactatggactgaccagtatgaagaagctttcactaatcagtacagtgcagatgtacagaacgcgcttgaacaacacctacattctagcaaggaatttgtgggcaaacctactattttagacactattaataagactgaattggcctgtaataacacagttattggttcccaaatgcagttacagctgggaagagtcactcgtgttcaaaagcaccggaagatcctgagggctgcaagagatttggctttggacactcttataatagagtatcgtgggaaagtcatgttacgacagcaatttgaggtcaatgggcatttcttcaaaaagtaagaacgtcattcattgagcagtgagggctaaggtggacctggttgaccagtgttgttgtaaaaatcattctgtttgataagacgctcttgggagaaaaaaatcacaactcagataagctcacacctgtctgctatttgtagagaagtgcaagtaaatcttcaaattgttcaatgtataaaatggtgacacctcctttccaagccaagcattccttgctttgtgcttgttctttaatcaaaagcagacaaacgtgatgctttcccaagtttaggcgttgcaaaagactgctgctgcttctctcagcatatgcttcatatttggagtcatggggtggccttcttatttgtgttgagaattacaggaattttaattgtatccctagaccatacccctttgtgctcttctactcaaaattcaatggtgtagagatgtgtgtggatgcccgtactttcggtaatgatgctcggttcatcagaagatcatgtacaccaaatgcagaggtaagatatctgtagcaacttccctttgactggaaccatcaaatgacaagcttactgaagaagcagtgtgaaaacttcactcagataaaggtctgtagataatagtcgtgatatttcatcgtgggaggtgaaaaacaaaagtaatggtgcttttatacgacaaaatgggcgcaaggaaagagttttctttagagaaggcagaaatagaaaagagcaagttagcatttg

SEQ ID NO: 336 - DNA, 2851 bp, Homo sapiens
attaccataactccttaaataaataatagattaccataactccaaatggagagaaagtatggtttttttctctcttacggaaagttcatggtctttatgaaaaatccaaccagaagccttttcacacaggtgcgacacatgattgcagatgggatgattcacctgtgcatctatgctgtgtctgccatcaccaaggatgctgaggtcaccatagcatttgattatgagtatagtaactgtaattataaagtggactgtgcctgtcacaagggaaaccggaattgtcctatacaaaaaaggaatcctaatgctacagaactgccactcctaccacctcctccaagcctacccaccattggagcagagactagacgtagaaaagcacgacggaaagagctagagatggagcagcagaatgaggcttcagaggagaataatgaccagcaatcacaagaagttccagaaaaagtaactgtatccagtgatcatgaggtaatcgcccctggtcaaatgatgatgctatggcatcaatcctccaaaggaagaggaacccgggttgccgcatggtttaagtaggggagctatagtaacacttagtgccctttatatcaatgtgggtttattgtgttcatacatttctttctgttttacaaagtcaaaaacatcctttgctggttttgcaccagagaataggggttagttatcatctgtgtttaccatgtggcctcacatgagttaacagtttaaagcactagagattgttatagagagttttaagctaccagaataaaacagattgattttttctcagagcttgagtacagctgaatattgcctctatcttaaaggaagtagacaatccagaagaaaaaccagaagaagagaaagaagaggttatagatgaccaggagaacctagctcatagcaggagggtgagtactgtctgacattactttgctccttctcattcctgctacctccatcatgtgaacctcttctgttctcttgactttgtatcatctcattgatttgacctgaaggttataatttgggctttttccgtaataaagattttattataatttttttatttatttttctctatacacacagtagttttgtagtgattattatctagtgatggtttgaagaggttgtttttttttttttttttttttttactaacaatctggtttccactgcacccatcctgtttttctttcatattaaagtttcaaaataactgaccctttttgaaaagtttatgtttgaccttgcctttatttacaactattccccacatttaaaatgaaatattttatttttaatcttctgttttccaagttatatgtgtcatcttactggtagttaaatgaatttctgtaaatttccattaaaaatacttttataaaagctatccactcgtcctcatttgaagcttccttctacaccagtactatctctttctagaccagggaagatagaaaggtagaagccatcatgcatgcttttgaaaacttagagaaaagaaagaagcggcgggatcagcccttggaacagagcaactctgatgtagagattactacaaccacctcagagactcctgttggtgaagagacaaaaactgaagcccctgaatctgaagttagcaactctgtttcaaatgttaccatcccaagcaccccacagagtgttggtgtgaatacccggaggtcttcccaagcaggggatattgctgcagaaaaactagtccccaagccacctccagcaaagccttctaggccccggccgaagagtcgaatttctcggtacaggaccagttcagcccaaagactaaagcgtcagaagcaggccaatgcacagcaggcagaattgtcacaagctgccttggaagagggaggaagtaacagtttagtaactcctactgaagctggaagtctagacagttcaggagaaaacaggccattaacagggtctgacccaactgtggtgtcaattactggatcccatgtcaaccgtgctgcatctaaataccccaaaaccaaaaaggtaagtcacaaatgcatcctttataagtccagtctggcaagggctgtcttagtgaaatgagaggacctataatccctagaagaaactaatctcaatattactagattgaaagttctaaaatgctttgacacaaaaggctggagtcatcctgctacctgtttccttatttttagtcagcttaaatcactgatagctgaaattattcctctcttagtgggcgtggagagggtgaaggaagatatccttgtgttctagttgctcaattcattcttactgcagctgctgcatctcctcctgtcctagtttctagatgacgtttgtctttatgaactacactgctacctcttgatttataaactaatgatctcttttttaccttagtatctagttacagaatggttgaatgacaaagcagagaagcaagagtgccctgttgagtgccctttacgtatcacaacggatccaactgtactggcaacgaccctaaacatgttaccaggtcttatccattccccgttaatttgcaccacccccaaacactacattcgctttggctcaccctttatccctgagagacgtcgaaggccccttctgcctgatggcacattcagctcctgtaagaagcgctggataaaacaagccttagaagaagggatgactcaaacatcatctgtaccccaagagactagaactcagcacctataccaaagcaatgagaatagtagctcttctagtatctgcaaagacaatgcaggtacgtatctaaaacctttctgattatatgaccaatgattgtttcagg

SEQ ID NO: 337 - DNA, 1484 bp, Homo sapiens
gtcccgccagtccgccaacacagtagtgccggcccccctctttccctggccctgccccccctccccgcctttggctcgctccgcctttctgccccccacccccacctcacgggtacgggccattcccggccaggaaacgccgtggcgccgcgttgggcctaactcgagtcctgccgcctcccgggagtgccgtgcgccgcagcccgggcccaggccccggcagcgcctgggacaaggtcttcagaactactagcagataatttggggggacttcatattcagaagtctatataaaggattcctcatgtccataacatgttggatgaggctctgcagctcacccccactctcagagtggtcagtctccattaattggaccccgtgatttccaatctctgctgtgttggacgtcatgagcattgcaatccctctgggagtcaccacatcagatacatcctactcagatatggctgctggatcagaaaaggaagtggaagccccctacctttcaagacgaagtggcactacaccaggatgtgaaagtccagcgaaagagacccaaggggcctagggggcagcacacccccagaagccaagtctattccaggcagtaccagggattagggtctgggctggaaaaatcctggtgttttgaatatgttcaggtccagttcagactcttgatcccacagccacttcttgagtgagggtatcctgtcttggtagtgaatggaagagggcctggtccctggggcagtgcagaaggcactttgatcatctcactcactgcaaatgtcatgtgaggtttcatggaagtattaagagatccaattaagaagaatagttctgagtctaaaccagcccagagtggcttctctaggggaaactccccgctcagctgccctgaatctgtggaggctagtccagcagttaatgagaagagcgtgtattccactcataattatgggaccactcagaggcatgggtgtcgaggactgccttatgctacgatcatccctcgttctgacctgaatggcctgccgtcgcctgtagaggaacgctgtggagacagcccgaactctgaaggagaaactgtacctacctggtgtccttgtggtctttctcaggatggcttccttctcaactgtgacaagtgcagatgattccttagtgctccttggctcgaattctctgcactaggggaatgagcagggggaaggttattagacttcatcggcggaagcaggacaacatatcaggtggggatagcagtgcaacagaaagctgggatgaggagctttctccttccactgtgttgtatacagcaacacagcacacacctacaagcatcaccttaactgttagaagaaccaaacccaagaagcggaaaaagagtccagaaaagggtcgtgcagcaccaaagacgaagaaaatcaagaattctccctctgaagcacagaatttagatgagaatacaactgagg

SEQ ID NO: 338 - DNA, 971 bp, Homo sapiens
cataactccttaaataaataatagattaccataactccaaatggagagaaagtatggtttttttctctcttacggaaagttcatggtctttatgaaaaatccaaccagaagccttttcacacaggtgcgacacatgattgcagatgggatgattcacctgtgcatctatgctgtgtctgccatcaccaaggatgctgaggtcaccatagcatttgattatgagtatagtaactgtaattataaagtggactgtgcctgtcacaagggaaaccggaattgtcctatacaaaaaaggaatcctaatgctacagaactgccactcctaccacctcctccaagcctacccaccattggagcagagactagacgtagaaaagcacgacggaaagagctagagatggagcagcagaatgaggcttcagaggagaataatgaccagcaatcacaagaagttccagaaaaagtaactgtatccagtgatcatgaggtaatcgcccctggtcaaatgatgatgctatggcatcaatcctccaaaggaagaggaacccgggttgccgcatggtttaagtaggggagctatagtaacacttagtgccctttatatcaatgtgggtttattgtgttcatacatttctttctgttttacaaagtcaaaaacatcctttgctggttttgcaccagagaataggggttagttatcatctgtgtttaccatgtggcctcacatgagttaacagtttaaagcactagagattgttatagagagttttaagctaccagaataaaacagattgattttttctcagagcttgagtacagctgaatattgcctctatcttaaaggaagtagacaatccagaagaaaaaccagaagaagagaaagaagaggttatagatgaccaggagaacctagctcatagcaggaggaccagggaagatagaaaggtagaagccatcatgcatgcttttga

SEQ ID NO: 339 - DNA, 4429 bp, Homo sapiens
tacccggaggtcttcccaagcaggggtaagagttgaaaagacttcagcacttagacatcctcacctttgctaatgtcaatacctaacttttggaatttttaaaatcagtgttttcagctttgctccatatcacaataaataaggccattaactgtttaactggaaccatttcattggcctattttataaatgcttattagaaataacgcaaacatttgtcgctagcctctttagctcatttaagtgtatacatttttgtatttaaaaattagattttaaattagtgtttctaatccttatatttttcatcagtagacattctgaatgcttaaagtgaataggaaattagactgtttgctgataaaacatttctggtaagcatctgaccctactattgctacaggatattgctgcagaaaaactagtccccaagccacctccagcaaagccttctaggccccggccgaagagtcgaatttctcggtacaggaccagttcagcccaaagactaaagcgtcagaagcaggccaatgcacagcaggcagaattgtcacaagctgccttggaagagggaggaagtaacagtttagtaactcctactgaagctggaagtctagacagttcaggagaaaacaggccattaacagggtctgacccaactgtggtgtcaattactggatcccatgtcaaccgtgctgcatctaaataccccaaaaccaaaaagtatctagttacagaatggttgaatgacaaagcagagaagcaagagtgccctgttgagtgccctttacgtatcacaacggatccaactgtactggcaacgaccctaaacatgttaccaggtcttatccattccccgttaatttgcaccacccccaaacactacattcgctttggctcaccctttatccctgagagacgtcgaaggccccttctgcctgatggcacattcagctcctgtaagaagcgctggataaaacaagccttagaagaagggatgactcaaacatcatctgtaccccaagagactagaactcagcacctataccaaagcaatgagaatagtagctcttctagtatctgcaaagacaatgcagacttgttgagcccattaaagaaatggaagtctcgctatctgatggagcagaatgtcaccaagttacttcggcctctgtctccagtcacaccaccccctcccaattcaggctcaaagagtccccagctggccacacctggctcatctcacccaggagaagaggagtgtcgaaatggatacagcctcatgttttcaccagtcacatctcttactactgctagtcgctgcaacactcctctacagtttgagctttgtcaccgaaaagacctggatttggcaaaagtaggataccttgactccaacactaacagctgtgctgatagaccttccctactcaactcaggtcattctgacctggctcctcatccctccctcggacccacttctgagactggtttcccaagcagaagtggagatggacatcagaccctcgtgagaaactcagaccaggcatttcggacagagttcaacttgatgtatgcctactcccctttgaatgctatgcctcgagcagatggactgtatcgaggatctcctctagtgggggataggaagcctttacatttggatgggggatattgttcccctgcagaaggattttccagcagatatgaacatggcttaatgaaagacctctctcgtggatccttgtcacctggtggtgaaagggcctgtgaaggagtcccatctgccccccagaacccaccacagaggaaaaaagtatccctgctggagtaccgaaaacggaaacaagaagctaaggaaaattctgctggtgggggaggtgactctgcacagagcaaaagcaagtctgcaggagctgggcaaggcagcagtaactccgtttccgacactggtgcccatggtgtgcagggatcctcagcccgaactccatcttcccctcacaaaaaattctccccatctcattcctctatgtcccatttggaggcggtaagcccatcagattccagaggcacttcttcatctcactgcagacctcaagagaatatcagcagtaggtggatggttcccacatcagtagaacgactccgagaaggagggagcatccccaaggtcctccgaagcagcgtgagggtggcccaaaagggagagccctctcccacatgggagagtaacatcacagagaaagactcagaccctgcagatggagaaggcccagagacattaagctcagcactctctaaaggagcaacagtttacagcccttccagatacagctaccagctcctgcagtgtgatagtcctcggacagaatcacaaagcctccttcagcagagttcctcccccttcagaggacatcctacacagtctccaggatacagttatcgaactactgcactgagacctggaaaccccccctctcacggttcttcagaatcatccctctcttccacgtcctattccagccccgcccaccctgtgtccacagactcgttggccccatttacggggacaccagggtattttagcagccagccacattctggaaacagcactggcagcaatcttccaaggaggagctgcccttctagtgctgctagccctaccctgcagggaccctcagactcgccaacctcagattcagtttctcagtccagcacaggaactctgagttccacctcctttcctcagaactctaggtcgtcattgccatcagacttacggactatcagtctgcccagtgctgggcagtcagctgtctaccaggcctccagggtatctgcggtttccaattcacagcactacccacaccgtgggagtgggggtgtgcaccagtaccgactccagccactgcaagggtcaggagtcaagactcagacgggactttcctagggcttctggatttgggcaaacagaactgaatgagcccatagctgcttccttccagctgcctctggaacctaggccgagcatattgctgaggaacggggggtacaaggtgccagaggattgggtctggtggacaagaaacaagacttgtggtcacaattggcctctggccttggagaaagctgtaaatcttgtctgaagcagagactataaagaagtttctccctgctgtcaagggtacattgttgacaagcaaatggtgtttcggttagtaacggttctaagtgcaatgagttgtgttgaagcctccgtctcccatccttgcctgtagcccgtagtcacttgtgcagtgaggacatctttttaaatttaaaaaaaaaaaaaaaaaaagttttcaaaggaaaaaaagttaaaagagccaatctcaaagccccaagccatctgagtactgttagggttttatgcacttaagaaaaaaggtaggtatgtaaatgttcatcctaagacaaccattccaaaagcaggtatctggccaatgtgtgtccaccaagaatactgtttatctttgtcttaagatcaccaagaaataggcaaggatagtaaagcttggaacctgcaccaactggagggtgcctggctctttgaagaaaagctcatggtcagctcttgattattcgggagcagattatttgagtagattgtctgagcctccaactgttaccatcctactcccccttcccaagctatttcacagctcagtaacccatgaagtaagtagacaagaaaaggaggaatgagacatgatataggccaattgcattgctacttaccagcttttggcaataaatttcattaggaaggataccgagtggtttgggaatgcttcgaattttattttttctactcccaattaatcaggagttgatgatcccatgagcaggaccgcctccatgattggggagcatgcacttgtgactgcagggtaagagtgggaagataggtttgtggagtggcaccgacaggactgtgattgtgtgtgggcctgccccacatttctctgggggatgcttatgtgagagtgggcccagtgaaagagttaccaagccacccacacccctaacactgttctggatgagagatgagagcagaccggcttctccccatcagtgcattgtgcctgttgtacacccctggaggagccctggagccagcccaggtggggtacacaatctttttaaattccatatggttgccagcttatttctttcacttgtttactgtaatatctggcgtgtttttatttatctaattttgtattcagttataaccatggtaggggtagtgaatatatgacaggtgtaatccctggtgctgcagtggaccttcttttcttttggacaagataatactgtgagtttccctccttccttccctctaatttgttttccttttttccccagcctcttgcatccccttcttttc

SEQ ID NO: 340 - DNA, 5743 bp, Homo sapiens
agcgagattccgtctccaataaaaagaaaaacaaaagtatttataggactctctaatgtctctgtttaacttattcagagacaatatcagaggaagttactgtactgatattttaagagggtgaatggataatgtaactgaatttcaagggtactgagacaggcattttggttgtttctttggagcagtaattataaagtggactgtgcctgtcacaagggaaaccggaattgtcctatacaaaaaaggaatcctaatgctacagaactgccactcctaccacctcctccaagcctacccaccattggagcagagactagacgtagaaaagcacgacggaaagagctagagatggagcagcagaatgaggcttcagaggagaataatgaccagcaatcacaagaagttccagaaaaagtaactgtatccagtgatcatgaggtaatcgcccctggtcaaatgatgatgctatggcatcaatcctccaaaggaagaggaacccgggttgccgcatggtttaagtaggggagctatagtaacacttagtgccctttatatcaatgtgggtttattgtgttcatacatttctttctgttttacaaagtcaaaaacatcctttgctggttttgcaccagagaataggggttagttatcatctgtgtttaccatgtggcctcacatgagttaacagtttaaagcactagagattgttatagagagttttaagctaccagaataaaacagattgattttttctcagagcttgagtacagctgaatattgcctctatcttaaaggaagtagacaatccagaagaaaaaccagaagaagagaaagaagaggttatagatgaccaggagaacctagctcatagcaggaggaccagggaagatagaaaggtagaagccatcatgcatgcttttgaaaacttagagaaaagaaagaagcggcgggatcagcccttggaacagagcaactctgatgtagagattactacaaccacctcagagactcctgttggtgaagagacaaaaactgaagcccctgaatctgaagttagcaactctgtttcaaatgttaccatcccaagcaccccacagagtgttggtgtgaatacccggaggtcttcccaagcaggggatattgctgcagaaaaactagtccccaagccacctccagcaaagccttctaggccccggccgaagagtcgaatttctcggtacaggaccagttcagcccaaagactaaagcgtcagaagcaggccaatgcacagcaggcagaattgtcacaagctgccttggaagagggaggaagtaacagtttagtaactcctactgaagctggaagtctagacagttcaggagaaaacaggccattaacagggtctgacccaactgtggtgtcaattactggatcccatgtcaaccgtgctgcatctaaataccccaaaaccaaaaagtatctagttacagaatggttgaatgacaaagcagagaagcaagagtgccctgttgagtgccctttacgtatcacaacggatccaactgtactggcaacgaccctaaacatgttaccaggtcttatccattccccgttaatttgcaccacccccaaacactacattcgctttggctcaccctttatccctgagagacgtcgaaggccccttctgcctgatggcacattcagctcctgtaagaagcgctggataaaacaagccttagaagaagggatgactcaaacatcatctgtaccccaagagactagaactcagcacctataccaaagcaatgagaatagtagctcttctagtatctgcaaagacaatgcagacttgttgagcccattaaagaaatggaagtctcgctatctgatggagcagaatgtcaccaagttacttcggcctctgtctccagtcacaccaccccctcccaattcaggctcaaagagtccccagctggccacacctggctcatctcacccaggagaagaggagtgtcgaaatggatacagcctcatgttttcaccagtcacatctcttactactgctagtcgctgcaacactcctctacagtttgagctttgtcaccgaaaagacctggatttggcaaaagtaggataccttgactccaacactaacagctgtgctgatagaccttccctactcaactcaggtcattctgacctggctcctcatccctccctcggacccacttctgagactggtttcccaagcagaagtggagatggacatcagaccctcgtgagaaactcagaccaggcatttcggacagagttcaacttgatgtatgcctactcccctttgaatgctatgcctcgagcagatggactgtatcgaggatctcctctagtgggggataggaagcctttacatttggatgggggatattgttcccctgcagaaggattttccagcagatatgaacatggcttaatgaaagacctctctcgtggatccttgtcacctggtggtgaaagggcctgtgaaggagtcccatctgccccccagaacccaccacagaggaaaaaagtatccctgctggagtaccgaaaacggaaacaagaagctaaggaaaattctgctggtgggggaggtgactctgcacagagcaaaagcaagtctgcaggagctgggcaaggcagcagtaactccgtttccgacactggtgcccatggtgtgcagggatcctcagcccgaactccatcttcccctcacaaaaaattctccccatctcattcctctatgtcccatttggaggcggtaagcccatcagattccagaggcacttcttcatctcactgcagacctcaagagaatatcagcagtaggtggatggttcccacatcagtagaacgactccgagaaggagggagcatccccaaggtcctccgaagcagcgtgagggtggcccaaaagggagagccctctcccacatgggagagtaacatcacagagaaagactcagaccctgcagatggagaaggcccagagacattaagctcagcactctctaaaggagcaacagtttacagcccttccagatacagctaccagctcctgcagtgtgatagtcctcggacagaatcacaaagcctccttcagcagagttcctcccccttcagaggacatcctacacagtctccaggatacagttatcgaactactgcactgagacctggaaaccccccctctcacggttcttcagaatcatccctctcttccacgtcctattccagccccgcccaccctgtgtccacagactcgttggccccatttacggggacaccagggtattttagcagccagccacattctggaaacagcactggcagcaatcttccaaggaggagctgcccttctagtgctgctagccctaccctgcagggaccctcagactcgccaacctcagattcagtttctcagtccagcacaggaactctgagttccacctcctttcctcagaactctaggtcgtcattgccatcagacttacggactatcagtctgcccagtgctgggcagtcagctgtctaccaggcctccagggtatctgcggtttccaattcacagcactacccacaccgtgggagtgggggtgtgcaccagtaccgactccagccactgcaagggtcaggagtcaagactcagacgggactttcctagggcttctggatttgggcaaacagaactgaatgagcccatagctgcttccttccagctgcctctggaacctaggccgagcatattgctgaggaacggggggtacaaggtgccagaggattgggtctggtggacaagaaacaagacttgtggtcacaattggcctctggccttggagaaagctgtaaatcttgtctgaagcagagactataaagaagtttctccctgctgtcaagggtacattgttgacaagcaaatggtgtttcggttagtaacggttctaagtgcaatgagttgtgttgaagcctccgtctcccatccttgcctgtagcccgtagtcacttgtgcagtgaggacatctttttaaatttaaaaaaaaaaaaaaaaaaagttttcaaaggaaaaaaagttaaaagagccaatctcaaagccccaagccatctgagtactgttagggttttatgcacttaagaaaaaaggtaggtatgtaaatgttcatcctaagacaaccattccaaaagcaggtatctggccaatgtgtgtccaccaagaatactgtttatctttgtcttaagatcaccaagaaataggcaaggatagtaaagcttggaacctgcaccaactggagggtgcctggctctttgaagaaaagctcatggtcagctcttgattattcgggagcagattatttgagtagattgtctgagcctccaactgttaccatcctactcccccttcccaagctatttcacagctcagtaacccatgaagtaagtagacaagaaaaggaggaatgagacatgatataggccaattgcattgctacttaccagcttttggcaataaatttcattaggaaggataccgagtggtttgggaatgcttcgaattttattttttctactcccaattaatcaggagttgatgatcccatgagcaggaccgcctccatgattggggagcatgcacttgtgactgcagggtaagagtgggaagataggtttgtggagtggcaccgacaggactgtgattgtgtgtgggcctgccccacatttctctgggggatgcttatgtgagagtgggcccagtgaaagagttaccaagccacccacacccctaacactgttctggatgagagatgagagcagaccggcttctccccatcagtgcattgtgcctgttgtacacccctggaggagccctggagccagcccaggtggggtacacaatctttttaaattccatatggttgccagcttatttctttcacttgtttactgtaatatctggcgtgtttttatttatctaattttgtattcagttataaccatggtaggggtagtgaatatatgacaggtgtaatccctggtgctgcagtggaccttcttttcttttggacaagataatactgtgagtttccctccttccttccctctaatttgttttccttttttccccagcctcttgcatccccttcttttctaccctgtcctacaactatcatatgcacagtcttctctctttgtgtgtgactgttacaaaatttcacttttcaaaatcgaaatcaggtgtttgctcaaatgaggggagattttttttttttttttttttttaaatgctgagacctcagcagagtacttttctttttgttgtttcccccacaaacccatcagtctgggagagcattgggagtggaaatcatgttgcctgggatgctggtttctttgtatattatataaaacgtatgtaaatgtctctccatttgggctggggtttgcattctccccttggctatttaaccaaggggagaggccagcgggcaggcggccctcaccctgcctggcacgtgcagagaccccagccactctgtgtgggcagggtgctgtcaagaccagacctcttgggggggtaggggcgggggggtggggggaactcttggaagggaagaagtatcacttctttctcaagtggagtgtttacaccttgctgtaacatttgaactttcacaagagatgtaataattttgataataaaattcttaaccataataatcataaagt

SEQ ID NO: 341 - DNA, 4164 bp, Homo sapiens
gtcccgccagtccgccaacacagtagtgccggcccccctctttccctggccctgccccccctccccgcctttggctcgctccgcctttctgccccccacccccacctcacgggtacgggccattcccggccaggaaacgccgtggcgccgcgttgggcctaactcgagtcctgccgcctcccgggagtgccgtgcgccgcagcccgggcccaggccccggcagcgcctgggacaaggtcttcagaactactagcagataatttggggggacttcatattcagaagtctatataaaggattcctcatgtccataacatgttggatgaggctctgcagctcacccccactctcagagtggtcagtctccattaattggaccccgtgatttccaatctctgctgtgttggacgtcatgagcattgcaatccctctgggagtcaccacatcagatacatcctactcagatatggctgctggatcagaccctgaatctgtggaggctagtccagcagttaatgagaagagcgtgtattccactcataattatgggaccactcagaggcatgggtgtcgaggactgccttatgctacgatcatccctcgttctgacctgaatggcctgccgtcgcctgtagaggaacgctgtggagacagcccgaactctgaaggagaaactgtacctacctggtgtccttgtggtctttctcaggatggcttccttctcaactgtgacaagtgcaggggaatgagcagggggaaggttattagacttcatcggcggaagcaggacaacatatcaggtggggatagcagtgcaacagaaagctgggatgaggagctttctccttccactgtgttgtatacagcaacacagcacacacctacaagcatcaccttaactgttagaagaaccaaacccaagaagcggaaaaagagtccagaaaagggtcgtgcagcaccaaagacgaagaaaatcaagaattctccctctgaagcacagaatttagatgagaatacaactgagggctgggaaaatcggataagactatggactgaccagtatgaagaagctttcactaatcagtacagtgcagatgtacagaacgcgcttgaacaacacctacattctagcaaggaatttgtgggcaaacctactattttagacactattaataagactgaattggcctgtaataacacagttattggttcccaaatgcagttacagctgggaagagtcactcgtgttcaaaagcaccggaagatcctgagggctgcaagagatttggctttggacactcttataatagagtatcgtgggaaagtcatgttacgacagcaatttgaggtcaatgggcatttcttcaaaaaaccatacccctttgtgctcttctactcaaaattcaatggtgtagagatgtgtgtggatgcccgtactttcggtaatgatgctcggttcatcagaagatcatgtacaccaaatgcagaggtgcgacacatgattgcagatgggatgattcacctgtgcatctatgctgtgtctgccatcaccaaggatgctgaggtcaccatagcatttgattatgagtatagtaactgtaattataaagtggactgtgcctgtcacaagggaaaccggaattgtcctatacaaaaaaggaatcctaatgctacagaactgccactcctaccacctcctccaagcctacccaccattggagcagagactagacgtagaaaagcacgacggaaagagctagagatggagcagcagaatgaggcttcagaggagaataatgaccagcaatcacaagaagttccagaaaaagtaactgtatccagtgatcatgaggaagtagacaatccagaagaaaaaccagaagaagagaaagaagaggttatagatgaccaggagaacctagctcatagcaggaggaccagggaagatagaaaggtagaagccatcatgcatgcttttgaaaacttagagaaaagaaagaagcggcgggatcagcccttggaacagagcaactctgatgtagagattactacaaccacctcagagactcctgttggtgaagagacaaaaactgaagcccctgaatctgaagttagcaactctgtttcaaatgttaccatcccaagcaccccacagagtgttggtgtgaatacccggaggtcttcccaagcaggggatattgctgcagaaaaactagtccccaagccacctccagcaaagccttctaggccccggccgaagagtcgaatttctcggtacaggaccagttcagcccaaagactaaagcgtcagaagcaggccaatgcacagcaggcagaattgtcacaagctgccttggaagagggaggaagtaacagtttagtaactcctactgaagctggaagtctagacagttcaggagaaaacaggccattaacagggtctgacccaactgtggtgtcaattactggatcccatgtcaaccgtgctgcatctaaataccccaaaaccaaaaagtatctagttacagaatggttgaatgacaaagcagagaagcaagagtgccctgttgagtgccctttacgtatcacaacggatccaactgtactggcaacgaccctaaacatgttaccaggtcttatccattccccgttaatttgcaccacccccaaacactacattcgctttggctcaccctttatccctgagagacgtcgaaggccccttctgcctgatggcacattcagctcctgtaagaagcgctggataaaacaagccttagaagaagggatgactcaaacatcatctgtaccccaagagactagaactcagcacctataccaaagcaatgagaatagtagctcttctagtatctgcaaagacaatgcagacttgttgagcccattaaagaaatggaagtctcgctatctgatggagcagaatgtcaccaagttacttcggcctctgtctccagtcacaccaccccctcccaattcaggctcaaagagtccccagctggccacacctggctcatctcacccaggagaagaggagtgtcgaaatggatacagcctcatgttttcaccagtcacatctcttactactgctagtcgctgcaacactcctctacagtttgaggtgatttgggtttggttgctgggagtgctggatatgaaaatcatcatttgtaccttctcatttcaaatataataccattccaaatgtttctttactatctttcttccccatctcagtaagagaatgggaaacctcagggtcattgtggcctgttacctggtagcctctcatcttggcagcccctatgcttcccaaaataggcatactgctaccacaaatcccattcatgtatcttttgcatgcagtccatcaatctccataagtttaggtagtaagcatgctagatctccatcgttatctttactgtatactttggtcaaaataggcctctagctgcctgtagtatctgttagtaacactagcctgagagcacagatgatattgattgattgtgtcttcgtttctaggcctttaaataagtgaagtgtctttcccaggttgtttggtattttcattgtggccttagcagagatttagaaaacattggggtatggcttatggcgaatgtgggttttttccactccaggttactttccctctttgttataatgtcttaggaatcagaagtagacaagaggctagcaacatgtattcatgagacaaatttattaccttcactgttggattaagttagaaatgtctgcctcagctgtttcaaaaagtaatcttgaatcactttagtgttcaggtttgggtgacagcaggtttcaatagaatccatgtatacttttttaaaacacttcatctattgcatgttactttgatttgtaattaaaatggacactgtctcttttttccttctcagaaaaatttgttctgaccactaaacacactctgctgctctgcccccttgtttgcacttctccagatgtgttttttgagaaaggtgaacattttaaccaatcttacgtttcctattcagcttttccaagtatgaggattcagaatacttagcttttatgagtaactaagaggcagctagcaacattgaaagcagaactgtattctttcttaccctagacctctac

SEQ ID NO: 342 - DNA, 1567 bp, Homo sapiens
gtcccgccagtccgccaacacagtagtgccggcccccctctttccctggccctgccccccctccccgcctttggctcgctccgcctttctgccccccacccccacctcacgggtacgggccattcccggccaggaaacgccgtggcgccgcgttgggcctaactcgagtcctgccgcctcccgggagtgccgtgcgccgcagcccgggcccaggccccggcagcgcctgggacaaggtcttcagaactactagcagataatttggggggacttcatattcagaagtctatataaaggattcctcatgtccataacatgttggatgaggctctgcagctcacccccactctcagagtggtcagtctccattaattggaccccgtgatttccaatctctgctgtgttggacgtcatgagcattgcaatccctctgggagtcaccacatcagatacatcctactcagatatggctgctggatcagaccctgaatctgtggaggctagtccagcagttaatgagaagagcgtgtattccactcataattatgggaccactcagaggcatgggtgtcgaggactgccttatgctacgatcatccctcgttctgacctgaatggcctgccgtcgcctgtagaggaacgctgtggagacagcccgaactctgaaggagaaactgtacctacctggtgtccttgtggtctttctcaggatggcttccttctcaactgtgacaagtgcaggggaatgagcagggggaaggttattagacttcatcggcggaagcaggacaacatatcaggtggggatagcagtgcaacagaaagctgggatgaggagctttctccttccactgtgttgtatacagcaacacagcacacacctacaagcatcaccttaactgttagaagaaccaaacccaagaagcggaaaaagagtccagaaaagggtcgtgcagcaccaaagacgaagaaaatcaagaattctccctctgaagcacagaatttagatgagaatacaactgagggctgggaaaatcggataagactatggactgaccagtatgaagaagctttcactaatcagtacagtgcagatgtacagaacgcgcttgaacaacacctacattctagcaaggaatttgtgggcaaacctactattttagacactattaataagactgaattggcctgtaataacacagttattggttcccaaatgcaggtaagcaccaaagggttgaggactctctaagtagctgaaattttaagaacccaggaagagggtaatggattggaattactgttccttccaaatgtacaaggccatggaataacagattagccaggtgttgatcatatgtaaccaaaagtaggttatattaactggaaactacctggatacatatttttaaactacctttattaataaaaaaatagatgaattgaggctgtgtgcagtgcagtggctcactcctataatacaacactttggcaagaagccaaggtggaaggattgcttgaggccagcagttcaagaccagcctgtacaacatagtgagaccctctc

SEQ ID NO: 343 - DNA, 2336 bp, Homo sapiens
gtcccgccagtccgccaacacagtagtgccggcccccctctttccctggccctgccccccctccccgcctttggctcgctccgcctttctgccccccacccccacctcacgggtacgggccattcccggccaggaaacgccgtggcgccgcgttgggcctaactcgagtcctgccgcctcccgggagtgccgtgcgccgcagcccgggcccaggccccggcagcgcctgggacaaggtcttcagaactactagcagataatttggggggacttcatattcagaagtctatataaaggattcctcatgtccataacatgttggatgaggctctgcagctcacccccactctcagagtggtcagtctccattaattggaccccgtgatttccaatctctgctgtgttggacgtcatgagcattgcaatccctctgggagtcaccacatcagatacatcctactcagatatggctgctggatcagaccctgaatctgtggaggctagtccagcagttaatgagaagagcgtgtattccactcataattatgggaccactcagaggcatgggtgtcgaggactgccttatgctacgatcatccctcgttctgacctgaatggcctgccgtcgcctgtagaggaacgctgtggagacagcccgaactctgaaggagaaactgtacctacctggtgtccttgtggtctttctcaggatggcttccttctcaactgtgacaagtgcaggggaatgagcagggggaaggttattagacttcatcggcggaagcaggacaacatatcaggtggggatagcagtgcaacagaaagctgggatgaggagctttctccttccactgtgttgtatacagcaacacagcacacacctacaagcatcaccttaactgttagaagaaccaaacccaagaagcggaaaaagagtccagaaaagggtcgtgcagcaccaaagacgaagaaaatcaagaattctccctctgaagcacagaatttagatgagaatacaactgagggctgggaaaatcggataagactatggactgaccagtatgaagaagctttcactaatcagtacagtgcagatgtacagaacgcgcttgaacaacacctacattctagcaaggaatttgtgggcaaacctactattttagacactattaataagactgaattggcctgtaataacacagttattggttcccaaatgcagttacagctgggaagagtcactcgtgttcaaaagcaccggaagatcctgagggctgcaagagatttggctttggacactcttataatagagtatcgtgggaaagtcatgttacgacagcaatttgaggtcaatgggcatttcttcaaaaaaccatacccctttgtgctcttctactcaaaattcaatggtgtagagatgtgtgtggatgcccgtactttcggtaatgatgctcggttcatcagaagatcatgtacaccaaatgcagaggtgcgacacatgattgcagatgggatgattcacctgtgcatctatgctgtgtctgccatcaccaaggatgctgaggtcaccatagcatttgattatgagtatagtaactgtaattataaagtggactgtgcctgtcacaagggaaaccggaattgtcctatacaaaaaaggaatcctaatgctacagaactgccactcctaccacctcctccaagcctacccaccattggagcagagactagacgtagaaaagcacgacggaaagagctagagatggagcagcagaatgaggcttcagaggagaataatgaccagcaatcacaagaagttccagaaaaagtaactgtatccagtgatcatgaggtaatcgcccctggtcaaatgatgatgctatggcatcaatcctccaaaggaagaggaacccgggttgccgcatggtttaagtaggggagctatagtaacacttagtgccctttatatcaatgtgggtttattgtgttcatacatttctttctgttttacaaagtcaaaaacatcctttgctggttttgcaccagagaataggggttagttatcatctgtgtttaccatgtggcctcacatgagttaacagtttaaagcactagagattgttatagagagttttaagctaccagaataaaacagattgattttttctcagagcttgagtacagctgaatattgcctctatcttaaaggaagtagacaatccagaagaaaaaccagaagaagagaaagaagaggttatagatgaccaggagaacctagctcatagcaggaggaccagggaagatagaaaggtagaagccatcatgcatgcttttga

SEQ ID NO: 344 - DNA, 4583 bp, Homo sapiens
gtcccgccagtccgccaacacagtagtgccggcccccctctttccctggccctgccccccctccccgcctttggctcgctccgcctttctgccccccacccccacctcacgggtacgggccattcccggccaggaaacgccgtggcgccgcgttgggcctaactcgagtcctgccgcctcccgggagtgccgtgcgccgcagcccgggcccaggccccggcagcgcctgggacaaggtcttcagaactactagcagataatttggggggacttcatattcagaagtctatataaaggattcctcatgtccataacatgttggatgaggctctgcagctcacccccactctcagagtggtcagtctccattaattggaccccgtgatttccaatctctgctgtgttggacgtcatgagcattgcaatccctctgggagtcaccacatcagatacatcctactcagatatggctgctggatcagaaaaggaagtggaagccccctacctttcaagacgaagtggcactacaccaggatgtgaaagtccagcgaaagagacccaaggggcctagggggcagcacacccccagaagccaagtctattccaggcagtaccagggattagggtctgggctggaaaaatcctggtgttttgaatatgttcaggtccagttcagactcttgatcccacagccacttcttgagtgagccctgaatctgtggaggctagtccagcagttaatgagaagagcgtgtattccactcataattatgggaccactcagaggcatgggtgtcgaggactgccttatgctcatgacgaagttgccccttttgcacttccctgactccagcggacgtctagccctgcatcattgttcttgtttttatgtcccagttgaccttggcattttgttttatcactttcctggttgaagccaaaaaacaaagggatcataattacggagcccctcctcctccgacacctcctgcttctccccctgtccagacgatcatccctcgttctgacctgaatggcctgccgtcgcctgtagaggaacgctgtggagacagcccgaactctgaaggagaaactgtacctacctggtgtccttgtggtctttctcaggatggcttccttctcaactgtgacaagtgcaggggaatgagcagggggaaggttattagacttcatcggcggaagcaggacaacatatcaggtggggatagcagtgcaacagaaagctgggatgaggagctttctccttccactgtgttgtatacagcaacacagcacacacctacaagcatcaccttaactgttagaagaaccaaacccaagaagcggaaaaagagtccagaaaagggtcgtgcagcaccaaagacgaagaaaatcaagaattctccctctgaagcacagaatttagatgagaatacaactgagggctgggaaaatcggataagactatggactgaccagtatgaagaagctttcactaatcagtacagtgcagatgtacagaacgcgcttgaacaacacctacattctagcaaggaatttgtgggcaaacctactattttagacactattaataagactgaattggcctgtaataacacagttattggttcccaaatgcagttacagctgggaagagtcactcgtgttcaaaagcaccggaagatcctgagggctgcaagagatttggctttggacactcttataatagagtatcgtgggaaagtcatgttacgacagcaatttgaggtcaatgggcatttcttcaaaaaaccatacccctttgtgctcttctactcaaaattcaatggtgtagagatgtgtgtggatgcccgtactttcggtaatgatgctcggttcatcagaagatcatgtacaccaaatgcagaggtgcgacacatgattgcagatgggatgattcacctgtgcatctatgctgtgtctgccatcaccaaggatgctgaggtcaccatagcatttgattatgagtatagtaactgtaattataaagtggactgtgcctgtcacaagggaaaccggaattgtcctatacaaaaaaggaatcctaatgctacagaactgccactcctaccacctcctccaagcctacccaccattggagcagagactagacgtagaaaagcacgacggaaagagctagagatggagcagcagaatgaggcttcagaggagaataatgaccagcaatcacaagaagttccagaaaaagtaactgtatccagtgatcatgaggaagtagacaatccagaagaaaaaccagaagaagagaaagaagaggttatagatgaccaggagaacctagctcatagcaggaggaccagggaagatagaaaggtagaagccatcatgcatgcttttgaaaacttagagaaaagaaagaagcggcgggatcagcccttggaacagagcaactctgatgtagagattactacaaccacctcagagactcctgttggtgaagagacaaaaactgaagcccctgaatctgaagttagcaactctgtttcaaatgttaccatcccaagcaccccacagagtgttggtgtgaatacccggaggtcttcccaagcaggggatattgctgcagaaaaactagtccccaagccacctccagcaaagccttctaggccccggccgaagagtcgaatttctcggtacaggaccagttcagcccaaagactaaagcgtcagaagcaggccaatgcacagcaggcagaattgtcacaagctgccttggaagagggaggaagtaacagtttagtaactcctactgaagctggaagtctagacagttcaggagaaaacaggccattaacagggtctgacccaactgtggtgtcaattactggatcccatgtcaaccgtgctgcatctaaataccccaaaaccaaaaagtatctagttacagaatggttgaatgacaaagcagagaagcaagagtgccctgttgagtgccctttacgtatcacaacggatccaactgtactggcaacgaccctaaacatgttaccaggtcttatccattccccgttaatttgcaccacccccaaacactacattcgctttggctcaccctttatccctgagagacgtcgaaggccccttctgcctgatggcacattcagctcctgtaagaagcgctggataaaacaagccttagaagaagggatgactcaaacatcatctgtaccccaagagactagaactcagcacctataccaaagcaatgagaatagtagctcttctagtatctgcaaagacaatgcagacttgttgagcccattaaagaaatggaagtctcgctatctgatggagcagaatgtcaccaagttacttcggcctctgtctccagtcacaccaccccctcccaattcaggctcaaagagtccccagctggccacacctggctcatctcacccaggagaagaggagtgtcgaaatggatacagcctcatgttttcaccagtcacatctcttactactgctagtcgctgcaacactcctctacagtttgaggtgatttgggtttggttgctgggagtgctggatatgaaaatcatcatttgtaccttctcatttcaaatataataccattccaaatgtttctttactatctttcttccccatctcagtaagagaatgggaaacctcagggtcattgtggcctgttacctggtagcctctcatcttggcagcccctatgcttcccaaaataggcatactgctaccacaaatcccattcatgtatcttttgcatgcagtccatcaatctccataagtttaggtagtaagcatgctagatctccatcgttatctttactgtatactttggtcaaaataggcctctagctgcctgtagtatctgttagtaacactagcctgagagcacagatgatattgattgattgtgtcttcgtttctaggcctttaaataagtgaagtgtctttcccaggttgtttggtattttcattgtggccttagcagagatttagaaaacattggggtatggcttatggcgaatgtgggttttttccactccaggttactttccctctttgttataatgtcttaggaatcagaagtagacaagaggctagcaacatgtattcatgagacaaatttattaccttcactgttggattaagttagaaatgtctgcctcagctgtttcaaaaagtaatcttgaatcactttagtgttcaggtttgggtgacagcaggtttcaatagaatccatgtatacttttttaaaacacttcatctattgcatgttactttgatttgtaattaaaatggacactgtctcttttttccttctcagaaaaatttgttctgaccactaaacacactctgctgctctgcccccttgtttgcacttctccagatgtgttttttgagaaaggtgaacattttaaccaatcttacgtttcctattcagcttttccaagtatgaggattcagaatacttagcttttatgagtaactaagaggcagctagcaacattgaaagcagaactgtattctttcttaccctagacctctac

SEQ ID NO: 345 - DNA, 7942 bp, Homo sapiens
gtcccgccagtccgccaacacagtagtgccggcccccctctttccctggccctgccccccctccccgcctttggctcgctccgcctttctgccccccacccccacctcacgggtacgggccattcccggccaggaaacgccgtggcgccgcgttgggcctaactcgagtcctgccgcctcccgggagtgccgtgcgccgcagcccgggcccaggccccggcagcgcctgggacaaggtcttcagaactactagcagataatttggggggacttcatattcagaagtctatataaaggattcctcatgtccataacatgttggatgaggctctgcagctcacccccactctcagagtggtcagtctccattaattggaccccgtgatttccaatctctgctgtgttggacgtcatgagcattgcaatccctctgggagtcaccacatcagatacatcctactcagatatggctgctggatcagaccctgaatctgtggaggctagtccagcagttaatgagaagagcgtgtattccactcataattatgggaccactcagaggcatgggtgtcgaggactgccttatgctacgatcatccctcgttctgacctgaatggcctgccgtcgcctgtagaggaacgctgtggagacagcccgaactctgaaggagaaactgtacctacctggtgtccttgtggtctttctcaggatggcttccttctcaactgtgacaagtgcaggggaatgagcagggggaaggttattagacttcatcggcggaagcaggacaacatatcaggtggggatagcagtgcaacagaaagctgggatgaggagctttctccttccactgtgttgtatacagcaacacagcacacacctacaagcatcaccttaactgttagaagaaccaaacccaagaagcggaaaaagagtccagaaaagggtcgtgcagcaccaaagacgaagaaaatcaagaattctccctctgaagcacagaatttagatgagaatacaactgagggctgggaaaatcggataagactatggactgaccagtatgaagaagctttcactaatcagtacagtgcagatgtacagaacgcgcttgaacaacacctacattctagcaaggaatttgtgggcaaacctactattttagacactattaataagactgaattggcctgtaataacacagttattggttcccaaatgcagttacagctgggaagagtcactcgtgttcaaaagcaccggaagatcctgagggctgcaagagatttggctttggacactcttataatagagtatcgtgggaaagtcatgttacgacagcaatttgaggtcaatgggcatttcttcaaaaaaccatacccctttgtgctcttctactcaaaattcaatggtgtagagatgtgtgtggatgcccgtactttcggtaatgatgctcggttcatcagaagatcatgtacaccaaatgcagaggtgcgacacatgattgcagatgggatgattcacctgtgcatctatgctgtgtctgccatcaccaaggatgctgaggtcaccatagcatttgattatgagtatagtaactgtaattataaagtggactgtgcctgtcacaagggaaaccggaattgtcctatacaaaaaaggaatcctaatgctacagaactgccactcctaccacctcctccaagcctacccaccattggagcagagactagacgtagaaaagcacgacggaaagagctagagatggagcagcagaatgaggcttcagaggagaataatgaccagcaatcacaagaagttccagaaaaagtaactgtatccagtgatcatgaggaagtagacaatccagaagaaaaaccagaagaagagaaagaagaggttatagatgaccaggagaacctagctcatagcaggaggaccagggaagatagaaaggtagaagccatcatgcatgcttttgaaaacttagagaaaagaaagaagcggcgggatcagcccttggaacagagcaactctgatgtagagattactacaaccacctcagagactcctgttggtgaagagacaaaaactgaagcccctgaatctgaagttagcaactctgtttcaaatgttaccatcccaagcaccccacagagtgttggtgtgaatacccggaggtcttcccaagcaggggatattgctgcagaaaaactagtccccaagccacctccagcaaagccttctaggccccggccgaagagtcgaatttctcggtacaggaccagttcagcccaaagactaaagcgtcagaagcaggccaatgcacagcaggcagaattgtcacaagctgccttggaagagggaggaagtaacagtttagtaactcctactgaagctggaagtctagacagttcaggagaaaacaggccattaacagggtctgacccaactgtggtgtcaattactggatcccatgtcaaccgtgctgcatctaaataccccaaaaccaaaaagtatctagttacagaatggttgaatgacaaagcagagaagcaagagtgccctgttgagtgccctttacgtatcacaacggatccaactgtactggcaacgaccctaaacatgttaccaggtcttatccattccccgttaatttgcaccacccccaaacactacattcgctttggctcaccctttatccctgagagacgtcgaaggccccttctgcctgatggcacattcagctcctgtaagaagcgctggataaaacaagccttagaagaagggatgactcaaacatcatctgtaccccaagagactagaactcagcacctataccaaagcaatgagaatagtagctcttctagtatctgcaaagacaatgcagacttgttgagcccattaaagaaatggaagtctcgctatctgatggagcagaatgtcaccaagttacttcggcctctgtctccagtcacaccaccccctcccaattcaggctcaaagagtccccagctggccacacctggctcatctcacccaggagaagaggagtgtcgaaatggatacagcctcatgttttcaccagtcacatctcttactactgctagtcgctgcaacactcctctacagtttgagctttgtcaccgaaaagacctggatttggcaaaagtaggataccttgactccaacactaacagctgtgctgatagaccttccctactcaactcaggtcattctgacctggctcctcatccctccctcggacccacttctgagactggtttcccaagcagaagtggagatggacatcagaccctcgtgagaaactcagaccaggcatttcggacagagttcaacttgatgtatgcctactcccctttgaatgctatgcctcgagcagatggactgtatcgaggatctcctctagtgggggataggaagcctttacatttggatgggggatattgttcccctgcagaaggattttccagcagatatgaacatggcttaatgaaagacctctctcgtggatccttgtcacctggtggtgaaagggcctgtgaaggagtcccatctgccccccagaacccaccacagaggaaaaaagtatccctgctggagtaccgaaaacggaaacaagaagctaaggaaaattctgctggtgggggaggtgactctgcacagagcaaaagcaagtctgcaggagctgggcaaggcagcagtaactccgtttccgacactggtgcccatggtgtgcagggatcctcagcccgaactccatcttcccctcacaaaaaattctccccatctcattcctctatgtcccatttggaggcggtaagcccatcagattccagaggcacttcttcatctcactgcagacctcaagagaatatcagcagtaggtggtaagtttatatttgatgttttatagttaaattgggggtgggggggagtatatatctaagatcattcccagttttacctaaaatctatgggaacacttgatgggaacatctgagacagccagccaacagtaccatctgtcctgttcagctgatttaataatgtcagctgcaaccccccagctttgcagaattaagaattaccaacatgcctgtggagcagtgctttggatgacatgtagttatggatgcagatgagctctttcatttggtgggcactaacactgcctttcctatttctcatttcacatgaaaggtgagtcaagaatccagccaagttccacatgaattaacaacagatgtctctcttccacacagctagcatatacagagcaaaaagacattctgaaaggatttgtctggtttaggggagaccacaaatttaaaaatgaataatactggtggcaaatactgaggatcaaatgtgtgaaatagagaatgaagcacaggagttcagggatcttgaactgaaaaaaataagtctgggaaagaacagtcctggctcaaatgtttcatgttcattaatctatgaaacctttattaaaccagtactgtgtatcaggcacatgatttcctaaaggagaaattttaacattttaaatgggggttaagggaagttaacatctttaacccactttttccttgatttctttttctttaaaagtggttgttgttgatgtttctcttttgtgcctgacatagttggaggcagaggaaatacgttgttttaaattggttctgaagaaagtaatgtttaagaggatgttttaagaaaatacactgtgcactggttagggcttcatttgttttggttaagtcctgtggcttgaacttgcaccctgttgcctttacaggatggttcccacatcagtagaacgactccgagaaggagggagcatccccaaggtcctccgaagcagcgtgagggtggcccaaaagggagagccctctcccacatgggagagtaacatcacagagaaagactcaggtgagcccatggccttctgctgccaccacattcagggacacatgagccgagtcctgtacagttcatgcctagtgctgagttgaggtgagtcagtttctgatgcagttgggctccaccgcatgctaggttccagcccacttatgctcatttgggctaccacatttgtaagatctagcattgcttgctctctgtctgctcttttttccccaaggaatacctttctgtaactctcatctctccaaagtcctggaaatctacctcgatgaaggatgaagagaaagaagacgggaatcacatcaggcatttagaacatagcccataattaaccactcattttgcccttctggcatgctgcactcacccaatttgtcacaaagagagcagtacgggttggtgatggcactggtgatttaaatgaaaaatggctctttcttacttattctaagaagccaagttgatttttttttatatatgttaccttccagaccctgcagatggagaaggcccagagacattaagctcagcactctctaaaggagcaacagtttacagcccttccagatacagctaccaggtgagatgagaaattgctggtctctagccataggagtgtgttctgggtcccaaattgtcctggtcatcctttgccattgagatgctgtctttgcatatagtttcagcagccttggaaataagtcatcatctgcttgtcctcaggtaataaattatgccagaagatgaatacggtgatcaaagacagacattttactgcctttggtttcctaaaaagaatacatggttaaaagatgaagaaaaaagaatgtagggtattataaatgttcaccagccatttaagggacttgttcgcgtccttattcgtttcctcccaactttgtctagctcctgcagtgtgatagtcctcggacagaatcacaaagcctccttcagcagagttcctcccccttcagaggacatcctacacagtctccaggatacagttatcgaactactgcactgagacctggaaaccccccctctcacggttcttcagaatcatccctctcttccacgtcctattccagccccgcccaccctgtgtccacagactcgttggccccatttacggggacaccagggtattttagcagccagccacattctggaaacagcactggcagcaatcttccaaggaggagctgcccttctagtgctgctagccctaccctgcagggaccctcagactcgccaacctcagattcagtttctcagtccagcacaggaactctgagttccacctcctttcctcagaactctaggtcgtcattgccatcagacttacggactatcagtctgcccagtgctgggcagtcagctgtctaccaggcctccagggtatctgcggtttccaattcacagcactacccacaccgtgggagtgggggtgtgcaccagtaccgactccagccactgcaagggtcaggagtcaagactcagacgggactttcctagggcttctggatttgggcaaacagaactgaatgagcccatagctgcttccttccagctgcctctggaacctaggccgagcatattgctgaggaacggggggtacaaggtgccagaggattgggtctggtggacaagaaacaagacttgtggtcacaattggcctctggccttggagaaagctgtaaatcttgtctgaagcagagactataaagaagtttctccctgctgtcaagggtacattgttgacaagcaaatggtgtttcggttagtaacggttctaagtgcaatgagttgtgttgaagcctccgtctcccatccttgcctgtagcccgtagtcacttgtgcagtgaggacatctttttaaatttaaaaaaaaaaaaaaaaaaagttttcaaaggaaaaaaagttaaaagagccaatctcaaagccccaagccatctgagtactgttagggttttatgcacttaagaaaaaaggtaggtatgtaaatgttcatcctaagacaaccattccaaaagcaggtatctggccaatgtgtgtccaccaagaatactgtttatctttgtcttaagatcaccaagaaataggcaaggatagtaaagcttggaacctgcaccaactggagggtgcctggctctttgaagaaaagctcatggtcagctcttgattattcgggagcagattatttgagtagattgtctgagcctccaactgttaccatcctactcccccttcccaagctatttcacagctcagtaacccatgaagtaagtagacaagaaaaggaggaatgagacatgatataggccaattgcattgctacttaccagcttttggcaataaatttcattaggaaggataccgagtggtttgggaatgcttcgaattttattttttctactcccaattaatcaggagttgatgatcccatgagcaggaccgcctccatgattggggagcatgcacttgtgactgcagggtaagagtgggaagataggtttgtggagtggcaccgacaggactgtgattgtgtgtgggcctgccccacatttctctgggggatgcttatgtgagagtgggcccagtgaaagagttaccaagccacccacacccctaacactgttctggatgagagatgagagcagaccggcttctccccatcagtgcattgtgcctgttgtacacccctggaggagccctggagccagcccaggtggggtacacaatctttttaaattccatatggttgccagcttatttctttcacttgtttactgtaatatctggcgtgtttttatttatctaattttgtattcagttataaccatggtaggggtagtgaatatatgacaggtgtaatccctggtgctgcagtggaccttcttttcttttggacaagataatactgtgagtttccctccttccttccctctaatttgttttccttttttccccagcctcttgcatccccttcttttc

SEQ ID NO: 346 - DNA, 6546 bp, Homo sapiens
gtcccgccagtccgccaacacagtagtgccggcccccctctttccctggccctgccccccctccccgcctttggctcgctccgcctttctgccccccacccccacctcacgggtacgggccattcccggccaggaaacgccgtggcgccgcgttgggcctaactcgagtcctgccgcctcccgggagtgccgtgcgccgcagcccgggcccaggccccggcagcgcctgggacaaggtcttcagaactactagcagataatttggggggacttcatattcagaagtctatataaaggattcctcatgtccataacatgttggatgaggctctgcagctcacccccactctcagagtggtcagtctccattaattggaccccgtgatttccaatctctgctgtgttggacgtcatgagcattgcaatccctctgggagtcaccacatcagatacatcctactcagatatggctgctggatcagaccctgaatctgtggaggctagtccagcagttaatgagaagagcgtgtattccactcataattatgggaccactcagaggcatgggtgtcgaggactgccttatgctacgatcatccctcgttctgacctgaatggcctgccgtcgcctgtagaggaacgctgtggagacagcccgaactctgaaggagaaactgtacctacctggtgtccttgtggtctttctcaggatggcttccttctcaactgtgacaagtgcaggggaatgagcagggggaaggttattagacttcatcggcggaagcaggacaacatatcaggtggggatagcagtgcaacagaaagctgggatgaggagctttctccttccactgtgttgtatacagcaacacagcacacacctacaagcatcaccttaactgttagaagaaccaaacccaagaagcggaaaaagagtccagaaaagggtcgtgcagcaccaaagacgaagaaaatcaagaattctccctctgaagcacagaatttagatgagaatacaactgagggctgggaaaatcggataagactatggactgaccagtatgaagaagctttcactaatcagtacagtgcagatgtacagaacgcgcttgaacaacacctacattctagcaaggaatttgtgggcaaacctactattttagacactattaataagactgaattggcctgtaataacacagttattggttcccaaatgcagttacagctgggaagagtcactcgtgttcaaaagcaccggaagatcctgagggctgcaagagatttggctttggacactcttataatagagtatcgtgggaaagtcatgttacgacagcaatttgaggtcaatgggcatttcttcaaaaaaccatacccctttgtgctcttctactcaaaattcaatggtgtagagatgtgtgtggatgcccgtactttcggtaatgatgctcggttcatcagaagatcatgtacaccaaatgcagaggtgcgacacatgattgcagatgggatgattcacctgtgcatctatgctgtgtctgccatcaccaaggatgctgaggtcaccatagcatttgattatgagtatagtaactgtaattataaagtggactgtgcctgtcacaagggaaaccggaattgtcctatacaaaaaaggaatcctaatgctacagaactgccactcctaccacctcctccaagcctacccaccattggagcagagactagacgtagaaaagcacgacggaaagagctagagatggagcagcagaatgaggcttcagaggagaataatgaccagcaatcacaagaagttccagaaaaagtaactgtatccagtgatcatgaggaagtagacaatccagaagaaaaaccagaagaagagaaagaagaggttatagatgaccaggagaacctagctcatagcaggaggaccagggaagatagaaaggtagaagccatcatgcatgcttttgaaaacttagagaaaagaaagaagcggcgggatcagcccttggaacagagcaactctgatgtagagattactacaaccacctcagagactcctgttggtgaagagacaaaaactgaagcccctgaatctgaagttagcaactctgtttcaaatgttaccatcccaagcaccccacagagtgttggtgtgaatacccggaggtcttcccaagcaggggatattgctgcagaaaaactagtccccaagccacctccagcaaagccttctaggccccggccgaagagtcgaatttctcggtacaggaccagttcagcccaaagactaaagcgtcagaagcaggccaatgcacagcaggcagaattgtcacaagctgccttggaagagggaggaagtaacagtttagtaactcctactgaagctggaagtctagacagttcaggagaaaacaggccattaacagggtctgacccaactgtggtgtcaattactggatcccatgtcaaccgtgctgcatctaaataccccaaaaccaaaaagtatctagttacagaatggttgaatgacaaagcagagaagcaagagtgccctgttgagtgccctttacgtatcacaacggatccaactgtactggcaacgaccctaaacatgttaccaggtcttatccattccccgttaatttgcaccacccccaaacactacattcgctttggctcaccctttatccctgagagacgtcgaaggccccttctgcctgatggcacattcagctcctgtaagaagcgctggataaaacaagccttagaagaagggatgactcaaacatcatctgtaccccaagagactagaactcagcacctataccaaagcaatgagaatagtagctcttctagtatctgcaaagacaatgcagacttgttgagcccattaaagaaatggaagtctcgctatctgatggagcagaatgtcaccaagttacttcggcctctgtctccagtcacaccaccccctcccaattcaggctcaaagagtccccagctggccacacctggctcatctcacccaggagaagaggagtgtcgaaatggatacagcctcatgttttcaccagtcacatctcttactactgctagtcgctgcaacactcctctacagtttgagctttgtcaccgaaaagacctggatttggcaaaagtaggataccttgactccaacactaacagctgtgctgatagaccttccctactcaactcaggtcattctgacctggctcctcatccctccctcggacccacttctgagactggtttcccaagcagaagtggagatggacatcagaccctcgtgagaaactcagaccaggcatttcggacagagttcaacttgatgtatgcctactcccctttgaatgctatgcctcgagcagatggactgtatcgaggatctcctctagtgggggataggaagcctttacatttggatgggggatattgttcccctgcagaaggattttccagcagatatgaacatggcttaatgaaagacctctctcgtggatccttgtcacctggtggtgaaagggcctgtgaaggagtcccatctgccccccagaacccaccacagaggaaaaaagtatccctgctggagtaccgaaaacggaaacaagaagctaaggaaaattctgctggtgggggaggtgactctgcacagagcaaaagcaagtctgcaggagctgggcaaggcagcagtaactccgtttccgacactggtgcccatggtgtgcagggatcctcagcccgaactccatcttcccctcacaaaaaattctccccatctcattcctctatgtcccatttggaggcggtaagcccatcagattccagaggcacttcttcatctcactgcagacctcaagagaatatcagcagtaggtggatggttcccacatcagtagaacgactccgagaaggagggagcatccccaaggtcctccgaagcagcgtgagggtggcccaaaagggagagccctctcccacatgggagagtaacatcacagagaaagactcagaccctgcagatggagaaggcccagagacattaagctcagcactctctaaaggagcaacagtttacagcccttccagatacagctaccaggtgagatgagaaattgctggtctctagccataggagtgtgttctgggtcccaaattgtcctggtcatcctttgccattgagatgctgtctttgcatatagtttcagcagccttggaaataagtcatcatctgcttgtcctcaggtaataaattatgccagaagatgaatacggtgatcaaagacagacattttactgcctttggtttcctaaaaagaatacatggttaaaagatgaagaaaaaagaatgtagggtattataaatgttcaccagccatttaagggacttgttcgcgtccttattcgtttcctcccaactttgtctagctcctgcagtgtgatagtcctcggacagaatcacaaagcctccttcagcagagttcctcccccttcagaggacatcctacacagtctccaggatacagttatcgaactactgcactgagacctggaaaccccccctctcacggttcttcagaatcatccctctcttccacgtcctattccagccccgcccaccctgtgtccacagactcgttggccccatttacggggacaccagggtattttagcagccagccacattctggaaacagcactggcagcaatcttccaaggaggagctgcccttctagtgctgctagccctaccctgcagggaccctcagactcgccaacctcagattcagtttctcagtccagcacaggaactctgagttccacctcctttcctcagaactctaggtcgtcattgccatcagacttacggactatcagtctgcccagtgctgggcagtcagctgtctaccaggcctccagggtatctgcggtttccaattcacagcactacccacaccgtgggagtgggggtgtgcaccagtaccgactccagccactgcaagggtcaggagtcaagactcagacgggactttcctagggcttctggatttgggcaaacagaactgaatgagcccatagctgcttccttccagctgcctctggaacctaggccgagcatattgctgaggaacggggggtacaaggtgccagaggattgggtctggtggacaagaaacaagacttgtggtcacaattggcctctggccttggagaaagctgtaaatcttgtctgaagcagagactataaagaagtttctccctgctgtcaagggtacattgttgacaagcaaatggtgtttcggttagtaacggttctaagtgcaatgagttgtgttgaagcctccgtctcccatccttgcctgtagcccgtagtcacttgtgcagtgaggacatctttttaaatttaaaaaaaaaaaaaaaaaaagttttcaaaggaaaaaaagttaaaagagccaatctcaaagccccaagccatctgagtactgttagggttttatgcacttaagaaaaaaggtaggtatgtaaatgttcatcctaagacaaccattccaaaagcaggtatctggccaatgtgtgtccaccaagaatactgtttatctttgtcttaagatcaccaagaaataggcaaggatagtaaagcttggaacctgcaccaactggagggtgcctggctctttgaagaaaagctcatggtcagctcttgattattcgggagcagattatttgagtagattgtctgagcctccaactgttaccatcctactcccccttcccaagctatttcacagctcagtaacccatgaagtaagtagacaagaaaaggaggaatgagacatgatataggccaattgcattgctacttaccagcttttggcaataaatttcattaggaaggataccgagtggtttgggaatgcttcgaattttattttttctactcccaattaatcaggagttgatgatcccatgagcaggaccgcctccatgattggggagcatgcacttgtgactgcagggtaagagtgggaagataggtttgtggagtggcaccgacaggactgtgattgtgtgtgggcctgccccacatttctctgggggatgcttatgtgagagtgggcccagtgaaagagttaccaagccacccacacccctaacactgttctggatgagagatgagagcagaccggcttctccccatcagtgcattgtgcctgttgtacacccctggaggagccctggagccagcccaggtggggtacacaatctttttaaattccatatggttgccagcttatttctttcacttgtttactgtaatatctggcgtgtttttatttatctaattttgtattcagttataaccatggtaggggtagtgaatatatgacaggtgtaatccctggtgctgcagtggaccttcttttcttttggacaagataatactgtgagtttccctccttccttccctctaatttgttttccttttttccccagcctcttgcatccccttcttttc

SEQ ID NO: 347 - DNA, 6277 bp, Homo sapiens
gtcccgccagtccgccaacacagtagtgccggcccccctctttccctggccctgccccccctccccgcctttggctcgctccgcctttctgccccccacccccacctcacgggtacgggccattcccggccaggaaacgccgtggcgccgcgttgggcctaactcgagtcctgccgcctcccgggagtgccgtgcgccgcagcccgggcccaggccccggcagcgcctgggacaaggtcttcagaactactagcagataatttggggggacttcatattcagaagtctatataaaggattcctcatgtccataacatgttggatgaggctctgcagctcacccccactctcagagtggtcagtctccattaattggaccccgtgatttccaatctctgctgtgttggacgtcatgagcattgcaatccctctgggagtcaccacatcagatacatcctactcagatatggctgctggatcagaccctgaatctgtggaggctagtccagcagttaatgagaagagcgtgtattccactcataattatgggaccactcagaggcatgggtgtcgaggactgccttatgctacgatcatccctcgttctgacctgaatggcctgccgtcgcctgtagaggaacgctgtggagacagcccgaactctgaaggagaaactgtacctacctggtgtccttgtggtctttctcaggatggcttccttctcaactgtgacaagtgcaggggaatgagcagggggaaggttattagacttcatcggcggaagcaggacaacatatcaggtggggatagcagtgcaacagaaagctgggatgaggagctttctccttccactgtgttgtatacagcaacacagcacacacctacaagcatcaccttaactgttagaagaaccaaacccaagaagcggaaaaagagtccagaaaagggtcgtgcagcaccaaagacgaagaaaatcaagaattctccctctgaagcacagaatttagatgagaatacaactgagggctgggaaaatcggataagactatggactgaccagtatgaagaagctttcactaatcagtacagtgcagatgtacagaacgcgcttgaacaacacctacattctagcaaggaatttgtgggcaaacctactattttagacactattaataagactgaattggcctgtaataacacagttattggttcccaaatgcagttacagctgggaagagtcactcgtgttcaaaagcaccggaagatcctgagggctgcaagagatttggctttggacactcttataatagagtatcgtgggaaagtcatgttacgacagcaatttgaggtcaatgggcatttcttcaaaaaaccatacccctttgtgctcttctactcaaaattcaatggtgtagagatgtgtgtggatgcccgtactttcggtaatgatgctcggttcatcagaagatcatgtacaccaaatgcagaggtgcgacacatgattgcagatgggatgattcacctgtgcatctatgctgtgtctgccatcaccaaggatgctgaggtcaccatagcatttgattatgagtatagtaactgtaattataaagtggactgtgcctgtcacaagggaaaccggaattgtcctatacaaaaaaggaatcctaatgctacagaactgccactcctaccacctcctccaagcctacccaccattggagcagagactagacgtagaaaagcacgacggaaagagctagagatggagcagcagaatgaggcttcagaggagaataatgaccagcaatcacaagaagttccagaaaaagtaactgtatccagtgatcatgaggaagtagacaatccagaagaaaaaccagaagaagagaaagaagaggttatagatgaccaggagaacctagctcatagcaggaggaccagggaagatagaaaggtagaagccatcatgcatgcttttgaaaacttagagaaaagaaagaagcggcgggatcagcccttggaacagagcaactctgatgtagagattactacaaccacctcagagactcctgttggtgaagagacaaaaactgaagcccctgaatctgaagttagcaactctgtttcaaatgttaccatcccaagcaccccacagagtgttggtgtgaatacccggaggtcttcccaagcaggggatattgctgcagaaaaactagtccccaagccacctccagcaaagccttctaggccccggccgaagagtcgaatttctcggtacaggaccagttcagcccaaagactaaagcgtcagaagcaggccaatgcacagcaggcagaattgtcacaagctgccttggaagagggaggaagtaacagtttagtaactcctactgaagctggaagtctagacagttcaggagaaaacaggccattaacagggtctgacccaactgtggtgtcaattactggatcccatgtcaaccgtgctgcatctaaataccccaaaaccaaaaagtatctagttacagaatggttgaatgacaaagcagagaagcaagagtgccctgttgagtgccctttacgtatcacaacggatccaactgtactggcaacgaccctaaacatgttaccaggtcttatccattccccgttaatttgcaccacccccaaacactacattcgctttggctcaccctttatccctgagagacgtcgaaggccccttctgcctgatggcacattcagctcctgtaagaagcgctggataaaacaagccttagaagaagggatgactcaaacatcatctgtaccccaagagactagaactcagcacctataccaaagcaatgagaatagtagctcttctagtatctgcaaagacaatgcagacttgttgagcccattaaagaaatggaagtctcgctatctgatggagcagaatgtcaccaagttacttcggcctctgtctccagtcacaccaccccctcccaattcaggctcaaagagtccccagctggccacacctggctcatctcacccaggagaagaggagtgtcgaaatggatacagcctcatgttttcaccagtcacatctcttactactgctagtcgctgcaacactcctctacagtttgagaacatatcctcccctgagagttcccctgcgcataggcccgagtccctgtcacccgagctttgtcaccgaaaagacctggatttggcaaaagtaggataccttgactccaacactaacagctgtgctgatagaccttccctactcaactcaggtcattctgacctggctcctcatccctccctcggacccacttctgagactggtttcccaagcagaagtggagatggacatcagaccctcgtgagaaactcagaccaggcatttcggacagagttcaacttgatgtatgcctactcccctttgaatgctatgcctcgagcagatggactgtatcgaggatctcctctagtgggggataggaagcctttacatttggatgggggatattgttcccctgcagaaggattttccagcagatatgaacatggcttaatgaaagacctctctcgtggatccttgtcacctggtggtgaaagggcctgtgaaggagtcccatctgccccccagaacccaccacagaggaaaaaagtatccctgctggagtaccgaaaacggaaacaagaagctaaggaaaattctgctggtgggggaggtgactctgcacagagcaaaagcaagtctgcaggagctgggcaaggcagcagtaactccgtttccgacactggtgcccatggtgtgcagggatcctcagcccgaactccatcttcccctcacaaaaaattctccccatctcattcctctatgtcccatttggaggcggtaagcccatcagattccagaggcacttcttcatctcactgcagacctcaagagaatatcagcagtaggtggatggttcccacatcagtagaacgactccgagaaggagggagcatccccaaggtcctccgaagcagcgtgagggtggcccaaaagggagagccctctcccacatgggagagtaacatcacagagaaagactcagaccctgcagatggagaaggcccagagacattaagctcagcactctctaaaggagcaacagtttacagcccttccagatacagctaccagctcctgcagtgtgatagtcctcggacagaatcacaaagcctccttcagcagagttcctcccccttcagaggacatcctacacagtctccaggatacagttatcgaactactgcactgagacctggaaaccccccctctcacggttcttcagaatcatccctctcttccacgtcctattccagccccgcccaccctgtgtccacagactcgttggccccatttacggggacaccagggtattttagcagccagccacattctggaaacagcactggcagcaatcttccaaggaggagctgcccttctagtgctgctagccctaccctgcagggaccctcagactcgccaacctcagattcagtttctcagtccagcacaggaactctgagttccacctcctttcctcagaactctaggtcgtcattgccatcagacttacggactatcagtctgcccagtgctgggcagtcagctgtctaccaggcctccagggtatctgcggtttccaattcacagcactacccacaccgtgggagtgggggtgtgcaccagtaccgactccagccactgcaagggtcaggagtcaagactcagacgggactttcctagggcttctggatttgggcaaacagaactgaatgagcccatagctgcttccttccagctgcctctggaacctaggccgagcatattgctgaggaacggggggtacaaggtgccagaggattgggtctggtggacaagaaacaagacttgtggtcacaattggcctctggccttggagaaagctgtaaatcttgtctgaagcagagactataaagaagtttctccctgctgtcaagggtacattgttgacaagcaaatggtgtttcggttagtaacggttctaagtgcaatgagttgtgttgaagcctccgtctcccatccttgcctgtagcccgtagtcacttgtgcagtgaggacatctttttaaatttaaaaaaaaaaaaaaaaaaagttttcaaaggaaaaaaagttaaaagagccaatctcaaagccccaagccatctgagtactgttagggttttatgcacttaagaaaaaaggtaggtatgtaaatgttcatcctaagacaaccattccaaaagcaggtatctggccaatgtgtgtccaccaagaatactgtttatctttgtcttaagatcaccaagaaataggcaaggatagtaaagcttggaacctgcaccaactggagggtgcctggctctttgaagaaaagctcatggtcagctcttgattattcgggagcagattatttgagtagattgtctgagcctccaactgttaccatcctactcccccttcccaagctatttcacagctcagtaacccatgaagtaagtagacaagaaaaggaggaatgagacatgatataggccaattgcattgctacttaccagcttttggcaataaatttcattaggaaggataccgagtggtttgggaatgcttcgaattttattttttctactcccaattaatcaggagttgatgatcccatgagcaggaccgcctccatgattggggagcatgcacttgtgactgcagggtaagagtgggaagataggtttgtggagtggcaccgacaggactgtgattgtgtgtgggcctgccccacatttctctgggggatgcttatgtgagagtgggcccagtgaaagagttaccaagccacccacacccctaacactgttctggatgagagatgagagcagaccggcttctccccatcagtgcattgtgcctgttgtacacccctggaggagccctggagccagcccaggtggggtacacaatctttttaaattccatatggttgccagcttatttctttcacttgtttactgtaatatctggcgtgtttttatttatctaattttgtattcagttataaccatggtaggggtagtgaatatatgacaggtgtaatccctggtgctgcagtggaccttcttttcttttggacaagataatactgtgagtttccctccttccttccctctaatttgttttccttttttccccagcctcttgcatccccttcttttc

SEQ ID NO: 348 - DNA, 5387 bp, Homo sapiens
agcgagattccgtctccaataaaaagaaaaacaaaagtatttataggactctctaatgtctctgtttaacttattcagagacaatatcagaggaagttactgtactgatattttaagagggtgaatggataatgtaactgaatttcaagggtactgagacaggcattttggttgtttctttggagcagtaattataaagtggactgtgcctgtcacaagggaaaccggaattgtcctatacaaaaaaggaatcctaatgctacagaactgccactcctaccacctcctccaagcctacccaccattggagcagagactagacgtagaaaagcacgacggaaagagctagagatggagcagcagaatgaggcttcagaggagaataatgaccagcaatcacaagaagttccagaaaaagtaactgtatccagtgatcatgaggaagtagacaatccagaagaaaaaccagaagaagagaaagaagaggttatagatgaccaggagaacctagctcatagcaggaggaccagggaagatagaaaggtagaagccatcatgcatgcttttgaaaacttagagaaaagaaagaagcggcgggatcagcccttggaacagagcaactctgatgtagagattactacaaccacctcagagactcctgttggtgaagagacaaaaactgaagcccctgaatctgaagttagcaactctgtttcaaatgttaccatcccaagcaccccacagagtgttggtgtgaatacccggaggtcttcccaagcaggggatattgctgcagaaaaactagtccccaagccacctccagcaaagccttctaggccccggccgaagagtcgaatttctcggtacaggaccagttcagcccaaagactaaagcgtcagaagcaggccaatgcacagcaggcagaattgtcacaagctgccttggaagagggaggaagtaacagtttagtaactcctactgaagctggaagtctagacagttcaggagaaaacaggccattaacagggtctgacccaactgtggtgtcaattactggatcccatgtcaaccgtgctgcatctaaataccccaaaaccaaaaagtatctagttacagaatggttgaatgacaaagcagagaagcaagagtgccctgttgagtgccctttacgtatcacaacggatccaactgtactggcaacgaccctaaacatgttaccaggtcttatccattccccgttaatttgcaccacccccaaacactacattcgctttggctcaccctttatccctgagagacgtcgaaggccccttctgcctgatggcacattcagctcctgtaagaagcgctggataaaacaagccttagaagaagggatgactcaaacatcatctgtaccccaagagactagaactcagcacctataccaaagcaatgagaatagtagctcttctagtatctgcaaagacaatgcagacttgttgagcccattaaagaaatggaagtctcgctatctgatggagcagaatgtcaccaagttacttcggcctctgtctccagtcacaccaccccctcccaattcaggctcaaagagtccccagctggccacacctggctcatctcacccaggagaagaggagtgtcgaaatggatacagcctcatgttttcaccagtcacatctcttactactgctagtcgctgcaacactcctctacagtttgagctttgtcaccgaaaagacctggatttggcaaaagtaggataccttgactccaacactaacagctgtgctgatagaccttccctactcaactcaggtcattctgacctggctcctcatccctccctcggacccacttctgagactggtttcccaagcagaagtggagatggacatcagaccctcgtgagaaactcagaccaggcatttcggacagagttcaacttgatgtatgcctactcccctttgaatgctatgcctcgagcagatggactgtatcgaggatctcctctagtgggggataggaagcctttacatttggatgggggatattgttcccctgcagaaggattttccagcagatatgaacatggcttaatgaaagacctctctcgtggatccttgtcacctggtggtgaaagggcctgtgaaggagtcccatctgccccccagaacccaccacagaggaaaaaagtatccctgctggagtaccgaaaacggaaacaagaagctaaggaaaattctgctggtgggggaggtgactctgcacagagcaaaagcaagtctgcaggagctgggcaaggcagcagtaactccgtttccgacactggtgcccatggtgtgcagggatcctcagcccgaactccatcttcccctcacaaaaaattctccccatctcattcctctatgtcccatttggaggcggtaagcccatcagattccagaggcacttcttcatctcactgcagacctcaagagaatatcagcagtaggtggatggttcccacatcagtagaacgactccgagaaggagggagcatccccaaggtcctccgaagcagcgtgagggtggcccaaaagggagagccctctcccacatgggagagtaacatcacagagaaagactcagaccctgcagatggagaaggcccagagacattaagctcagcactctctaaaggagcaacagtttacagcccttccagatacagctaccagctcctgcagtgtgatagtcctcggacagaatcacaaagcctccttcagcagagttcctcccccttcagaggacatcctacacagtctccaggatacagttatcgaactactgcactgagacctggaaaccccccctctcacggttcttcagaatcatccctctcttccacgtcctattccagccccgcccaccctgtgtccacagactcgttggccccatttacggggacaccagggtattttagcagccagccacattctggaaacagcactggcagcaatcttccaaggaggagctgcccttctagtgctgctagccctaccctgcagggaccctcagactcgccaacctcagattcagtttctcagtccagcacaggaactctgagttccacctcctttcctcagaactctaggtcgtcattgccatcagacttacggactatcagtctgcccagtgctgggcagtcagctgtctaccaggcctccagggtatctgcggtttccaattcacagcactacccacaccgtgggagtgggggtgtgcaccagtaccgactccagccactgcaagggtcaggagtcaagactcagacgggactttcctagggcttctggatttgggcaaacagaactgaatgagcccatagctgcttccttccagctgcctctggaacctaggccgagcatattgctgaggaacggggggtacaaggtgccagaggattgggtctggtggacaagaaacaagacttgtggtcacaattggcctctggccttggagaaagctgtaaatcttgtctgaagcagagactataaagaagtttctccctgctgtcaagggtacattgttgacaagcaaatggtgtttcggttagtaacggttctaagtgcaatgagttgtgttgaagcctccgtctcccatccttgcctgtagcccgtagtcacttgtgcagtgaggacatctttttaaatttaaaaaaaaaaaaaaaaaaagttttcaaaggaaaaaaagttaaaagagccaatctcaaagccccaagccatctgagtactgttagggttttatgcacttaagaaaaaaggtaggtatgtaaatgttcatcctaagacaaccattccaaaagcaggtatctggccaatgtgtgtccaccaagaatactgtttatctttgtcttaagatcaccaagaaataggcaaggatagtaaagcttggaacctgcaccaactggagggtgcctggctctttgaagaaaagctcatggtcagctcttgattattcgggagcagattatttgagtagattgtctgagcctccaactgttaccatcctactcccccttcccaagctatttcacagctcagtaacccatgaagtaagtagacaagaaaaggaggaatgagacatgatataggccaattgcattgctacttaccagcttttggcaataaatttcattaggaaggataccgagtggtttgggaatgcttcgaattttattttttctactcccaattaatcaggagttgatgatcccatgagcaggaccgcctccatgattggggagcatgcacttgtgactgcagggtaagagtgggaagataggtttgtggagtggcaccgacaggactgtgattgtgtgtgggcctgccccacatttctctgggggatgcttatgtgagagtgggcccagtgaaagagttaccaagccacccacacccctaacactgttctggatgagagatgagagcagaccggcttctccccatcagtgcattgtgcctgttgtacacccctggaggagccctggagccagcccaggtggggtacacaatctttttaaattccatatggttgccagcttatttctttcacttgtttactgtaatatctggcgtgtttttatttatctaattttgtattcagttataaccatggtaggggtagtgaatatatgacaggtgtaatccctggtgctgcagtggaccttcttttcttttggacaagataatactgtgagtttccctccttccttccctctaatttgttttccttttttccccagcctcttgcatccccttcttttctaccctgtcctacaactatcatatgcacagtcttctctctttgtgtgtgactgttacaaaatttcacttttcaaaatcgaaatcaggtgtttgctcaaatgaggggagattttttttttttttttttttttaaatgctgagacctcagcagagtacttttctttttgttgtttcccccacaaacccatcagtctgggagagcattgggagtggaaatcatgttgcctgggatgctggtttctttgtatattatataaaacgtatgtaaatgtctctccatttgggctggggtttgcattctccccttggctatttaaccaaggggagaggccagcgggcaggcggccctcaccctgcctggcacgtgcagagaccccagccactctgtgtgggcagggtgctgtcaagaccagacctcttgggggggtaggggcgggggggtggggggaactcttggaagggaagaagtatcacttctttctcaagtggagtgtttacaccttgctgtaacatttgaactttcacaagagatgtaataattttgataataaaattcttaaccataataatcataaagt

SEQ ID NO: 349 - DNA, 5721 bp, Homo sapiens
caggcattgtggcgtgtgcctgtattcccaggtactcaggaggctgagacaggagaattgcttgaacccgggaggcagaggttgccgtgagccgagatcacgccactccactccagcctgagcgacagagcaagactgtatctcaaaaaaaagatgtgaaagtagagattttaccctgatttctaacatctcaaggtttctccacatatttaagaaagtattataaattttcaagccagtgcagtataatagtttcagatgaaatgaaggggttaaataacagattaccataactccttaaataaataatagattaccataactccaaatggagagaaagtatggtttttttctctcttacggaaagttcatggtctttatgaaaaatccaaccagaagccttttcacacaggtgcgacacatgattgcagatgggatgattcacctgtgcatctatgctgtgtctgccatcaccaaggatgctgaggtcaccatagcatttgattatgagtatagtaactgtaattataaagtggactgtgcctgtcacaagggaaaccggaattgtcctatacaaaaaaggaatcctaatgctacagaactgccactcctaccacctcctccaagcctacccaccattggagcagagactagacgtagaaaagcacgacggaaagagctagagatggagcagcagaatgaggcttcagaggagaataatgaccagcaatcacaagaagttccagaaaaagtaactgtatccagtgatcatgaggaagtagacaatccagaagaaaaaccagaagaagagaaagaagaggttatagatgaccaggagaacctagctcatagcaggaggaccagggaagatagaaaggtagaagccatcatgcatgcttttgaaaacttagagaaaagaaagaagcggcgggatcagcccttggaacagagcaactctgatgtagagattactacaaccacctcagagactcctgttggtgaagagacaaaaactgaagcccctgaatctgaagttagcaactctgtttcaaatgttaccatcccaagcaccccacagagtgttggtgtgaatacccggaggtcttcccaagcaggggatattgctgcagaaaaactagtccccaagccacctccagcaaagccttctaggccccggccgaagagtcgaatttctcggtacaggaccagttcagcccaaagactaaagcgtcagaagcaggccaatgcacagcaggcagaattgtcacaagctgccttggaagagggaggaagtaacagtttagtaactcctactgaagctggaagtctagacagttcaggagaaaacaggccattaacagggtctgacccaactgtggtgtcaattactggatcccatgtcaaccgtgctgcatctaaataccccaaaaccaaaaagtatctagttacagaatggttgaatgacaaagcagagaagcaagagtgccctgttgagtgccctttacgtatcacaacggatccaactgtactggcaacgaccctaaacatgttaccaggtcttatccattccccgttaatttgcaccacccccaaacactacattcgctttggctcaccctttatccctgagagacgtcgaaggccccttctgcctgatggcacattcagctcctgtaagaagcgctggataaaacaagccttagaagaagggatgactcaaacatcatctgtaccccaagagactagaactcagcacctataccaaagcaatgagaatagtagctcttctagtatctgcaaagacaatgcagacttgttgagcccattaaagaaatggaagtctcgctatctgatggagcagaatgtcaccaagttacttcggcctctgtctccagtcacaccaccccctcccaattcaggctcaaagagtccccagctggccacacctggctcatctcacccaggagaagaggagtgtcgaaatggatacagcctcatgttttcaccagtcacatctcttactactgctagtcgctgcaacactcctctacagtttgagctttgtcaccgaaaagacctggatttggcaaaagtaggataccttgactccaacactaacagctgtgctgatagaccttccctactcaactcaggtcattctgacctggctcctcatccctccctcggacccacttctgagactggtttcccaagcagaagtggagatggacatcagaccctcgtgagaaactcagaccaggcatttcggacagagttcaacttgatgtatgcctactcccctttgaatgctatgcctcgagcagatggactgtatcgaggatctcctctagtgggggataggaagcctttacatttggatgggggatattgttcccctgcagaaggattttccagcagatatgaacatggcttaatgaaagacctctctcgtggatccttgtcacctggtggtgaaagggcctgtgaaggagtcccatctgccccccagaacccaccacagaggaaaaaagtatccctgctggagtaccgaaaacggaaacaagaagctaaggaaaattctgctggtgggggaggtgactctgcacagagcaaaagcaagtctgcaggagctgggcaaggcagcagtaactccgtttccgacactggtgcccatggtgtgcagggatcctcagcccgaactccatcttcccctcacaaaaaattctccccatctcattcctctatgtcccatttggaggcggtaagcccatcagattccagaggcacttcttcatctcactgcagacctcaagagaatatcagcagtaggtggatggttcccacatcagtagaacgactccgagaaggagggagcatccccaaggtcctccgaagcagcgtgagggtggcccaaaagggagagccctctcccacatgggagagtaacatcacagagaaagactcagaccctgcagatggagaaggcccagagacattaagctcagcactctctaaaggagcaacagtttacagcccttccagatacagctaccagctcctgcagtgtgatagtcctcggacagaatcacaaagcctccttcagcagagttcctcccccttcagaggacatcctacacagtctccaggatacagttatcgaactactgcactgagacctggaaaccccccctctcacggttcttcagaatcatccctctcttccacgtcctattccagccccgcccaccctgtgtccacagactcgttggccccatttacggggacaccagggtattttagcagccagccacattctggaaacagcactggcagcaatcttccaaggaggagctgcccttctagtgctgctagccctaccctgcagggaccctcagactcgccaacctcagattcagtttctcagtccagcacaggaactctgagttccacctcctttcctcagaactctaggtcgtcattgccatcagacttacggactatcagtctgcccagtgctgggcagtcagctgtctaccaggcctccagggtatctgcggtttccaattcacagcactacccacaccgtgggagtgggggtgtgcaccagtaccgactccagccactgcaagggtcaggagtcaagactcagacgggactttcctagggcttctggatttgggcaaacagaactgaatgagcccatagctgcttccttccagctgcctctggaacctaggccgagcatattgctgaggaacggggggtacaaggtgccagaggattgggtctggtggacaagaaacaagacttgtggtcacaattggcctctggccttggagaaagctgtaaatcttgtctgaagcagagactataaagaagtttctccctgctgtcaagggtacattgttgacaagcaaatggtgtttcggttagtaacggttctaagtgcaatgagttgtgttgaagcctccgtctcccatccttgcctgtagcccgtagtcacttgtgcagtgaggacatctttttaaatttaaaaaaaaaaaaaaaaaaagttttcaaaggaaaaaaagttaaaagagccaatctcaaagccccaagccatctgagtactgttagggttttatgcacttaagaaaaaaggtaggtatgtaaatgttcatcctaagacaaccattccaaaagcaggtatctggccaatgtgtgtccaccaagaatactgtttatctttgtcttaagatcaccaagaaataggcaaggatagtaaagcttggaacctgcaccaactggagggtgcctggctctttgaagaaaagctcatggtcagctcttgattattcgggagcagattatttgagtagattgtctgagcctccaactgttaccatcctactcccccttcccaagctatttcacagctcagtaacccatgaagtaagtagacaagaaaaggaggaatgagacatgatataggccaattgcattgctacttaccagcttttggcaataaatttcattaggaaggataccgagtggtttgggaatgcttcgaattttattttttctactcccaattaatcaggagttgatgatcccatgagcaggaccgcctccatgattggggagcatgcacttgtgactgcagggtaagagtgggaagataggtttgtggagtggcaccgacaggactgtgattgtgtgtgggcctgccccacatttctctgggggatgcttatgtgagagtgggcccagtgaaagagttaccaagccacccacacccctaacactgttctggatgagagatgagagcagaccggcttctccccatcagtgcattgtgcctgttgtacacccctggaggagccctggagccagcccaggtggggtacacaatctttttaaattccatatggttgccagcttatttctttcacttgtttactgtaatatctggcgtgtttttatttatctaattttgtattcagttataaccatggtaggggtagtgaatatatgacaggtgtaatccctggtgctgcagtggaccttcttttcttttggacaagataatactgtgagtttccctccttccttccctctaatttgttttccttttttccccagcctcttgcatccccttcttttctaccctgtcctacaactatcatatgcacagtcttctctctttgtgtgtgactgttacaaaatttcacttttcaaaatcgaaatcaggtgtttgctcaaatgaggggagattttttttttttttttttttttaaatgctgagacctcagcagagtacttttctttttgttgtttcccccacaaacccatcagtctgggagagcattgggagtggaaatcatgttgcctgggatgctggtttctttgtatattatataaaacgtatgtaaatgtctctccatttgggctggggtttgcattctccccttggctatttaaccaaggggagaggccagcgggcaggcggccctcaccctgcctggcacgtgcagagaccccagccactctgtgtgggcagggtgctgtcaagaccagacctcttgggggggtaggggcgggggggtggggggaactcttggaagggaagaagtatcacttctttctcaagtggagtgtttacaccttgctgtaacatttgaactttcacaagagatgtaataattttgataataaaattcttaaccataataatcataaagt

SEQ ID NO: 350 - DNA, 6837 bp, Homo sapiens
gtcccgccagtccgccaacacagtagtgccggcccccctctttccctggccctgccccccctccccgcctttggctcgctccgcctttctgccccccacccccacctcacgggtacgggccattcccggccaggaaacgccgtggcgccgcgttgggcctaactcgagtcctgccgcctcccgggagtgccgtgcgccgcagcccgggcccaggccccggcagcgcctgggacaaggtcttcagaactactagcagataatttggggggacttcatattcagaagtctatataaaggattcctcatgtccataacatgttggatgaggctctgcagctcacccccactctcagagtggtcagtctccattaattggaccccgtgatttccaatctctgctgtgttggacgtcatgagcattgcaatccctctgggagtcaccacatcagatacatcctactcagatatggctgctggatcagaccctgaatctgtggaggctagtccagcagttaatgagaagagcgtgtattccactcataattatgggaccactcagaggcatgggtgtcgaggactgccttatgctacgatcatccctcgttctgacctgaatggcctgccgtcgcctgtagaggaacgctgtggagacagcccgaactctgaaggagaaactgtacctacctggtgtccttgtggtctttctcaggatggcttccttctcaactgtgacaagtgcaggggaatgagcagggggaaggttattagacttcatcggcggaagcaggacaacatatcaggtggggatagcagtgcaacagaaagctgggatgaggagctttctccttccactgtgttgtatacagcaacacagcacacacctacaagcatcaccttaactgttagaagaaccaaacccaagaagcggaaaaagagtccagaaaagggtcgtgcagcaccaaagacgaagaaaatcaaggcatttcgagagggatcccggaagtccttgcggatgaagaattctccctctgaagcacagaatttagatgagaatacaactgagggctgggaaaatcggataagactatggactgaccagtatgaagaagctttcactaatcagtacagtgcagatgtacagaacgcgcttgaacaacacctacattctagcaaggaatttgtgggcaaacctactattttagacactattaataagactgaattggcctgtaataacacagttattggttcccaaatgcagttacagctgggaagagtcactcgtgttcaaaagcaccggaagatcctgagggctgcaagagatttggctttggacactcttataatagagtatcgtgggaaagtcatgttacgacagcaatttgaggtcaatgggcatttcttcaaaaaaccatacccctttgtgctcttctactcaaaattcaatggtgtagagatgtgtgtggatgcccgtactttcggtaatgatgctcggttcatcagaagatcatgtacaccaaatgcagaggtgcgacacatgattgcagatgggatgattcacctgtgcatctatgctgtgtctgccatcaccaaggatgctgaggtcaccatagcatttgattatgagtatagtaactgtaattataaagtggactgtgcctgtcacaagggaaaccggaattgtcctatacaaaaaaggaatcctaatgctacagaactgccactcctaccacctcctccaagcctacccaccattggagcagagactagacgtagaaaagcacgacggaaagagctagagatggagcagcagaatgaggcttcagaggagaataatgaccagcaatcacaagaagttccagaaaaagtaactgtatccagtgatcatgaggaagtagacaatccagaagaaaaaccagaagaagagaaagaagaggttatagatgaccaggagaacctagctcatagcaggaggaccagggaagatagaaaggtagaagccatcatgcatgcttttgaaaacttagagaaaagaaagaagcggcgggatcagcccttggaacagagcaactctgatgtagagattactacaaccacctcagagactcctgttggtgaagagacaaaaactgaagcccctgaatctgaagttagcaactctgtttcaaatgttaccatcccaagcaccccacagagtgttggtgtgaatacccggaggtcttcccaagcaggggatattgctgcagaaaaactagtccccaagccacctccagcaaagccttctaggccccggccgaagagtcgaatttctcggtacaggaccagttcagcccaaagactaaagcgtcagaagcaggccaatgcacagcaggcagaattgtcacaagctgccttggaagagggaggaagtaacagtttagtaactcctactgaagctggaagtctagacagttcaggagaaaacaggccattaacagggtctgacccaactgtggtgtcaattactggatcccatgtcaaccgtgctgcatctaaataccccaaaaccaaaaagtatctagttacagaatggttgaatgacaaagcagagaagcaagagtgccctgttgagtgccctttacgtatcacaacggatccaactgtactggcaacgaccctaaacatgttaccaggtcttatccattccccgttaatttgcaccacccccaaacactacattcgctttggctcaccctttatccctgagagacgtcgaaggccccttctgcctgatggcacattcagctcctgtaagaagcgctggataaaacaagccttagaagaagggatgactcaaacatcatctgtaccccaagagactagaactcagcacctataccaaagcaatgagaatagtagctcttctagtatctgcaaagacaatgcagacttgttgagcccattaaagaaatggaagtctcgctatctgatggagcagaatgtcaccaagttacttcggcctctgtctccagtcacaccaccccctcccaattcaggctcaaagagtccccagctggccacacctggctcatctcacccaggagaagaggagtgtcgaaatggatacagcctcatgttttcaccagtcacatctcttactactgctagtcgctgcaacactcctctacagtttgagctttgtcaccgaaaagacctggatttggcaaaagtaggataccttgactccaacactaacagctgtgctgatagaccttccctactcaactcaggtcattctgacctggctcctcatccctccctcggacccacttctgagactggtttcccaagcagaagtggagatggacatcagaccctcgtgagaaactcagaccaggcatttcggacagagttcaacttgatgtatgcctactcccctttgaatgctatgcctcgagcagatggactgtatcgaggatctcctctagtgggggataggaagcctttacatttggatgggggatattgttcccctgcagaaggattttccagcagatatgaacatggcttaatgaaagacctctctcgtggatccttgtcacctggtggtgaaagggcctgtgaaggagtcccatctgccccccagaacccaccacagaggaaaaaagtatccctgctggagtaccgaaaacggaaacaagaagctaaggaaaattctgctggtgggggaggtgactctgcacagagcaaaagcaagtctgcaggagctgggcaaggcagcagtaactccgtttccgacactggtgcccatggtgtgcagggatcctcagcccgaactccatcttcccctcacaaaaaattctccccatctcattcctctatgtcccatttggaggcggtaagcccatcagattccagaggcacttcttcatctcactgcagacctcaagagaatatcagcagtaggtggatggttcccacatcagtagaacgactccgagaaggagggagcatccccaaggtcctccgaagcagcgtgagggtggcccaaaagggagagccctctcccacatgggagagtaacatcacagagaaagactcagaccctgcagatggagaaggcccagagacattaagctcagcactctctaaaggagcaacagtttacagcccttccagatacagctaccagctcctgcagtgtgatagtcctcggacagaatcacaaagcctccttcagcagagttcctcccccttcagaggacatcctacacagtctccaggatacagttatcgaactactgcactgagacctggaaaccccccctctcacggttcttcagaatcatccctctcttccacgtcctattccagccccgcccaccctgtgtccacagactcgttggccccatttacggggacaccagggtattttagcagccagccacattctggaaacagcactggcagcaatcttccaaggaggagctgcccttctagtgctgctagccctaccctgcagggaccctcagactcgccaacctcagattcagtttctcagtccagcacaggaactctgagttccacctcctttcctcagaactctaggtcgtcattgccatcagacttacggactatcagtctgcccagtgctgggcagtcagctgtctaccaggcctccagggtatctgcggtttccaattcacagcactacccacaccgtgggagtgggggtgtgcaccagtaccgactccagccactgcaagggtcaggagtcaagactcagacgggactttcctagggcttctggatttgggcaaacagaactgaatgagcccatagctgcttccttccagctgcctctggaacctaggccgagcatattgctgaggaacggggggtacaaggtgccagaggattgggtctggtggacaagaaacaagacttgtggtcacaattggcctctggccttggagaaagctgtaaatcttgtctgaagcagagactataaagaagtttctccctgctgtcaagggtacattgttgacaagcaaatggtgtttcggttagtaacggttctaagtgcaatgagttgtgttgaagcctccgtctcccatccttgcctgtagcccgtagtcacttgtgcagtgaggacatctttttaaatttaaaaaaaaaaaaaaaaaaagttttcaaaggaaaaaaagttaaaagagccaatctcaaagccccaagccatctgagtactgttagggttttatgcacttaagaaaaaaggtaggtatgtaaatgttcatcctaagacaaccattccaaaagcaggtatctggccaatgtgtgtccaccaagaatactgtttatctttgtcttaagatcaccaagaaataggcaaggatagtaaagcttggaacctgcaccaactggagggtgcctggctctttgaagaaaagctcatggtcagctcttgattattcgggagcagattatttgagtagattgtctgagcctccaactgttaccatcctactcccccttcccaagctatttcacagctcagtaacccatgaagtaagtagacaagaaaaggaggaatgagacatgatataggccaattgcattgctacttaccagcttttggcaataaatttcattaggaaggataccgagtggtttgggaatgcttcgaattttattttttctactcccaattaatcaggagttgatgatcccatgagcaggaccgcctccatgattggggagcatgcacttgtgactgcagggtaagagtgggaagataggtttgtggagtggcaccgacaggactgtgattgtgtgtgggcctgccccacatttctctgggggatgcttatgtgagagtgggcccagtgaaagagttaccaagccacccacacccctaacactgttctggatgagagatgagagcagaccggcttctccccatcagtgcattgtgcctgttgtacacccctggaggagccctggagccagcccaggtggggtacacaatctttttaaattccatatggttgccagcttatttctttcacttgtttactgtaatatctggcgtgtttttatttatctaattttgtattcagttataaccatggtaggggtagtgaatatatgacaggtgtaatccctggtgctgcagtggaccttcttttcttttggacaagataatactgtgagtttccctccttccttccctctaatttgttttccttttttccccagcctcttgcatccccttcttttctaccctgtcctacaactatcatatgcacagtcttctctctttgtgtgtgactgttacaaaatttcacttttcaaaatcgaaatcaggtgtttgctcaaatgaggggagattttttttttttttttttttttaaatgctgagacctcagcagagtacttttctttttgttgtttcccccacaaacccatcagtctgggagagcattgggagtggaaatcatgttgcctgggatgctggtttctttgtatattatataaaacgtatgtaaatgtctctccatttgggctggggtttgcattctccccttggctatttaaccaaggggagaggccagcgggcaggcggccctcaccctgcctggcacgtgcagagaccccagccactctgtgtgggcagggtgctgtcaagaccagacctcttgggggggtaggggcgggggggtggggggaactcttggaagggaagaagtatcacttctttctcaagtggagtgtttacaccttgctgtaacatttgaactttcacaagagatgtaataattttgataataaaattcttaaccataataatcataaagt

SEQ ID NO: 351 - DNA, 6544 bp, Homo sapiens
aatccattcttatacattgtgactttcttgaaatgtttatatgcagcatgacgaagttgccccttttgcacttccctgactccagcggacgtctagccctgcatcattgttcttgtttttatgtcccagttgaccttggcattttgttttatcactttcctggttgaagccaaaaaacaaagggtactactttcttctttctttccatatgtaccatactttaggggagagaggggccagtgtttggacactgttgatttaaaaaatcttattttcaggatcataattacggagcccctcctcctccgacacctcctgcttctccccctgtccagacgatcatccctcgttctgacctgaatggcctgccgtcgcctgtagaggaacgctgtggagacagcccgaactctgaaggagaaactgtacctacctggtgtccttgtggtctttctcaggatggcttccttctcaactgtgacaagtgcaggggaatgagcagggggaaggttattagacttcatcggcggaagcaggacaacatatcaggtggggatagcagtgcaacagaaagctgggatgaggagctttctccttccactgtgttgtatacagcaacacagcacacacctacaagcatcaccttaactgttagaagaaccaaacccaagaagcggaaaaagagtccagaaaagggtcgtgcagcaccaaagacgaagaaaatcaagaattctccctctgaagcacagaatttagatgagaatacaactgagggctgggaaaatcggataagactatggactgaccagtatgaagaagctttcactaatcagtacagtgcagatgtacagaacgcgcttgaacaacacctacattctagcaaggaatttgtgggcaaacctactattttagacactattaataagactgaattggcctgtaataacacagttattggttcccaaatgcagttacagctgggaagagtcactcgtgttcaaaagcaccggaagatcctgagggctgcaagagatttggctttggacactcttataatagagtatcgtgggaaagtcatgttacgacagcaatttgaggtcaatgggcatttcttcaaaaaaccatacccctttgtgctcttctactcaaaattcaatggtgtagagatgtgtgtggatgcccgtactttcggtaatgatgctcggttcatcagaagatcatgtacaccaaatgcagaggtgcgacacatgattgcagatgggatgattcacctgtgcatctatgctgtgtctgccatcaccaaggatgctgaggtcaccatagcatttgattatgagtatagtaactgtaattataaagtggactgtgcctgtcacaagggaaaccggaattgtcctatacaaaaaaggaatcctaatgctacagaactgccactcctaccacctcctccaagcctacccaccattggagcagagactagacgtagaaaagcacgacggaaagagctagagatggagcagcagaatgaggcttcagaggagaataatgaccagcaatcacaagaagttccagaaaaagtaactgtatccagtgatcatgaggaagtagacaatccagaagaaaaaccagaagaagagaaagaagaggttatagatgaccaggagaacctagctcatagcaggaggaccagggaagatagaaaggtagaagccatcatgcatgcttttgaaaacttagagaaaagaaagaagcggcgggatcagcccttggaacagagcaactctgatgtagagattactacaaccacctcagagactcctgttggtgaagagacaaaaactgaagcccctgaatctgaagttagcaactctgtttcaaatgttaccatcccaagcaccccacagagtgttggtgtgaatacccggaggtcttcccaagcaggggatattgctgcagaaaaactagtccccaagccacctccagcaaagccttctaggccccggccgaagagtcgaatttctcggtacaggaccagttcagcccaaagactaaagcgtcagaagcaggccaatgcacagcaggcagaattgtcacaagctgccttggaagagggaggaagtaacagtttagtaactcctactgaagctggaagtctagacagttcaggagaaaacaggccattaacagggtctgacccaactgtggtgtcaattactggatcccatgtcaaccgtgctgcatctaaataccccaaaaccaaaaagtatctagttacagaatggttgaatgacaaagcagagaagcaagagtgccctgttgagtgccctttacgtatcacaacggatccaactgtactggcaacgaccctaaacatgttaccaggtcttatccattccccgttaatttgcaccacccccaaacactacattcgctttggctcaccctttatccctgagagacgtcgaaggccccttctgcctgatggcacattcagctcctgtaagaagcgctggataaaacaagccttagaagaagggatgactcaaacatcatctgtaccccaagagactagaactcagcacctataccaaagcaatgagaatagtagctcttctagtatctgcaaagacaatgcagacttgttgagcccattaaagaaatggaagtctcgctatctgatggagcagaatgtcaccaagttacttcggcctctgtctccagtcacaccaccccctcccaattcaggctcaaagagtccccagctggccacacctggctcatctcacccaggagaagaggagtgtcgaaatggatacagcctcatgttttcaccagtcacatctcttactactgctagtcgctgcaacactcctctacagtttgagctttgtcaccgaaaagacctggatttggcaaaagtaggataccttgactccaacactaacagctgtgctgatagaccttccctactcaactcaggtcattctgacctggctcctcatccctccctcggacccacttctgagactggtttcccaagcagaagtggagatggacatcagaccctcgtgagaaactcagaccaggcatttcggacagagttcaacttgatgtatgcctactcccctttgaatgctatgcctcgagcagatggactgtatcgaggatctcctctagtgggggataggaagcctttacatttggatgggggatattgttcccctgcagaaggattttccagcagatatgaacatggcttaatgaaagacctctctcgtggatccttgtcacctggtggtgaaagggcctgtgaaggagtcccatctgccccccagaacccaccacagaggaaaaaagtatccctgctggagtaccgaaaacggaaacaagaagctaaggaaaattctgctggtgggggaggtgactctgcacagagcaaaagcaagtctgcaggagctgggcaaggcagcagtaactccgtttccgacactggtgcccatggtgtgcagggatcctcagcccgaactccatcttcccctcacaaaaaattctccccatctcattcctctatgtcccatttggaggcggtaagcccatcagattccagaggcacttcttcatctcactgcagacctcaagagaatatcagcagtaggtggatggttcccacatcagtagaacgactccgagaaggagggagcatccccaaggtcctccgaagcagcgtgagggtggcccaaaagggagagccctctcccacatgggagagtaacatcacagagaaagactcagaccctgcagatggagaaggcccagagacattaagctcagcactctctaaaggagcaacagtttacagcccttccagatacagctaccagctcctgcagtgtgatagtcctcggacagaatcacaaagcctccttcagcagagttcctcccccttcagaggacatcctacacagtctccaggatacagttatcgaactactgcactgagacctggaaaccccccctctcacggttcttcagaatcatccctctcttccacgtcctattccagccccgcccaccctgtgtccacagactcgttggccccatttacggggacaccagggtattttagcagccagccacattctggaaacagcactggcagcaatcttccaaggaggagctgcccttctagtgctgctagccctaccctgcagggaccctcagactcgccaacctcagattcagtttctcagtccagcacaggaactctgagttccacctcctttcctcagaactctaggtcgtcattgccatcagacttacggactatcagtctgcccagtgctgggcagtcagctgtctaccaggcctccagggtatctgcggtttccaattcacagcactacccacaccgtgggagtgggggtgtgcaccagtaccgactccagccactgcaagggtcaggagtcaagactcagacgggactttcctagggcttctggatttgggcaaacagaactgaatgagcccatagctgcttccttccagctgcctctggaacctaggccgagcatattgctgaggaacggggggtacaaggtgccagaggattgggtctggtggacaagaaacaagacttgtggtcacaattggcctctggccttggagaaagctgtaaatcttgtctgaagcagagactataaagaagtttctccctgctgtcaagggtacattgttgacaagcaaatggtgtttcggttagtaacggttctaagtgcaatgagttgtgttgaagcctccgtctcccatccttgcctgtagcccgtagtcacttgtgcagtgaggacatctttttaaatttaaaaaaaaaaaaaaaaaaagttttcaaaggaaaaaaagttaaaagagccaatctcaaagccccaagccatctgagtactgttagggttttatgcacttaagaaaaaaggtaggtatgtaaatgttcatcctaagacaaccattccaaaagcaggtatctggccaatgtgtgtccaccaagaatactgtttatctttgtcttaagatcaccaagaaataggcaaggatagtaaagcttggaacctgcaccaactggagggtgcctggctctttgaagaaaagctcatggtcagctcttgattattcgggagcagattatttgagtagattgtctgagcctccaactgttaccatcctactcccccttcccaagctatttcacagctcagtaacccatgaagtaagtagacaagaaaaggaggaatgagacatgatataggccaattgcattgctacttaccagcttttggcaataaatttcattaggaaggataccgagtggtttgggaatgcttcgaattttattttttctactcccaattaatcaggagttgatgatcccatgagcaggaccgcctccatgattggggagcatgcacttgtgactgcagggtaagagtgggaagataggtttgtggagtggcaccgacaggactgtgattgtgtgtgggcctgccccacatttctctgggggatgcttatgtgagagtgggcccagtgaaagagttaccaagccacccacacccctaacactgttctggatgagagatgagagcagaccggcttctccccatcagtgcattgtgcctgttgtacacccctggaggagccctggagccagcccaggtggggtacacaatctttttaaattccatatggttgccagcttatttctttcacttgtttactgtaatatctggcgtgtttttatttatctaattttgtattcagttataaccatggtaggggtagtgaatatatgacaggtgtaatccctggtgctgcagtggaccttcttttcttttggacaagataatactgtgagtttccctccttccttccctctaatttgttttccttttttccccagcctcttgcatccccttcttttctaccctgtcctacaactatcatatgcacagtcttctctctttgtgtgtgactgttacaaaatttcacttttcaaaatcgaaatcaggtgtttgctcaaatgaggggagattttttttttttttttttttttaaatgctgagacctcagcagagtacttttctttttgttgtttcccccacaaacccatcagtctgggagagcattgggagtggaaatcatgttgcctgggatgctggtttctttgtatattatataaaacgtatgtaaatgtctctccatttgggctggggtttgcattctccccttggctatttaaccaaggggagaggccagcgggcaggcggccctcaccctgcctggcacgtgcagagaccccagccactctgtgtgggcagggtgctgtcaagaccagacctcttgggggggtaggggcgggggggtggggggaactcttggaagggaagaagtatcacttctttctcaagtggagtgtttacaccttgctgtaacatttgaactttcacaagagatgtaataattttgataataaaattcttaaccataataatcataaagt

SEQ ID NO: 352 - DNA, 6450 bp, Homo sapiens
accagggattagggtctgggctggaaaaatcctggtgttttgaatatgttcaggtccagttcagactcttgatcccacagccacttcttgagtgagccctgaatctgtggaggctagtccagcagttaatgagaagagcgtgtattccactcataattatgggaccactcagaggcatgggtgtcgaggactgccttatgctacgatcatccctcgttctgacctgaatggcctgccgtcgcctgtagaggaacgctgtggagacagcccgaactctgaaggagaaactgtacctacctggtgtccttgtggtctttctcaggatggcttccttctcaactgtgacaagtgcaggggaatgagcagggggaaggttattagacttcatcggcggaagcaggacaacatatcaggtggggatagcagtgcaacagaaagctgggatgaggagctttctccttccactgtgttgtatacagcaacacagcacacacctacaagcatcaccttaactgttagaagaaccaaacccaagaagcggaaaaagagtccagaaaagggtcgtgcagcaccaaagacgaagaaaatcaaggcatttcgagagggatcccggaagtccttgcggatgaagaattctccctctgaagcacagaatttagatgagaatacaactgagggctgggaaaatcggataagactatggactgaccagtatgaagaagctttcactaatcagtacagtgcagatgtacagaacgcgcttgaacaacacctacattctagcaaggaatttgtgggcaaacctactattttagacactattaataagactgaattggcctgtaataacacagttattggttcccaaatgcagttacagctgggaagagtcactcgtgttcaaaagcaccggaagatcctgagggctgcaagagatttggctttggacactcttataatagagtatcgtgggaaagtcatgttacgacagcaatttgaggtcaatgggcatttcttcaaaaaaccatacccctttgtgctcttctactcaaaattcaatggtgtagagatgtgtgtggatgcccgtactttcggtaatgatgctcggttcatcagaagatcatgtacaccaaatgcagaggtgcgacacatgattgcagatgggatgattcacctgtgcatctatgctgtgtctgccatcaccaaggatgctgaggtcaccatagcatttgattatgagtatagtaactgtaattataaagtggactgtgcctgtcacaagggaaaccggaattgtcctatacaaaaaaggaatcctaatgctacagaactgccactcctaccacctcctccaagcctacccaccattggagcagagactagacgtagaaaagcacgacggaaagagctagagatggagcagcagaatgaggcttcagaggagaataatgaccagcaatcacaagaagttccagaaaaagtaactgtatccagtgatcatgaggaagtagacaatccagaagaaaaaccagaagaagagaaagaagaggttatagatgaccaggagaacctagctcatagcaggaggaccagggaagatagaaaggtagaagccatcatgcatgcttttgaaaacttagagaaaagaaagaagcggcgggatcagcccttggaacagagcaactctgatgtagagattactacaaccacctcagagactcctgttggtgaagagacaaaaactgaagcccctgaatctgaagttagcaactctgtttcaaatgttaccatcccaagcaccccacagagtgttggtgtgaatacccggaggtcttcccaagcaggggatattgctgcagaaaaactagtccccaagccacctccagcaaagccttctaggccccggccgaagagtcgaatttctcggtacaggaccagttcagcccaaagactaaagcgtcagaagcaggccaatgcacagcaggcagaattgtcacaagctgccttggaagagggaggaagtaacagtttagtaactcctactgaagctggaagtctagacagttcaggagaaaacaggccattaacagggtctgacccaactgtggtgtcaattactggatcccatgtcaaccgtgctgcatctaaataccccaaaaccaaaaagtatctagttacagaatggttgaatgacaaagcagagaagcaagagtgccctgttgagtgccctttacgtatcacaacggatccaactgtactggcaacgaccctaaacatgttaccaggtcttatccattccccgttaatttgcaccacccccaaacactacattcgctttggctcaccctttatccctgagagacgtcgaaggccccttctgcctgatggcacattcagctcctgtaagaagcgctggataaaacaagccttagaagaagggatgactcaaacatcatctgtaccccaagagactagaactcagcacctataccaaagcaatgagaatagtagctcttctagtatctgcaaagacaatgcagacttgttgagcccattaaagaaatggaagtctcgctatctgatggagcagaatgtcaccaagttacttcggcctctgtctccagtcacaccaccccctcccaattcaggctcaaagagtccccagctggccacacctggctcatctcacccaggagaagaggagtgtcgaaatggatacagcctcatgttttcaccagtcacatctcttactactgctagtcgctgcaacactcctctacagtttgagctttgtcaccgaaaagacctggatttggcaaaagtaggataccttgactccaacactaacagctgtgctgatagaccttccctactcaactcaggtcattctgacctggctcctcatccctccctcggacccacttctgagactggtttcccaagcagaagtggagatggacatcagaccctcgtgagaaactcagaccaggcatttcggacagagttcaacttgatgtatgcctactcccctttgaatgctatgcctcgagcagatggactgtatcgaggatctcctctagtgggggataggaagcctttacatttggatgggggatattgttcccctgcagaaggattttccagcagatatgaacatggcttaatgaaagacctctctcgtggatccttgtcacctggtggtgaaagggcctgtgaaggagtcccatctgccccccagaacccaccacagaggaaaaaagtatccctgctggagtaccgaaaacggaaacaagaagctaaggaaaattctgctggtgggggaggtgactctgcacagagcaaaagcaagtctgcaggagctgggcaaggcagcagtaactccgtttccgacactggtgcccatggtgtgcagggatcctcagcccgaactccatcttcccctcacaaaaaattctccccatctcattcctctatgtcccatttggaggcggtaagcccatcagattccagaggcacttcttcatctcactgcagacctcaagagaatatcagcagtaggtggatggttcccacatcagtagaacgactccgagaaggagggagcatccccaaggtcctccgaagcagcgtgagggtggcccaaaagggagagccctctcccacatgggagagtaacatcacagagaaagactcagaccctgcagatggagaaggcccagagacattaagctcagcactctctaaaggagcaacagtttacagcccttccagatacagctaccagctcctgcagtgtgatagtcctcggacagaatcacaaagcctccttcagcagagttcctcccccttcagaggacatcctacacagtctccaggatacagttatcgaactactgcactgagacctggaaaccccccctctcacggttcttcagaatcatccctctcttccacgtcctattccagccccgcccaccctgtgtccacagactcgttggccccatttacggggacaccagggtattttagcagccagccacattctggaaacagcactggcagcaatcttccaaggaggagctgcccttctagtgctgctagccctaccctgcagggaccctcagactcgccaacctcagattcagtttctcagtccagcacaggaactctgagttccacctcctttcctcagaactctaggtcgtcattgccatcagacttacggactatcagtctgcccagtgctgggcagtcagctgtctaccaggcctccagggtatctgcggtttccaattcacagcactacccacaccgtgggagtgggggtgtgcaccagtaccgactccagccactgcaagggtcaggagtcaagactcagacgggactttcctagggcttctggatttgggcaaacagaactgaatgagcccatagctgcttccttccagctgcctctggaacctaggccgagcatattgctgaggaacggggggtacaaggtgccagaggattgggtctggtggacaagaaacaagacttgtggtcacaattggcctctggccttggagaaagctgtaaatcttgtctgaagcagagactataaagaagtttctccctgctgtcaagggtacattgttgacaagcaaatggtgtttcggttagtaacggttctaagtgcaatgagttgtgttgaagcctccgtctcccatccttgcctgtagcccgtagtcacttgtgcagtgaggacatctttttaaatttaaaaaaaaaaaaaaaaaaagttttcaaaggaaaaaaagttaaaagagccaatctcaaagccccaagccatctgagtactgttagggttttatgcacttaagaaaaaaggtaggtatgtaaatgttcatcctaagacaaccattccaaaagcaggtatctggccaatgtgtgtccaccaagaatactgtttatctttgtcttaagatcaccaagaaataggcaaggatagtaaagcttggaacctgcaccaactggagggtgcctggctctttgaagaaaagctcatggtcagctcttgattattcgggagcagattatttgagtagattgtctgagcctccaactgttaccatcctactcccccttcccaagctatttcacagctcagtaacccatgaagtaagtagacaagaaaaggaggaatgagacatgatataggccaattgcattgctacttaccagcttttggcaataaatttcattaggaaggataccgagtggtttgggaatgcttcgaattttattttttctactcccaattaatcaggagttgatgatcccatgagcaggaccgcctccatgattggggagcatgcacttgtgactgcagggtaagagtgggaagataggtttgtggagtggcaccgacaggactgtgattgtgtgtgggcctgccccacatttctctgggggatgcttatgtgagagtgggcccagtgaaagagttaccaagccacccacacccctaacactgttctggatgagagatgagagcagaccggcttctccccatcagtgcattgtgcctgttgtacacccctggaggagccctggagccagcccaggtggggtacacaatctttttaaattccatatggttgccagcttatttctttcacttgtttactgtaatatctggcgtgtttttatttatctaattttgtattcagttataaccatggtaggggtagtgaatatatgacaggtgtaatccctggtgctgcagtggaccttcttttcttttggacaagataatactgtgagtttccctccttccttccctctaatttgttttccttttttccccagcctcttgcatccccttcttttctaccctgtcctacaactatcatatgcacagtcttctctctttgtgtgtgactgttacaaaatttcacttttcaaaatcgaaatcaggtgtttgctcaaatgaggggagattttttttttttttttttttttaaatgctgagacctcagcagagtacttttctttttgttgtttcccccacaaacccatcagtctgggagagcattgggagtggaaatcatgttgcctgggatgctggtttctttgtatattatataaaacgtatgtaaatgtctctccatttgggctggggtttgcattctccccttggctatttaaccaaggggagaggccagcgggcaggcggccctcaccctgcctggcacgtgcagagaccccagccactctgtgtgggcagggtgctgtcaagaccagacctcttgggggggtaggggcgggggggtggggggaactcttggaagggaagaagtatcacttctttctcaagtggagtgtttacaccttgctgtaacatttgaactttcacaagagatgtaataattttgataataaaattcttaaccataataatcataaagt

SEQ ID NO: 353 - DNA, 6798 bp, Homo sapiens; identical to SEQ ID NO: 332

SEQ ID NO: 354 - DNA, 6673 bp, Homo sapiens; identical to SEQ ID NO: 333

SEQ ID NO: 355 - DNA, 6642 bp, Homo sapiens; identical to SEQ ID NO: 331

SEQ ID NO: 356 - DNA, 3406 bp, Homo sapiens; identical to SEQ ID NO: 334

SEQ ID NO: 357 - DNA, 2142 bp, Homo sapiens; identical to SEQ ID NO: 335

SEQ ID NO: 358 - DNA, 2851 bp, Homo sapiens
attaccataactccttaaataaataatagattaccataactccaaatggagagaaagtatggtttttttctctcttacggaaagttcatggtctttatgaaaaatccaaccagaagccttttcacacaggtgcgacacatgattgcagatgggatgattcacctgtgcatctatgctgtgtctgccatcaccaaggatgctgaggtcaccatagcatttgattatgagtatagtaactgtaattataaagtggactgtgcctgtcacaagggaaaccggaattgtcctatacaaaaaaggaatcctaatgctacagaactgccactcctaccacctcctccaagcctacccaccattggagcagagactagacgtagaaaagcacgacggaaagagctagagatggagcagcagaatgaggcttcagaggagaataatgaccagcaatcacaagaagttccagaaaaagtaactgtatccagtgatcatgaggtaatcgcccctggtcaaatgatgatgctatggcatcaatcctccaaaggaagaggaacccgggttgccgcatggtttaagtaggggagctatagtaacacttagtgccctttatatcaatgtgggtttattgtgttcatacatttctttctgttttacaaagtcaaaaacatcctttgctggttttgcaccagagaataggggttagttatcatctgtgtttaccatgtggcctcacatgagttaacagtttaaagcactagagattgttatagagagttttaagctaccagaataaaacagattgattttttctcagagcttgagtacagctgaatattgcctctatcttaaaggaagtagacaatccagaagaaaaaccagaagaagagaaagaagaggttatagatgaccaggagaacctagctcatagcaggagggtgagtactgtctgacattactttgctccttctcattcctgctacctccatcatgtgaacctcttctgttctcttgactttgtatcatctcattgatttgacctgaaggttataatttgggctttttccgtaataaagattttattataatttttttatttatttttctctatacacacagtagttttgtagtgattattatctagtgatggtttgaagaggttgtttttttttttttttttttttttactaacaatctggtttccactgcacccatcctgtttttctttcatattaaagtttcaaaataactgaccctttttgaaaagtttatgtttgaccttgcctttatttacaactattccccacatttaaaatgaaatattttatttttaatcttctgttttccaagttatatgtgtcatcttactggtagttaaatgaatttctgtaaatttccattaaaaatacttttataaaagctatccactcgtcctcatttgaagcttccttctacaccagtactatctctttctagaccagggaagatagaaaggtagaagccatcatgcatgcttttgaaaacttagagaaaagaaagaagcggcgggatcagcccttggaacagagcaactctgatgtagagattactacaaccacctcagagactcctgttggtgaagagacaaaaactgaagcccctgaatctgaagttagcaactctgtttcaaatgttaccatcccaagcaccccacagagtgttggtgtgaatacccggaggtcttcccaagcaggggatattgctgcagaaaaactagtccccaagccacctccagcaaagccttctaggccccggccgaagagtcgaatttctcggtacaggaccagttcagcccaaagactaaagcgtcagaagcaggccaatgcacagcaggcagaattgtcacaagctgccttggaagagggaggaagtaacagtttagtaactcctactgaagctggaagtctagacagttcaggagaaaacaggccattaacagggtctgacccaactgtggtgtcaattactggatcccatgtcaaccgtgctgcatctaaataccccaaaaccaaaaaggtaagtcacaaatgcatcctttataagtccagtctggcaagggctgtcttagtgaaatgagaggacctataatccccagaagaaactaatctcaatattactagattgaaagttctaaaatgctttgacacaaaaggctggagtcatcctgctacctgtttccttatttttagtcagcttaaatcactgatagctgaaattattcctctcttagtgggcgtggagagggtgaaggaagatatccttgtgttctagttgctcaattcattcttactgcagctgctgcatctcctcctgtcctagtttctagatgacgtttgtctttatgaactacactgctacctcttgatttataaactaatgatctcttttttaccttagtatctagttacagaatggttgaatgacaaagcagagaagcaagagtgccctgttgagtgccctttacgtatcacaacggatccaactgtactggcaacgaccctaaacatgttaccaggtcttatccattccccgttaatttgcaccacccccaaacactacattcgctttggctcaccctttatccctgagagacgtcgaaggccccttctgcctgatggcacattcagctcctgtaagaagcgctggataaaacaagccttagaagaagggatgactcaaacatcatctgtaccccaagagactagaactcagcacctataccaaagcaatgagaatagtagctcttctagtatctgcaaagacaatgcaggtacgtatctaaaacctttctgattatatgaccaatgattgtttcagg

SEQ ID NO: 359 - DNA, 971 bp, Homo sapiens; identical to SEQ ID NO: 338

SEQ ID NO: 360 - DNA, 4429 bp, Homo sapiens; identical to SEQ ID NO: 339

SEQ ID NO: 361 - DNA, 1484 bp, Homo sapiens; identical to SEQ ID NO: 337

SEQ ID NO: 362 - DNA, 5743 bp, Homo sapiens; identical to SEQ ID NO: 340

SEQ ID NO: 363 - DNA, 4164 bp, Homo sapiens; identical to SEQ ID NO: 341

SEQ ID NO: 364 - DNA, 1567 bp, Homo sapiens; identical to SEQ ID NO: 342

SEQ ID NO: 365 - DNA, 2336 bp, Homo sapiens; identical to SEQ ID NO: 343

SEQ ID NO: 366 - DNA, 4583 bp, Homo sapiens; identical to SEQ ID NO: 344

SEQ ID NO: 367 - DNA, 7942 bp, Homo sapiens; identical to SEQ ID NO: 345

SEQ ID NO: 368 - DNA, 6546 bp, Homo sapiens; identical to SEQ ID NO: 346

SEQ ID NO: 369 - DNA, 6277 bp, Homo sapiens; identical to SEQ ID NO: 347

SEQ ID NO: 370 - DNA, 5387 bp, Homo sapiens; identical to SEQ ID NO: 348

SEQ ID NO: 371 - DNA, 5721 bp, Homo sapiens; identical to SEQ ID NO: 349

SEQ ID NO: 372 - DNA, 6837 bp, Homo sapiens; identical to SEQ ID NO: 350

SEQ ID NO: 373 - DNA, 6544 bp, Homo sapiens; identical to SEQ ID NO: 351

SEQ ID NO: 374 - DNA, 6450 bp, Homo sapiens; identical to SEQ ID NO: 352

SEQ ID NO: 375 - DNA, 3233 bp, Homo sapiens
tgcgactgagtcggtggcgaagacgggaacgcgacgatggcggagactctgcccgggtcgggcgactcgggccctggcacggcttctctcggcccgggcgttgcggagactgggacgaggcggctcagcgagctgcgggtgatcgatctgcgggcggagctgaagaagcggaacctggacacgggcggcaacaagagcgtcctgatggagcggctcaagaaggcggttaaagaagaggggcaagatcctgatgaaattggcatcgagttagaagccaccagcaagaagtcagccaagagatgtgttaaaggactgaagatggaggaggaaggcacagaagataatggcctggaagacgattccagagacgggcaggaggacatggaagcaagtctggagaacctgcagaatatgggcatgatggacatgagtgtgctagacgaaactgaagtggcgaatagcagtgctccagattttggggaggatggcacggacggccttctcgattccttttgtgatagtaaagaatacgtggctgcacagctgagacagctcccggctcagcccccagagcatgctgtggatggggaaggatttaagaacactttggaaacttcatcgttgaacttcaaagtaactccggacattgaagaatcccttttggagccagaaaatgagaaaatactcgacattttgggggaaacttgtaaatctgagccagtaaaagaagaaagttccgagctggagcagccatttgcacaggacacaagtagcgtggggccagacagaaagcttgcggaggaagaggacctatttgacagcgcccatccggaagagggtgatttagatttggccagcgagtcaacagcacacgctcagtcgagcaaggcagacagcctgttagcggtagtgaaaagggagcccgcggagcagccaggcgatggcgagaggacggactgtgagcctgtagggctagagccggcagttgagcagagtagtgcggcctccgagctcgcggaggcctctagcgaggagctcgcagaagcacccacggaagccccaagcccagaagccagagatagcaaagaagacgggaggaagtttgattttgacgcttgtaatgaagtccctccggctcctaaagagtcctcaaccagtgagggcgctgatcagaaaatgagctcttttaaggaagaaaaagatataaagccaatcattaaagatgaaaaaggtcgggtcggcagcggttctggtcggaacctgtgggtcagcgggctgtcctccacaacacgcgctacggatctcaagaaccttttcagcaagtatgggaaggttgtcggggccaaagtggtaacgaacgcccgcagcccgggggctcgatgctatggattcgtcaccatgtcgacatctgacgaggcgaccaagtgcatcagccatctccacagaactgagctgcatggacgaatgatctccgtagagaaggccaaaaatgagcctgctgggaaaaagctttccgacagaaaagagtgcgaagtgaagaaggaaaaattatcgagtgtcgacagacatcattctgtggagatcaaaattgaaaaaactgtaattaagaaggaagagaagattgagaagaaggaggaaaaaaagcctgaagacattaagaaggaagaaaaagaccaggatgagctgaaacccggacctacaaatcggtctagagtcaccaaatcaggaagcagaggaatggagcggacggtcgtgatggataaatcgaaaggagagcccgtcattagcgtgaaaaccacaagcaggtccaaagagagaagctccaagagtcaggatcgcaagtcagaaagcaaagaaaagagagacatcttgtcgtttgataaaatcaaagaacaaagggagagagagcgccagaggcagcgggaacgggagatccgcgaaacggagaggcggcgggagcgcgagcagcgggagcgggagcaacgcctcgaggccttccatgagcggaaggagaaggcccggctacagcgggaacgcctgcagctcgagtgccagcgccagcggctggagcgggagcgcatggagcgggagcggctggagcgcgagcgcatgcgcgtggagcgtgagcgcaggaaggagcaggagcgcatccaccgcgagcgcgaggagctgcggcgccagcaggagcagctgcgttacgagcaggagcggcggcccgggcggaggccctacgacctggaccgacgagatgatgcctattggccagaaggaaagcgtgtggcaatggaggaccgatatcgtgcagactttccccggccagaccaccgctttcacgacttcgatcatcgagaccggggccagtaccaggaccacgccatcgacaggcgggagggttcgaggccaatgatgggagaccaccgggatgggcagcactatggagatgaccgccatggccacggaggacccccagagcgccacggccgggactcccgtgatggctgggggggctacggctccgacaagaggctgagtgaaggccgggggctgccccctccccccaggggtggccgtgactggggagagcacaaccagcggctagaggagcaccaggcacgcgcctggcagggtgccatggacgcaggcgcggctagccgggagcacgccaggtggcaaggtggcgagaggggcctgtctgggccctcggggccggggcacatggcaagccgcggtggagtggcggggcgaggcggctttgcacaaggtggacattcccagggccacgtggtgccaggtggcggactggaaggtggcggagtggccagccaggaccggggcagcagagtccctcacccacaccctcatccccccccgtacccccacttcacccgccgctactaagtcccactcgctgtgagttttcgggtgggcagacgcactgttgaatctggtagccagggttccctcgaacttgggggatctttttaaaagcaaagtaaatcctgccaccatgttgtagctcaatacaatgtgaactcacttttttttttttttttaataaatgtgttcttgttctgccatttttaaatcaaggtttctgttaacgaggcattccattttccattaataaagtttaccattcgcaaaaaaaaaatgtgttcttgttctgccatttttaaatcaaggtttctgttaacgaggcattccattttccattaataaagtttaccattcgc

SEQ ID NO: 376 - DNA, 3071 bp, Homo sapiens
gggggtggggagtgttgttaaccggaggggcagccgcagtcgcgcggattgagcgggctcgcggcgctgggttcctggtctccgggccagggcaatgttccgcacggcagtgatgatggcggccagcctggcgctgaccggggctgtggtggctcacgcctactacctcaaacaccagttctaccccactgtggtgtacctgaccaagtccagccccagcatggcagtcctgtacatccaggcctttgtccttgtcttccttctgggcaaggtgatgggcaaggtgttctttgggcaactgagggcagcagagatggagcaccttctggaacgttcctggtacgccgtcacagagacttgtctggccttcaccgtttttcgggatgacttcagcccccgctttgttgcactcttcactcttcttctcttcctcaaatgtttccactggctggctgaggaccgtgtggactttatggaacgcagccccaacatctcctggctctttcactgccgcattgtctctcttatgttcctcctgggcatcctggacttcctcttcgtcagccacgcctatcacagcatcctgacccgtggggcctctgtgcagctggtgtttggctttgagtatgccatcctgatgacgatggtgctcaccatcttcatcaagtatgtgctgcactccgtggacctccagagtgagaacccctgggacaacaaggctgtgtacatgctctacacagagctgtttacaggcttcatcaaggttctgctgtacatggccttcatgaccatcatgatcaaggtgcacaccttcccactctttgccatccggcccatgtacctggccatgagacagttcaagaaagctgtgacagatgccatcatgtctcgccgagccatccgcaacatgaacaccctgtatccagatgccaccccagaggagctccaggcaatggacaatgtctgcatcatctgccgagaagagatggtgactggtgccaagagactgccctgcaaccacattttccataccagctgcctgcgctcctggttccagcggcagcagacctgccccacctgccgtatggatgtccttcgtgcatcgctgccagcgcagtcaccaccacccccggagcctgcggatcaggggccaccccctgccccccaccccccaccactcttgcctcagccccccaacttcccccagggcctcctgcctccttttcctccaggcatgttcccactgtggccccccatgggcccctttccacctgtcccgcctccccccagctcaggagaggctgtggctcctccatccaccagtgcagccctttctcggcccagtggagcagctacaaccacagctgctggcaccagtgctactgctgcttctgccacagcatctggcccaggctctggctctgccccagaggctggccctgcccctggtttccccttccctcctccctggatgggtatgcccctgcctccaccctttgccttccccccaatgcctgtgccccctgcgggctttgctgggctgaccccagaggagctacgagctctggagggccatgagcggcagcacctggaggcccggctgcagagcctgcgtaacatccacacactgctggacgccgccatgctgcagatcaaccagtacctcaccgtgctggcctccttggggcccccccggcctgccacttcagtcaactccactgaggagactgccactacagttgttgctgctgcctcctccaccagcatccctagctcagaggccacgaccccaaccccaggagcctccccaccagcccctgaaatggaaaggcctccagctcctgagtcagtgggcacagaggagatgcctgaggatggagagcccgatgcagcagagctccgccggcgccgcctgcagaagctggagtctcctgttgcccactgacactgccccagcccagccccagcctctgctcttttgagcagccctcgctggaacatgtcctgccaccaagtgccagctccctctctgtctgcaccagggagtagtacccccagctctgagaaagaggcggcatcccctaggccaagtggaaagaggctggggttcccatttgactccagtcccaggcagccatggggatctcgggtcagttccagccttcctctccaactcttcagccctgtgttctgctggggccatgaaggcagaaggtttagcctctgagaagccctcttcttcccccacccctttccaggagaaggggctgcccctccaagccctacttgtatgtgcggagtcacactgcagtgccgaacagtattagctcccgttcccaagtgtggactccagaggggctggaggcaagctatgaacttgctcgctggcccacccctaagactggtacccatttccttttcttaccctgatctccccagaagcctcttgtggtggtggctgtgccccctatgccctgtggcatttctgcgtcttactggcaaccacacaactcagggaaaggaatgcctgggagtgggggtgcaggcgggcagcactgagggaccctgccccgcccctccccccaggcccctttcctctgcagcttctcaagtgagactgacctgtctcacccagcagccactgcccagccgcactccaggcaagggccagtgcgcctgctcctgaccactgcaatcccagcgcccaaggaaggccacttctcaactggcagaacttctgaagtttagaattggaattacttccttactagtgtcttttggcttaaattttgtcttttgaagttgaatgcttaatcccgggaaagaggaacaggagtgccagactcctggtctttccagtttagaaaaggctctgtgccaaggagggaccacaggagctgggacctgcctgcccctgtcttttccccttggttttgtgttacaagagttgttggagacagtttcagatgattatttaatttgtaaatattgtacaaattttaatagcttaaattgtatatacagccaaataaaaacttgcattaacaaaaaaaaaaaaaaaaaaaaaaaaa

SEQ ID NO: 377 - DNA, 3074 bp, Homo sapiens
gggggtggggagtgttgttaaccggaggggcagccgcagtcgcgcggattgagcgggctcgcggcgctgggttcctggtctccgggccagggcaatgttccgcacggcagtgatgatggcggccagcctggcgctgaccggggctgtggtggctcacgcctactacctcaaacaccagttctaccccactgtggtgtacctgaccaagtccagccccagcatggcagtcctgtacatccaggcctttgtccttgtcttccttctgggcaaggtgatgggcaaggtgttctttgggcaactgagggcagcagagatggagcaccttctggaacgttcctggtacgccgtcacagagacttgtctggccttcaccgtttttcgggatgacttcagcccccgctttgttgcactcttcactcttcttctcttcctcaaatgtttccactggctggctgaggaccgtgtggactttatggaacgcagccccaacatctcctggctctttcactgccgcattgtctctcttatgttcctcctgggcatcctggacttcctcttcgtcagccacgcctatcacagcatcctgacccgtggggcctctgtgcagctggtgtttggctttgagtatgccatcctgatgacgatggtgctcaccatcttcatcaagtatgtgctgcactccgtggacctccagagtgagaacccctgggacaacaaggctgtgtacatgctctacacagagctgtttacaggcttcatcaaggttctgctgtacatggccttcatgaccatcatgatcaaggtgcacaccttcccactctttgccatccggcccatgtacctggccatgagacagttcaagaaagctgtgacagatgccatcatgtctcgccgagccatccgcaacatgaacaccctgtatccagatgccaccccagaggagctccaggcaatggacaatgtctgcatcatctgccgagaagagatggtgactggtgccaagagactgccctgcaaccacattttccataccagctgcctgcgctcctggttccagcggcagcagacctgccccacctgccgtatggatgtccttcgtgcatcgctgccagcgcagtcaccaccacccccggagcctgcggatcaggggccaccccctgccccccaccccccaccactcttgcctcagccccccaacttcccccagggcctcctgcctccttttcctccaggcatgttcccactgtggccccccatgggcccctttccacctgtcccgcctccccccagctcaggagaggctgtggctcctccatccaccagtgcagcagccctttctcggcccagtggagcagctacaaccacagctgctggcaccagtgctactgctgcttctgccacagcatctggcccaggctctggctctgccccagaggctggccctgcccctggtttccccttccctcctccctggatgggtatgcccctgcctccaccctttgccttccccccaatgcctgtgccccctgcgggctttgctgggctgaccccagaggagctacgagctctggagggccatgagcggcagcacctggaggcccggctgcagagcctgcgtaacatccacacactgctggacgccgccatgctgcagatcaaccagtacctcaccgtgctggcctccttggggcccccccggcctgccacttcagtcaactccactgaggagactgccactacagttgttgctgctgcctcctccaccagcatccctagctcagaggccacgaccccaaccccaggagcctccccaccagcccctgaaatggaaaggcctccagctcctgagtcagtgggcacagaggagatgcctgaggatggagagcccgatgcagcagagctccgccggcgccgcctgcagaagctggagtctcctgttgcccactgacactgccccagcccagccccagcctctgctcttttgagcagccctcgctggaacatgtcctgccaccaagtgccagctccctctctgtctgcaccagggagtagtacccccagctctgagaaagaggcggcatcccctaggccaagtggaaagaggctggggttcccatttgactccagtcccaggcagccatggggatctcgggtcagttccagccttcctctccaactcttcagccctgtgttctgctggggccatgaaggcagaaggtttagcctctgagaagccctcttcttcccccacccctttccaggagaaggggctgcccctccaagccctacttgtatgtgcggagtcacactgcagtgccgaacagtattagctcccgttcccaagtgtggactccagaggggctggaggcaagctatgaacttgctcgctggcccacccctaagactggtacccatttccttttcttaccctgatctccccagaagcctcttgtggtggtggctgtgccccctatgccctgtggcatttctgcgtcttactggcaaccacacaactcagggaaaggaatgcctgggagtgggggtgcaggcgggcagcactgagggaccctgccccgcccctccccccaggcccctttcctctgcagcttctcaagtgagactgacctgtctcacccagcagccactgcccagccgcactccaggcaagggccagtgcgcctgctcctgaccactgcaatcccagcgcccaaggaaggccacttctcaactggcagaacttctgaagtttagaattggaattacttccttactagtgtcttttggcttaaattttgtcttttgaagttgaatgcttaatcccgggaaagaggaacaggagtgccagactcctggtctttccagtttagaaaaggctctgtgccaaggagggaccacaggagctgggacctgcctgcccctgtcttttccccttggttttgtgttacaagagttgttggagacagtttcagatgattatttaatttgtaaatattgtacaaattttaatagcttaaattgtatatacagccaaataaaaacttgcattaacaaaaaaaaaaaaaaaaaaaaaaaaa

SEQ ID NO: 378 - DNA, 3967 bp, Homo sapiens
aggtgcaacattagaggaaatcaatcagcactgggactggctggaacaaaatctcctccacaccttgtctgtctttgataataaagatgacattgccagttttgtcaaagggaaggtaaagccgtgtgtctgggtggctgacggatgacacagctgagccattctcctcatcaggtgtgactgtcgttgaagcagcgcacacttctcgggggcctgtgcacctcagtccctcctgcttcctgtcccttgcaccccctgccttcccattgctggctcactgagcagggactgtcatctctgtgtgtcaggctctgatagccgaggagaccagcagcaggctcgccgagcaggaggaggaacccgagaaattccgagaagccctggtgaagttcgaggccaggttcaacttccccgaggcggagaagctggtcacctactactcctgctgctgttggaagggcagggtgccccgccagggctggctgtacctcagcatcaaccacctctgcttctactccttcttcctgggcaaggaacttaaacttgtggttccgtgggttgatatccagaaattagaaagaacgtccaatgtctttctgacggataccatccgaatcaccacgcagaataaggagcgtgacttctccatgttcctgaacctggatgaggtgtttaaggtcatggagcagctggccgacgtgacgctgcgaaggctgctggataatgaggtctttgacctcgaccccgatctgcaggagccgagccagatcaccaagagggacctggaagccagagcacagaatgagttcttccgggctttcttcaggttgccgaggaaggagaagctgcacgcggttgtggactgttcgctctggacgccgttcagtcgctgtcacaccgcggggcggatgttcgcctctgacagctacatctgctttgccagcagagaagatggctgctgtaagatcatcctgccactcagagaggtggtgagcatcgagaagatggaggacacgagcctgctgccgcatcccatcattgtcagtatcagaagcaaggtggccttccagttcattgagctccgggaccgagacagcctggtggaggcgctgcttgcgaggttgaagcaggtccacgccaaccaccccgtgcactacgacacctctgcggatgatgacatggcttcactcgtgtttcattcaacaagcatgtgcagtgaccacagatttggggatcttgaaatgatgtcttctcaaaatagcgaggagagtgagaaagagaagagcccgctgatgcaccccgatgccctggtcaccgccttccagcagtcaggcagccagagccctgactcccgaatgtccagagaacagataaaaataagcctgtggaatgaccactttgtggaatacggcagaaccgtgtgtatgtttcgcacagagaagattcggaagctcgtagccatgggcatccctgaatctttgcgagggagactctggcttctcttctcagatgcggtgacggatcttgcctcacaccctggttactacgggaatctggtggaggagtccctggggaaatgctgcctggtaaccgaggagatagaacgagacctgcaccgctccctgccagagcaccccgccttccagaacgaaacgggaattgctgctttgaggagagtcttgacggcctatgcccaccggaaccccaagattggatactgccagtccatgaacatcctgacctccgtgctgctgctgtacaccaaggaggaggaagccttctggctgttggttgctgtgtgtgagcggatgctgcccgattacttcaaccaccgagtgatcggggcacaagttgaccagtctgtcttcgaggagctcatcaagggtcatctcccagagctggcagagcacatgaacgacctctcagccctggcgtctgtctctctctcgtggttcctgaccctgttcctcagcatcatgcctctagagagtgcggtgaatgtggtagactgcttcttctatgatggcatcaaagccatcttccagctgggactggctgtgcttgaggccaatgctgaggacctgtgcagcagcaaggatgatggccaggccttgatgatcctcagcaggtttctagatcacattaagaatgaggacagcccagggcccccagttggcagccaccatgcctttttctccgacgaccaggagccctaccctgtgactgatatttcggacctgatccgggattcctatgagaaatttggagaccagtctgtggagcagatcgagcacctacgttacaagcacaggatcagggtcctccaaggccacgaggacaccacaaagcagaacgtgcttcgagtcgttatcccggaagtctcaattcttcctgaagacctagaggagctctacgacttattcaagagagaacatatgatgagctgttactgggagcagcccaggcccatggcctcacgccacgaccccagccggccctatgctgagcagtaccgcatagacgcccggcagtttgcacacctgtttcagctagtctcgccctggacctgcggggcccacacggagatcctcgccgaaaggacgttcaggctcttggatgacaacatggaccagctcatcgagttcaaagcgtttgtgagctgcctcgatattatgtataatggagaaatgaatgagaagattaaactattatacaggcttcatatccctccagcactcactgaaaatgaccgagacagccagtcgccgttgaggaatcctctgttgtcaacatcgagacccctggttttcgggaaacccaatggtgatgcagttgattatcagaaacagctgaagcagatgattaaggatttagccaaagaaaaagataaaactgagaaagaattgcccaaaatgagccagagagaatttatccagttctgtaaaactctgtacagtatgttccatgaagatccagaagaaaatgatttgtatcaagccatcgccacagtcaccacactgctgctgcagatcggggaggtggggcagcgaggcagcagctctggaagctgctcccaggagtgtggggaggagctgcgggcttcagctccttctcctgaggactcggtttttgcagacactgggaagacgccccaggactcccaggcacttccagaggcggcagaaagggactggactgtctcccttgaacatattttagcttcacttctgactgaacagtcattagtcaacttttttgaaaagccactggacatgaaatccaaacttgaaaatgccaagatcaatcagtacaatctcaaaacttttgaaatgagccaccaatcacaatctgaacttaagctgagtaacttgtagcaagacagcagctgctatgcacactggagtccaccataccaaagcacgaaccagactgtttcttggggtcagccctaaaccgagatttcagtctaccttaccaatggggcatctggctaaacaacctgacaaactgtggccaggggaaccgacacaaccctcaagcatttctatgtattgagaattgtcagtgccctaaggtatccattggttcccttgatgccaacttacaatttttaccggatttgctgaaatgggcacttctgctgtgatgctagtgttgattttgctctcagatgaacacaatgtctcatactaaccaagaagcaagaaaagccccatgctttcatttttcacttggagtgacaatgggagaggtcaggaatcaagttcactttcaagatctaagggagtccactatctgtgcaattgtatttggcttttttttgcactgtttcaatgctggtaattgaaaccattttaatatatttggttgtattcactttatatgtccttccaaaaatgttgttgtgtacataccatgctttcaatgttggcttccaagttttttaataagaaactttttgtttttt

SEQ ID NO: 379 - DNA, 2486 bp, Homo sapiens
acccggagcgggaagatggcggcggcgcaggaggcggacggggcccgcagcgccgtggtggcggccgggggaggcagctccggtcaggtgaccagcaatggcagcatcgggagggacccgccagcggagacccagcctcagaacccaccggcccagccggcacccaatgcctggcaggtcatcaaaggtgtgctgtttaggatcttcatcatctgggccatcagcagttggttccgccgagggccggcccctcaggaccaggcgggccccggaggagccccacgcgtcgccagccgcaacctgttccccaaagacactttaatgaacctgcatgtgtacatctcagagcacgagcactttacagacttcaacgccacgtcggcactcttctgggaacagcacgatcttgtgtatggcgactggactagcggcgagaactcagacggctgctacgagcactttgctgagctcgatatcccacagagcgtccagcagaacggctccatctacatccacgtttacttcaccaagagtggcttccacccagacccccggcagaaggccctgtaccgccggcttgccacagtccacatgtcccggatgatcaacaaatacaagcgcagacgatttcagaaaaccaagaacctgctgacaggagagacagaagcggacccagaaatgatcaagagggctgaggactatgggcctgtggaggtgatctcccattggcaccccaacatcaccatcaacatcgtggacgaccacacgccgtgggtgaagggcagtgtgccccctcccctggatcaatatgtgaagttcgacgccgtgagcggtgactactatcccatcatctacttcaatgactactggaacctgcagaaggactactaccccatcaacgagagcctggccagcctgccgctccgcgtctccttctgcccactctcgctttggcgctggcagctctatgctgcccagagcaccaagtcgccctggaacttcctgggcgatgagttgtacgagcagtcagatgaggagcaggactcggtgaaggtggccctgctggagaccaacccctacctgctggcgctcaccatcatcgtgtctatcgttcacagtgtcttcgagttcctggccttcaagaatgatatccagttctggaacagccggcagtccctggagggcctgtccgtgcgctccgtcttcttcggcgttttccagtcattcgtggtcctcctctacatcctggacaacgagaccaacttcgtggtccaggtcagcgtcttcattggggtcctcatcgacctctggaagatcaccaaggtcatggacgtccggctggaccgagagcacagggtggcaggaatcttcccccgcctatccttcaaggacaagtccacgtatatcgagtcctcgaccaaagtgtatgatgatatggcattccggtacctgtcctggatcctcttcccgctcctgggctgctatgccgtctacagtcttctgtacctggagcacaagggctggtactcctgggtgctcagcatgctctacggcttcctgctgaccttcggcttcatcaccatgacgccccagctcttcatcaactacaagctcaagtctgtggcccaccttccctggcgcatgctcacctacaaggccctcaacacattcatcgacgacctgttcgcctttgtcatcaagatgcccgttatgtaccggatcggctgcctgcgggacgatgtggttttcttcatctacctctaccaacggtggatctaccgcgtcgaccccacccgagtcaacgagtttggcatgagtggagaagaccccacagctgccgcccccgtggccgaggttcccacagcagcaggggccctcacgcccacacctgcacccaccacgaccaccgccaccagggaggaggcctccacgtccctgcccaccaagcccacccagggggccagctctgccagcgagccccaggaagcccctccaaagccagcagaggacaagaaaaaggattagtcgagactggtcctcacctgctccggctcctggcgaccactacccctgcgtcccggccccctcgcctcccctccctgtcgccctttccctggacagatcaggccggggcggtgggaggcccgcctcaggtcagggcccagcgtgtgacgtaggggccggggcaggccagggtttgtttgtggaggcgctgtctgtccctctgtccctctgtgtttccagccatctcgccctgccagcccagcaccactgggaatcatggtgaagctgatgcagcgttgccgagggggtgggttgggcgggggtggggccgggcccccctacgggatgcccacggccgttcatcatcttgtccctcgtccccctaccacactccccctcctagaccgccgccctttaacacagtctggatttaataaattcatatgggtgtttaacttaaactcaaaaaaaaaaaaaaaaaa

SEQ ID NO: 380 - DNA, 1017 bp, Homo sapiens
tggcggcagaggcagtgcggatccggcgttctccactgatcttttccaaggctgtacagacatggcggcggcttttcggaaggcggctaagtcccggcagcgggaacacagagagcgaagcgagcctggctttcgaaaacatctgggcctgctggagaaaaagaaagattacaaacttcgtgcagatgactaccgtaaaaaacaagaatacctcaaagctcttcggaagaaggctcttgaaaaaaatccagatgaattctactacaaaatgactcgggttaaactccaggatggagtacatattattaaggagactaaggaagaagtaaccccagaacaactaaagctgatgagaactcaggacgtcaaatatatagaaatgaagagggttgcagaagctaagaaaatcgaaagactaaaatcagagctccatctgctggatttccaggggaagcaacagaacaagcatgtgttcttttttgacaccaaaaaggaagttgaacagtttgatgtcgcaactcacctgcaaacagccccggagctagtcgacagagtctttaataggcccaggatagagaccttgcagaaagaaaaagtgaaaggagttaccaatcagactggacttaagcgaatagctaaagaaaggcaaaagcagtataactgcctgacacagcggattgaacgagagaagaaattgttcgttattgctcagaaaattcaaacacgcaaagatcttatggataaaactcagaaagtgaaggtgaagaaagaaacggtgaactccccagctatttataaatttcagagtcgtcgaaaacgttgacgtgttatagataagccttgtcattctgtatcaaaaatctgttgtcgttttctagtaacttcaaattccattactccaaatggcatggttttccggtttgtaaccataactaaattgtcagtctgacatttaatgtctttctatggacaacattaaatctccctcccttctgtaattgtttttggattgtgaaa

SEQ ID NO: 381 - DNA, 2225 bp, Homo sapiens
cggcggcggcggtggcggcggcgactgctgcggtgaaggaggaggaggagccgagcgggcgctggcaccgaggcctgaccatggacgaggaatacgatgtgatcgtgctggggaccggtctcaccgaatgcatcctgtcgggcatcatgtctgtgaacgggaagaaggtgctgcacatggaccggaacccctactacgggggcgagagctcctccatcacacccctggaggagctgtataagcgttttcagttgctggaggggccccctgagtcgatgggccgaggccgagactggaatgttgacctgattcccaaattcctcatggctaacgggcagctggtaaagatgctactgtatacagaggtgactcgctacctggacttcaaggtggtggagggcagctttgtctacaaggggggcaagatctacaaagtgccgtccactgagactgaggccttggcttccaatctgatgggcatgtttgagaaacggcgcttccgcaagttcctggtgtttgtggcaaacttcgatgagaatgaccccaagacctttgagggcgttgacccccagactaccagcatgcgtgacgtctaccggaagtttgatctgggccaggatgtcatcgatttcactggccatgccctggcgctctaccgcactgatgactacctggaccagccctgccttgagaccgtcaaccgcatcaagttgtacagtgagtccctggcccggtatggcaagagcccatatttatacccgctctacggcttgggcgagctgccccagggttttgcaagattgagtgccatctatggggggacatatatgctgaacaaacctgtggatgacatcatcatggagaacggcaaggtggtgggcgtgaagtctgagggagaggtggcccgctgcaagcagctgatctgtgaccccagctacatcccggaccgtgtgcggaaggctggccaggttatccgcatcatctgtatccttagccaccccatcaagaacaccaacgacgccaactcctgccaaataatcatcccccagaaccaggtcaacaggaagtcagacatctacgtgtgcatgatctcctatgcacacaacgtggcggcccagggcaagtacatagctattgccagcactactgtggagaccacggaccctgaaaaggaggtggagccggctctggagctgttggagcccattgaccagaagtttgtggctatcagtgacttgtatgagcccattgatgatggttgtgagagccaggtgttctgttcctgctcctacgatgccaccacacactttgagacaacctgcaacgacatcaaagacatctacaaacgcatggctggcacggcctttgactttgagaacatgaagcgcaaacagaacgacgtctttggagaagctgagcagtgattgtggccgcccccagcccctgctgccccagcctgtgtctgttctcctcgagggctccagcatcctctgcttcccccaccacgttcccatcacccacctcattgatccactgaccaaatccttaaccctagcgatggcttgggagatggggggttggatagcatcctctttcttggcccttccttatcctaggaaaagagggttcctctccttgtgtgtgtctcttccccccacccctaattcttctgctctgtttgggaagacgtggaggaaaaggtgacttctgcccccaccgctcttacccccactgtagtggcctttggagatgcccccacctcccccccaccaactctcgcgtgttggagagaaggggccctcccagcacaaagttgcattcctccccccctaatttattctaatttattaactttgacccaccctttctgagcctgcagccttcccgtgtggcctgagggctgtcgagtgagctgccccagccccctcccagcccttgcccagcctgggggagtggggaaggcttgggcatggccccgttggaggttgatttgctgttttgtttcttgtctttgtgttctgtggtacttgctgagagaaaagaaaagtgagccaagcagaaggaggtggaaaacggacccaaaccccagtgtgccctgccccatgcctttcctttagtggtgggaaacccttatcttgcaaagtgaatgtgtccccttccccaccctctagtgtatttcacagaaaacaaaacctcccaataaaacggttgaaacctgaaaaaaa

SEQ ID NO: 382 - DNA, 6708 bp, Homo sapiens
gctttcccaacatgctctgcagagaaatcaaagatggcggttgtatctgctgttcgctggctgggcctccgcagcaggcttggccagccgctgacgggtcggcgggcgggtttgtgtgaacaggcacgcagctgcagattttattctggtagtgcaaccctctcaaaggttgaaggaactgatgtaacagggattgaagaagtagtaattccaaaaaagaaaacttgggataaagtagccgttcttcaggcacttgcatccacagtaaacagggataccacagctgtgccttatgtgtttcaagatgatccttaccttatgccagcatcatctttggaatctcgttcatttttactggcaaagaaatccggggagaatgtggccaagtttattattaattcataccccaaatattttcagaaggacatagctgaacctcatataccgtgtttaatgcctgagtactttgaacctcagatcaaagacataagtgaagccgccctgaaggaacgaattgagctcagaaaagtcaaagcctctgtggacatgtttgatcagcttttgcaagcaggaaccactgtgtctcttgaaacaacaaatagtctcttggatttattgtgttactatggtgaccaggagccctcaactgattaccattttcaacaaactggacagtcagaagcattggaagaggaaaatgatgagacatctaggaggaaagctggtcatcagtttggagttacatggcgagcaaaaaacaacgctgagagaatcttttctctaatgccagagaaaaatgaacattcctattgcacaatgatccgaggaatggtgaagcaccgagcttatgagcaggcattaaacttgtacactgagttactaaacaacagactccatgctgatgtatacacatttaatgcattgattgaagcaacagtatgtgcgataaatgagaaatttgaggaaaaatggagtaaaatactggagctgctaagacacatggttgcacagaaggtgaaaccaaatcttcagacttttaataccattctgaaatgtctccgaagatttcatgtgtttgcaagatcgccagccttacaggttttacgtgaaatgaaagccattggaatagaaccctcgcttgcaacatatcaccatattattcgcctgtttgatcaacctggagaccctttaaagagatcatccttcatcatttatgatataatgaatgaattaatgggaaagagattttctccaaaggacccggatgatgataagttttttcagtcagccatgagcatatgctcatctctcagagatctagaacttgcctaccaagtacatggccttttaaaaaccggagacaactggaaattcattggacctgatcaacatcgtaatttctattattccaagttcttcgatttgatttgtctaatggaacaaattgatgttaccttgaagtggtatgaggacctgataccttcagcctactttccccactcccaaacaatgatacatcttctccaagcattggatgtggccaatcggctagaagtgattcctaaaatttggaaagatagtaaagaatatggtcatactttccgcagtgacctgagagaagagatcctgatgctcatggcaagggacaagcacccaccagagcttcaggtggcatttgctgactgtgctgctgatatcaaatctgcgtatgaaagccaacccatcagacagactgctcaggattggccagccacctctctcaactgtatagctatcctctttttaagggctgggagaactcaggaagcctggaaaatgttggggcttttcaggaagcataataagattcctagaagtgagttgctgaatgagcttatggacagtgcaaaagtgtctaacagcccttcccaggccattgaagtagtagagctggcaagtgccttcagcttacctatttgtgagggcctcacccagagagtaatgagtgattttgcaatcaaccaggaacaaaaggaagccctaagtaatctaactgcattgaccagtgacagtgatactgacagcagcagtgacagcgacagtgacaccagtgaaggcaaatgaaagtggagattcaggagcagcaatggtctcaccatagctgctggaatcacacctgagaactgagatataccaatatttaacattgttacaaagaagaaaagatacagatttggtgaatttgttactgtgaggtacagtcagtacacagctgacttatgtagatttaagctgctaatatgctacttaaccatctattaatgcaccattaaaggcttagcatttaagtagcaacattgcggttttcagacacatggtgaggtccatggctcttgtcatcaggataagcctgcacacctagagtgtcggtgagctgacctcacgatgctgtcctcgtgcgattgccctctcctgctgctggacttctgcctttgttggcctgatgtgctgctgtgatgctggtccttcatcttaggtgttcatgcagttctaacacagttggggttgggtcaatagtttcccaatttcaggatatttcgatgtcagaaataacgcatcttaggaatgactaaacaagataatggcagtttaggctgcacaactggtaaaatgactgtagataaatgttgtaattagtgtacacgtttgtatttttgttaatatagccgctgccatagttttctaacttgaacagccatgaatgtttcatgtctccctttttttttgtctatagctgttacctattttagtggttgaaatgagagctagtgatgacagaaggatgtggaatgtcttcttgacatcattgtgtattgctggtaatcaagttggtaacgactacttctagcagctcttaccactatgacttaagtggtcctggaaggcagtaagtggaggtttgcagcattcctgccttcatgagggcttctaccactgaccactttgcacgtacctggctcccagatttacttaggtaccccacgagttgtccacataagcagcttcatctttaccttgccagagttgacaattatgggatactctagtctacttatacttgtgttcccatctgtctgccatcctctgaaggccgggacccagtcatacatccttagaaaccaaagtatggtttttgttttctcttggaatgtcaggtcttaaggcatttaattgagggacaaaaaaaaaaaaagccgatatagtagctagctacttaagcatccatgggtattgctccatatcaaagcagatttgcaggacagagagagtaaattagccttcagtcttggtttacagcttccaaggagagccttggccacctgaaatgttaactcggtcccttcctgtctctagttcatcagcacctgcagatgcctgactcttgttagccttactattcaatacagtccttagattcacggtatgcctcttcctatccaggcacctattctgaatcaccatgttgctctgcagctagagttgataggagaaaatccatttgggtagatggcctatgaatttgtagtagactttcaaaatgagtgatttgttagcttggtacttttaagtttgtggtacagatcctccaaacccatactctgagcaattaactgccttgaacatagagaaaaattaaggcctcacaggatgagtctccattctctgtaaatgcttattttatcatagtctttagcctctactatgagtaaaatgttctcttcggccgggtgtggtgactcacacctgtaacctcagcactttgggaggcagaggtgggaggatcacttaggtccaggagttcgagactagcctgggcaacatagtgagacaccggatctacaaaaaaataaaaagccagactggtggtatgtatctgtgtcccagctaattgggagggtgagttgggaggattgtttgagcctaggagagggaggttgcagtgagccgtgattgcaccactgcactccagcctgggcaacagagcaagaccctgtcttggagaaaccagaattttggaagagcaaatggggctgagtgcagtggctcatgcctgtaatcccagcacttagggtgccaatgtggattacctgagcccaggagtttgagaccagcctgggtaacagtgagacccccctccctacaaaagattttaataattagttgggcgtagtggtgcatgcctgtaatcccagctactctggagacaggtggaggggattgcttgagcctgggaagctgaggctgcagtagccatgactgcaccactgcattccagcctggttgacagagtgacccttgtctccaagaaaaaaaaaaagcaaatgggattaaggactcatggaatgggaaggggaaggggagtcttactatatgtggaataaacttgctcagtgttgccacagagttacattaccaatgtgtagaagtcagaaactagacttctagtttggttcaacatttgagggttgttttatagccatcaaagtattcaagaggttggatggcactcaaaagattctacatgtctagaatcaaactcaaatctggcacgtaggtgcttcttagtaaatgcttaatgaatgccaccaactctgcaaagtattcattgattttgagaccttagtcatgttgctactaaaagtagggcatatgaccgcctaagaaacagaacttcgagaagtcctaacgtaaccacagtaaagcagactcccctttcagcaacctcaaagcaaaaaaaaaaaaaaaaaaaccagttagctgctatataaacactataccaagcactaggcttagaggaaaagatgtcagattgtactgtcactggctatgtacccatattctctaagacagggtagcatttgtctttcaaactgcagggtttgaaatcagtttttgtgggtgattgcaattttttaatgaaatgcattagaacatctaagcacgtcacctacagttttgtgatggtgcatttttgcattgcagtatagatctgtgcatagatatatgcattaagtgtagcaaatcgtgatgtaaattttttactgctggtcatggtcaaaaagtaagatacgctaggaaattgagtcactaggagcatggatgtataaggcaggttttatagaaccatttagattcaacattaatggtagagtggcattttaccaaaaaaatgggtgtatttgatttgggtgctgtaaggcaatttgctaggacatgggataatcagattacacaaaatctaggcagtgaacaagtcttcatcctggcccaggaaatagcctattaaaaaatgctgtccaggccaggcacagtggctcacacctgtaatcccaggacttcgggaggctgaggctggaggattgcttgagttcaagaccagcctgagcaacacagtgaaaacccatctcaaaaaaaaaaaaaaaaaaccaaaaaaactgtccagctgtggactttcaggattcaggactgctggggatcaagcccaaggatgtttttcagagctctgtgatttaagatgctcgaaaagagtgtccaagaggagtaaaggtcatgacagaatttactcccaggacaatctaagttctgccacaagtacccgtggtgtctgttcccacaacaatggccctttcacaagctcttgcctcacaacccctgcagaagtccttcaacaaaactaataatagactagtgaaacctactcctcacatgggtaagagttgcagtgggcaggtgaccctcctccctgcccccatcctttgcttcctcaagctccctgccaacctctggatacatcaatgggaaggaaaccagggaagcatagacctatagtacaacaggggtgtagtgaccactggacctgatgaagcgaatctgcctgaaatttaatacgcctttttatttcccttctgtgttaaatcaaatgatctgttctgcactgagccaagcaagttacttttaaaactggtggcaccactcatttgggacttggagactgcttttatccagaacctgttaagagaacaggggatttaaatacaaaggaatatgaaggtggtgtgccttaaagacagtctaaaattaggttttagtttgttacattattttgaaatattaaacatgaaaatgttaaatcaggatgtgtgagttttaagatgttgaacactgtcctacatcagtgaggagggaggcaataaagtaatttcagagtaaaacagattgaggatgaaaccaagacagaagtgatgatttggctttttatgatttttgctgtggaaatggcagtcgtgtgacttttcacttgcagtttaaatgaaagggtgaagagaagcctacctgccctaatggctcagggctatatccacctcccggataaccctggcccttgggactccatcatctccttgaagtagcactgagaatccaagaagaggctccgctgctttttgcacatgttactgagttacatctcaggaagatttttaagcacgaggaaggaaaatacaggcctggccaagcagggtccccttttcggtatcatctttgttcctaataagcaatcaagggggtgggtgtgttggctggtaaaggaactactaagattcagaagcttgtagtcttcattattttgttttacaggttaaaataaaccacttgactgggaaaaaaaaa

SEQ ID NO: 383 - DNA, 2249 bp, Homo sapiens
agaccgggaggggacctggatcatggctgccgcgccgccgctacgggaccgcctgagctttctacaccggctcccgattctcctgaaggggacgtccgatgatgatgtcccgtgtccgggctacctgtttgaagagattgctaaaatctcccacgagtctccgggcagcagccagtgcctgctggagtacctcctgagccgcctgcacagcagctccggccacgggaagctcaaggtgctgaagatcctgctctatctgtgcagccacggctcctccttcttcctgctcatcctcaaacgcaactctgccttcatccaggaagctgcagcttttgcagggcccccagatcctctgcacgggaacagcttgtaccagaaggttcgcgcggccgcgcaggacttggggagcaccctgttctcggacaccgtgttgccgctggctccctcccagcctctggggaccccgcctgccacaggcatgggctcccaggccaggccgcacagcaccctccagggtttcggctacagcaaggaacacggccgcacggctgtgaggcatcagcctgggcaggccggagggggctgggatgagctggacagcggccccagctctcagaattcctcccagaacagtgacctgagcagggtctcggactcgggcagtcattccggcagcgacagccattcaggggccagccgggagccgggtgacctggcagaaagggtcgaggtggtggccctgagtgactgtcagcaggagttgagcttggtgaggactgtgactcggggaccacgcgccttcctgagccgcgaggaggcacagcacttcatcaaagcgtgtggactgctcaactgtgaggccgtgctgcagctgctgacctgccacctgcgtgggaccagtgaatgcacgcagctgagggcgctgtgtgccatcgcctccctggggagcagcgacctcctcccccaggagcacatcctcctccgcacccggccgtggctgcaggagctcagcatgggcagcccgggacctgtgaccaacaaggccaccaagatcctgaggcactttgaggcctcctgtgggcagctgtcccctgcccggggcacctcagctgagcctggccccacagccgccctcccaggcccatctgacctgctgaccgacgctgtgcctctccctgggagccaggtcttcctgcagcctctgagttcaaccccggtctcgtcccggagccctgctccctcatctgggatgccgtccagccctgtgcccaccccacccccagatgcctcccccattccagcccccggagaccccagcgaggccgaggccagactggcagaaagcaggcggtggagacctgaacggatcccagggggcacggacagcccaaagagaggccccagcagctgtgcgtggagccgcgactccttgtttgctggcatggagctggtggcctgtccccgcctggtgggggctggggctgctgcgggagagtcctgtcctgatgctccccgcgccccccaaacatcgtcccagaggacagcagccaaagagcctcctggctcagagccgtcagctttcgcgttcctgaacgcctgacccgatggcctggccctggagtcttcagcttcagctgctgtctggggcggtctgtgcttcctgagcagcctcaaccgtagctgctacagtctccaggcagcttgacttgagaggacgaccctagggctacctcagtttcccccatctcctctgccagaggctctggctatttggacttgaatccctacgagggatggcaggtggcagggcttcagaaatgtcgatctcagggctctcagggggcagtccctgcctgtcttgccctcagacatgaggtttcttgtatgaatgcggaagcgactaccaggttccttatttcattttgatctcagctccctccttccccaggaggtcatgagcagcaacaagccactgctcccccgtcccatcggggtgggctaggtgctgaggctgggtttggtgcatgtgggttgagggtgtcttgtccgggctgccttgtgctgtctggcctgaggccatttcaagtctcagatccctacgtgatccttccctggctctcacctgctcctttaggctgtaattgcttcctacacacgaagcctctgattggagcctctggtccatctcagaaaaaccttccaagagcgctggggtttatgctttctgaataaacactactgtttacatg

SEQ ID NO: 384 - DNA, 3111 bp, Homo sapiens
gcgagttgtgtgagccgccagtatggccgggctatggcggcgagcactggctacgtgcgactgtggggagcggcgcggtgctgggtgctgcggcggccgatgctggccgccgccggggggcgggttcccactgcagcaggagcgtggttgctccgaggccagcggacctgcgacgcctctcctccttgggcactgtggggccgaggcccggcaattgggggccaatggcgggggttttgggaagcgagcagccgcggcggaggcgcattctcggggggcgaggacgcctccgagggcggcgcggaggaaggagccggcggcgcggggggcagcgcgggcgccggggaaggcccggtcataacggcgctcacgcccatgacgatccccgatgtgtttccgcacctgccgctcatcgccatcacccgcaacccggtgttcccgcgctttatcaagattatcgaggttaaaaataagaagttggttgagctgctgagaaggaaagttcgtctcgcccagccttatgtcggcgtctttctaaagagagatgacagcaatgagtcggatgtggtcgagagcctggatgaaatctaccacacggggacgtttgcccagatccatgagatgcaggaccttggggacaagctgcgcatgatcgtcatgggacacagaagagtccatatcagcagacagctggaggtggagcccgaggagccggaggcggagaacaagcacaagccccgcaggaagtcaaagcggggcaagaaggaggcggaggacgagctgagcgccaggcacccggcggagctggcgatggagcccacccctgagctcccggctgaggtgctcatggtggaggtagagaacgttgtccacgaggacttccaggtcacggaggaggtgaaagccctgactgcagagatcgtgaagaccatccgggacatcattgccttgaaccctctctacagggagtcagtgctgcagatgatgcaggctggccagcgggtggtggacaaccccatctacctgagcgacatgggcgccgcgctcaccggggccgagtcccatgagctgcaggacgtcctggaagagaccaatattcctaagcggctgtacaaggccctctccctgctgaagaaggaatttgaactgagcaagctgcagcagcgcctggggcgggaggtggaggagaagatcaagcagacccaccgtaagtacctgctgcaggagcagctaaagatcatcaagaaggagctgggcctggagaaggacgacaaggatgccatcgaggagaagttccgggagcgcctgaaggagctcgtggtccccaagcacgtcatggatgttgtggacgaggagctgagcaagctgggcctgctggacaaccactcctcggagttcaatgtcacccgcaactacctagactggctcacgtccatcccttggggcaagtacagcaacgagaacctggacctggcgcgggcacaggcagtgctggaggaagaccactacggcatggaggacgtcaagaaacgcatcctggagttcattgccgttagccagctccgcggctccacccagggcaagatcctctgcttctatggcccccctggcgtgggtaagaccagcattgctcgctccatcgcccgcgccctgaaccgagagtacttccgcttcagcgtcgggggcatgactgacgtggctgagatcaagggccacaggcggacctacgtgggcgccatgcccgggaagatcatccagtgtttgaagaagaccaagacggagaaccccctgatcctcatcgacgaggtggacaagatcggccgaggctaccagggggacccgtcgtcggcactgctggagctgctggacccagagcagaatgccaacttcctggaccactacctggacgtgcccgtggacttgtccaaggtgctgttcatctgcacggccaacgtcacggacaccatccccgagccgctgcgagaccgtatggagatgatcaacgtgtcgggctacgtggcccaggagaagctggccattgcggagcgctacctggtgccccaggctcgcgccctgtgtggcttggatgagagcaaggccaagctgtcatcggacgtgctgacgctgctcatcaagcagtactgccgcgagagcggtgtccgcaacctgcagaagcaagtggagaaggtgttacggaaatcggcctacaagattgtcagcggcgaggccgagtccgtggaggtgacgcccgagaacctgcaggacttcgtggggaagcccgtgttcaccgtggagcgcatgtatgacgtgacaccgcccggcgtggtcatggggctggcctggaccgcaatgggaggctccacgctgtttgtggagacatccctgagacggccacaggacaaggatgccaagggtgacaaggatggcagcctggaggtgacaggccagctgggggaggtgatgaaggagagcgcccgcatagcctacaccttcgccagagccttcctcatgcagcacgcccccgccaatgactacctggtgacctcacacatccacctgcatgtgcccgagggcgccacccccaaggacggcccaagcgcaggctgcaccatcgtcacggccctgctgtccctggccatgggcaggcctgtccggcagaatctggccatgactggcgaagtctccctcacgggcaagatcctgcctgttggtggcatcaaggagaagaccattgcggccaagcgcgcaggggtgacgtgcatcgtcctgccagccgagaacaagaaggacttctacgacctggcagccttcatcaccgagggcctggaggtgcacttcgtggaacactaccgggagatcttcgacatcgccttcccggacgagcaggcagaggcgctggccgtggaacggtgacggccaccccgggactgcaggcggcggatgtcaggccctgtctgggccagaactgagcgctgtggggagcgcgcccggacctggcagtggagccaccgagcgagcagctcggtccagtgacccagatcccagggacctcagtcggcttaatcagagtgtggcatagaagctatttaatgattaaagtcatttgcagta

SEQ ID NO: 385 - DNA, 3652 bp, Homo sapiens
gggaggggtgcgaggctagccacgcaggcggggccctgggtcattttaaactctcagagtgaacgtcttgataggaccgacaagacgcatgacatgtacttagaaagcttatcttagagccacactgagattggaacccgcaaaatatgccagggaggaaggtgagcaagggacacgacactcacccggagaaacccagcaagcgcagcgaggctgtggggagaccggagccctgcacaccgccgggggaaggtgggccagcgccaccaccgtggagaacagcgcggaggcaccccacgagatgagacggaactgccgtgagatccagcaatgccaactgtgggtctgacccaggagaacggaaagcagggacgtgaacagccctcctcatgttcttgacaccgtcattctcagcagctcagctaaggcacagaggcagccgagcgtctgtcagcggagtcgtggctgagcagaacacgccacacgccacacgccacacgccacacgtgcaggattgctcaagatggaagggcacagtggaatatatatatatatttatatttttggcgagaccctggaggacacactgaatacaatggaataccatcccgcctttgaaaggaagggaaatcctggcacacgctgcaacaggagggagcttgaggacactgtggtgagtggagcacgtgagacacggaaggacacacgctgaagacacgcagagatgcccacccacgtggggaggtgacaggggagcccagcgcacagagacaaagtggaatggaggcctgggggctgggagcaaatgcggagcgagtgcttcctggggcagagtctccgtttgggaagatgagaaggttctgccgacggatgctggcgatggttgcagaagaatgtgaatgtgcccaatgctactgaaaaacggttacaatggaaacgccaccccagtgaccaccactgccccgtgggcctccctgggcctctccgccaagacctgcaacaacgtgtccttcgaagagagcaggatagtcctggtcgtggtgtacagcgcggtgtgcacgctgggggtgccggccaactgcctgactgcgtggctggcgctgctgcaggtactgcagggcaacgtgctggccgtctacctgctctgcctggcactctgcgagctgctgtacacaggcacgctgccactctgggtcatctatatccgcaaccagcaccgctggaccctaggcctgctggcctgcaaggtgaccgcctacatcttcttctgcaacatctacgtcagcatcctcttcctgtgctgcatctcctgcgaccgcttcgtggccgtggtgtacgcgctggagagtcggggccgccgccgccggaggaccgccatcctcatctccgcctgcatcttcatcctcgtcgggatcgttcactacccggtgttccagacggaagacaaggagacctgctttgacatgctgcagatggacagcaggattgccgggtactactacgccaggttcaccgttggctttgccatccctctctccatcatcgccttcaccaaccaccggattttcaggagcatcaagcagagcatgggcttaagcgctgcccagaaggccaaggtgaagcactcggccatcgcggtggttgtcatcttcctagtctgcttcgccccgtaccacctggttctcctcgtcaaagccgctgccttttcctactacagaggagacaggaacgccatgtgcggcttggaggaaaggctgtacacagcctctgtggtgtttctgtgcctgtccacggtgaacggcgtggctgaccccattatctacgtgctggccacggaccattcccgccaagaagtgtccagaatccataaggggtggaaagagtggtccatgaagacagacgtcaccaggctcacccacagcagggacaccgaggagctgcagtcgcccgtggcccttgcagaccactacaccttctccaggcccgtgcacccaccagggtcaccatgccctgcaaagaggctgattgaggagtcctgctgagcccactgtgtggcagggggatggcaggttgggggtcctggggccagcaatgtggttcctgtgcactgagcccaccagccacagtgcccatgtcccctctggaagacaaactaccaatttctcgttcctgaagccactccctccgtgaccactggccccaggctttcccacatggaaggtggctgcatgccaaggggaggagcgacacctccaggcttccgggagcccagagagcatgtggcaggcagtggggcctcttcatcagcagcctgcctggctggctcccttggctgtgggcaggtagcacgcctgctggcagaggtacctggtggctgccctgttcgcatcagtggcgatgactttatttgcggagcatttctgcaagcgttgcctggatgcggtggtgcattgtgggccctctgggctcctgcctcagaatgtcagtgagcaccatgctggaggtcacccagcactgtggcagcgcccaggagggcatagggcagcctaccacctccaagggggcaggcgccctcatctggggttgggtctgtgctgagctggagggcctctagggaaccgtggggcagggtggccagctgctggctcccagagcgcagcccaggcgtcctcaacggggagccccaaatgtccacgcccagaacaacagttggcaggacaggtgtgacacagccacagcagaggcaaggggtgccaggagtccccagcggcatcctcggggagatgctggtgaggggtccgtacagggtggggtccccacccctagccccttactgaggggggagtgcagcagttggcctgcttgtctggcggagaaagccagctccctgcaccctcggggctgagtcagatctgggtctgccgcaaaggccttgcctagaccaggtcacactgatgccctggtttccctatctgtaaaatggggccaatgacacctacctcactgggtcaccatcgagatcaatcctcctccctgccccgacacctcgggcacatcgcatgcactcagagcacagagccgggcagacgcagcacctgcatggggagcccagtgcccggcacagcacaggggcttccagggaggccgcgcagggccgtggggctgagccacgctctcgttttgtcaggcagctatgcagttgctcttccttgtttttgttttgtttttgtttttgtttttaatatttatttttttagagacagggccttgctctgttgcctgggctggagaacagtggcaccatcatagctcactgcagcctcaaactcctgggctcaagcgatcctccccgctcagcctcctgagtagctgggactacaggtgtgcaccaccacacccagccaaaacagccatcctccccttgagagtcatcagaaaaatacattaggaaaatgtgtttagaaataaaagcacaaggcagggcagtgctcacgcctgtcatcccagcactttgggaggccgagacgggaggatcagttgaggtcaggagtttgagaccagcctcggcaacatggcaaaatcttgtctcttttttttggtattaaaaaaatcataaaaataaaagaaataatgcaaaaaaaaaaaaaaaaaa

SEQ ID NO: 386 - DNA, 3330 bp, Homo sapiens
cttttcttttctccaggaagagagctgtgaccagcagcgtcccttattcgcttggccttggttcctgtttgcactggctacagcagggcactggcccctactgtcaccgccacctacacaaagaccctatctctgagcgctgcagcctactgttcagccccaggtttgaggatggatgccctggacgcttcgaagctactggatgaggagctgtattcaagacagctgtatgtgctgggctcacctgccatgcagaggattcagggagccagggtcctggtgtcaggcctgcagggcctgggggccgaggtggccaagaacttggttctgatgggtgtgggcagcctcactctgcatgatccccaccccacctgctggtccgacctggctgcccagtttctcctctcagagcaggacttggaaaggagcagagccgaggcctctcaagagctcttggctcagctcaacagagctgtccaggtcgtcgtgcacacgggtgacatcactgaggacctgctgttggacttccaggtggtggtgctgactgctgcaaagctggaggagcagctgaaggtgggcaccttgtgtcataagcatggagtttgctttctggcggctgacacccggggcctcgtggggcagttgttctgtgactttggtgaggacttcactgtgcaggaccccacagaggcagaacccctgacagctgccatccagcacatctcccagggctcccctggcattctcactctgaggaaaggggccaatacccactacttccgtgatggagacttggtgactttctcgggaattgagggaatggttgagctcaacgactgtgatccccggtctatccacgtgcgggaggatgggtccctggagattggagacacaacaactttctctcggtacttgcgtggtggggctatcactgaagtcaagagacccaagactgtgagacataagtccctggacacagccctgctccagccccatgtggtggcccagagctcccaggaagttcaccatgcccactgcctgcatcaggccttctgtgcactgcacaagttccagcacctccatggccggccaccccagccctgggatcctgttgatgcagagactgtggtgggcctggcccgggacctggaaccactgaagcggacagaggaagagccactggaagagccactggatgaggccctagtgcggacagtcgccctaagcagtgcaggtgtcttgagccctatggtggccatgctgggtgcagtagctgcccaggaagtgctgaaggcaatctccaggaagttcatgcctctggaccagtggctttactttgatgccctcgattgtcttccggaagatggggagctccttcccagtcctgaggactgtgccctgagaggcagccgctatgatgggcaaattgcagtgtttggggctggttttcaggagaaactgagacgccagcactacctcctggtgggcgctggtgccattggttgtgagctgctcaaagtctttgccctagtgggactgggggccgggaacagcgggggcttgactgttgttgacatggaccacatagagcgctccaatctcagccgtcagttcctcttcaggtcccaggacgttggtagacccaaggcagaggtggctgcagcagctgcccggggcctgaacccagacttacaggtgatcccgctcacctacccactggatcccaccacagagcacatctatggggataactttttctcccgtgtggatggtgtggctgctgccctggacagtttccaggcccggcgctatgtggctgctcgttgcacccactatctgaagccactgctggaggcaggcacatcgggcacctggggcagtgctacagtattcatgccacatgtgactgaggcctacagagcccctgcctcagctgcagcttctgaggatgccccctaccctgtctgtaccgtgcggtacttccctagcacagccgagcacaccctgcagtgggcccggcatgagtttgaagaactcttccgactgtctgcagagaccatcaaccaccaccaacaggcacacacttccctggcagacatggatgagccacagacactcaccttactgaagccagtgcttggggtcctgagagtgcgtccacagaactggcaagactgtgtggcgtgggctcttggccactggaaactctgctttcattatggcatcaaacagctgctgaggcacttcccacctaataaagtgcttgaggatggaactcccttctggtcaggtcccaaacagtgtccccagcccttggagtttgacaccaaccaagacacacacctcctctacgtactggcagctgccaacctgtatgcccagatgcatgggctgcctggctcacaggactggactgcactcagggagctgctgaagctgctgccacagcctgacccccaacagatggcccccatctttgctagtaatctagagctggcttcggcttctgctgagtttggccctgagcagcagaaggaactgaacaaagccctggaagtctggagtgtgggccctcccctgaagcctctgatgtttgagaaggatgatgacagcaacttccatgtggactttgtggtagcggcagctagcctgagatgtcagaactacgggattccaccggtcaaccgtgcccagagcaagcgaattgtgggccagattatcccagccattgccaccactacagcagctgtggcaggcctgttgggcctggagctgtataaggtggtgagtgggccacggcctcgtagtgcctttcgccacagctacctacatctggctgaaaactacctcatccgctatatgccttttgccccagccatccagacgttccatcacctgaagtggacctcttgggaccgtctgaaggtaccagctgggcagcctgagaggaccctggagtcgctgctggctcatcttcaggagcagcacgggttgagggtgaggatcctgctgcacggctcagccctgctctatgcggccggatggtcacctgaaaagcaggcccagcacctgcccctcagggtgacagaactggttcagcagctgacaggccaggcacctgctcctgggcagcgggtgttggtgctagagctgagctgtgagggtgacgacgaggacactgccttcccacctctgcactatgagctgtgacaaggcagccaccctgtcacctagctcaatggagccccggatcccaagccctgcattgtaagcccacagtaggcactcaataaatgcttgttaaaggaaggcaaaaaaaaaaaaaaaaaa

SEQ ID NO: 387 - DNA, 2146 bp, Homo sapiens
cgctcgcgctggaagaagcggaagaagatggcgctcaccagctttttacctgcacctactcagctatctcaggaccagcttgaggctgaagaaaaggcaagatcccagagatcacggcagacctcactggtctcctcccgaagagaacctcccccgtacggataccggaaaggctggatacctcggttattagaggattttggagatggaggtgcttttccagagatccatgtggcccagtatccactggatatgggacgaaagaaaaaaatgtcgaatgcgctggccattcaggtggattctgaaggaaaaattaaatatgatgcaattgctcgacaaggacagtcaaaagacaaggtcatttatagcaaatacactgacctggttccaaaggaggttatgaatgcagatgatccagacctgcaaaggcccgatgaagaagctattaaagagataacagaaaagacaagagtagccttagaaaaatctgtatcacagaaggtcgccgcagccatgccagttcgagcagctgacaaattggctcctgctcagtatatccgatacacaccatctcagcaaggagtggcattcaactctggagctaaacagagggttattcggatggtagaaatgcagaaagatccaatggagcctccaaggttcaagattaataagaaaattccccggggaccaccttctcctcctgcgcctgtcatgcattctcctagccgaaagatgactgtaaaggaacaacaagagtggaagattcctccttgtatttctaactggaaaaatgcaaagggttatacaattccattagacaaacgtctggctgctgatggaagaggactacagacagtacacataaatgaaaatttcgccaaattggcagaagccctctacattgctgatcggaaggctcgtgaagctgtggaaatgcgtgcccaagtagagagaaaaatggctcagaaagaaaaggaaaaacatgaagagaaacttagagaaatggcccagaaagccagggagagaagagctgggatcaaaactcatgtggaaaaagaggatggggaggcacgtgagagggatgaaatccggcatgacaggcgaaaagagagacagcatgaccggaatctttccagggcagctcctgataagaggtcgaaacttcagagaaatgaaaatcgggatatcagtgaagttattgctctcggtgttcctaatcctcggacttccaatgaagttcagtatgaccaaaggctcttcaaccaatccaagggtatggacagtggatttgcaggtggagaagatgaaatttataatgtttatgatcaagcctggagaggtggtaaagatatggcccagagtatttataggcccagtaaaaatctggacaaggacatgtatggtgatgacctagaagccagaataaagaccaacagatttgttcccgacaaggagttttctggttcagaccgtagacagagaggccgagaaggaccagtgcagtttgaggaagatccttttggtttggacaagtttttggaagaagccaaacagcatggtggctctaaaagaccctcagatagcagccgccccaaggaacacgagcatgaaggcaagaagaggaggaaggaataggcacaggtctctccaaagtgaatgaactcttacccataaccctaatgatgcaagtcatatgggggaacactttgtaaatggtcaggataaaaaccaaatctgggtgccagatcccagcactactttttattactggagaaatgggggggatagaaaattctactttgaattatttagttttttttaaagagtgggttgtgtttgtgcttctcccacctttcagcatttatagaacatgctgccccacatacaaagtcaagaccacttacttttatgtgacactagtagtttggggttaatgttttgtgtaagaacagctgcatatgagtaaagttaccccaaccacagtgaggaggaagatgttcacatactggaactgtcctgccaaataaattttgcccctattgtgctctgttttaatttggagtgggcaaagtaacctcttgcttggtgcaactatttgtttcaaataaaaacatttagacaaaaaaaaaaaaaaaaaaaaaaa

SEQ ID NO: 388 - DNA, 1155 bp, Homo sapiens
ggaagagccgtcaacttagcgagcgcaacaggctgccgctgaggagctggagctggtggggactgggccgcaatggacaagctgaagaaggtgctgagcgggcaggacacggaggaccggagcggcctgtccgaggttgttgaggcatcttcattaagctggagtaccaggataaaaggcttcattgcgtgttttgctataggaattctctgctcactgctgggtactgttctgctgtgggtgcccaggaagggactacacctcttcgcagtgttttatacctttggtaatatcgcatcaattgggagtaccatcttcctcatgggaccagtgaaacagctgaagcgaatgtttgagcctactcgtttgattgcaactatcatggtgctgttgtgttttgcacttaccctgtgttctgccttttggtggcataacaagggacttgcacttatcttctgcattttgcagtctttggcattgacgtggtacagcctttccttcataccatttgcaagggatgctgtgaagaagtgttttgccgtgtgtcttgcataattcatggccagttttatgaagctttggaaggcactatggacagaagctggtggacagttttgtaactatcttcgaaacctctgtcttacagacatgtgccttttatcttgcagcaatgtgttgcttgtgattcgaacatttgagggttacttttggaagcaacaatacattctcgaacctgaatgtcagtagcacaggatgagaagtgggttctgtatcttgtggagtggaatcttcctcatgtacctgtttcctctctggatgttgtcccactgaattcccatgaatacaaacctattcagcaacagcacataagccttgggtgcaagtgattcccaggtggcaaaaggcagccccatcagagatcacgggagcaacagtaagggacagagttttggggtccacttgtccctcagcatggaagccatcaccgtggtcctgcatagagtgagtctgcttctactctggcatctgagaacaagtgactctgctttagacaagcccctggagagcctggccatggagtgaggtagaaaagaagcactttttggtggtatatgctgtttctgaatttgaatctaagcattcttggtgttctga

SEQ ID NO: 389 - DNA, 4286 bp, Homo sapiens
ggagtgcatccgccccaacccttttccccctcgtctcctgtgagaattccccgtcggatacgagcagcgtggccgttggctgcctcgcacaggacttccttcccgactccatcactttctcctggaaatacaagaacaactctgacatcagcagcacccggggcttcccatcagtcctgagagggggcaagtacgcagccacctcacaggtgctgctgccttccaaggacgtcatgcagggcacagacgaacacgtggtgtgcaaagtccagcaccccaacggcaacaaagaaaagaacgtgcctcttccaggtgagggccgggcccagccaccgggacagagagggagccgaagggggcgggagtggcgggcaccgggctgacacgtgtccctcactgcagtgattgccgagctgcctcccaaagtgagcgtcttcgtcccaccccgcgacggcttcttcggcaacccccgcaagtccaagctcatctgccaggccacgggtttcagtccccggcagattcaggtgtcctggctgcgcgaggggaagcaggtggggtctggcgtcaccacggaccaggtgcaggctgaggccaaagagtctgggcccacgacctacaaggtgaccagcacactgaccatcaaagagagcgactggctcagccagagcatgttcacctgccgcgtggatcacaggggcctgaccttccagcagaatgcgtcctccatgtgtggccccggtgagtgacctgtccccaggggcagcacccaccgacacacaggggtccactcgggtctggcattcgccaccccggatgcagccatctactccctgagccttggcttcccagagcggccaagggcaggggctcgggcggcaggacccctgggctcggcagaggcagttgctactctttgggtgggaaccatgcctccgcccacatccacacctgccccacctctgactcccttctcttgactccagatcaagacacagccatccgggtcttcgccatccccccatcctttgccagcatcttcctcaccaagtccaccaagttgacctgcctggtcacagacctgaccacctatgacagcgtgaccatctcctggacccgccagaatggcgaagctgtgaaaacccacaccaacatctccgagagccaccccaatgccactttcagcgccgtgggtgaggccagcatctgcgaggatgactggaattccggggagaggttcacgtgcaccgtgacccacacagacctgccctcgccactgaagcagaccatctcccggcccaagggtaggccccactcttgcccctcttcctgcactccctgggacctcccttggcctctggggcatggtggaaagcacccctcactcccccgttgtctgggcaactggggaaaaggggactcaaccccagcccacaggctggtccccccactgccccgccctcaccaccatctctgttcacaggggtggccctgcacaggcccgatgtctacttgctgccaccagcccgggagcagctgaacctgcgggagtcggccaccatcacgtgcctggtgacgggcttctctcccgcggacgtcttcgtgcagtggatgcagagggggcagcccttgtccccggagaagtatgtgaccagcgccccaatgcctgagccccaggccccaggccggtacttcgcccacagcatcctgaccgtgtccgaagaggaatggaacacgggggagacctacacctgcgtggtggcccatgaggccctgcccaacagggtcaccgagaggaccgtggacaagtccaccggtaaacccaccctgtacaacgtgtccctggtcatgtccgacacagctggcacctgctactgaccctgctggcctgcccacaggctcggggcggctggccgctctgtgtgtgcatgcaaactaaccgtgtcaacggggtgagatgttgcatcttataaaattagaaataaaaagatccattcaaaagatactggtcctgagtgcacgatgctctggcctactggggtggcggctgtgctgcacccaccctgcgcctcccctgcagaacaccttcctccacagcccccacccctgcctcacccacctgcgtgcctcagtggcttctagaaacccctgaattccctgcagctgctcacagcaggctgacctcagacttgccattcctcctactgcttccagaaagaaagctgaaagcaaggccacacgtatacaggcagcacacaggcatgtgtggatacacatggacagacacggacacacacaaacacatggacacacagagacgtgctaacccatgggcacacacatacacagacatggacccacacacaaacatatgtggacacacatgtacaaacatgcacaggcacacaaagagaacactgactacaggcacacacacacacgggcacactacccacaggcacacaacagatggacacgcgtacacagacatgcacacacccacaggcacaacacgtgcgcatgccggccggcccccgcccacattctcccagggccctgccggatactctgtccctgcagcagtttgctccctgcgctgtgctggccccggggctttgggcccaggctctgcttgtccttctgtctctgcttggaggtgctgccatggcacccagcttgggctctgcctggggagcggaggccccagggatagcatgtgacccctgctgaggccaggctcctgatgaaggcagcagatagcccccacacccaccggtgagcagaaccagagcctgtgccatgtgctgagagcaggcagtgactaagcatatgggcccagagggcagagtggctgccctgggcagctgctcctcttagcaggaggcctcaggagatgagctagagcaagtctgcccctgcaaataccacctgctccccaacccacagcagggagcaggcgaggtcagacagcagcagcccgggaaggaccgagccccagcagggaaggcagggcccgagtgaggtctccacacccaacgcacagtgctgtctctaactggggccacctccgagtccccgccacactcttggccctttggagtcctgggctccaggtgtctcccaagggcccatctgtgcaggggatgcaaccccccgaatgtcctcatcccactgtggagctcaggtctctgtctgctccctgggtcctggcagggtaggacaagtccgccaggatgtccccatgcagactctgctccaagagggagctggagagtcagggccttggtgagggagtcaggatcgggttccccccagctcagtcctcccacctgccagcccccacagcacagggcagggccacaccccctgcttccccctccaggagagtcaggacatgctggccgctgctccgctggggccccgccctccagcccccaccttggtctgtgtgctgcatcccccacgctctctctgccaccccaggactctgaggaaaagacctcagagtcccagccctgcccagcctcggcctgtgcccccgctgcatcaggctttcaggggcccagcccatgccctgggcagtgcccgagcccccctgcacttgctctccccacccctgggtgcagcacagcctaggggccaagggtgggcctagaggatgggccccgggggggctttgctgggtgccaccccagcctgaccctattcccccgtgctgtgtctcctgcagagggggaggtgagcgccgacgaggagggctttgagaacctgtgggccaccgcctccaccttcatcgtcctcttcctcctgagcctcttctacagtaccaccgtcaccttgttcaaggtagcacggctgtggcacagggaggagggcgcagggcgaatgtggggcccagggagcagcctgggctggacgtctagcccggaggcccccacaccaccccactgggtcatctctgccccggctcccttcccgaccacagggaaagcatttcacactgtctctgttgcctgtaggtgaaatgatcccaacagaagaacatcggagaccagagagaggaactcaaaggggcgctgcctccgggtctggggtcctggcctgcgtggcctgttggcacgtgtttctcttccccgcccggcctccagttgtgtgctctcacacaggcttccttctcgaccggcaggggctggctggcttgcaggccacgaggtgggctctaccccacactgctttgctgtgtatacgcttgttgccctgaaataaatatgcacattttatccatgaaa

SEQ ID NO: 390 - DNA, 2680 bp, Homo sapiens
gtagcggacatggcgggctcccggctcccgcggcagctcttcctccagggcgtggcggccgtcttcatgtttgctttcgcttccctctacacgcaaatcccaggctgggggatctgcaggccctgactcagaggtagtctagtctgcaagggctgtccagggcctggccatgacatgccctcccacaggcctgtatggccccgagggcatcctacctgcaaggaggacgctgcggcctcagggcaaggggcgctggcagcagctgtgggagaccccgacgctgctgtgggaagcgccgagactggggctggacacggcccagggcctggagctgctgagcctgctgggtgcactagtggccctgggagccctgctgctgagcccactgcgccaccctgtcatctacttgctgctttgggccgcctacctgtcagcctgccaggtgggccaggtgttcctttatttccagtgggactccctgctgctagagactggcttcctggccgtgctggtggccccgctgaggccagcctcccaccgcaaggaggccccccagggcaggcaggcaggggccctgccccacgaagacctccccttctggctggtgcgatggctgctgttccgcctcatgttcgcctcaggcgtggtcaagctgaccagccgctgccctgcgtggtgggggctcactgccctcacctaccactacgagacccagtgcctgcccacgcccgccgcctggttcgcacaccacctgccggtctggctgcacaagctcagcgtggtggccaccttcctaattgagatcgctgtgccgcccctgttcttcgcccccattcgacgcctgcgcttggctgctttctactcgcaggtgctgctgcaggtcctgattatcatcaccggcaactacaacttcttcaacctgatgacgctggtgcttaccactgcgctgttggacgaccagcacctggctgctgagcctggccatggcagccgcaagaagacggccacctcctggcccaaggccctgctggccaccctgtcgctgctgctggaactagccgtctacgggcttctggcctatggcactgtgcactactttggcctggaggttgactggcagcagcgcaccatccactccagaaccactttcaccttccaccagttttctcagtggctgaagacactgacgctgcccactgtgtggctgggtgtggcctccctggtctgggagctgctgagtgccctgtggaggtggacccaggtgcggggctggctacggaagctcagtgctgtagtccaactgtcccttgtgggcactgcgaccgtggccttgttcctgattagcctggtgccgtactcctacgtggagcccgggacccacgggcgcctctggaccggggcccaccgcctgtttggtgccgtggagcacctacagctggccaactcctacggcctcttccgccgcatgactgggcttggtggacggcctgaggtggtgctggagggcagttacgacggccaccactggacggagatcgagttcatgtacaagcctgggaacctgagccggccgcccccggttgtggtgccccaccagccacgcctggactggcagatgtggtttgcagccctgggcccacacacgcacagcccgtggttcacaagcctggtcttgcgcctgctgcagggcaaggagccagtgatccgccttgtccagagccaagtggccaggtatcccttccacaagcagccgcccacctacgtccgagcccagcgctacaagtactggttctcccagcctggggagcagggccagtggtggcggcgccagtgggtggaggagttcttcccatccgtgtccctgggggaccccacgctggagacgctgctcaggcagtttggactacaggagaaaagcccacctcgcacccgcagcgccaacagcaccctggcccaggccctccactggactcgctctcagctgtctcccctggaggcccccgccctgctctgggggctcctcatggccgtgggggctgtcagatttgtgcaggccctgctagcaccctgttctctccggtcctccccgctggcaccagtcagcggggagaagcgcaggccagcctcccagaaagactccggagctgcctccgaacaggccaccgcagcccccaacccctgctccagtagttcgaggaccacccggcgaaagaagtagctgtgttctcccagctgcacgtcctgagagggccaggtcgccgggagtgctctggcctccggcaggacaggacccagccactgtgccttagctgaccctgcagggccaggcacaggttggggggctgcccctggggtttgcagggtgctgcattgagggctccaggccccacccccacgccagccatgcccctccccaggactcccactattgcctctgtgattggcccaggaggaaaacacgaccaagctcaagacccttcccctgccctgggctgtgggggtctgagtctagagcccccaaccctaggccccgtgccagaggggaagaggctgactcccaggggaagaggggaagcactgtcatcttccacgtcatcttcacaccagcccatcctgccctttagatctgggcaccaataaaggcgtcttttgtgcttgaaaaaaaaaaaaaaaaaaaaaa

SEQ ID NO: 391 - DNA, 3310 bp, Homo sapiens
ggcgggcgaccaaagcgcctgaggaccggcaacatggtgcggtcggggaataaggcagctgttgtgctgtgtatggacgtgggctttaccatgagtaactccattcctggtatagaatccccatttgaacaagcaaagaaggtgataaccatgtttgtacagcgacaggtgtttgctgagaacaaggatgagattgctttagtcctgtttggtacagatggcactgacaatcccctttctggtggggatcagtatcagaacatcacagtgcacagacatctgatgctaccagattttgatttgctggaggacattgaaagcaaaatccaaccaggttctcaacaggctgacttcctggatgcactaatcgtgagcatggatgtgattcaacatgaaacaataggaaagaagtttgagaagaggcatattgaaatattcactgacctcagcagccgattcagcaaaagtcagctggatattataattcatagcttgaagaaatgtgacatctccctgcaattcttcttgcctttctcacttggcaaggaagatggaagtggggacagaggagatggcccctttcgcttaggtggccatgggccttcctttccactaaaaggaattaccgaacagcaaaaagaaggtcttgagatagtgaaaatggtgatgatatctttagaaggtgaagatgggttggatgaaatttattcattcagtgagagtctgagaaaactgtgcgtcttcaagaaaattgagaggcattccattcactggccctgccgactgaccattggctccaatttgtctataaggattgcagcctataaatcgattctacaggagagagttaaaaagacttggacagttgtggatgcaaaaaccctaaaaaaagaagatatacaaaaagaaacagtttattgcttaaatgatgatgatgaaactgaagttttaaaagaggatattattcaagggttccgctatggaagtgatatagttcctttctctaaagtggatgaggaacaaatgaaatataaatcggaggggaagtgcttctctgttttgggattttgtaaatcttctcaggttcagagaagattcttcatgggaaatcaagttctaaaggtctttgcagcaagagatgatgaggcagctgcagttgcactttcctccctgattcatgctttggatgacttagacatggtggccatagttcgatatgcttatgacaaaagagctaatcctcaagtcggcgtggcttttcctcatatcaagcataactatgagtgtttagtgtatgtgcagctgcctttcatggaagacttgcggcaatacatgttttcatccttgaaaaacagtaagaaatatgctcccaccgaggcacagttgaatgctgttgatgctttgattgactccatgagcttggcaaagaaagatgagaagacagacacccttgaagacttgtttccaaccaccaaaatcccaaatcctcgatttcagagattatttcagtgtctgctgcacagagctttacatccccgggagcctctacccccaattcagcagcatatttggaatatgctgaatcctcccgctgaggtgacaacaaaaagtcagattcctctctctaaaataaagaccctttttcctctgattgaagccaagaaaaaggatcaagtgactgctcaggaaattttccaagacaaccatgaagatggacctacagctaaaaaattaaagactgagcaagggggagcccacttcagcgtctccagtctggctgaaggcagtgtcacctctgttggaagtgtgaatcctgctgaaaacttccgtgttctagtgaaacagaagaaggccagctttgaggaagcgagtaaccagctcataaatcacatcgaacagtttttggatactaatgaaacaccgtattttatgaagagcatagactgcatccgagccttccgggaagaagccattaagttttcagaagagcagcgctttaacaacttcctgaaagcccttcaagagaaagtggaaattaaacaattaaatcatttctgggaaattgttgtccaggatggaattactctgatcaccaaagaggaagcctctggaagttctgtcacagctgaggaagccaaaaagtttctggcccccaaagacaaaccaagtggagacacagcagctgtatttgaagaaggtggtgatgtggacgatttattggacatgatataggtcgtggatgtatggggaatctaagagagctgccatcgctgtgatgctgggagttctaacaaaacaagttggatgcggccattcaaggggagccaaaatctcaagaaattcccagcaggttacctggaggcggatcatctaattctctgtggaatgaatacacacatatatattacaagggataatttagaccccatacaagtttataaagagtcattgttattttctggttggtgtattattttttctgtggtcttactgatctttgtatattacatacatgctttgaagtttctggaaagtagatcttttcttgacctagtatatcagtgacagttgcagcccttgtgatgtgattagtgtctcatgtggaaccatggcatggttattgatgagtttcttaaccctttccagagtcctcctttgcctgatcctccaacagctgtcacaacttgtgttgagcaagcagtagcatttgcttcctcccaacaagcagctgggttaggaaaaccatgggtaaggacggactcacttctctttttagttgaggccttctagttaccacattactctgcctctgtatataggtggttttctttaagtggggtgggaaggggagcacaatttcccttcatactccttttaagcagtgagttatggtggtggtctcatgaagaaaagaccttttggcccaatctctgccatatcagtgaacctttagaaactcaaaaactgagaaatttacttcagtagttagaattatatcacttcactgttctctacttgcaagcctcaaagagagaaagtttcgttatattaaaacacttaggtaacttttcggtctttcccatttctacctaagtcagctttcatctttgtggatggtgtctcctttactaaataagaaaataacaaagcccttattctctttttttcttgtcctcattcttgccttgagttccagttcctctttggtgtacagacttcttggtacccagtcacctctgtcttcagcaccctcataagtcgtcactaatacacagttttgtacatgtaacattaaaggcataaatgactc

SEQ ID NO: 392 - DNA, 2195 bp, Homo sapiens
tcggggccagcgcatggggctgctgagaccgctccggacgtgcgaagcgttcgcggtgcggtaggaagctgaagtcttcagcagaaccctgacctaggtagggagtctcaatggccctgggtgaagaaaaggcagaagcggaagcatctgaagacacaaaggcccagtcctatgggagagggagctgcagggagcgggagctggacatcccagggcccatgagtggggagcagcccccacgcctggaagctgagggagggctcatctcccctgtatggggggcagaagggatacctgcccctacttgctggattgggactgaccctggcagcccctctagagcccaccagccacaggccagtgatgccaacagagagcccgtagctgagaggtctgagcctgcactcagtggcctgcctcctgccaccatggggtctggagaccttctgctctccggggaaagccaggtggagaagaccaagctttcttcctccgaggagttccctcagactctgagccttcccagaacaacaactatttgctcaggacatgatgctgataccgaagatgatccatccctagcagatttgccccaggcactggacctcagccagcagcctcacagctcaggtctctcttgcctgtcacagtggaagtccgtgctgagcccaggttccgcagctcagccttccagctgcagcatctctgcttcctccacgggcagcagtctccagggtcaccaggagagggcggagcctcgtggtggttctctggccaaggtctcctcctccctggagccggtcgtcccccaggaaccttcctctgtggtggggctaggacctcggccccagtggtcaccacagcctgtgttctctgggggtgatgcttctgggctaggcaggagacgcctctccttccaggctgagtactgggcctgtgtgctgccagattccctgcctccatcacccgaccgccactcccctctctggaacccaaataaagagtatgaagatctgcttgactatacttacccactgaggcccgggcctcagctcccaaagcaccttgatagccgtgtgccagctgaccctgtcctgcaggactccggggtagacctggatagcttctctgtctctccagcaagcaccctcaaatcacctactaatgtctcccccaactgcccaccagcagaggccactgccctgccattttctgggcccagagagccaagccttaagcagtggccctccagagtaccccagaaacagggtggcatgggcttggcatcttggagccaacttgcatctacccccagagccccaggcagtagggatgctcgttgggagcgcagagagccagccctgaggggtgcgaaggaccggctgactataggcaagcaccttgatatgggctctccccagctaaggacacgggacagagggtggccctcgcccaggccagagagggagaagaggaccagccagagtgcccggcgccctacctgcacagagtctaggtggaaatcagaagaggaagtggaaagtgatgacgagtatcttgccctccccgctcggctgacacagacattttgctgtcagctggaagagctgatctgctggctgtataatgttgcagatgttactgaccacgggactgcagccaggtccaatcttacaagtctcaagtcttctctgcagctttaccggcaatttaagaaagatatagatgaacatcagtctctgacggagagtgtcttacagaagggggagattcttcttcagtgcctgttggagaacaccccagttttagaggatgtccttgggaggatcgcaaagcagtctggtgagctggagagccacgcagatcgcctgtatgactctatcttggcctctctggacatgctggctggctgcacccttatccctgacaaaaagcccatggcggcaatggagcacccatgtgaaggggtttaacctggcatcttctcaggcagaggtgcaacctgtcggccaaacactggctagtgagaaaaaaaaccttcaagaagtccttgcaagagccattcaacactgaagtcaagggggaaaccttcaatatactagctttaaaatgcctttctcctccctgaatggagggctgagttactatttttatttacaatgaatccttccaaactaaaaaaaaaaaaaaaaaaa

SEQ ID NO: 393 - DNA, 2315 bp, Homo sapiens
cgtaggcgctcacgtgattactcgcttacgtgagcagaagtagttctggtcgtcgtctaccgtctcgctatagccgtttgagggaagaaggaggaaaattacccgctacaccaaaattgcattgagccaaacttgccaccaagagcccaacaatcaccatgatgctgagcacggaaggcagggaggggttcgtggtgaaggtcaggggcctaccctggtcctgctcagccgatgaagtgatgcgcttcttctctgattgcaagatccaaaatggcacatcaggtattcgtttcatctacaccagagaaggcagaccaagtggtgaagcatttgttgaacttgaatctgaagaggaagtgaaattggctttgaagaaggacagagaaaccatgggacacagatacgttgaagtattcaagtctaacagtgttgaaatggattgggtgttgaagcatacaggtccgaatagccctgatactgccaacgatggcttcgtccggcttagaggactcccatttggctgtagcaaggaagagattgttcagttcttttcagggttggaaattgtgccaaatgggatgacactgccagtggactttcaggggcgaagcacaggggaagcctttgtgcagtttgcttcacaggagatagctgagaaggccttaaagaaacacaaggaaagaatagggcacaggtacattgagatcttcaagagtagccgagctgaagttcgaacccactatgatccccctcgaaagctcatggctatgcagcggccaggtccctatgataggccgggggctggcagagggtataatagcattggcagaggagctgggtttgaaaggatgaggcgtggtgcctatggtggagggtatggaggctatgatgactatggtggctataatgatggatatggctttgggtctgatagatttggaagagacctcaattactgtttttcaggaatgtctgatcatagatacggagatggtgggtccagtttccagagcaccacagggcactgtgtacacatgagggggttaccttacagagccactgagaatgatatttataatttcttctcacctcttaatcccatgagagtacatattgaaattggacccgatggcagagttaccggtgaggcagatgttgaatttgctactcatgaagatgctgtggcagctatggcaaaagacaaagctaatatgcaacacagatatgtggagctcttcttaaattctactgcaggaacaagtgggggtgcttacgatcacagctatgtagaactttttttgaattctacagcaggggcaagtggtggcgcttatggtagccaaatgatgggagggatgggcttatccaaccagtctagttatggaggtcctgctagccagcagctgagtggtggttatggaggtggttatggtggtcagagcagtatgagtggatatgaccaagttctgcaggaaaactccagtgactatcagtcaaaccttgcttaggtagagaaggagcactaaatagctactccagatataaaagctgtacatttgtgggagttgaatagaatgggagggatgtttagtatatccagtatgattggtaaatgggaaatataattgattctgatcactcttggtcagcttctctttctttatctttctttctccttttttaagaaaacgagttaagtttaacagttttgcattacaggcttgtgattcatgcttactgtaaagtggaagttgagattattttaaaacttcaagctcagtaattttgaacactgaaacattcatctaggacataataacaaagttcagtattgaccataactgttaaaacaatttttagctttcctcaagttagttatgttgtaggagtgtacctaagcagtaagcgtatttaggttaatgcagtttcacttatgttaaatgttgctcttataccacaaatacattgaaaacttcggatgcatgttgagaaacatgcctttctgtaaaactcaaatataggagctgtgtctacgattcaaagtgaaaacatttggcatgtttgttaattctagctttttggtttaatatcctgtaaggcacgtgagtgtacactttttttttttttaaggatacgggacaattttaagatgtaataccaatactttagaagtttggtcgtgtcgtttgtatgaaaatctgaggctttggtttaaatctttccttgtattgtgatttccatttagatgtattgtactaagtgaaacttgttaaataaatcttccttttaaaaactggaaaaaaaaaaaaaaaaaa

SEQ ID NO: 394 - DNA, 2327 bp, Homo sapiens
cgtaggcgctcacgtgattactcgcttacgtgagcagaagtagttctggtcgtcgtctaccgtctcgctatagccgtttgagggaagaaggaggaaaattacccggtatcgttagagctacaccaaaattgcattgagccaaacttgccaccaagagcccaacaatcaccatgatgctgagcacggaaggcagggaggggttcgtggtgaaggtcaggggcctaccctggtcctgctcagccgatgaagtgatgcgcttcttctctgattgcaagatccaaaatggcacatcaggtattcgtttcatctacaccagagaaggcagaccaagtggtgaagcatttgttgaacttgaatctgaagaggaagtgaaattggctttgaagaaggacagagaaaccatgggacacagatacgttgaagtattcaagtctaacagtgttgaaatggattgggtgttgaagcatacaggtccgaatagccctgatactgccaacgatggcttcgtccggcttagaggactcccatttggctgtagcaaggaagagattgttcagttcttttcagggttggaaattgtgccaaatgggatgacactgccagtggactttcaggggcgaagcacaggggaagcctttgtgcagtttgcttcacaggagatagctgagaaggccttaaagaaacacaaggaaagaatagggcacaggtacattgagatcttcaagagtagccgagctgaagttcgaacccactatgatccccctcgaaagctcatggctatgcagcggccaggtccctatgataggccgggggctggcagagggtataatagcattggcagaggagctgggtttgaaaggatgaggcgtggtgcctatggtggagggtatggaggctatgatgactatggtggctataatgatggatatggctttgggtctgatagatttggaagagacctcaattactgtttttcaggaatgtctgatcatagatacggagatggtgggtccagtttccagagcaccacagggcactgtgtacacatgagggggttaccttacagagccactgagaatgatatttataatttcttctcacctcttaatcccatgagagtacatattgaaattggacccgatggcagagttaccggtgaggcagatgttgaatttgctactcatgaagatgctgtggcagctatggcaaaagacaaagctaatatgcaacacagatatgtggagctcttcttaaattctactgcaggaacaagtgggggtgcttacgatcacagctatgtagaactttttttgaattctacagcaggggcaagtggtggcgcttatggtagccaaatgatgggagggatgggcttatccaaccagtctagttatggaggtcctgctagccagcagctgagtggtggttatggaggtggttatggtggtcagagcagtatgagtggatatgaccaagttctgcaggaaaactccagtgactatcagtcaaaccttgcttaggtagagaaggagcactaaatagctactccagatataaaagctgtacatttgtgggagttgaatagaatgggagggatgtttagtatatccagtatgattggtaaatgggaaatataattgattctgatcactcttggtcagcttctctttctttatctttctttctccttttttaagaaaacgagttaagtttaacagttttgcattacaggcttgtgattcatgcttactgtaaagtggaagttgagattattttaaaacttcaagctcagtaattttgaacactgaaacattcatctaggacataataacaaagttcagtattgaccataactgttaaaacaatttttagctttcctcaagttagttatgttgtaggagtgtacctaagcagtaagcgtatttaggttaatgcagtttcacttatgttaaatgttgctcttataccacaaatacattgaaaacttcggatgcatgttgagaaacatgcctttctgtaaaactcaaatataggagctgtgtctacgattcaaagtgaaaacatttggcatgtttgttaattctagctttttggtttaatatcctgtaaggcacgtgagtgtacactttttttttttttaaggatacgggacaattttaagatgtaataccaatactttagaagtttggtcgtgtcgtttgtatgaaaatctgaggctttggtttaaatctttccttgtattgtgatttccatttagatgtattgtactaagtgaaacttgttaaataaatcttccttttaaaaactggaaaaaaaaaaaaaaaaaa

SEQ ID NO: 395 - DNA, 783 bp, Homo sapiens
cgagtctcgctcaggctcggttttaccccggagtctattcgaagggggctgctacgtcagcgcgtctcagcgtaagacggcgctattccgctgtaacagcttccggcgggtcctggatgttgatgtcctgcatctaacgcggtgtaacccccgaagccgagcgagctccggaggaatttcagtatctgctacggtaacttcatcagcccgccaagatggcgatgcaagcggccaagagggcgaacattcgacttccacctgaagtaaatcggatattgtatataagaaatttgccatacaaaatcacagctgaagaaatgtatgatatatttgggaaatatggacctattcgtcaaatcagagtggggaacacacctgaaactagaggaacagcttatgtggtctatgaggacatctttgatgccaagaatgcatgtgatcacctatcgggattcaatgtttgtaacagataccttgtggttttgtactataatgccaacagggcatttcagaagatggacacaaagaagaaggaggaacagttgaagcttctcaaggagaaatatggcatcaacacagatccaccaaaataaatgttttctacattttcatttggactaaatcccacgaatgacaactaccacctttttttcctttttaattaatactaaatattgtgatttcttatttgaggttcaaaatgacctgcttgaaactttgatacatattggaatacattatgttaataaacttgtagctttttgtgaaacaaaaaaaaaaaaa

SEQ ID NO: 396 - DNA, 2093 bp, Homo sapiens
acgcacgcgcactgcgcccagcatgagggtcgcggctctgatcagtggtgggaaggacagctgctataatatgatgcagtgcattgctgctgggcatcagatcgttgctttagcaaatctaagaccagctgaaaaccaagtggggtctgatgaactggatagctacatgtatcagacagtggggcaccatgccattgacttgtatgcagaagcaatggctcttcccctctatcgccgaaccataagaggaaggagcttggatacaagacaagtgtacaccaaatgtgaaggtgatgaggttgaagatctctatgagcttttgaaacttgttaaggaaaaagaagaagtagaggggatatcagtaggtgctatactttctgactatcagcgtattcgagtggaaaatgtgtgtaaaaggcttaatctccagcctttagcttatctttggcagagaaaccaggaagatttgctcagagagatgatatcatctaacattcaagcaatgatcatcaaagtagcagctttgggtttagatcctgataagcatcttgggaaaaccctggatcaaatggagccttatctcatagagctttctaagaagtatggagtacatgtttgtggagaaggtggagagtatgaaactttcactttggattgccctctatttaagaagaaaataattgtggattcatcagaagtagtcatacattcagctgatgcatttgcacctgtggcttatctacgctttttagaattgcacttggaggacaaggtgtcctcagtgcctgacaactacagaacatctaattatatatataatttttgaaaagtgttttggaacattgttcattaaaccaccatttctatacaaaaaaattgcatagtattttctcagttactatgactagtttatttttttctcatgactcttatttttttagagaaacatactttcactagaagaggttagtggaaccatttattaattgggaaaatgtcgacggcatgttcattaatagtgccaactttcttggaattcactctttctctttcgataacacatcttccctatgacctttttttcttttatttcatctataaaccccatttctgtagcatttctttttttatcacactagtttcttttcctccttctctctttcttgctccaatccctaccaataatgtcatgatgcagaggcatttgaaaatgaagatgaaaagatggtcactttatttagccagtcaagcttattctactgggtgtcgccaaagcgatttatcatttttattttaaatatattcatggttgaagtgtttcaacgttattggacaattaggaagaatgtccttaactcttacaagttattttataactgatttttaaaatgctgtttttcagtattaactatgttgaccttagaaaacttttacaaaaaatagactttatgttttagaacagttttaggttcacagcaaaaatggagcagaaaatgcagagatttcccatataccctctacctccacacattcacagcctcccctaccgtcaatgtcttataatagagtggtacatttgttacaactgatgaacctacattgacacattattatcacccaaagtccatagtttacgtgagggttcactcttggtgttgtacataatatgggttttgacaaatgtgtaatgacatttgtcaaccgttatagtattatacagaataatttcactgccttaaaaaatcctctgtgttttacttattcatccctccctctcctttaacccttagcaactgatcttttcactgtgtacatagttttgcttttaccagaatgtaatgtagttgaaatcatacagtatatagcttttcatgcagtatatagcttttcagattggcttctttcatgtattaatatgcatttaggtttctctgtatcttgtcatgtatatgtagctcattttttttttagtgtagaataaaattttattgtctggttctaccacatttcatttgtccatgcacctattgaagaacatctcagttgcttccatgttttggcgattatgaataaagcgactataaacatccatg

SEQ ID NO: 397 - DNA, 1192 bp, Homo sapiens
ccagtgttcccagttcccaccagtccaactgcgaggagtgcgacgtgagtctgagtctgatccctccgaaaaccgtacttccggcgctgtctcggaggcctcccgtcccctcccttgtccgtcttctaactcttccccacgccaggtccgtcaagcctaagtccttgagttccgggtccgggcagcagagaaaggaagtcctctccctggaggcctatctccctcagaacggcgcgagaagcgagaccttagaaggcagcgcttcccgcgaaggaccggaaaggagcgcctactaaggacgccgtcgaggtccggggcgcctcaactctatagctctaactggctagaagtgcccaacgtggaatgtttcttttttaaaggcggctcttgaagcgacccggaagcggaagtggaagaaagttctagtggcttgaggtatccgcagagcggccgggtggcgggaggaaccgttacgggaactgaagttgcggattaagcctgatcaagatgacaacctcccaaaagcaccgagacttcgtggcagagcccatgggggagaagccagtggggagcctggctgggattggtgaagtcctgggcaagaagctggaggaaaggggttttgacaaggcctatgttgtccttggccagtttctggtgctaaagaaagatgaagacctcttccgggaatggctgaaagacacttgtggcgccaatgccaagcagtcccgggactgcttcggatgccttcgagagtggtgcgacgccttcttgtgatgctctctgggaagctctcaatccccagccctcatccagagtttgcagccgagtagggactcctcccctgtcctctacgaaggaaaagattgctattgtcgtactcacctccgacgtactccggggtcttttgggagttttctcccctaaccatttcaacttttttttggattctcgctcttgcatgcctcccccgtcctttttcccttgccagttccctggtgacagttaccagctttcctgaatggattcccggccccatccctcacccccaccctcactttcaatccgtttgataccatttggctccttttttggcagaacagtcactgtccttgtaaagttttttagatcaataaagtcagtggctttcaaaaaaaaaaaaaaaaaaaaaaaaaaaaaaaaaaaaaaaaaa

SEQ ID NO: 398 - DNA, 4368 bp, Homo sapiens
ggcggcgcagttgcgagcgcaggtgagttccgggccgccaccggctgcttctgtgggccgggcctctgagcattggcgacccccgcccggctccgggctgacagggcctggcttcgccaggctccttgccagaggcctccactcactccagacccctatagcccgtcgctgtcagctgtcaacaaaggatgcgaatgctggccgcttcctgtgggcttcgtgtcacccagaggtgagcccaggccaggatgggggactccagggacctttgccctcaccttgactccataggagaggtgaccaaagaggacttgctgctcaaatctaagggaacctgtcagtcgtgtggggtcaccggaccaaacctatgggcctgtctgcaggttgcctgcccctatgttggctgcggagaatccttcgctgaccacagcaccattcatgcacaggcaaaaaagcacaacttgaccgtgaacctgaccacgttccgactgtggtgttacgcctgtgagaaggaggtattcctggagcagcggctggcagcccctctgctgggctcctcttccaagttctctgaacaggactccccgccaccctcccaccctctgaaagctgttcctattgctgtggctgatgaaggagagtctgagtcagaggatgatgacctgaaacctcgaggcctcacgggcatgaagaacctcgggaactcctgctacatgaacgccgccctgcaggccctgtccaattgcccgccgctgactcagttcttcttggagtgtggcggcctggtgcgcacagataagaagccagccctgtgcaagagctaccagaagctggtctctgaggtctggcataagaaacggccaagctacgtggtccccaccagtctgtctcatgggatcaagttggtcaacccaatgttccgaggctatgcccagcaggacacccaagagttccttcgctgcctgatggaccagctgcacgaggagctcaaggagccggtggtggccacggtggcgctgacggaggctcgggactcagattcgagtgacacggatgagaaacgggagggtgaccggagcccatcagaagatgagttcttgtcctgtgactcgagcagtgaccggggtgagggtgacgggcaggggcgtggcgggggcagctcgcaggccgagacggagctgctgatcccagatgaggcgggccgagccatctctgagaaggagcggatgaaggaccgcaagttctcctggggccagcagcgtacaaactcggagcaagtggacgaggacgctgatgtggacactgccatggctgcccttgaccagcccgcggaggcccagcccccgtcaccacggtcctccagcccctgccggacgccagagccggacaatgatgctcacctacgcagctcctctcgcccctgcagccccgtccaccaccacgagggccatgccaagctgtctagcagcccccctcgtgcaagccccgtgaggatggcaccgtcgtacgtgctcaagaaagcccaggtattgagtgctggcagccggaggcggaaggagcagcgctaccgcagcgtcatctcagacatctttgacggctccattctcagcctcgtgcagtgtctcacctgtgaccgggtatccaccacagtggaaacgttccaggacttatcactgcccattcctggaaaggaggacctggccaagctccattcagccatctaccagaatgtgccggccaagccaggcgcctgtggggacagctatgccgcccagggctggctggccttcattgtggagtacatccgacggtttgtggtatcctgtacccccagctggttttgggggcctgtcgtcaccctggaagactgccttgctgccttctttgccgctgatgagttaaagggtgacaacatgtacagctgtgagcggtgtaagaagctgcggaacggagtgaagtactgcaaagtcctgcggttgcccgagatcctgtgcattcacctaaagcgctttcggcacgaggtgatgtactcattcaagatcaacagccacgtctccttccccctcgaggggctcgacctgcgccccttccttgccaaggagtgcacatcccagatcaccacctacgacctcctctcggtcatctgccaccacggcacggcaggcagtgggcactacatcgcctactgccagaacgtgatcaatgggcagtggtacgagtttgatgaccagtacgtcacagaagtccacgagacggtggtgcagaacgccgagggctacgtactcttctacaggaagagcagcgaggaggccatgcgggagcgacagcaggtggtgtccctggccgccatgcgggagcccagcctgctgcggttctacgtgtcccgcgagtggctcaacaagttcaacaccttcgcggagccaggccccatcaccaaccagaccttcctctgctcccacggaggcatcccgccccacaaataccactacatcgacgacctggtggtcatcctgccccagaacgtctgggagcacctgtacaacagattcgggggtggccccgccgtgaaccacctgtacgtgtgctccatctgccaggtggagatcgaggcactggccaagcgcaggaggatcgagatcgacaccttcatcaagttgaacaaggccttccaggccgaggagtcgccgggcgtcatctactgcatcagcatgcagtggttccgggagtgggaggcgttcgtcaaggggaaggacaacgagccccccgggcccattgacaacagcaggattgcacaggtcaaaggaagcggccatgtccagctgaagcagggagctgactacgggcagatttcggaggagacctggacctacctgaacagcctgtatggaggtggccccgagattgccatccgccagagtgtggcgcagccgctgggcccagagaacctgcacggggagcagaagatcgaagccgagacgcgggccgtgtgatctgctgggctagtctccccatgtgccccaccccgcggaaggcgtgtttgtgcccagaagagaggccgggctgctgcagaaccccgccgtgtaaagaggcagaaaagttggtttggtttgcagtaacgctgcaactagaaaatatatgcacttcaggcttgttgaaacgaccaagactctgtgacgttaatttgggtctttgtcctggcagtgcctctgccagtcactgtcatcgttgtgtcccccacaactgtcctcttgctagctcggcccagctttgtccctggagcccgatgctacccctgtcagacagaggctgcggcctgggccagagtcagggagtagctgctgcttcacggcgtctccactgtgcgattggcccggagccccgaagactcggagggagctgctcagggccggtgagcgcagccagaagccctggccagtgaggagctcacaggtcctccctggtggtcccgccgcacctctgcatctcctgggcgtcaccaggaaggctctgaagtcccgggctgctctcagcacttctcctgcagactgaagactctggactcattgctgattggaacaccaggaggaggttggatttctgccagtgggggatgtttctggaggcagctggtcccccacaccgcgtcctgctgagcctgccccctggattggctgtaatttgcctcgaagttcagcagttcatcttcatgggaaatttgctgagcccccaccagggaaccggatgatgaaacagggatacctcacagcttggccatttgaggcaaaggcagcttcccgagctgatgctaaagaagacagactttcccttcctcccagcagcagcagtgcagagcccgcctggagggatgtgggggctgtgcagggtgcagcgctcaggtggatcctgggaagcagcctctggatgctgagtggagggagccactgagcacagcaaggcaccaaagcccctggagaaaccgccagggcgaggtgcgaccatcatcaggatcaaagcagacggggcgtgggtggggaaggggctctgggaccagaccccccacactactgcgtctttgtttctatcagtctttgtagaagcaggtggtggtggaaattccagcaggtgggtcccgcagaggccctgaggcctcacttttcggatcttctgtcccagatcctgctccctccctgctgagcctggggttcccctggcattggccccagccttctgaaagccggcgctgcagccagaggccgcacgctgcactgtcgcgacgcagagaggcttctgtgcaggctgggatcgggccccatgtctgtgctgtctagtttgtgttcaaaatgtcagaataaacacagaataaatgtt

SEQ ID NO: 399 - DNA, 4490 bp, Homo sapiens
caggcggcggcggcgcagttgcgagtgcaggctccttgccagaggcctccactcactccagacccctatagcccgtcgctgtcagctgtcaacaaaggatgcgaatgctggccgcttcctgtgggcttcgtgtcacccagaggtgagcccaggccaggatgggggactccagggacctttgccctcaccttgactccataggagaggtgaccaaagaggacttgctgctcaaatctaagggaacctgtcagtcgtgtggggtcaccggaccaaacctatgggcctgtctgcaggttgcctgcccctatgttggctgcggagaatccttcgctgaccacagcaccattcatgcacaggcaaaaaagcacaacttgaccgtgaacctgaccacgttccgactgtggtgttacgcctgtgagaaggaggtattcctggagcagcggctggcagcccctctgctgggctcctcttccaagttctctgaacaggactccccgccaccctcccaccctctgaaagctgttcctattgctgtggctgatgaaggagagtctgagtcagaggatgatgacctgaaacctcgaggcctcacgggcatgaagaacctcgggaactcctgctacatgaacgccgccctgcaggccctgtccaattgcccgccgctgactcagttcttcttggagtgtggcggcctggtgcgcacagataagaagccagccctgtgcaagagctaccagaagctggtctctgaggtctggcataagaaacggccaagctacgtggtccccaccagtctgtctcatgggatcaagttggtcaacccaatgttccgaggctatgcccagcaggacacccaagagttccttcgctgcctgatggaccagctgcacgaggagctcaaggagccggtggtggccacggtggcgctgacggaggctcgggactcagattcgagtgacacggatgagaaacgggagggtgaccggagcccatcagaagatgagttcttgtcctgtgactcgagcagtgaccggggtgagggtgacgggcaggggcgtggcgggggcagctcgcaggccgagacggagctgctgatcccagatgaggcgggccgagccatctctgagaaggagcggatgaaggaccgcaagttctcctggggccagcagcgtacaaactcggagcaagtggacgaggacgctgatgtggacactgccatggctgcccttgaccagcccgcggaggcccagcccccgtcaccacggtcctccagcccctgccggacgccagagccggacaatgatgctcacctacgcagctcctctcgcccctgcagccccgtccaccaccacgagggccatgccaagctgtctagcagcccccctcgtgcaagccccgtgaggatggcaccgtcgtacgtgctcaagaaagcccaggtattgagtgctggcagccggaggcggaaggagcagcgctaccgcagcgtcatctcagacatctttgacggctccattctcagcctcgtgcagtgtctcacctgtgaccgggtatccaccacagtggaaacgttccaggacttatcactgcccattcctggaaaggaggacctggccaagctccattcagccatctaccagaatgtgccggccaagccaggcgcctgtggggacagctatgccgcccagggctggctggccttcattgtggagtacatccgacggtttgtggtatcctgtacccccagctggttttgggggcctgtcgtcaccctggaagactgccttgctgccttctttgccgctgatgagttaaagggtgacaacatgtacagctgtgagcggtgtaagaagctgcggaacggagtgaagtactgcaaagtcctgcggttgcccgagatcctgtgcattcacctaaagcgctttcggcacgaggtgatgtactcattcaagatcaacagccacgtctccttccccctcgaggggctcgacctgcgccccttccttgccaaggagtgcacatcccagatcaccacctacgacctcctctcggtcatctgccaccacggcacggcaggcagtgggcactacatcgcctactgccagaacgtgatcaatgggcagtggtacgagtttgatgaccagtacgtcacagaagtccacgagacggtggtgcagaacgccgagggctacgtactcttctacaggaagagcagcgaggaggccatgcgggagcgacagcaggtggtgtccctggccgccatgcgggagcccagcctgctgcggttctacgtgtcccgcgagtggctcaacaagttcaacaccttcgcggagccaggccccatcaccaaccagaccttcctctgctcccacggaggcatcccgccccacaaataccactacatcgacgacctggtggtcatcctgccccagaacgtctgggagcacctgtacaacagattcgggggtggccccgccgtgaaccacctgtacgtgtgctccatctgccaggtggagatcgaggcactggccaagcgcaggaggatcgagatcgacaccttcatcaagttgaacaaggccttccaggccgaggagtcgccgggcgtcatctactgcatcagcatgcagtggttccgggagtgggaggcgttcgtcaaggggaaggacaacgagccccccgggcccattgacaacagcaggattgcacaggtcaaaggaagcggccatgtccagctgaagcagggagctgactacgggcagatttcggaggagacctggacctacctgaacagcctgtatggaggtggccccgagattgccatccgccagagtgtggcgcagccgctgggcccagagaacctgcacggggagcagaagatcgaagccgagacgcgggccgtgtgatctgctgggctagtctgtaagtcgccccggctggtccctccatggcactctgggtcctctcctcactctccagagaccctcacatgtccttttgaacatccaaagagcaggtccctgaaagcaccttcctggaggatgtgggagggccctggacatggcccggccccactgctgagtgcccgtgtccccacagccccatgtgccccaccccgcggaaggcgtgtttgtgcccagaagagaggccgggctgctgcagaaccccgccgtgtaaagaggcagaaaagttggtttggtttgcagtaacgctgcaactagaaaatatatgcacttcaggcttgttgaaacgaccaagactctgtgacgttaatttgggtctttgtcctggcagtgcctctgccagtcactgtcatcgttgtgtcccccacaactgtcctcttgctagctcggcccagctttgtccctggagcccgatgctacccctgtcagacagaggctgcggcctgggccagagtcagggagtagctgctgcttcacggcgtctccactgtgcgattggcccggagccccgaagactcggagggagctgctcagggccggtgagcgcagccagaagccctggccagtgaggagctcacaggtcctccctggtggtcccgccgcacctctgcatctcctgggcgtcaccaggaaggctctgaagtcccgggctgctctcagcacttctcctgcagactgaagactctggactcattgctgattggaacaccaggaggaggttggatttctgccagtgggggatgtttctggaggcagctggtcccccacaccgcgtcctgctgagcctgccccctggattggctgtaatttgcctcgaagttcagcagttcatcttcatgggaaatttgctgagcccccaccagggaaccggatgatgaaacagggatacctcacagcttggccatttgaggcaaaggcagcttcccgagctgatgctaaagaagacagactttcccttcctcccagcagcagcagtgcagagcccgcctggagggatgtgggggctgtgcagggtgcagcgctcaggtggatcctgggaagcagcctctggatgctgagtggagggagccactgagcacagcaaggcaccaaagcccctggagaaaccgccagggcgaggtgcgaccatcatcaggatcaaagcagacggggcgtgggtggggaaggggctctgggaccagaccccccacactactgcgtctttgtttctatcagtctttgtagaagcaggtggtggtggaaattccagcaggtgggtcccgcagaggccctgaggcctcacttttcggatcttctgtcccagatcctgctccctccctgctgagcctggggttcccctggcattggccccagccttctgaaagccggcgctgcagccagaggccgcacgctgcactgtcgcgacgcagagaggcttctgtgcaggctgggatcgggccccatgtctgtgctgtctagtttgtgttcaaaatgtcagaataaacacagaataaatgttaaaaaaaaaaaaaaaaaaaaaaaaaaaaaaaaaaa

SEQ ID NO: 400 - DNA, 3318 bp, Homo sapiens
gtgatgcgtagttccggctgccggttgacatgaagaagcagcagcggctagggcggcggtagctgcaggggtcggggattgcagcgggcctcggggctaagagcgcgacgcggcctagagcggcagacggcgcagtgggccgagaaggaggcgcagcagccgccctggcccgtcatggagatggaaaaggagttcgagcagatcgacaagtccgggagctgggcggccatttaccaggatatccgacatgaagccagtgacttcccatgtagagtggccaagcttcctaagaacaaaaaccgaaataggtacagagacgtcagtccctttgaccatagtcggattaaactacatcaagaagataatgactatatcaacgctagtttgataaaaatggaagaagcccaaaggagttacattcttacccagggccctttgcctaacacatgcggtcacttttgggagatggtgtgggagcagaaaagcaggggtgtcgtcatgctcaacagagtgatggagaaaggttcgttaaaatgcgcacaatactggccacaaaaagaagaaaaagagatgatctttgaagacacaaatttgaaattaacattgatctctgaagatatcaagtcatattatacagtgcgacagctagaattggaaaaccttacaacccaagaaactcgagagatcttacatttccactataccacatggcctgactttggagtccctgaatcaccagcctcattcttgaactttcttttcaaagtccgagagtcagggtcactcagcccggagcacgggcccgttgtggtgcactgcagtgcaggcatcggcaggtctggaaccttctgtctggctgatacctgcctcttgctgatggacaagaggaaagacccttcttccgttgatatcaagaaagtgctgttagaaatgaggaagtttcggatggggctgatccagacagccgaccagctgcgcttctcctacctggctgtgatcgaaggtgccaaattcatcatgggggactcttccgtgcaggatcagtggaaggagctttcccacgaggacctggagcccccacccgagcatatccccccacctccccggccacccaaacgaatcctggagccacacaatgggaaatgcagggagttcttcccaaatcaccagtgggtgaaggaagagacccaggaggataaagactgccccatcaaggaagaaaaaggaagccccttaaatgccgcaccctacggcatcgaaagcatgagtcaagacactgaagttagaagtcgggtcgtggggggaagtcttcgaggtgcccaggctgcctccccagccaaaggggagccgtcactgcccgagaaggacgaggaccatgcactgagttactggaagcccttcctggtcaacatgtgcgtggctacggtcctcacggccggcgcttacctctgctacaggttcctgttcaacagcaacacatagcctgaccctcctccactccacctccacccactgtccgcctctgcccgcagagcccacgcccgactagcaggcatgccgcggtaggtaagggccgccggaccgcgtagagagccgggccccggacggacgttggttctgcactaaaacccatcttccccggatgtgtgtctcacccctcatccttttactttttgccccttccactttgagtaccaaatccacaagccattttttgaggagagtgaaagagagtaccatgctggcggcgcagagggaaggggcctacacccgtcttggggctcgccccacccagggctccctcctggagcatcccaggcgggcggcacgccaacagccccccccttgaatctgcagggagcaactctccactccatatttatttaaacaattttttccccaaaggcatccatagtgcactagcattttcttgaaccaataatgtattaaaattttttgatgtcagccttgcatcaagggctttatcaaaaagtacaataataaatcctcaggtagtactgggaatggaaggctttgccatgggcctgctgcgtcagaccagtactgggaaggaggacggttgtaagcagttgttatttagtgatattgtgggtaacgtgagaagatagaacaatgctataatatataatgaacacgtgggtatttaataagaaacatgatgtgagattactttgtcccgcttattctcctccctgttatctgctagatctagttctcaatcactgctcccccgtgtgtattagaatgcatgtaaggtcttcttgtgtcctgatgaaaaatatgtgcttgaaatgagaaactttgatctctgcttactaatgtgccccatgtccaagtccaacctgcctgtgcatgacctgatcattacatggctgtggttcctaagcctgttgctgaagtcattgtcgctcagcaatagggtgcagttttccaggaataggcatttgcctaattcctggcatgacactctagtgacttcctggtgaggcccagcctgtcctggtacagcagggtcttgctgtaactcagacattccaagggtatgggaagccatattcacacctcacgctctggacatgatttagggaagcagggacaccccccgccccccacctttgggatcagcctccgccattccaagtcaacactcttcttgagcagaccgtgatttggaagagaggcacctgctggaaaccacacttcttgaaacagcctgggtgacggtcctttaggcagcctgccgccgtctctgtcccggttcaccttgccgagagaggcgcgtctgccccaccctcaaaccctgtggggcctgatggtgctcacgactcttcctgcaaagggaactgaagacctccacattaagtggctttttaacatgaaaaacacggcagctgtagctcccgagctactctcttgccagcattttcacattttgcctttctcgtggtagaagccagtacagagaaattctgtggtgggaacattcgaggtgtcaccctgcagagctatggtgaggtgtggataaggcttaggtgccaggctgtaagcattctgagctgggcttgttgtttttaagtcctgtatatgtatgtagtagtttgggtgtgtatatatagtagcatttcaaaatggacgtactggtttaacctcctatccttggagagcagctggctctccaccttgttacacattatgttagagaggtagcgagctgctctgctatatgccttaagccaatatttactcatcaggtcattattttttacaatggccatggaataaaccatttttacaaaa

SEQ ID NO: 401 - DNA, 1885 bp, Homo sapiens
ggtggcggcgcggagccttgggcccggctgcggcccggcggcggccccggcgcggtgcgggcgttcgcggcgccccgggagctgcaggggccccgggcggcggcgaggccggagaggggcgggcccgggacaccggcacccggcgccctcggagccaaaggcgcgcggcggacacggcggggccctcgcgcgcctggagacgatgccaaagctgcagggcttcgagttctggagccgcaccctgcgaggggcccgccacgtcgtggcccccatggtggaccagagcgagctggcctggaggctgctgagccggcgccacggggcacagctctgctacacgcccatgctgcatgcccaggtctttgtccgcgacgccaactaccggaaggagaacctgtactgcgaggtgtgccccgaggaccggcccctcatcgtgcagttctgtgccaatgacccggaggtgtttgttcaggcggctctcctggctcaggattactgtgacgccattgacctgaacttgggctgcccacagatgatagccaagagaggtcactatggcgcctttctgcaggacgagtgggacctgctccaaagaatgattttgctggcccacgagaaactctctgttcctgtcacgtgcaaaatccgtgtcttcccggagattgacaagaccgtgaggtacgcccagatgctggagaaggccggctgccagttgctgacggtgcacggacgcaccaaggagcagaaggggcccctgtcgggtgcagcgtcctgggagcatatcaaggctgtgcggaaggctgtggccatccctgtgtttgctaacgggaacatccagtgcctgcaggacgtggagcgctgcctccgggacacgggtgtgcagggcgtcatgagcgcagagggcaacctgcacaaccccgccctgttcgagggccggagccctgccgtgtgggagctggccgaggagtatctggacatcgtgcgggagcacccctgccccctgtcctacgtccgggcccacctcttcaagctgtggcaccacacgctgcaggtgcaccaggagctgcgagaggagctggccaaggtgaagaccctggagggcatcgctgctgtgagccaggagctgaagctgcggtgtcaggaggagatatccaggcaggagggagcgaagcccaccggcgacttgcccttccactggatctgccagccctacatccggccggggcccagggaggggagcaaggagaaggcaggtgcgcgcagcaagcgggccctggaggaagaggagggtggcacggaggtcctgtccaagaacaagcaaaagaagcagctgaggaacccccacaagaccttcgacccctctctgaagccaaaatatgcaaagtgtgaccagtgtggaaacccaaagggcaacagatgtgtgttcagcctgtgccgcggctgctgcaagaagcgagcctccaaagagactgcagactgcccaggtcacggattgctttttaaaaccaaattggagaagtctctggcctggaaagaggcccagcctgagctgcaggagcctcagccagcagcacctggaacaccaggtggcttctccgaagtcatgggcagtgccctggcctgaaggcccacaacccccacccccaggactgctgctggagcctggacacgtcctacttaagaaaatgccttttactcagggaatctcctgctacttaatgtggaaagacacgcccatgtcccccttcggcccactctgggggcctggaaatgctgcagtggggagcaggccccaggctggacctgccctgtcctcagcacgcgtgtgcaaaagtgaacaataaatcatttcaaagatgcgagaaaaaaaaaaaaaaaaaaaaaa

SEQ ID NO: 402 - DNA, 965 bp, Homo sapiens
cagcttgtcctctatgacttacccagaaggcaacgcttctctttctggtcaaaatggctggtaagcaggccgtttcagcatcaggcaagtggctggatggtattcgaaaatggtattacaatgctgcaggattcaataaactggggttaatgcgagatgatacaatatacgaggatgaagatgtaaaagaagccataagaagacttcctgagaacctttataatgacaggatgtttcgcattaagagggcactggacctgaacttgaagcatcagatcttgcctaaagagcagtggaccaaatatgaagaggaaaatttctaccttgaaccgtatctgaaagaggttattcgggaaagaaaagaaagagaagaatgggcaaagaagtaatcatgtagttgaagtctgtggatgcagctgttatgaagatggttaaacttgaaacaaacaattttaagaattatttggtctgaagatgttttactttaaataaatgtctattgtaatggctggagtttttgaattccaaaccttatactgaataactactgaatccctttactgttaaatttttttccaaactttcaagatatatttagttgtgtttaactgctacttggagctcagaagccactttatcagttttcctcactggttggatagcctatcagtttatggaaggatataacttccgtaagttacatccttatggaagctactgaataaaagaagggggtatgcaccccctagtttgccaagattgagaaatagcctcttcactggtatgcaaacagatttgattttgcatcctatcatttaaaaagaaattatgtctgcaccccaacataggcatacttaagtaatatacatactcctgtgctaacatgtatactagaaaacaaaaagatgttagaaaaataaaagtataaagacaaatcaaaaaaaaaaaaaaaaaaaaaaaaaaaa

SEQ ID NO: 403 - DNA, 2726 bp, Homo sapiens
gggatccaggagcgaggagccgggagcggggaacagggagtcggggagccgggaaccggggctggcagcggccgccatgagcacggtggaccttgctcgcgtgggcgcgtgcatcctgaagcatgcggtgaccggggaggccgtggagctgcggagcctgtggcgggagcacgcgtgcgtggtggccgggctgcggcgcttcgggtgcgtggtgtgccgctggatcgcccaggacctcagcagccttgctgggctcctggaccaacacggcgtgcgcctggtgggcgtagggcccgaggccctgggtctgcaggagttcctggacggcgactacttcgcgggagagctctacctggatgagagcaagcagctttacaaggagctaggcttcaagcggtacaacagcctgagcatcctcccagcagctctggggaagcccgtgcgtgatgtggctgccaaggccaaggccgttggcatccaggggaacttgtctggggacctgctgcagagcggagggctgctggtggtcagcaaaggtggtgataaagtgctcctgcatttcgtccagaagtccccaggcgactacgtccccaaggagcacatcctgcaggtcctgggcatctctgcggaggtctgtgccagcgacccgcctcagtgtgacagagaggtgtgagggaggcgaaggccctggcctccgaggatctgggtggcgtctgctgccctaggtgtgctggaagtccacttggaagaactgttccggaggcgctgggtcgggatgccgaacctctcctgatccgccggcagcaacgagccattaaaactgcagttcctgaccacgcactgcttcgcaggctccgagccctgcatcctccacagcccccgccttgctcactgttgggccctcagggcgggcagggtggctgtgagtcacaggtgtcatcttcctgctctgcgactttctctggagaccttgggcctttggcctgtggggcactggggatggtaacctcactgccccgtcactcccttcaaaggcgacagacccaagcccacgtcaggagaggagcgtggggtcagctccagcagggtcggggtcagtgcctgtgtctggtgggggccactcaggagagttgggttttcagggcagagatgggcttgattccacctggtggggtgggtggaccctggagactctcaggtgatgggccagcctgccccaaggctctttactgatgtcagaatcattgtttgcacctgctgggtatggcctttggggcggccggcccgggagggtcttagtctaattaggtgtgtccagcttcttggccacctttccctggggaccctaacaggcccagagcagagccccttacctcccaggtcagactacctgctcaggccctcccctcccatgcaggccgatgacaactgcagccctctctgcactccctagtccagacctggggaccactgtgggttcctgtgggtctcccggctcccttcctgcccccaatgccaccattgcagtggccatttaaaaatgcatagcaggtgacccactgcgtccctttgcgttcagcccctcctctggctttcagttacaccaagctaaaatttcaggttcccagctgcagctctctgggtcccccggtgccccagtggggctctccgcatctgaatgtgtggtccctgggggtgggcacttgggggcatcctggtcactgctggccctagcattggaccctaggagacctgactggaactggctccctccccatcagctcccagctgtcactctctcccacccccgggcagctgttttgcccaagaccactgctacctgtttacccaccctggtccctcccagacaagcaaggcctctgatttctttgaagcatttacttagctcaagtctgaagctgtagatactggaagacaatgcaccttggagggtgggcaggacacagttgattgtctctacagagctgtgacgggggcactgagccccgctggtgtctgtggagggggctccggtccaggtactgcactggacactgctcatccctgggtgtcaggcaggtggctgcaccctaggccaggcgcagaggcctggcaggcaggcttggcatggttggccggggcgggacgtacactgggtcgccgctagctgcaccttcgcacagatgcctccgagcagcgggtgggcgtgggccgcacagcgcggcagggccttggctaccacacgcggcatcgctccttggggtgcatgggggtgccccgggcacagtggaacgtgtctgcgaaggcggccaggttctgcagcgaccccagtaccctgtgggtgggtgggtgtgacagcaggagcattgccatcttggacaaacatggccattttaagttctccgtgattaaaaaccagcccaaaacatcagcctaatggctcatgtcagtatgagcagaaacatttcaaccatgagataaacccccatctgaccagaaacatgccaatcctgagaataacctcccctccagccagagatattccaactctgcaataaaactctccttcacacagaaacattcgcagcctgcggtaggctccccattcctaaacccttaaatgcccttagtctgtaagagaatgtccctgaccgaaatcggccagaagcccctctcaggtttattcccaaaataaacctgtctctgttggaaaaaaaaaaaaaaaa

SEQ ID NO: 404 - DNA, 1318 bp, Homo sapiens
ctgagctctgagcgcctgcggtctcctgtgtgctgctctctgtggggtcctgtagacccagagaggctcagctgcactcgcccggctgggagagctgggtgtggggaacatggccgggcctccgaggctcctgctgctgcccctgcttctggcgctggctcgcggcctgcctggggccctggctgcccaagaggtgcagcagtctccccactgcacgactgtccccgtgggagcctccgtcaacatcacctgctccaccagcgggggcctgcgtgggatctacctgaggcagctcgggccacagccccaagacatcatttactacgaggacggggtggtgcccactacggacagacggttccggggccgcatcgacttctcagggtcccaggacaacctgactatcaccatgcaccgcctgcagctgtcggacactggcacctacacctgccaggccatcacggaggtcaatgtctacggctccggcaccctggtcctggtgacagaggaacagtcccaaggatggcacagatgctcggacgccccaccaagggcctctgccctccctgccccaccgacaggctccgccctccctgacccgcagacagcctctgccctccctgacccgccagcagcctctgccctccctgcggccctggcggtgatctccttcctcctcgggctgggcctgggggtggcgtgtgtgctggcgaggacacagataaagaaactgtgctcgtggcgggataagaattcggcggcatgtgtggtgtacgaggacatgtcgcacagccgctgcaacacgctgtcctcccccaaccagtaccagtgacccagtgggcccctgcacgtcccgcctgtggtccccccagcaccttccctgccccaccatgccccccaccctgccacacccctcaccctgctgtcctcccacggctgcagcagagtttgaagggcccagccgtgcccagctccaagcagacacacaggcagtggccaggccccacggtgcttctcagtggacaatgatgcctcctccgggaagccttccctgcccagcccacgccgccaccgggaggaagcctgactgtcctttggctgcatctcccgaccatggccaaggagggcttttctgtgggatgggcctgggcacgcggccctctcctgtcagtgccggcccacccaccagcaggcccccaacccccaggcagcccggcagaggacgggaggagaccagtcccccacccagccgtaccagaaataaaggcttctgtgcttcctttaaaaaaaaaaaaaaaaaaaaaaaaaaaaaaaaaaa

SEQ ID NO: 405 - DNA, 1651 bp, Homo sapiens
gaggccggcggagaaggaggacccgggagccggcggcccggagctgggagcgcggggaaggcggttggggttctgacagctgcgcgcgatcctgctctctctcagccgcctgtggacatgcgcaaagggccctctcctgagtccagatgatgctcataccaatggcttcagtgatggcggtgactgaaccgaaatgggtctcggtctggagccgcttcctctgggtgacgctgctgagcatggtgctggggtccctgctggccctgctgctgccgctgggggctgtggaggagcagtgcttggctgtgctcaaaggcctctacctgctcaggagcaaaccggacagggcgcagcatgccgccaccaagtgcaccagcccgtccacggagctcagcatcacctccaggggcgcgacgctgctggtggccaagaccaaggcctctccagcgggtaagttggaagccagagctgccctgaaccaggccctggagatgaagcgccagggcaagcgggaaaaagcccaaaagctcttcatgcacgccctcaagatggacccggacttcgtggacgcgctcaccgagtttggcatcttctcggaagaagacaaggacatcatccaggcggactacttgtacaccagagcattgaccatctcaccctaccatgagaaagcactggtcaaccgcgatcggacactgcctcttgtggaagagatcgaccagaggtatttcagcatcatcgacagcaaagtgaagaaggtcatgtccatccccaaggggaactcagctctgcgcagggtcatggaggagacctactaccatcacatctaccacacagtggccatcgagggcaacaccctcaccctctcggaaatcaggcacatcctggagacccgctacgccgtgcccgggaagagcctggaggagcagaacgaggtcataggcatgcatgcagccatgaagtacatcaacacgactctggtttcgcgcatcggctccgtcaccatcagcgacgtgctggagatccacaggcgggtgctgggctacgtggaccccgtggaagccggcaggtttcggacaacacaggtcctggtcggacaccacatccctccccatccgcaggatgtggaaaagcagatgcaggagtttgtacagtggctcaactccgaggaagccatgaacctgcacccagtggagtttgcagccttagcccattataaactcgtttacatccaccctttcattgatggcaacgggaggacctcccgtctgctcatgaacctcatcctcatgcaggcgggctacccgcccatcaccatccgcaaggagcagcggtccgactactaccacgtgttggaagctgccaacgagggcgacgtgaggcctttcattcgcttcatcgccaagtgtactgagaccaccctggacaccctgctttttgccacaactgagtactcggtggcactgccagaagcccaacccaaccactctgggttcaaggagacgcttcctgtgaagccctaaccctagaaatcctcagtgacaaaggctgtcctgaggtaggaaaaaaaaaaagaaacagcatttctagaaacctagtcacttcctaaagcaaaaggagaaacattctttacctccaaatgttttagttt

SEQ ID NO: 406 - DNA, 2573 bp, Homo sapiens
atgacgacatggtcgtaaatccgccatcttcctgcggcgcgttgcgacatggagggcgcgatggcagtgcgggtgacggccgctcatacggcagaagcccaggccgaagccgggcgggaagcgggcgagggtgcagttgcggcggtggcggcggccttggcccccagcggcttcctcggcctcccggcgcccttcagcgaggaagatgaggacgatgtgcacagatgcggccgctgccaggcagagttcaccgccttggaggattttgttcagcacaagattcagaaggcctgccagcgggcccctccggaggccctgcctgccacccctgccaccacagcgttgctgggccaggaggtggtgccggcagcaccaggcccagaggagcccatcactgtggcccacatcgtggtggaggcggcctctctggcagcagacatcagccacgcatctgaccttgttggtggtgggcacatcaaagaggtcatcgtggctgctgaggcggagctgggagacggtgagatggccgaggccccgggcagcccccgccagcaggggctggggctcgcaggggagggtgagcaggcccaggtgaagctactggtgaacaaggatggccgctatgtgtgtgcgctgtgccacaagaccttcaagacgggcagcatcctcaaggcccacatggtcactcacagcagccgcaaggaccacgagtgcaagctctgtggggcctccttccgcaccaagggctcactcatccggcaccaccggcggcacacggatgagcgcccctacaagtgctccaagtgtggaaagagcttccgggagtcgggtgcactgacccggcacctcaagtctctcaccccctgcacagagaaaatccgcttcagtgtgagcaaggacgtggttgtcagcaaagaggacgcacgtgcaggttctggagctggagctgccggcttggggacagccacatcatcggtgacaggcgagcctatagagacttcacccgtgattcacctggtgacagatgccaagggcaccgtcatccacgaagtccacgtccagatgcaggagctgtccctgggcatgaaagccctggccccagagccccccgtctcccaggagctcccctgctccagcgagggcagccgtgagaacctgctgcaccaggccatgcagaactccggcatcgtccttgagcgcgctgctggggaggagggtgccctggagccagctcctgctgccgggtccagtccccagcccctggcagtggcagccccgcagctgccggtactggaagtgcagccgctggagacacaggtggccagcgaggcctcagcggtgcccaggacccacccatgtcctcagtgcagtgagaccttcccgacagcagccaccctggaggcccacaagaggggccacaccgggccgaggccgttcgcctgcgcgcagtgtggcaaggccttccccaaggcctacctgctcaagaagcaccaggaggtgcacgtgcgtgagcgccgcttccgctgtggcgactgcgggaagctctacaagaccattgcccatgtgcgtggccaccggcgcgtccactcagacgagcggccctacccttgtcccaagtgtggcaagcgctacaagactaagaacgcacagcaggtgcacttcaggacacacctggaggagaagccgcacgtgtgccagttctgcagccgtggcttccgagagaagggctcactggtgcggcacgtgcgacaccacacaggcgagaagccgttcaagtgctacaagtgcggccgtggcttcgccgagcacggcacgctgaaccggcacctgcgcaccaaagggggctgcctgctggaggtggaggagttgctggtgtctgaggacagccccgcggcagccaccaccgtcctcacggaagacccgcacacagtgttggtggagttctcgtccgtggtagctgacacccaggagtatatcatcgaggccactgcggacgatgcggagaccagtgaggccacggagatcatcgagggcacccagacagaggtggacagccacatcatgaaggtggtgcagcagatcgtgcaccaggctagcgccggccaccagatcatcgtgcagaacgtcaccatggacgaggagacggcgctgggcccagaggcggctgccgccgacaccatcaccatcgccacccccgagagcctgacagagcaggtggccatgacgctggcctcggccatcagcgagggcactgtgcttgccgcccgggcagggacaagtggcactgaacaggccactgtgaccatggtgtcatcagaggacatcgagatcctggagcatgcaggcgagctggtcatcgcctcgccggagggccagctggaggtgcagacggtcatcgtctagcatgaggtctgcggggtcctggccgggcagggacagggcagaggactctgagcgccccacccatgcctgcctggcctggtagagaagatggcacaggatggaggcgccccaagacggacagtgtacataagagtttcttgttgctttacaataaaacatgagaacctgca

SEQ ID NO: 407 - DNA, 782 bp, Homo sapiens
atgaggggaaaggccactgaggctggaaaaaatagtacccagagcctagtggagggattagctttggcctggaagtatttaaagttcacccagagttccggaaagaaaaatggaggaaaagaagagttgcggggagagacaagcggtatccctgcaaatctgaaaactggaagaggaattggaagtaaccttttcggataccgtctggagcccacgaagggaccgcagcgacgccctcaccggaagtcccgcctctgccgtgggcctgcgagaatcgaggcactcgctggcgtacccatgtatcgaaatgagttcacggcctggtaccggcggatgtcggtggtctacgggatcggcacctggtctgtgttgggctcactgctttactatagccggacaatggcgaagtcgtcagaccaaaaggatggctcagcaagtgaagtacccagtgaactctctgaacgcccaaaaggattttatgtggaaacagttgtcacatataaagaagattttgttccaaatacagaaaagatcctcaactattggaaatcatggactggtggccctggtacagaaccatgactggctgctgaattctgaaaaccaggacttggttcaacatttaaatttgatagttgccctgattcccattttgggtttgtgaaaagtgtatgtatttaaatttgctgtaaaacataatcactaataatatgcaataaatattttcttgaaggaaactatctgcgttttcttttttttttttttttttgagacggagtctt

SEQ ID NO: 408 - DNA, 782 bp, Homo sapiens; identical to SEQ ID NO: 407

SEQ ID NO: 409 - DNA, 2364 bp, Homo sapiens
ggttcggtggcgcgagaggcggggagtcgccgtggcacaaatcctgaagagcccgtgggcgtggactgctcatctgtaaagaaagtggagacatgaccttgagatttggctgacccagcaatgctggggccttcgcaagtctgatgttccaggactccagtgcctgttggtgtggacggaggacacggggccccgaccatggtcacactcatcactgagaagctgcagagccagagcctggacgacctcacctgcaaggcggaggctggcccgttgcagtattctgcggaaaccctgaacaagagcggtcgtctgttccctttggagctcaacgaccagagtccctggaaggtcttcagtggaggaccgcccgtcagaagccaggcagccacgggccctgatttctccttcctgccgggcctgtctgctgccgctcacaccatgggtcttcagtggcagccacagtccccgcgcccaggcgcaggcctgggtgcagccagcaccgtggaccccagtgaaagcacaggctcgtccacggccccaccgaccaagcggcattgccggtccttgtcagaacccgaggagcttgtgcgctgccggtccccctggcgccccggcagctccaaggtctggactccagtctccaagaggcggtgcgacagcggcgggagtgccacgcggcagggaagccccggcgccgtcctgccgaggagtgctgtgtggtcgaccggtcccacctcgcccgccacgccccggccgtcctccgccagcggcggcttcgtggacagcagcgagggcagtgcgggctcaggcccgctctggtgttccgcggagtcctgcttgccctccacgaggcgccgcccgtccctctcacaggagcgactcgcgggtgcgggcactcccctgccctgggccagcagcagccccacgtccacgcctgcgctgggcgggcgccgtgggctgctccggtgccgctcacagccttgcgtgctcagtgggaagaggagccggcgcaaacggaggcgtgaggaggacgccaggtggacacgcccatccttggacttcctgaaaatgacccagactttaaaaaattcaaaaagcctttgctccctcaattacgaagatgacgatgaggatgacaccccagtgaagacggttctgtcctccccatgtgactcccggggcctccctggcatcaccatgcctggctgcagccagaggggcctcaggaccagccctgtccaccccaacctgtgggcctctagggagtcggtgaccagtgatggctcccgcaggagcagcggggacccccgtgatggggacagtgtcggggaggagggcgtcttcccccgggcccgctgggagctggacctggagcagatcgagaacaactgaggctggtgggggctggtcggggccatggctgccgcctgcacctgccctggggcacagagtaggtttcctgtgagctggtcggggccacggcccggcacctgccctggggcacagagtaggtttcctgtgagctggtcggggccacggctgccgccggcacctgccctggggcacagagtaggtttcctgtgagctggtcggggccacggctgccaccggcacctgccctggggcacagagtaggtttcctgtgagctggtcggggccacggctgccgccggcacctgccctggggcacagagtaggtttcctgtgagctggtcggggccacggctgccgccggcacctgccctggggcacagagtaggtttcctgtgagctggtcggggccacggctgccaccggcacctgccctggggcacagagtaggtttcctgtgagctggtcggggccacggctgccgcctgcactgccctggggcacagactaggtttcctgtgagctggtcggggccatggctgctgcctgcacctgccccggggcacagagtaggtttcctgtgagctggtcggggccatggctgccgcctgcacctgccccggggcacagagtaggtttcctgtgtgctggtcggggccatggctgccaccggcacctgccctggggcacagagtaggtttcctgtgagttggtcggggccacggctgccgcctgcactgccctggggcacagactaggtttcatgtgagctggtcggggccatggctgccgccggcacctgccctggggcacagagtaggtttcgtgttgcttggaacattaaggcgtaattttgattcagtttttcctaaagaagcattttgcatttttatggcttttgcagttcgggagaaagcttctctattttggatgcatttcagaagggcgttctattaaacatgaatctgcaaacagaaaaaaaaaaaaaaa

SEQ ID NO: 410 - DNA, 4739 bp, Homo sapiens
ggcagggccggaaggagtgcagcggctgccacggagctcgcagctgcggcttctgaggagtaagcggcgcggtagcgaaggccgccgaacctgcctggctagccggcgacttgagtgacgactcttttgaaacagatggtcaccatgtttagatattagcagtcccatatatgcatgtctgcatttgaaaatggaagagggaaacaacaatgaagaggtaattcacttgaacaactttcactgccatcggggacaagactttgtaattttcttctggaaaacccagattatccaaagagagaagacagaatcattataaatcccagtagcagtctgctggccagccaagatgagacaaagttgcctaaaatagacttttttgactattctaaattgacccctcttgaccagcgctgcttcatccaagctgctgacctcctcatggccgacttcaaagtgctcagtagtcaggacatcaagtgggccctgcacgagctcaaaggacactatgcaatcacccgaaaggccttgtctgatgccattaaaaaatggcaggagctgtcaccagaaaccagtggaaaaaggaagaagagaaaacaaatgaaccagtattcttacattgatttcaagtttgaacaaggtgacataaaaatagaaaagaggatgttctttcttgaaaataagcgacgacattgtaggtcctatgaccgacgtgctctccttccagctgtgcaacaagagcaggagttctatgagcagaaaatcaaagagatggcagagcatgaagactttttgcttgccctacagatgaatgaagaacagtatcaaaaggatggccagctgattgagtgtcgctgctgctatggggaatttccattcgaggagctgacgcagtgcgcagatgctcacttgttctgcaaagagtgtctcatcagatatgcccaagaggcagtctttggatctggaaagttggagctcagctgcatggaaggcagctgcacgtgttcgttcccaaccagtgagctggagaaggtgctcccccagaccatcctgtataagtactatgagcgaaaagccgaggaggaggttgcggcagcctacgccgacgagcttgtcaggtgcccgtcctgtagctttccggctctgttggacagtgatgtgaagaggttcagctgtcctaatcctcactgccgaaaggaaacctgtaggaagtgtcagggactctggaaagaacataatggcctcacctgtgaagagctggctgaaaaagacgacatcaagtaccgtacctctattgaagaaaaaatgactgctgcccgcattagaaaatgccacaagtgtgggactggcctcatcaaatctgaaggctgcaaccgcatgtcttgccgctgtggtgcccagatgtgctacctctgtcgagtttctattaatggatatgaccatttctgccaacatccccgctcaccaggagccccttgccaggagtgttcaagatgctctctctggaccgatcccactgaagatgatgagaagcttattgaggaaatccagaaggaggctgaagaggaacagaaaagaaagaatggagagaacaccttcaaacgcattggacccccgctggagaagcctgtggagaaggtgcagagggtggaggccctcccgaggcccgttccgcagaacctgccacagccacagatgccaccctatgccttcgcgcacccacccttccccctgcctcccgtgcggcctgtgttcaacaacttcccactcaacatggggcctatcccagccccgtacgtgccccctctgcccaacgtgcgggtcaactatgacttcggtcccatccacatgcccctggagcacaacctgcccatgcactttggcccccagccgcggcatcgcttctgatggccccgaatccccattgagcagcacaaagcccgtttggggtaggagtgtggatggagaaccctcccccaaggctggtgtctgtaccattgcatcctaagtcagcttgaagggtaggctggttttcttcccacccctttcctagaagggctactgctcctggaagagtggacggatccataataaagacgtcccaaatggtggagttcggagagagctgcgatgtgaactgcccctcccctcgcatcccccaggccaccaacggcagtccttctgccttgtccatggcataggccatagaccaggtccctgctgctcacacctgggcctctcctcggagccgacccctgggtagcaaggcagccgagagcatctccctggaggggcccacggttgggccaagggcagagggggctgcacctgcgggcctgggaagcattgctcagggtggggggctgggaccatggcccgcagaggcactgccacagctgtgagggccaagatgctgtccccccatccaaaacccgtgcgccactgcagtgagtgttgagggcacctctcctcccctcttacacctactcagatgaggcagcagcagacccatctcgcggcgggggttttgttctgttgccgcctaactttctcatcctcggtctctggaaagtcaggctgagaaatcctttcccaggccaggccgctgcggtacactggatggttctgaagctggcccattgaaagagcctcttaaggcagctgggacagaggcctggtggccctgctgggcagcccaactgctgggggagacgtttctgccaccctgggtgatgagcagcttttcccccctggctttctgggggaggagtgggcctccttagggagacaggtgaccctgggtgccacccctgccccgtgtgtgccccgggtgttctcagtggttgctgaaggcaggtagagggtgctgtccagtatcccccatgtgaaggtcacttcccttctcatggagtcagctgagcatcagctcagccctgccatgtccccactcaccctcctcgcctcctgtccggccctgggtttctagcggtgcctgaggcatcactctggcccattgacagatgagaggtctgaagccttcctggccacaggcatcactttctcctcctcctcatgccctgccttgtccttgtcgtgttgccatggggttctgagaggctgggagttcacagacctcagacacagctgagtccgacaaccattggggtggggctgcatcagtctccggagtggcccgccacctcctgaagcagggcctggcccacccaaggtgcctggggcaggcgggcaccgtcattcgctgccattggcttctcagatgtatttcaaggactaaagtgggctctaagatctaagatggcccggcgcggtggctcccgcctgtaatcccagcactttgggaggccgaggcgggcggatgagttgaggtcgggagtttgagtccccgtctctactaaaaatacaaaattagccggacaaggtggcgcatgcctataatcccaggtactcaggaggctgaggcaggagaatcacttgaacctgggaggcagaggttgcagtgagccaagattgtgccactgcactccagcctgagcaacaaaagcaaaactctatctttaaaaaaaaaaaaaaaaaaactaagatacccattctttctgcctttgcccaggatggaggctttgaagacaggtggtcacctggacctggggtaagggtgcgcagggaggccgggcttgggggcagcctgctgctatgtccttgctggcgcccatacctgttggactgcctgaactttgctactagcctgaacgacagtgccttggaaaggcaggctccatgcggcagcaacaggattgtcttcggtaccttaaatatgctccctgtgcttccccagggaggatctctgggagcagagggcggctgtagacatcacagctgaagaggtgacctcaggccctgggagcctcagctccctctgccctgtaccctaggcacgtggctccagcaagagccccaggcaggacaaagggagcaggcagcagctgcagaaacagccctagacaggtgctggcctcaaccctggcaggggagggggagcccagagtgatgtttctcctaaggccaaaccccaggggtgggtcatttgagaggagttccagctgttctggccacactgggctggtggggaaggagcggcggcctctttccttggagggtccctgattcctgaggatcctccccgagccaggcacgggggaccacagggctgccgtgagcacccaccctggttctccaggcccctctgtccagaggcagggcctgaacctcgggctcctgcctggaccagtgacagcattggggagagaagcactgggggtcttcagaccagccagcaaggggccgtgccagtgcccagagagcaggtcagacaacaggcaaccctgaggcagctggctccctctctctgccctgcagggcttgccgcagggcgtgaggctccccagccacagccccctcttacttgccttaaaactggagagaggaatctagtatttgcacttagcaaaatatttaaaaactgaaaaaaatgtgcatgatctgtcactttgtataaaaacaagaaacgattagttcattaaactttttctttaccttctggtagtaaaaatagataaaataattccgtttcaactactgtgtgtaaaaagcctgtatcatatgtaactgggacttttgtaaataaatgtttgtgcgctctgctcaaaaaaaaaaaaaaaaaa

SEQ ID NO: 411 - DNA, 5793 bp, Homo sapiens
ggcagggccggaaggagtgcagcggctgccacggagctcgcagctgcggcttctgaggagtaagcggcgcggtagcgaaggccgccgaacctgcctggctagccggcgacttgagtgacgactcttttgaaacagatggtcaccatgtttagatattagcagtcccatatatgcatgtctgcatttgaaaatggaagagggaaacaacaatgaagaggtaattcacttgaacaactttcactgccatcggggacaagagtggatcaatctccgagatgggcccatcaccatatctgactcctcagatgaggaaaggattccaatgctggtcaccccagctcctcagcagcatgaagaagaggacctggatgatgatgtcatcctgacagaaacaaataaacctcagagatcacgacccaatctcatcaaaccagctgcccagtggcaagatctgaaaaggttgggagaagaaaggcctaaaaagtctagagcagcatttgaatcagataagagcagctatttttcagtgtgtaacaacccattgtttgattctggggcacaggatgattctgaggatgactacggtgaatttctggatcttgggcctcctggaatctctgaattcactaagccaagtggccaaacagaaagagaacccaagcctggaccgagtcataaccaagcagcaaatgacattgtcaaccccagatcagagcagaaagtcatcatcttggaagaaggtagccttctttacacagaaagcgatcctttggaaactcagaaccagtcatccgaagactcagagacagagctgttatcaaatctaggagagtcagctgctctagcagatgatcaggccatcgaagaagactgctggttagatcatccttacttccagtctctgaaccaacagccccgtgaaataacaaaccaggtcgttcctcaggaacggcagcctgaagcagaactgggccgcttgttgtttcagcatgaattcccagggcccgcttttccaaggccggaaccccagcaaggtgggatttcaggcccctcttctcctcagcctgcccatcctctaggagagtttgaagaccagcagttagcaagtgatgatgaagagccaggtccagcctttccaatgcaagaatctcaagagcccaatttggaaaacatttgggggcaagaagctgcagaggtagatcaagagctcgttgaactactagtgaaagaaacggaagcaagatttccagatgtagcaaatgggtttattgaggaaataattcattttaagaattattatgatctgaatgtactttgtaattttcttctggaaaacccagattatccaaagagagaagacagaatcattataaatcccagtagcagtctgctggccagccaagatgagacaaagttgcctaaaatagacttttttgactattctaaattgacccctcttgaccagcgctgcttcatccaagctgctgacctcctcatggccgacttcaaagtgctcagtagtcaggacatcaagtgggccctgcacgagctcaaaggacactatgcaatcacccgaaaggccttgtctgatgccattaaaaaatggcaggagctgtcaccagaaaccagtggaaaaaggaagaagagaaaacaaatgaaccagtattcttacattgatttcaagtttgaacaaggtgacataaaaatagaaaagaggatgttctttcttgaaaataagcgacgacattgtaggtcctatgaccgacgtgctctccttccagctgtgcaacaagagcaggagttctatgagcagaaaatcaaagagatggcagagcatgaagactttttgcttgccctacagatgaatgaagaacagtatcaaaaggatggccagctgattgagtgtcgctgctgctatggggaatttccattcgaggagctgacgcagtgcgcagatgctcacttgttctgcaaagagtgtctcatcagatatgcccaagaggcagtctttggatctggaaagttggagctcagctgcatggaaggcagctgcacgtgttcgttcccaaccagtgagctggagaaggtgctcccccagaccatcctgtataagtactatgagcgaaaagccgaggaggaggttgcggcagcctacgccgacgagcttgtcaggtgcccgtcctgtagctttccggctctgttggacagtgatgtgaagaggttcagctgtcctaatcctcactgccgaaaggaaacctgtaggaagtgtcagggactctggaaagaacataatggcctcacctgtgaagagctggctgaaaaagacgacatcaagtaccgtacctctattgaagaaaaaatgactgctgcccgcattagaaaatgccacaagtgtgggactggcctcatcaaatctgaaggctgcaaccgcatgtcttgccgctgtggtgcccagatgtgctacctctgtcgagtttctattaatggatatgaccatttctgccaacatccccgctcaccaggagccccttgccaggagtgttcaagatgctctctctggaccgatcccactgaagatgatgagaagcttattgaggaaatccagaaggaggctgaagaggaacagaaaagaaagaatggagagaacaccttcaaacgcattggacccccgctggagaagcctgtggagaaggtgcagagggtggaggccctcccgaggcccgttccgcagaacctgccacagccacagatgccaccctatgccttcgcgcacccacccttccccctgcctcccgtgcggcctgtgttcaacaacttcccactcaacatggggcctatcccagccccgtacgtgccccctctgcccaacgtgcgggtcaactatgacttcggtcccatccacatgcccctggagcacaacctgcccatgcactttggcccccagccgcggcatcgcttctgatggccccgaatccccattgagcagcacaaagcccgtttggggtaggagtgtggatggagaaccctcccccaaggctggtgtctgtaccattgcatcctaagtcagcttgaagggtaggctggttttcttcccacccctttcctagaagggctactgctcctggaagagtggacggatccataataaagacgtcccaaatggtggagttcggagagagctgcgatgtgaactgcccctcccctcgcatcccccaggccaccaacggcagtccttctgccttgtccatggcataggccatagaccaggtccctgctgctcacacctgggcctctcctcggagccgacccctgggtagcaaggcagccgagagcatctccctggaggggcccacggttgggccaagggcagagggggctgcacctgcgggcctgggaagcattgctcagggtggggggctgggaccatggcccgcagaggcactgccacagctgtgagggccaagatgctgtccccccatccaaaacccgtgcgccactgcagtgagtgttgagggcacctctcctcccctcttacacctactcagatgaggcagcagcagacccatctcgcggcgggggttttgttctgttgccgcctaactttctcatcctcggtctctggaaagtcaggctgagaaatcctttcccaggccaggccgctgcggtacactggatggttctgaagctggcccattgaaagagcctcttaaggcagctgggacagaggcctggtggccctgctgggcagcccaactgctgggggagacgtttctgccaccctgggtgatgagcagcttttcccccctggctttctgggggaggagtgggcctccttagggagacaggtgaccctgggtgccacccctgccccgtgtgtgccccgggtgttctcagtggttgctgaaggcaggtagagggtgctgtccagtatcccccatgtgaaggtcacttcccttctcatggagtcagctgagcatcagctcagccctgccatgtccccactcaccctcctcgcctcctgtccggccctgggtttctagcggtgcctgaggcatcactctggcccattgacagatgagaggtctgaagccttcctggccacaggcatcactttctcctcctcctcatgccctgccttgtccttgtcgtgttgccatggggttctgagaggctgggagttcacagacctcagacacagctgagtccgacaaccattggggtggggctgcatcagtctccggagtggcccgccacctcctgaagcagggcctggcccacccaaggtgcctggggcaggcgggcaccgtcattcgctgccattggcttctcagatgtatttcaaggactaaagtgggctctaagatctaagatggcccggcgcggtggctcccgcctgtaatcccagcactttgggaggccgaggcgggcggatgagttgaggtcgggagtttgagtccccgtctctactaaaaatacaaaattagccggacaaggtggcgcatgcctataatcccaggtactcaggaggctgaggcaggagaatcacttgaacctgggaggcagaggttgcagtgagccaagattgtgccactgcactccagcctgagcaacaaaagcaaaactctatctttaaaaaaaaaaaaaaaaaaactaagatacccattctttctgcctttgcccaggatggaggctttgaagacaggtggtcacctggacctggggtaagggtgcgcagggaggccgggcttgggggcagcctgctgctatgtccttgctggcgcccatacctgttggactgcctgaactttgctactagcctgaacgacagtgccttggaaaggcaggctccatgcggcagcaacaggattgtcttcggtaccttaaatatgctccctgtgcttccccagggaggatctctgggagcagagggcggctgtagacatcacagctgaagaggtgacctcaggccctgggagcctcagctccctctgccctgtaccctaggcacgtggctccagcaagagccccaggcaggacaaagggagcaggcagcagctgcagaaacagccctagacaggtgctggcctcaaccctggcaggggagggggagcccagagtgatgtttctcctaaggccaaaccccaggggtgggtcatttgagaggagttccagctgttctggccacactgggctggtggggaaggagcggcggcctctttccttggagggtccctgattcctgaggatcctccccgagccaggcacgggggaccacagggctgccgtgagcacccaccctggttctccaggcccctctgtccagaggcagggcctgaacctcgggctcctgcctggaccagtgacagcattggggagagaagcactgggggtcttcagaccagccagcaaggggccgtgccagtgcccagagagcaggtcagacaacaggcaaccctgaggcagctggctccctctctctgccctgcagggcttgccgcagggcgtgaggctccccagccacagccccctcttacttgccttaaaactggagagaggaatctagtatttgcacttagcaaaatatttaaaaactgaaaaaaatgtgcatgatctgtcactttgtataaaaacaagaaacgattagttcattaaactttttctttaccttctggtagtaaaaatagataaaataattccgtttcaactactgtgtgtaaaaagcctgtatcatatgtaactgggacttttgtaaataaatgtttgtgcgctctgctcaaaaaaaaaaaaaaaaaa

SEQ ID NO: 412 - DNA, 5622 bp, Homo sapiens
ggcagggccggaaggagtgcagcggctgccacggagctcgcagctgcggcttctgaggagtaagcggcgcggtagcgaaggccgccgaacctgcctggctagccggcgacttgagtgacgactcttttgaaacagatggtcaccatgtttagatattagcagtcccatatatgcatgtctgcatttgaaaatggaagagggaaacaacaatgaagaggtaattcacttgaacaactttcactgccatcggggacaagagtggatcaatctccgagatgggcccatcaccatatctgactcctcagatgaggaaaggattccaatgctggtcaccccagctcctcagcagcatgaagaagaggacctggatgatgatgtcatcctgacagaagatgattctgaggatgactacggtgaatttctggatcttgggcctcctggaatctctgaattcactaagccaagtggccaaacagaaagagaacccaagcctggaccgagtcataaccaagcagcaaatgacattgtcaaccccagatcagagcagaaagtcatcatcttggaagaaggtagccttctttacacagaaagcgatcctttggaaactcagaaccagtcatccgaagactcagagacagagctgttatcaaatctaggagagtcagctgctctagcagatgatcaggccatcgaagaagactgctggttagatcatccttacttccagtctctgaaccaacagccccgtgaaataacaaaccaggtcgttcctcaggaacggcagcctgaagcagaactgggccgcttgttgtttcagcatgaattcccagggcccgcttttccaaggccggaaccccagcaaggtgggatttcaggcccctcttctcctcagcctgcccatcctctaggagagtttgaagaccagcagttagcaagtgatgatgaagagccaggtccagcctttccaatgcaagaatctcaagagcccaatttggaaaacatttgggggcaagaagctgcagaggtagatcaagagctcgttgaactactagtgaaagaaacggaagcaagatttccagatgtagcaaatgggtttattgaggaaataattcattttaagaattattatgatctgaatgtactttgtaattttcttctggaaaacccagattatccaaagagagaagacagaatcattataaatcccagtagcagtctgctggccagccaagatgagacaaagttgcctaaaatagacttttttgactattctaaattgacccctcttgaccagcgctgcttcatccaagctgctgacctcctcatggccgacttcaaagtgctcagtagtcaggacatcaagtgggccctgcacgagctcaaaggacactatgcaatcacccgaaaggccttgtctgatgccattaaaaaatggcaggagctgtcaccagaaaccagtggaaaaaggaagaagagaaaacaaatgaaccagtattcttacattgatttcaagtttgaacaaggtgacataaaaatagaaaagaggatgttctttcttgaaaataagcgacgacattgtaggtcctatgaccgacgtgctctccttccagctgtgcaacaagagcaggagttctatgagcagaaaatcaaagagatggcagagcatgaagactttttgcttgccctacagatgaatgaagaacagtatcaaaaggatggccagctgattgagtgtcgctgctgctatggggaatttccattcgaggagctgacgcagtgcgcagatgctcacttgttctgcaaagagtgtctcatcagatatgcccaagaggcagtctttggatctggaaagttggagctcagctgcatggaaggcagctgcacgtgttcgttcccaaccagtgagctggagaaggtgctcccccagaccatcctgtataagtactatgagcgaaaagccgaggaggaggttgcggcagcctacgccgacgagcttgtcaggtgcccgtcctgtagctttccggctctgttggacagtgatgtgaagaggttcagctgtcctaatcctcactgccgaaaggaaacctgtaggaagtgtcagggactctggaaagaacataatggcctcacctgtgaagagctggctgaaaaagacgacatcaagtaccgtacctctattgaagaaaaaatgactgctgcccgcattagaaaatgccacaagtgtgggactggcctcatcaaatctgaaggctgcaaccgcatgtcttgccgctgtggtgcccagatgtgctacctctgtcgagtttctattaatggatatgaccatttctgccaacatccccgctcaccaggagccccttgccaggagtgttcaagatgctctctctggaccgatcccactgaagatgatgagaagcttattgaggaaatccagaaggaggctgaagaggaacagaaaagaaagaatggagagaacaccttcaaacgcattggacccccgctggagaagcctgtggagaaggtgcagagggtggaggccctcccgaggcccgttccgcagaacctgccacagccacagatgccaccctatgccttcgcgcacccacccttccccctgcctcccgtgcggcctgtgttcaacaacttcccactcaacatggggcctatcccagccccgtacgtgccccctctgcccaacgtgcgggtcaactatgacttcggtcccatccacatgcccctggagcacaacctgcccatgcactttggcccccagccgcggcatcgcttctgatggccccgaatccccattgagcagcacaaagcccgtttggggtaggagtgtggatggagaaccctcccccaaggctggtgtctgtaccattgcatcctaagtcagcttgaagggtaggctggttttcttcccacccctttcctagaagggctactgctcctggaagagtggacggatccataataaagacgtcccaaatggtggagttcggagagagctgcgatgtgaactgcccctcccctcgcatcccccaggccaccaacggcagtccttctgccttgtccatggcataggccatagaccaggtccctgctgctcacacctgggcctctcctcggagccgacccctgggtagcaaggcagccgagagcatctccctggaggggcccacggttgggccaagggcagagggggctgcacctgcgggcctgggaagcattgctcagggtggggggctgggaccatggcccgcagaggcactgccacagctgtgagggccaagatgctgtccccccatccaaaacccgtgcgccactgcagtgagtgttgagggcacctctcctcccctcttacacctactcagatgaggcagcagcagacccatctcgcggcgggggttttgttctgttgccgcctaactttctcatcctcggtctctggaaagtcaggctgagaaatcctttcccaggccaggccgctgcggtacactggatggttctgaagctggcccattgaaagagcctcttaaggcagctgggacagaggcctggtggccctgctgggcagcccaactgctgggggagacgtttctgccaccctgggtgatgagcagcttttcccccctggctttctgggggaggagtgggcctccttagggagacaggtgaccctgggtgccacccctgccccgtgtgtgccccgggtgttctcagtggttgctgaaggcaggtagagggtgctgtccagtatcccccatgtgaaggtcacttcccttctcatggagtcagctgagcatcagctcagccctgccatgtccccactcaccctcctcgcctcctgtccggccctgggtttctagcggtgcctgaggcatcactctggcccattgacagatgagaggtctgaagccttcctggccacaggcatcactttctcctcctcctcatgccctgccttgtccttgtcgtgttgccatggggttctgagaggctgggagttcacagacctcagacacagctgagtccgacaaccattggggtggggctgcatcagtctccggagtggcccgccacctcctgaagcagggcctggcccacccaaggtgcctggggcaggcgggcaccgtcattcgctgccattggcttctcagatgtatttcaaggactaaagtgggctctaagatctaagatggcccggcgcggtggctcccgcctgtaatcccagcactttgggaggccgaggcgggcggatgagttgaggtcgggagtttgagtccccgtctctactaaaaatacaaaattagccggacaaggtggcgcatgcctataatcccaggtactcaggaggctgaggcaggagaatcacttgaacctgggaggcagaggttgcagtgagccaagattgtgccactgcactccagcctgagcaacaaaagcaaaactctatctttaaaaaaaaaaaaaaaaaaactaagatacccattctttctgcctttgcccaggatggaggctttgaagacaggtggtcacctggacctggggtaagggtgcgcagggaggccgggcttgggggcagcctgctgctatgtccttgctggcgcccatacctgttggactgcctgaactttgctactagcctgaacgacagtgccttggaaaggcaggctccatgcggcagcaacaggattgtcttcggtaccttaaatatgctccctgtgcttccccagggaggatctctgggagcagagggcggctgtagacatcacagctgaagaggtgacctcaggccctgggagcctcagctccctctgccctgtaccctaggcacgtggctccagcaagagccccaggcaggacaaagggagcaggcagcagctgcagaaacagccctagacaggtgctggcctcaaccctggcaggggagggggagcccagagtgatgtttctcctaaggccaaaccccaggggtgggtcatttgagaggagttccagctgttctggccacactgggctggtggggaaggagcggcggcctctttccttggagggtccctgattcctgaggatcctccccgagccaggcacgggggaccacagggctgccgtgagcacccaccctggttctccaggcccctctgtccagaggcagggcctgaacctcgggctcctgcctggaccagtgacagcattggggagagaagcactgggggtcttcagaccagccagcaaggggccgtgccagtgcccagagagcaggtcagacaacaggcaaccctgaggcagctggctccctctctctgccctgcagggcttgccgcagggcgtgaggctccccagccacagccccctcttacttgccttaaaactggagagaggaatctagtatttgcacttagcaaaatatttaaaaactgaaaaaaatgtgcatgatctgtcactttgtataaaaacaagaaacgattagttcattaaactttttctttaccttctggtagtaaaaatagataaaataattccgtttcaactactgtgtgtaaaaagcctgtatcatatgtaactgggacttttgtaaataaatgtttgtgcgctctgctcaaaaaaaaaaaaaaaaaa

SEQ ID NO: 413 - DNA, 1393 bp, Homo sapiens
cttgctcctcggggtgggggagggtatccggcttaagggggctgcggtggacaccacttcttaatgtcgggggtcttcgcggcgctcacctcggctcctagggttcgggacggtacgcaccagccaccttcgcgccgaaggcggtagggcgccacggagaggaaccgctctaggcacgtaaggcctcgtgaggttgcgtcgcgcgcggagcactctgggacttgtagttctggagatggagcgagctgtgccgctcgcggtgcctctgggtcagacagaggtgttccaggccttgcagcggctccatatgaccatcttctcccagagcgtctcaccatgtgggaagtttctggcggctggcaacaattacgggcagattgccatcttcagcttgtcctctgctttgagctcagaagccaaagaggaaagtaagaagccggtggtgactttccaagcccatgatgggcccgtctatagcatggtttccaccgatcgacatctgcttagtgctggggatggggaggtgaaggcctggctttgggcggagatgctcaagaagggctgtaaggagctgtggcgtcgtcagcctccatacaggaccagcctggaagtgcctgagatcaacgctttgctgctggtccccaaggagaattccctcatcctggctgggggagactgtcagttgcacactatggaccttgaaactgggactttcacgagggtcctccggggccacacagactacatccactgcctggcactgcgggaaaggagcccagaggtgctgtcaggtggcgaggatggagctgttcgactttgggacctgcgcacagccaaggaggtccagacgatcgaggtctataagcacgaggagtgctcgaggccccacaatgggcgctggattggatgtttggcaactgattccgactggatggtctgtggagggggcccagccctcaccctctggcacctccgatcctccacacccaccaccatcttccccatccgggcgccacagaagcacgtcaccttctaccaggacctgattctgtcagctggccagggccgctgcgtcaaccagtggcagctgagcggggagctgaaggcccaggtgcctggctcctccccagggctgctcagcctcagcctcaaccagcagcctgccgcgcctgagtgcaaggtcctgacagctgcaggcaacagctgccgggtggatgtcttcaccaacctgggttaccgagccttctccctgtccttctgatctctgacgacacccccagccagctcagggttttagagtgtttttcattttctttttttttttttttacaataaagtttcaggcttttttaaaaaaaaaaaaaaaaaaaaaaaaaaaaaaaaaaaaaaaaaa

SEQ ID NO: 414 - DNA, 2941 bp, Homo sapiens
ccccgggccgggccctgagcgcgcgggctccgcgccgccgccgcgccatggcggagaccaagattatctaccacatggacgaggaggagacgccgtacctggtcaagctgcccgtggcccccgagcgcgtcacgctggccgacttcaagaacgtgctcagcaaccggcccgtgcacgcctacaaattcttctttaagtccatggaccaggacttcggggtggtgaaggaggagatctttgatgacaatgccaagcttccctgcttcaacggccgcgtggtctcctggctggtcctggctgagggtgctcactcggatgcggggtcccagggcacggacagccacacagacctgcccccgcctcttgagcggacaggcggcatcggggactcccggcccccctccttccacccaaatgtggccagcagccgtgacgggatggacaacgagacaggcacggagtccatggtcagtcaccggcgggagcgtgcccgacgccggaaccgcgaggaggccgcccggaccaatgggcacccaaggggagaccgacggcgggatgtggggctgcccccagacagcgcgtccaccgccctcagcagcgagcttgagtccagcagctttgtggactcggacgaggatggcagcacgagcaggctcagcagctccacggagcagagcacctcatccagactcatccggaagcacaaacgccggcggaggaagcagcgccttcggcaggcggaccgggcctcctccttcagcagcataaccgactccaccatgtccctcaacatcgtcactgtcacgctcaacatggaaagacatcactttctgggcatcagcatcgtggggcagagcaacgaccgtggagacggcggcatctacattggctccatcatgaagggcggggctgtggccgctgacggccgcatcgagcccggcgacatgttgctgcaggtgaatgacgtgaactttgagaacatgagcaatgacgatgccgtgcgggtgctgcgggagatcgtttcccagacggggcccatcagcctcactgtggccaagtgctgggacccaacgccccgaagctacttcaccgtcccacgggctgacccggtgcggcccatcgaccccgccgcctggctgtcccacacggcggcactgacaggagccctgccccgctacgagctggaagaggcgccgctgacggtgaagagtgacatgagcgccgtcgtccgggtcatgcagctgccagactcgggactggagatccgcgaccgcatgtggctcaagatcaccatcgccaatgccgtcatcggggcggacgtggtggactggctgtacacacacgtggagggcttcaaggagcggcgggaggcccggaagtacgccagcagcttgctgaagcacggcttcctgcggcacacggtcaacaagatcaccttctccgagcagtgctactacgtcttcggggatctctgcagcaatctcgccaccctgaacctcaacagtggctccagtgggacttcggatcaggacacgctggccccgctgccccacccggctgccccctggcctctgggtcagggctacccctaccagtacccgggacccccaccctgcttcccgcctgcctaccaggacccgggctttagctatggcagcggcagcaccgggagtcagcagagtgaagggagcaaaagcagtgggtccacccggagcagccgccgggccccgggccgtgagaaggagcgtcgggcggcgggagctgggggcagtggcagtgaatcggatcacacggcaccgagtggggtggggagcagctggcgagagcgtccggccggccagctcagccgtggcagcagcccacgcagtcaggcctcggctaccgccccggggctccccccgccccaccccacgaccaaggcctatacagtggtgggggggccacccgggggaccccctgtccgggagctggctgccgtccccccggaattgacaggcagccgccagtccttccagaaggctatggggaacccctgcgagttcttcgtggacatcatgtgactcgtggcgcatgccccagccctgcctgaggtggggagctggcggtcctgccgcatgcagagctcgcgtgggcttgccttcgtgggggccaggacgggaggcagggtggggggcaggctggaccaccaccatctgccctggcagcctggctgctccagctcctgacagcacctgtgtctgagcagccgtgttgggggcgctccctctctgcccctcagcgagagcctcggacctcccaaccccttgtgtctggtggggatccctcctgggatgaggaagaccccctcgggctctcggctgacccccacctcctgcacagctgtgcccaggcccccagggtggtccatgcggggcaaccccctgcggtgcacaggccccctgtctggagtagggatctaatttatttatttattgcctggccggtgactcgggggaggaggcgaccctgtcatctgtcccacctgctgctgccccttggagcagcctgcaccttctctcctcccatccggcaacagtctgaaagtacgtggaggacgggaccggaagacgagagagggctggacatcctgcccaccgtgtcccagccagggcagggagggaccatggcccgcagggtcaaggggccccgatgtgcacagctgccacagggagggaggtcttggggagatgggcagtcaggtggcccgtccttggtgagtgcacacactgcgcgcacacatcgcggccttcctggcttctctggcccccacgtgtctgtgctgtagatactgtatcaaagtcccagcgtttagatggttaacatagagctgcttctgtgtaaatgctgcttattttaaacactaaaaagcgtttaattttatgggaaaaaaaaaaaaaaaaaa

SEQ ID NO: 415 - DNA, 2142 bp, Homo sapiens
aacggcgcggcccgaggggcgcaggcgggagggcggcggggctgtggccgctgacggccgcatcgagcccggcgacatgttgctgcaggtgaatgacgtgaactttgagaacatgagcaatgacgatgccgtgcgggtgctgcgggagatcgtttcccagacggggtgagggctgggggcgctggagcgggaggggccaggcagggaggtgggaccatgggggccttgctgtgtgaccaccgttcctgcaggcccatcagcctcactgtggccaagtgctgggacccaacgccccgaagctacttcaccgtcccacgggctgacccggtgcggcccatcgaccccgccgcctggctgtcccacacggcggcactgacaggagccctgccccgctacgagctggaagaggcgccgctgacggtgaagagtgacatgagcgccgtcgtccgggtcatgcagctgccagactcgggactggagatccgcgaccgcatgtggctcaagatcaccatcgccaatgccgtcatcggggcggacgtggtggactggctgtacacacacgtggagggcttcaaggagcggcgggaggcccggaagtacgccagcagcttgctgaagcacggcttcctgcggcacacggtcaacaagatcaccttctccgagcagtgctactacgtcttcggggatctctgcagcaatctcgccaccctgaacctcaacagtggctccagtgggacttcggatcaggacacgctggccccgctgccccacccggctgccccctggcctctgggtcagggctacccctaccagtacccgggacccccaccctgcttcccgcctgcctaccaggacccgggctttagctatggcagcggcagcaccgggagtcagcagagtgaagggagcaaaagcagtgggtccacccggagcagccgccgggccccgggccgtgagaaggagcgtcgggcggcgggagctgggggcagtggcagtgaatcggatcacacggcaccgagtggggtggggagcagctggcgagagcgtccggccggccagctcagccgtggcagcagcccacgcagtcaggcctcggctaccgccccggggctccccccgccccaccccacgaccaaggcctatacagtggtgggggggccacccgggggaccccctgtccgggagctggctgccgtccccccggaattgacaggcagccgccagtccttccagaaggctatggggaacccctgcgagttcttcgtggacatcatgtgactcgtggcgcatgccccagccctgcctgaggtggggagctggcggtcctgccgcatgcagagctcgcgtgggcttgccttcgtgggggccaggacgggaggcagggtggggggcaggctggaccaccaccatctgccctggcagcctggctgctccagctcctgacagcacctgtgtctgagcagccgtgttgggggcgctccctctctgcccctcagcgagagcctcggacctcccaaccccttgtgtctggtggggatccctcctgggatgaggaagaccccctcgggctctcggctgacccccacctcctgcacagctgtgcccaggcccccagggtggtccatgcggggcaaccccctgcggtgcacaggccccctgtctggagtagggatctaatttatttatttattgcctggccggtgactcgggggaggaggcgaccctgtcatctgtcccacctgctgctgccccttggagcagcctgcaccttctctcctcccatccggcaacagtctgaaagtacgtggaggacgggaccggaagacgagagagggctggacatcctgcccaccgtgtcccagccagggcagggagggaccatggcccgcagggtcaaggggccccgatgtgcacagctgccacagggagggaggtcttggggagatgggcagtcaggtggcccgtccttggtgagtgcacacactgcgcgcacacatcgcggccttcctggcttctctggcccccacgtgtctgtgctgtagatactgtatcaaagtcccagcgtttagatggttaacatagagctgcttctgtgtaaatgctgcttattttaaacactaaaaagcgtttaattttatggga

SEQ ID NO: 416 - DNA, 2286 bp, Homo sapiens
gcgggtagcgccccgcgtccgagcctcgggccgggccctgagcgcgcgggctccgcgccgccgccgcgccatggcggagaccaagattatctaccacatggacgaggaggagacgccgtacctggtcaagctgcccgtggcccccgagcgcgtcacgctggccgacttcaagaacgtgctcagcaaccggcccgtgcacgcctacaaattcttctttaagtccatggaccaggacttcggggtggtgaaggaggagatctttgatgacaatgccaagcttccctgcttcaacggccgcgtggtctcctggctggtcctggctgagggtgctcactcggatgcggggtcccagggcacggacagccacacagacctgcccccgcctcttgagcggacaggcggcatcggggactcccggcccccctccttccacccgaatgtggccagcagccgtgacgggatggacaacgagacaggcacggagtccatggtcagtcaccggcgggagcgtgcccgacgccggaaccgcgaggaggccgcccggaccaatgggcacccaaggggagaccgacggcgggatgtggggctgcccccagacagcgcgtccaccgccctcagcagcgagcttgagtccagcagctttgtggactcggacgaggatggcagcacgagcaggctcagcagctccacggagcagagcacctcatccagactcacccggaagtacgccagcagcttgctgaagcacggcttcctgcggcacacggtcaacaagatcaccttctccgagcagtgctactacgtcttcggggatctctgcagcaatctcgccaccctgaacctcaacagtggctccagtgggacttcggatcaggacacgctggccccgctgccccacccggctgccccctggcctctgggtcagggctacccctaccagtacccgggacccccaccctgcttcccgcctgcctaccaggacccgggctttagctatggcagcggcagcaccgggagtcagcagagtgaagggagcaaaagcagtgggtccacccggagcagccgccgggccccgggccgtgagaaggagcgtcgggcggcgggagctgggggcagtggcagtgaatcggatcacacggcaccgagtggggtggggagcagctggcgagagcgtccggccggccagctcagccgtggcagcagcccacgcagtcaggcctcggctaccgccccggggctccccccgccccaccccacgaccaaggcctatacagtggtgggggggccacccgggggaccccctgtccgggagctggctgccgtccccccggaattgacaggcagccgccagtccttccagaaggctatggggaacccctgcgagttcttcgtggacatcatgtgactcgtggcgcatgccccagccctgcctgaggtggggagctggcggtcctgccgcatgcagagctcgcgtgggcttgccttcgtgggggccaggacgggaggcagggtggggggcaggctggaccaccaccatctgccctggcagcctggctgctccagctcctgacagcacctgtgtctgagcagccgtgttgggggcgctccctctctgcccctcagcgagagcctcggacctcccaaccccttgtgtctggtggggatccctcctgggatgaggaagaccccctcgggctctcggctgacccccacctcctgcacagctgtgcccaggcccccagggtggtccatgcggggcaaccccctgcggtgcacaggccccctgtctggagtagggatctaatttatttatttattgcctggccggtgactcgggggaggaggcgaccctgtcatctgtcccacctgctgctgccccttggagcagcctgcaccttctctcctcccatccggcaacagtctgaaagtacgtggaggacgggaccggaagacgagagagggctggacatcctgcccaccgtgtcccagccagggcagggagggaccatggcccgcagggtcaaggggccccgatgtgcacagctgccacagggagggaggtcttggggagatgggcagtcaggtggcccgtccttggtgagtgcacacactgcgcgcacacatcgcggccttcctggcttctctggcccccacgtgtctgtgctgtagatactgtatcaaagtcccagcgtttagatggttaacatagagctgcttctgtgtaaatgctgcttattttaaacactaaaaagcgtttaattttatgggaaaaaaaaaaaaaaaaaa

SEQ ID NO: 417 - DNA, 1606 bp, Homo sapiens
aaccacatcttcgtcccagccccggaggctcctgtgggcaagatcgtgagccaacgggttcctgaggcccctcctggccaggcagggtttccccgcgcgtttccgaggagccctgcctggccgggcggctggacaaacaggtcgtagcaccgatcgcgcccgcccccagcaggggtcccgcacaggcttgcccctgacccccacccaaacctgtccttccgctttgcccccaaacagtgcacttgccggcggtcccaacccagcaggagaagtggacatgaggttggcaggccctctccgcattgtggtcctagtcgtcagtgtgggtgtcacatggatcgtggtcagcatcctcctgggtgggcctggcagtggctttcctcgcatccagcaactcttcaccagtccagagagctcggtgactgcagcgccacgggccaggaagtacaagtgtggcctgccccagccgtgtcctgaggagcacctggccttccgcgtggtcagcggggccgccaacgtcattgggcccaagatctgcctcgaggacaagatgctgatgagcagcgtcaaggacaacgtgggccgcgggctgaacatcgccctggtgaacggggtcagcggcgagctcatcgaggcccgggcctttgacatgtgggccggagatgtcaacgacctgttgaagtttattcggccactgcacgaaggcaccctggtgttcgtggcatcctacgacgacccagccaccaagatgaatgaagagaccagaaagctcttcagtgagctgggcagcaggaacgccaaggagctggccttccgggacagctgggtgtttgtcggggccaagggtgtgcagaacaagagcccctttgagcagcacgtgaagaacagtaagcacagcaacaagtacgaaggctgccccgaggcgctggagatggaaggctgtatcccgcggagaagcacggccagctagcacggccagtgccaggaccgggccgagggaggccagaccaagggaggcacgcgcgctgccgggcggacagaggctgaggctcacaccccacacccgggcaggagcgctccctggccccaacacatcggggctccgaggcagtgaccagaacgtggtctcaaggtggtgggggctatgggggctgcagggggtagccctgccgcactttgtcacgggagcccagggtacccgcctccttttcgtaacactgttccccccggtcagcccatctagccctgtcctccattcctcacgccatctccatccccatcttgagtcctggaacggccctgggtgcctgcccctcactgtgcatctctgggagcagcccggcaggttggggcgtcttccagaacctctcccttctggagccactctgcactgcgggctaaacatgtttccagtgtgattccttccagtgagccaaacccggtggctgcttcatgagcctgactgcctctcgcctgctctcagcaggaagggacccctggagcaggctggcccggggtggtgaagtagctggagcccgatcacagtcccgcggtttgtcagggggcccaccttctagatgaccccttaataaagtgatggccccac

SEQ ID NO: 418 - DNA, 4807 bp, Homo sapiens
aagtgcgcatgtgcgcgaggagtcgctcgggcacttattgagcgccgactgtctacgggcggccgggggtgatgggcagaggcttcagtgtccccttcgcctccgcaggagaggagaggcagcagcatggcgagtgtcctgtcccgacgccttggaaagcggtccctcctgggagcccgggtgttgggacccagtgcctcggaggggccctcggctgccccaccctcggagccactgctagaaggggccgctccccagcctttcaccacctctgatgacaccccctgccaggagcagcccaaggaagtccttaaggctcccagcacctcgggccttcagcaggtggcctttcagcctgggcagaaggtttatgtgtggtacgggggtcaagagtgcacaggactggtggagcagcacagctggatggagggtcaggtgaccgtctggctgctggagcagaagctgcaggtctgctgcagggtggaggaggtgtggctggcagagctgcagggcccctgtccccaggcaccacccctggagcccggagcccaggccctggcctacaggcccgtctccaggaacatcgatgtcccaaagaggaagtcggacgcagtggaaatggatgagatgatggcggccatggtgctgacgtccctgtcctgcagccctgttgtacagagtcctcccgggaccgaggccaacttctctgcttcccgtgcggcctgcgacccatggaaggagagtggtgacatctcggacagcggcagcagcactaccagcggtcactggagtgggagcagtggtgtctccaccccctcgcccccccacccccaggccagccccaagtatttgggggatgcttttggttctccccaaactgatcatggctttgagaccgatcctgaccctttcctgctggacgaaccagctccacgaaaaagaaagaactctgtgaaggtgatgtacaagtgcctgtggccaaactgtggcaaagttctgcgctccattgtgggcatcaaacgacacgtcaaagccctccatctgggggacacagtggactctgatcagttcaagcgggaggaggatttctactacacagaggtgcagctgaaggaggaatctgctgctgctgctgctgctgctgccgcaggcaccccagtccctgggactcccacctccgagccagctcccacccccagcatgactggcctgcctctgtctgctcttccaccacctctgcacaaagcccagtcctccggcccagaacatcctggcccggagtcctccctgccctcaggggctctcagcaagtcagctcctgggtccttctggcacattcaggcagatcatgcataccaggctctgccatccttccagatcccagtctcaccacacatctacaccagtgtcagctgggctgctgccccctccgccgcctgctctctctctccggtccggagccggtcgctaagcttcagcgagccccagcagccagcacctgcgatgaaatctcatctgatcgtcacttctccaccccgggcccagagtggtgccaggaaagcccgaggggaggctaagaagtgccgcaaggtgtatggcatcgagcaccgggaccagtggtgcacggcctgccggtggaagaaggcctgccagcgctttctggactgagctgtgctgcaggttctactctgttcctggccctgccggcagccactgacaagaggccagtgtgtcaccagccctcagcagaaaccgaaagagaaagaacggaaacacggagtttgggctctgttggctaaggtgtaacacttaaagcaattttctcccattgtgcgaacattttattttttaaaaaaaagaaacaaaaatatttttccccctaaaataggagagagccaaaactgaccaaggctattcagcagtgaaccagtgaccaaagaattaattaccctccgtttcccacatccccactctctaggggattagcttgtgcgtgtcaaaagaaggaacagctcgttctgcttcctgctgagtcggtgaattctttgctttctaaactcttccagaaaggactgtgagcaagatgaatttacttttcttaaaaaaaaaaaaaaaaaaaaaaaaaaagagtttctggctgatgggtgactcagagtgcaggactgcctggccgtggggcagaggggtttgcccttctcggagggtacctcctgttccctgtctgagcatcctgcatggaagtcaaaggaaatccctttcttggtgacgacttaaatctgggttccctcagacattgggttgcaccccaacaaatattaaatggcttcttcttaaagcccagagaaagaggttttttaaaagactgtcgccaaatagctgagccaaaaggctgatcagaattcactttttggaatgtggcagttaaacactaccttgatcattctctcctctttcctcgaggaactcctggagggtttgagcgtctggaaactctctgctctgacccgaggaagcaccctcctgacgccgccttcctccggttattgaaaggacgcctcagaaatgctttgttttcttttacgatgtattcagaagcctttactgattaaagttttcttttatttgggtggccgggagagacccagggaggttctggaggttcctttctgtctcctggccccaccagggatttccccatttctgtttgctgcctgaaagcaggatgaggaaggccaaggagagtccttgcacccgtgagcgtcaggatgaggaaatgacaggaggaagacgtgggtttgggttagtggctgctggcgttttggcccttggtgtttctggagcctccagggatctaggggagcctgggctgcgtgcatgtcgataagcagagctgttcttggggagaaggagggaggtctcgggagtgtagcaccatgccaaccagccctgcgcgaagacagagtgagccacgcccggatggcagggcatgtttctgttttggtgtctcactttcctcccagcgtgacttatttggggattcctcagggcctactggaatgtgactgcccactgcccagctgcctcgggtacaagtcctggccctatgtcccagctgtcaggggctcagggaatcctacccagccacctgtcctgggatggagtgtcagcatccaccccttggttgtcatcgaggccgccctcccagtcctgggtgaagatatttgggccaccagggctcccttggccccttcacgtaggaaatagacacgtgctttttaatgcaggacactttgagtgttacaaaatctgtagacctggcagtagggtcatgatgttgggaagggtgtagtgccctaggttggtgacagaagggacagacacttgtgcacaggtgtctttggtgatggggtttttttttttataacttagtaaaaaaaaaaaaatgtatgtggaattctgtctcttggtaaagctcaaagccaggctagcctgaggtggcgcagggctctccttcctgtcccttcgatctccttgagaattaagagctggcagctgctgatggtgtttcccaacccccctcacttcccaagacaacccccagcttcaggtcctcatggggaggggagggcacgttcttgacacatgggaacttcgctcaggagggcctccccttcccctctccctcagagttttcactgccgtctcgtctttagaaagctgtttgaattccccccgcccccagtttggaccgtgtagatataactggatatacggatttttctctttgtgcaggcttcttatgccgttggtatacagggcaggaaagagaggaataaagggagagagcagtgtggaaaccacggtggttttgctttgttcttactaggttttggtgccaccttccctgcctgcgcttgtgccccctctcctccttggcactggcggcctccttgcctcccttccacccgtgctgccatcccgtgcctgtcgtgttggttcttcacacgtgctctgttctcggggttgttccattcatgccttcttggagggtgagggtggcttgggaaccgacccagtgatcatgcctactttcttctttgtatctccctccttcccagcccacccgggcagcagactctgatggaaggaaggtgccgtaggtgggcttttagaaactaacgggactggttttcaaagcagttatcttgggaaactgtttattccagcgatgtgacttttttcagaatatttcttggaatcatattcagagtctggggctgtgtgttgagcagccttaaggatgctagacactcatttagtgcccagggagtccagcgaatgacgtctgtggccaagcgaggtctcaggtgcaaagcaaaaggaccatttaaagtaaaatagcttggattcaatcatgtgacttttaaattggctcagaaagcaattttgtaatttcagagagtgttttgagccatggccacgttgtcattgtgagtctatagcttgactccttggagaacaatattcatttggttgtggagactgatttgctgggagaaatctgtcctgttactttctggtcatcccaggttctgacttttaccaggggcaaaaaaaaaaaaagcaagagggagataaatcccatctgtgagtttgtcttattggcgcctttttcctcagctgtcttccaagtattatttttactgttaaaaaattttttaaaaatgtgaaatgtaatgtttttacagcaacaatatgaaatatattttataaggaataaaatggtaccttgtctgatttaaaaaaa

SEQ ID NO: 419 - DNA, 2872 bp, Homo sapiens
gattcctgcggacccagctgtggcgacgccaggagaccccaagctgcatcgccgagtggcaactagaactccagggctgtgaaagccacaggtgggggctgagcgaggcgtggcctcaggagcggaggacccccccactctccctcgagcgccgcagtccaccgtagcgggtggagcccgccttggtgcgcagttggaaaacctcggagccccgctggatctcctggctgccacccgcaccccccgccagcctacgccccaccgtagagatgccttcttcggtgacggcgctgggtcaggccaggtcctctggccccgggatggccccgagcgcctgctgctgctcccctgcggccctgcagaggaggctgcccatcctggcgtggctgcccagctactccctgcagtggctgaagatggatttcgtcgccggcctctcagttggcctcactgccattccccaggcgctggcctatgctgaagtggctggactcccgccccagtatggcctctactctgccttcatgggctgcttcgtgtatttcttcctgggcacctcccgggatgtgactctgggccccaccgccattatgtccctcctggtctccttctacaccttccatgagcccgcctacgctgtgctgctggccttcctgtccggctgcatccagctggccatgggggtcctgcgtttggggttcctgctggacttcatttcctaccccgtcattaaaggcttcacctctgctgctgccgtcaccatcggctttggacagatcaagaacctgctgggactacagaacatccccaggccgttcttcctgcaggtgtaccacaccttcctcaggattgcagagaccagggtaggtgacgccgtcctggggctggtctgcatgctgctgctgctggtgctgaagctgatgcgggaccacgtgcctcccgtccaccccgagatgccccctggtgtgcggctcagccgtgggctggtctgggctgccacgacagctcgcaacgccctggtggtctccttcgcagccctggttgcgtactccttcgaggtgactggataccagcctttcatcctaacaggggagacagctgaggggctccctccagtccggatcccgcccttctcagtgaccacagccaacgggacgatctccttcaccgagatggtgcaggacatgggagccgggctggccgtggtgcccctgatgggcctcctggagagcattgcggtggccaaagccttcgcatctcagaataattaccgcatcgatgccaaccaggagctgctggccatcggtctcaccaacatgttgggctccctcgtctcctcctacccggtcacaggcagctttggacggacagccgtgaacgctcagtcgggggtgtgcaccccggcggggggcctggtgacgggagtgctggtgctgctgtctctggactacctgacctcactgttctactacatccccaagtctgccctggctgccgtcatcatcatggccgtggccccgctgttcgacaccaagatcttcaggacgctctggcgtgttaagaggctggacctgctgcccctgtgcgtgaccttcctgctgtgcttctgggaggtgcagtacggcatcctggccggggccctggtgtctctgctcatgctcctgcactctgcagccaggcctgagaccaaggtgtcagaggggccggttctggtcctgcagccggccagcggcctgtccttccctgccatggaggctctgcgggaggagatcctaagccgggccctggaagtgtccccgccacgctgcctggtcctggagtgcacccatgtctgcagcatcgactacactgtggtgctgggactcggcgagctcctccaggacttccagaagcagggcgtcgccctggcctttgtgggcctgcaggtccccgttctccgtgtcctgctgtccgctgacctgaaggggttccagtacttctctaccctggaagaagcagagaagcgcctgaggcaggagccagggacccagccctacaacatcagagaagactccattctggaccaaaaggttgccctgctcaaggcataatggggccacccgtgggcatccacagtttgcagggtgttccggaaggttcttgtcactgtgattggatgctggatgccgcctgatagacatgctggcctggctgagaaacccctgagcaggtaacccagggaagagaaggaagccaggcctggaggtccacggcagtgggagtggggctcactggcttcctgtgggatgactggaaaatgacctcgctgctgttccctggcatgaccctctttggaagagtggtttggagagagccttctagaatgacagactgtgcgaggaagcaggggcaggggtttccagcccgggctgtgcgaggcatcctggggctggcagcaccttcccggctcaccagtgccacctgcgggggagggacggggcaggcaggagtctgggaggcgggtccgctcctcttgtctgcggcatctgtgctctccgagagaaaaccaaggtgtgtcaaatgacgtcaagtctctatttaaaaataattttgtgttttctaaatggaaaaagtgatagctttggtgattttgtaaaagtcataaatgcttattgtaaaaaatacaggaaaccacccctcaccctgtccacttgggtgatcattccagacccctccccaaacatgcatatgtacctgtccgtcagtgtgtggatgtatgtttacagttctacataaatgggatcattttatacatggtgctctggaacccacatttttcatgcagtcatttgcagtgaattatttattgtgataataaatagcattagaatac

SEQ ID NO: 420 - DNA, 1207 bp, Homo sapiens
ggggggaagggtgatgtggctgcggcatcgccggcctcgctatgtctgccattttcaattttcagagtctattgactgtaatcttgctgcttatatgtacctgtgcttatattcgatccttggcacccagcctcctggacagaaataaaactggattgttgggtatattttggaagtgtgccagaattggtgaacggaagagtccttatgttgcagtatgctgtatagtaatggccttcagcatcctcttcatacagtagctggggaaaatgccagaatgtagttgccatcagatttgattgtgaacaaggactgactgcagaaaataatggaaaggatgtttaactcttttatctccgaacattgaatgagataaatttccagatgctgttctctattttaatgttattggaccaatgttctgtataaacaattaagatgtaaccatttaatagtctgtaacaatcaacctcagtactgtcactacaatattacattctgcaaatgttattctgttgtatcagatacaaaattttagtgaggtatctctaaggcacatagtagaaaacaaaattggttaattactcaagttcctttcactgtgatttggaaatgatttaatctttatagaatgagaaccttttttggactagcttttttattaaaatggctcaatttgtgttgataaggattgcattaatatttaatagtgcttgcttttcctctgggcacaccattttgatcattaaccagagtacctctactcttagcaaactctagtttatgacaagtatttaaaatatttaaaacaagcttatgcagttcttaaggacgaaggtaaatgagatgtaacttaaaaatagtattgggaaaatgttgatagttaacattagtggatttagactagccaaatgacatagtaggctctgaaacatcttgtcaagtatatgtattttgtgcatgaatttttgctggaaagctgtctttctctgaaaaacacaacgttcttagaatgaaaagaacaattataaaataattatcctatatgtgtttttcattctttttagtgtcatggcttcaaaaatgaaacatttattttaattgccgtaaaggaactgtatttttgttttgttttttaacacagcactttaaatccagtttgtgttttgtcaacttgcaaaaaaaaaaaaaaaaaaaaaaaaaaaaa

SEQ ID NO: 421 - DNA, 1816 bp, Homo sapiens
cgccgtttgtcccttgcggtacccgtccgcatacgaatctagcccgggaaccgagttgcgggagtgcggtctgtgccgttccggccaggagtttgccgactgcagacgtcctgcgaaccggcaagatgtgctctctggggttgttccctcctccaccgcctcggggtcaagtcaccctatatgagcacaataacgagctggtgacgggcagtagctatgagagcccgccccccgacttccggggccagtggatcaatcttcctgtcctacaactgacaaaggatcccctaaagacccctggaaggctggaccatggcacaagaactgccttcatccatcaccgggagcaagtgtggaagagatgcatcaacatttggcgtgatgtgggcctttttggggtgctaaatgaaattgcaaactcagaagaagaggtgtttgagtgggtgaagacggcatccggctgggccctggcactctgtcgatgggcctcttccctccatgggtccctgttcccccatctgtctctcaggagcgaagatctgatcgctgaatttgcccaagtcacaaattggtccagctgctgcttgcgtgtctttgcatggcacccccacaccaacaagtttgcagtggccctgctagatgactcagtccgtgtgtataatgccagcagcaccatagtcccctccctgaagcaccggctgcagcgaaatgtggcgtctctggcctggaagccccttagtgcctctgtcttggctgtggcctgccagagctgcattcttatctggaccctggaccctacctccttgtctacccgaccctcttctggctgtgcccaagtgctgtctcaccctgggcatacacctgttaccagcttggcctgggcccccagtggggggcggctgctctcagcttcacccgtggatgctgctatccgggtatgggatgtctcaacagagacctgtgtcccccttccctggtttcgaggaggtggggtgaccaacctgctctggtccccagacggcagcaaaatcctggctaccactccttcagctgtctttcgagtctgggaggcccagatgtggacttgtgagaggtggcctactctatcagggcgctgtcagactggctgctggagcccagatggcagccgactgctgttcactgtattgggagagccactgatttactccctgtcttttccagaacgttgtggtgagggaaaggggtgcgttggaggtgcaaagtcagcaacgattgtggcagatctgtctgagacaacaatacagacaccagatggtgaggagaggcttgggggagaggctcactccatggtctgggaccccagtggggaacgtctggctgtgcttatgaaaggaaagccaagggtacaggatggtaaaccagtcatcctcctttttcgcactcgaaacagccctgtgtttgagctccttccctgtggcattatccagggggagccaggagcccagccccagctcatcactttccatccttccttcaacaaaggggccctgctcagtgtgggctggtccacaggccgaattgcccacatcccgctgtactttgtcaatgcccagtttccacgttttagcccagtgcttgggcgggcccaggaaccccctgctgggggtggaggctctattcatgacctgcccctctttactgagacatccccaacctctgccccttgggaccctctcccagggccaccacctgttctgccccactccccacattcccacctctaagaataaataagttttccttttgttttccactcaaaaaaaaaaaaaaaaaa

SEQ ID NO: 422 - DNA, 3181 bp, Homo sapiens
ctgagcgagaagagcagacaccgtgctcctggaatcacccagcatgttgcaaggtctcctgccagtcagtctcctcctctctgttgcagtaagtgctataaaagaactccctggggtgaagaagtatgaagtggtttatcctataagacttcatccactgcataaaagagaggccaaagagccagagcaacaggaacaatttgaaactgaattaaagtataaaatgacaattaatggaaaaattgcagtgctttatttgaaaaaaaacaagaacctccttgcaccaggctacacggaaacatattataattccactggaaaggagatcaccacaagcccacaaattatggatgattgttattatcaaggacatattcttaatgaaaaggtttctgacgctagcatcagcacatgtaggggtctaaggggctacttcagtcagggggatcaaagatactttattgaacctttaagccccatacatcgggatggacaggagcatgcactcttcaagtataaccctgatgaaaagaattatgacagcacctgtgggatggatggtgtgttgtgggcccacgatttgcagcagaacattgccctacctgccaccaaactagtaaaattgaaagacaggaaggttcaggaacatgagaaatacatagaatattatttggtcctggataatggtgagtttaaaaggtacaatgagaatcaagatgagatcagaaagagggtatttgagatggctaattatgtcaacatgctttataaaaagctcaatactcatgtggccttagttggtatggaaatctggactgacaaggataagataaagataaccccaaatgcaagcttcaccttggagaatttttctaaatggagggggagtgttctctcaagaagaaagcgtcatgatattgctcagttaatcacagcaacagaacttgctggaacgactgtgggtcttgcatttatgtctacaatgtgttctccttattctgttggcgttgttcaggaccacagcgataatcttcttagagttgcagggacaatggcacatgaaatgggccacaactttggaatgtttcatgacgactattcttgcaagtgtccttctacaatatgtgtgatggacaaagcactgagcttctatatacccacagacttcagttcctgcagccgtctcagctatgacaagttttttgaagataaattatcaaattgcctctttaatgctccattgcctacagatatcatatccactccaatttgtgggaaccagttggtggaaatgggagaggactgtgattgtgggacatctgaggaatgtaccaatatttgctgtgatgctaagacatgtaaaatcaaagcaacttttcaatgtgcattaggagaatgttgtgaaaaatgccaatttaaaaaggctgggatggtgtgcagaccagcaaaagatgagtgcgacctgcctgaaatgtgtaatggtaaatctggtaattgtcctgatgatagattccaagtcaatggcttcccttgccatcacgggaagggccactgcttgatggggacatgccccacactgcaggagcagtgcacagagctgtggggaccaggaactgaggttgcagataagtcatgttacaacaggaatgaaggtgggtcaaagtacgggtactgtcgcagagtggatgacacactcattccctgcaaagcaaatgataccatgtgtgggaagttgttctgtcaaggtgggtcggataatttgccctggaaaggacggatagtgactttcctgacatgtaaaacatttgatcctgaagacacaagtcaagaaataggcatggtggccaatggaactaagtgtggcgataacaaggtttgcattaatgcagaatgtgtggatattgagaaagcctacaaatcaaccaattgctcatctaagtgcaaaggacatgctgtgtgtgaccatgagctccagtgtcaatgtgaggaaggatggatccctcccgactgcgatgactcctcagtggtcttccacttctccattgtggttggggtgctgttcccaatggcggtcatttttgtggtggttgctatggtaatccggcaccagagctccagagaaaagcagaagaaagatcagaggccactatctaccactggcaccaggccacacaaacagaagaggaaaccccagatggtaaaggctgttcaaccccaagagatgagtcagatgaagccccatgtgtatgatctgccagtagaaggcaatgagcccccagcctcttttcataaagacacaaacgcacttccccctactgttttcaaggataatccaatgtctacacctaaggactcaaatccaaaagcatgaagcaacagctaagcaagaactaatggctaaattatcaacttggaaaactggaaaatctggatggcagagaaatatactatctcaccagtatttgctctcgactcaagaaggttaacattttctgattcatgttagactttgaagagactaaagaaaattttcaagaggaacatatgcctgagaacctttgcatgaatttaaaatttcaattatccattcttataagaaggaagatgattgtaaagaaatatctccgaagttaaaatctgtaataggaattgattcattctctaatgaaaacaaaacataaaaacatcacactaatcttggaggaataagaaaaattgtacatccattaaatgtacaattgattgcaacatcttgattgttttaaccattaacttgtcaaattacaatcacagttaagaaaatgatgtaaaattctgttttgtggatctctttcctagattagcttctgaaatcattattagctatatcatttgaggttttctacaatttggtataactaagaatttaaaaatgttttatcatatatatttgtataattaattactggcatggttaaagtggttttcactttttaaatggagaaaatttcagttaaattaataggataaaccaggttgcgaactggtgacctgtaggccatgtttgcactgcaaatatatttggtctgaatgatattgatattggacacatagtacttttacatgttttgaatgtattgctaatatttaaaaattgagagatcttgcataaacaatagattcccaaaaaaaaaaaaaaaaa

SEQ ID NO: 423 - DNA, 2076 bp, Homo sapiens
gcgagaagagcagacaccgtgctcctggaatcacccagcatgttgcaaggtctcctgccagtcagtctcctcctctctgttgcagtaagtgctataaaagaactccctggggtgaagaagtatgaagtggtttatcctataagacttcatccactgcataaaagagaggccaaagagccagagcaacaggaacaatttgaaactgaattaaagtataaaatgacaattaatggaaaaattgcagtgctttatttgaaaaaaaacaagaacctccttgcaccaggctacacggaaacatattataattccactggaaaggagatcaccacaagcccacaaattatggatgattgttattatcaaggacatattcttaatgaaaaggtttctgacgctagcatcagcacatgtaggggtctaaggggctacttcagtcagggggatcaaagatactttattgaacctttaagccccatacatcgggatggacaggagcatgcactcttcaagtataaccctgatgaaaagaattatgacagcacctgtgggatggatggtgtgttgtgggcccacgatttgcagcagaacattgccctacctgccaccaaactagtaaaattgaaagacaggaaggttcaggaacatgagaaatacatagaatattatttggtcctggataatggtgagtttaaaaggtacaatgagaatcaagatgagatcagaaagagggtatttgagatggctaattatgtcaacatgctttataaaaagctcaatactcatgtggccttagttggtatggaaatctggactgacaaggataagataaagataaccccaaatgcaagcttcaccttggagaatttttctaaatggagggggagtgttctctcaagaagaaagcgtcatgatattgctcagttaatcacagcaacagaacttgctggaacgactgtgggtcttgcatttatgtctacaatgtgttctccttattctgttggcgttgttcaggaccacagcgataatcttcttagagttgcagggacaatggcacatgaaatgggccacaactttggaatgtttcatgacgactattcttgcaagtgtccttctacaatatgtgtgatggacaaagcactgagcttctatatacccacagacttcagttcctgcagccgtctcagctatgacaagttttttgaagataaattatcaaattgcctctttaatgctccattgcctacagatatcatatccactccaatttgtgggaaccagttggtggaaatgggagaggactgtgattgtgggacatctgaggaatgtaccaatatttgctgtgatgctaagacatgtaaaatcaaagcaacttttcaatgtgcattaggagaatgttgtgaaaaatgccaatttaaaaaggctgggatggtgtgcagaccagcaaaagatgagtgcgacctgcctgaaatgtgtaatggtaaatctggtaattgtcctgatgatagattccaagtcaatggcttcccttgccatcacgggaagggccactgcttgatggggacatgccccacactgcaggagcagtgcacagagctgtggggaccaggtaggaggacaaatcctttcccctgtgcatgtgcgaaggaaaatcatttcagatgacagtgtttaaccatggtcaaaggaccattctgtcctatccttcttagaagcttcgaactcaaaatcatggaaaggttttaagatttgaggttggttttagggttgctagatttagcaagtaaaaataaggatggccccgttaaattttaacttaaaattaacaagttttttgttaattttttgttttttgtctcagcatcagtatatcccatgcaatatttgaggtgtgctcatactaaaattatttgtgtatctgaaattcaaattaaactgggtgtctttttcttttcatctggcaaccctactaagatcataaacccttggaaatctgtgtgtgtgcgggtgtgtgtgtgtgtgtgtgtgcaggggtggcagaagtactgtgggatgggacagaaataaaaaaaaaaaaaa

SEQ ID NO: 424 - DNA, 639 bp, Homo sapiens
gagagaaggagagcctgcagacagaggcctccagcttggtctgtctccccacctctaccagcatctgctgagctatgagccaaaccagggatttacagggaggaaaagctttcggactgctgaaggcccagcaggaagagaggctggatgagatcaacaagcaattcctagacgatcccaaatatagcagtgatgaggatctgccctccaaactggaaggcttcaaagagaaatacatggagtttgaccttaatggaaatggcgatattgatatcatgtccctgaaacgaatgctggagaaacttggagtccccaagactcacctagagctaaagaaattaattggagaggtgtccagtggctccggggagacgttcagctaccctgactttctcaggatgatgctgggcaagagatctgccatcctaaaaatgatcctgatgtatgaggaaaaagcgagagaaaaggaaaagccaacaggccccccagccaagaaagctatctctgagttgccctgatttgaagggaaaagggatgatgggattgaaggggcttctaatgacccagatatggaaacagaagacaaaattgtaagccagagtcaacaaattaaataaattaccccctcctccagatcaa

SEQ ID NO: 425 - DNA, 1363 bp, Homo sapiens
gaggaaaagctttcggactgctgaaggcccagcaggaagagaggctggatgagatcaacaagcaattcctagacgatcccaaatatagcagtgatgaggatctgccctccaaactggaaggcttcaaaggtgagggggaaactgtaggcggtggagacagggctgggggtaggagggttaggatttccacaagaacaaggcaggaacagcagagataaaaagtttacttttgtggtagcaaaaggggaacctgcctttattgccctcctgccacactgcggtccctttcccgggcctgcctctctcagcatcccctctagctccttacaccctagcggggcccctcaactccccaaccccacttcctctgcctgcccctcctcctccttccacgttgtctcctccacctagcagttggttggcaaccccttcctcactcacccagagaaatacatggagtttgaccttaatggaaatggcgatattggtgagaaacgggtgatttgcgggggcagggtggtgtgcaggcctaagaagacagaggtctctcctacatgctccattcctcatgatttgggagggggcccacctaccacagtgggaggaaggagaatggggatgcggaagtgggagaggagagagagggtctccccaccttctccccatccccatcctctgcccccagatatcatgtccctgaaacgaatgctggagaaacttggagtccccaagactcacctagagctaaagaaattaattggagaggtgtccagtggctccggggagacgttcagctaccctgactttctcaggatgatgctgggcaagagatctgccatcctaaaaatgtgagtgtcaatttccaacctcccctgtacttacctgttttctcctcccccatccctacccttgtccacaggctcaacatttctacacgttgcccatcatcccttcttccatccttagagggacccttccaaggtcccgaccccatccctatccatagtcctggtccccagaaactccaacccctgcccttcctcttcccccttccaccctcacatccccatccccttctagcctttcctagcaccctatgatttattcccttgagaggagtgttccctgatccctgtgcctcttcccatctcaaccaggatcctgatgtatgaggaaaaagcgagagaaaaggaaaagccaacaggccccccagccaagaaagctatctctgagttgccctgatttgaagggaaaagggatgatgggattgaaggggcttctaatgacccagatatggaaacagaagacaaaattgtaagccagagtcaacaaattaaataaattaccccctcctccagatcaa

SEQ ID NO: 426 - DNA, 503 bp, Homo sapiens
cacctagcagttggttggcaaccccttcctcagtcccctgctgaaaaccctccagtcagcgcttatcccttctgctctctcccctcacccagagaaatacatggagtttgaccttaatggaaatggcgatattgatatcatgtccctgaaacgaatgctggagaaacttggagtccccaagactcacctagagctaaagaaattaattggagaggtgtccagtggctccggggagacgttcagctaccctgactttctcaggatgatgctgggcaagagatctgccatcctaaaaatgatcctgatgtatgaggaaaaagcgagagaaaaggaaaagccaacaggccccccagccaagaaagctatctctgagttgccctgatttgaagggaaaagggatgatgggattgaaggggcttctaatgacccagatatggaaacagaagacaaaattgtaagccagagtcaacaaattaaataaattaccccctcctccagatcaa

SEQ ID NO: 427 - DNA, 1548 bp, Homo sapiens
ggcaagggaaaaccggctgtggagaaggaaatagggcccggcgctgagtgagcgtggttgcgtgtcctttgcagacactttctggggcgaggtgacatggcgagagtcttggatcggtggacgtagacggtagacagttcgcgtgcgtttccttcgcctacttggcctacatgccttctgcccgtgaagcgatgtttcccctcgaaaggccgtagacgccgtcagaatcggtttttcagtgagttttgacccctccgacgctccgtctctgacagaatcgcggcgttcttcgtacccgcccatcctccgcggacgccgtgccatggcgactctgctgcgccctgtcctccgtcggctctgcgggctcccgggcctacagcggcctgcggcagaaatgcccctccgggctaggagcgacggcgccggcccgctatactcgcaccacctccccacctccccgctgcagaaagcgctgttggccgccggctccgcggcgatggcgctctataacccctaccgccacgacatggtcgcagttctaggggagaccacaggacaccgcaccctgaaggtcctcagggaccagatgaggagggatccagagggtgcccagatcctgcaggagcgtccccggatttcgacatccaccctcgacctgggcaagctccagagcctgccggaaggctccctcggtcgcgagtatctccgtttcctggatgtgaacagggtctccccagacacccgagcacccacccgcttcgtggatgatgaggagctagcgtatgtaattcagcggtaccgggaggtgcacgacatgcttcacaccctgctggggatgcccaccaacatcctgggggagatcgtggtgaaatggtttgaggctgtccagactggcctgcccatgtgcatcctgggtgcattctttggaccgatccgacttggcgctcagagcctgcaagtgctggtctcggagttgatcccatgggccgttcagaacgggcgcagagcccattgtgtcctcaacctgtactatgagcggcgctgggagcagtccctgagggctctgcgggaggagctgggcattacagcaccacccatgcacgtccagggcttggcctgagctcctgagccagcggggcctggcctacctcccccatcccctgcttcccttggaggcagagggctcccttgactacctttgttcctcttctttgaacactgacccttggacaacatttatcataatttgtcataaccactgctgagtggccttgaggacgaaccccgcagggagcaagcagtacagtggcattcccagggggaccagcagctacccaaggagaaccatgcatgaacagtatcagtcgtctgggctcatgctgggattgtgcagtgctcctgttgcaactcctcccagccagccaggtttgctgggggccaggctgggtgtcctcacaggagtgagggctacacccaattccaaaagcctgagaagagagaagtggagggggaggcgagtgtgtgaataaaggctcccatcaggtcaaa

SEQ ID NO: 428 - DNA, 1910 bp, Homo sapiens
gtctctgacaggctcagctggagagggacgggttgggacgcactgtccttttgcccttccccctccgcgagcagaagctgactccgcaggagcgagggtcgcagagctgggtgagcggaaatgtccctcccagagtgaagtcgcagggcccgccccgcgtctgagggagcggaggtcttcctgggggatttcagtctccacatagttttggagccggacttttgaagaatgattcgtgaatccggaatgggtgacagcgtcatcacggcattttattgacagaccatggattcttacagtgcaccagagtcaactcctagtgcatcctcaagacctgaagattactttataggtgccactcctctgcagaaacgattagaatcggtcaggaagcagagttcatttatcctgactccacctcgaaggaaaattccccagtgttcgcagttgcaggaagatgttgaccctcaaaaggttgcattccttctgcataaacagtggactttatatagtttaactcccttatataaattctcctatagtaatctcaaagagtattctagacttctcaatgcttttattgttgctgaaaagcaaaaaggacttgctgtggaagtgggagaagacttcaacatcaaagtgattttttctactctcctaggaatgaaaggaacacaaagggacccggaagcatttcttgtccagattgtgtcaaaatctcaattgccatctgagaatagagaaggtaaagtgctgtggactggctggttctgctgtgtatttggagacagtcttctggagactgtttcagaagatttcacctgtctgcccttattccttgcaaatggagcagagtctaacacagcaataattggaacttggtttcagaaaacctttgactgttatttcagtcctttagcaatcaatgcatttaatctttcctggatggctgccatgtggactgcatgcaaaatggaccattatgtggctactactgaatttctttggtctgtaccctgtagccctcaaagtctggacatttctttcgcaatacatccagaggatgcaaaagctctatgggacagtgtccacaaaacacctggggaggttacccaggaagaagttgacctattcatggattgcctttattcacatttccatagacatttcaaaattcatttatcagccacaagattagttcgtgtttcaacatctgtagcttcagcacatactgatggaaaaataaagattctgtgtcataaataccttattggagtgttagcatatttgacagaactggcaatttttcaaattgagtgaagccttatgtggactataagttatagattatatactcttattgataacttgcctaattgctatgctgaaagagactgcaggagaaataggcatctatctctgcatctgttttccccaccatgcctttggagttgccaagatggaagccaagaaggatctagaagaacaaagaatatggtagtagatgagccacagccaggtgcccatgtactaatcatgataacctgacatgccattctcaaaatgctgagttgttaatttcttgtcatctttaaatatatatatataggctgggcttggtggctcacacctgtaattccagcactttgggaggctgaggtgggtggatcatttgaggccaggaattcaagaccagcctggccaacatggtgaaaccccttctctactgaaaatacaataattagctgggcgtggtggcacatgcctgtgatcccagctactggggaggctgaggcaggagaatcgttttaacccagaagacaggctgcagtgagccaagactgcaccactgcactccagcctgggcaacaaagtgagactctgcctcaaaaaataaaaaaaaaaaaaaa

SEQ ID NO: 429 - DNA, 3457 bp, Homo sapiens
gaggccgagagggggcagcaggcgatggcggcggcggtagctgcggcgggtcggttaggctggttgttcgccgcgctctgcctgggcaacgccgcgggggaggccgcgccgggcccgcgagtgctgggcttctgcctggaggaggatggagcggcgggcgcgggttgggtacgcggaggggcggcgcgggacacgccggacgccaccttcctcctgcgcctcttcggcccgggcttcgccaacagctcttggtcctgggtggccccggagggggcgggctgccgggaggaggcggcctcccccgcgggcgagtggcgcgcgctgctgcgcttgcgcctgcgggccgaggccgtgcgcccgcactcggcgctgctggcggtgcgcgtggagccgggtggcggggcggctgaggaggcggcgccgccctgggctctgggcctgggggcggccgggctgctggcgctggcagcgctggcgcgaggcctgcagctgagcgcgctggcgctggcgcctgccgaggtgcaggtgctgcgcgagagcggctcggaggcggagcgtgcggcggcgcggcgtttggagcccgcgcggcgctgggccggctgcgccttgggcgcgctgctgctgctggccagcctggcgcaggcggcgctggcggtgctgctgtaccgcgcggccggccagcgtgcggtgcccgccgtgttgggcagcgcggggctcgtgttcctggtgggagaggtggtgccggccgccgtgagcgggcgctggacgctggcgctggcgccgcgagcgctcggcctcagccgcctggccgtcctgctcactctgcccgtcgcgctgcccgtggggcagctgctggagctggcggcgcggcccgggcggctgcgggagcgggtgctggagctggcgcgcggcggcggcgacccctacagcgatctcagcaagggcgtgctgcgctgccggaccgtggaggacgtgctcacgcccctcgaagactgcttcatgctggacgccagcaccgtgctggacttcggcgtcctggccagcatcatgcagagcggccacacgcgcatcccggtgtacgaggaggagcgctccaacatcgtggacatgctctacctcaaggacttggccttcgtggatcccgaagactgcacgccgctcagcaccatcactcgtttctacaaccatccgctccacttcgtcttcaacgacaccaagctggacgctgtcctggaggaattcaagcgagggaagtcccacctggccatcgtgcagaaggtgaacaacgagggtgaaggcgaccccttctacgaggtcctgggcctggtcaccctggaggacgtgatcgaggagatcatcaggtccgagatcctggacgagtctgaagactaccgagacaccgtggtgaagaggaagcctgcttctctgatggcccctctgaagcggaaggaggagttctccttgttcaaggtgtctgatgatgaatataaagtaacaatctcgcctcagctgctcttggccacccagcgcttcctgtcccgagaagtggatgtattcagcccgctgcgcatctctgagaaggtcctgctgcacctgttgaagcatcccagtgtcaaccaggaagtgaggtttgacgagagcaaccggctggccacacaccactacctgtaccagcgcagccagccggtggattacttcattctcatcctgcagggcagggttgaagtggagatcgggaaagagggtctgaagtttgagaatggggccttcacgtactatggagtgtcggccctaactgtgccatcctcggttcaccagtccccggtgtcctcgctccagcccatccgccatgacctgcagcccgacccaggtgacggcacgcattcatctgcgtattgtcccgactacaccgtgagggcgctctctgatctgcagctcatcaaggttacgcgactgcagtacctcaatgcactcctggctacccgagcccagaacctgccacagtcccctgagaacaccgacctgcaggttattccaggcagccagaccaggctccttggtgagaagaccaccacagcggcagggtccagccacagcaggcccggcgtcccggtggaaggcagccctgggcggaacccaggcgtttaacggctcactaggcagccccagatctggggaacagatgagcacgtggggagctggagtgagctgagcagaagttttgtgcccgcctgcccccatcccctccaggccacgttttagatggcccttgtagttgcgggtcctgggtgtcctcagaactagacatcaatgcctggatccttcagccggccctgccctcctttaggagacaggagtcaccagggcacagccctccaggcccgcctcaggaaggaatgaaaggaatgccatcatctctagttcccagggcccagccttccccttctcccccggggcagggacagtgcggcatattcagattcagacctctttgggctgagccaccttgtgagtgcagttactgcctttgtgtggccgtgacctctatttgtttgcttttaatttgccaacctatcgctgctggcagcactttttgagcaagccgagagcacccattttggctgggggttcagatcgatggccttgtccatgttgtcctttctggcttccctgatggtgtcatgtttcagcgcatgcgccccagcctttcccatgtgccaaaccagaagctccactgcccgtaggctgtccctgtagccctgctccctccctggaggctgctcttctgattctgagagctggcctagtggtgctgagggcccctttctgcttctctgcccacctgctgagttgccactcgcagtgttgtcagttcccgtgttctgagaagaggtcatgcctgggaggaagggatcgtcatgctgcatcgaatcctctctccgccgtgtggcccccaggagagtagctgcctgttgcacctgctccacacctccccacagcctccctgcaggtgctgtgtggccgtgatgtgcagagagcagtgagggagggttcatgaaccaggtggatcctctttaaaaaaaaaaaagtttttgttatatctctagaacatttcaagtcttttcctttttttctgttcctagctatggggttttagagaagtgggaacaggaaggcatttgtctttttcttctagtttactacattttccttccgtagttcttcagctgtgtggaaacgggcatcacaaggacataggatcatagattgggtagggagggaggaggatttctggaacttttctcaaaggaatttggacccttataaatgggactgaaggtcaaaacaacagtgatatccttgcttagaaattgtcctcaaggaataaactctgagagcaagcccgggttggaaacagatgctttaaaaaaaaaaaaaaaaaaaaaaaaaaaaaaaa

SEQ ID NO: 430 - DNA, 3313 bp, Homo sapiens
gaggccgagagggggcagcaggcgatggcggcggcggtagctgcggcgggtcggttaggctggttgttcgccgcgctctgcctgggcaacgccgcgggggaggccgcgccgggcccgcgagtgctgggcttctgcctggaggaggatggagcggcgggcgcgggttgggtacgcggaggggcggcgcgggacacgccggacgccaccttcctcctgcgcctcttcggcccgggcttcgccaacagctcttggtcctgggtggccccggagggggcgggctgccgggaggaggcggcctcccccgcgggcgagtggcgcgcgctgctgcgcttgcgcctgcgggccgaggccgtgcgcccgcactcggcgctgctggcggtgcgcgtggagccgggtggcggggcggctgaggaggcggcgccgccctgggctctgggcctgggggcggccgggctgctggcgctggcagcgctggcgcgaggcctgcagctgagcgcgctggcgctggcgcctgccgaggtgcaggtgctgcgcgagagcggctcggaggcggagcgtgcggcggcgcggcgtttggagcccgcgcggcgctgggccggctgcgccttgggcgcgctgctgctgctggccagcctggcgcaggcggcgctggcggtgctgctgtaccgcgcggccggccagcgtgcggtgcccgccgtgttgggcagcgcggggctcgtgttcctggtgggagaggtggtgccggccgccgtgagcgggcgctggacgctggcgctggcgccgcgagcgctcggcctcagccgcctggccgtcctgctcactctgcccgtcgcgctgcccgtggggcagctgctggagctggcggcgcggcccgggcggctgcgggagcgggtgctggagctggcgcgcggcggcggcgacccctacagcgatctcagcaagggcgtgctgcgctgccggaccgtggaggacgtgctcacgcccctcgaagactgcttcatgctggacgccagcaccgtgctggacttcggcgtcctggccagcatcatgcagagcggccacacgcgcatcccggtgtacgaggaggagcgctccaacatcgtggacatgctctacctcaaggacttggccttcgtggatcccgaagactgcacgccgctcagcaccatcactcgtttctacaaccatccgctccacttcgtcttcaacgacaccaagctggacgctgtcctggaggaattcaagcgaggagacaccgtggtgaagaggaagcctgcttctctgatggcccctctgaagcggaaggaggagttctccttgttcaaggtgtctgatgatgaatataaagtaacaatctcgcctcagctgctcttggccacccagcgcttcctgtcccgagaagtggatgtattcagcccgctgcgcatctctgagaaggtcctgctgcacctgttgaagcatcccagtgtcaaccaggaagtgaggtttgacgagagcaaccggctggccacacaccactacctgtaccagcgcagccagccggtggattacttcattctcatcctgcagggcagggttgaagtggagatcgggaaagagggtctgaagtttgagaatggggccttcacgtactatggagtgtcggccctaactgtgccatcctcggttcaccagtccccggtgtcctcgctccagcccatccgccatgacctgcagcccgacccaggtgacggcacgcattcatctgcgtattgtcccgactacaccgtgagggcgctctctgatctgcagctcatcaaggttacgcgactgcagtacctcaatgcactcctggctacccgagcccagaacctgccacagtcccctgagaacaccgacctgcaggttattccaggcagccagaccaggctccttggtgagaagaccaccacagcggcagggtccagccacagcaggcccggcgtcccggtggaaggcagccctgggcggaacccaggcgtttaacggctcactaggcagccccagatctggggaacagatgagcacgtggggagctggagtgagctgagcagaagttttgtgcccgcctgcccccatcccctccaggccacgttttagatggcccttgtagttgcgggtcctgggtgtcctcagaactagacatcaatgcctggatccttcagccggccctgccctcctttaggagacaggagtcaccagggcacagccctccaggcccgcctcaggaaggaatgaaaggaatgccatcatctctagttcccagggcccagccttccccttctcccccggggcagggacagtgcggcatattcagattcagacctctttgggctgagccaccttgtgagtgcagttactgcctttgtgtggccgtgacctctatttgtttgcttttaatttgccaacctatcgctgctggcagcactttttgagcaagccgagagcacccattttggctgggggttcagatcgatggccttgtccatgttgtcctttctggcttccctgatggtgtcatgtttcagcgcatgcgccccagcctttcccatgtgccaaaccagaagctccactgcccgtaggctgtccctgtagccctgctccctccctggaggctgctcttctgattctgagagctggcctagtggtgctgagggcccctttctgcttctctgcccacctgctgagttgccactcgcagtgttgtcagttcccgtgttctgagaagaggtcatgcctgggaggaagggatcgtcatgctgcatcgaatcctctctccgccgtgtggcccccaggagagtagctgcctgttgcacctgctccacacctccccacagcctccctgcaggtgctgtgtggccgtgatgtgcagagagcagtgagggagggttcatgaaccaggtggatcctctttaaaaaaaaaaaagtttttgttatatctctagaacatttcaagtcttttcctttttttctgttcctagctatggggttttagagaagtgggaacaggaaggcatttgtctttttcttctagtttactacattttccttccgtagttcttcagctgtgtggaaacgggcatcacaaggacataggatcatagattgggtagggagggaggaggatttctggaacttttctcaaaggaatttggacccttataaatgggactgaaggtcaaaacaacagtgatatccttgcttagaaattgtcctcaaggaataaactctgagagcaagcccgggttggaaacagatgctttaaaaaaaaaaaaaaaaaaaaaaaaaaaaaaaa

SEQ ID NO: 431 - DNA, 2849 bp, Homo sapiens
gttggggccgtcgaggcggcggcgactctgcgtccccggctcctgatggaggcggggccgcatccccggccggggcactgctgcaagcctggggggcggctggacatgaaccacggcttcgtgcaccatatccgacggaaccagatcgctcgggacgactatgacaagaaggtgaagcaggcggccaaggagaaggtgaggaggcggcacacgcccgcgccgacgcggccccgcaagccagacctgcaggtgtacctgccgcgacaccgagatgtctctgcccacccacgcaacccagactatgaagagtccggtgaaagcagcagtagtggaggctctgagctggagccttctggccatcagctcttctgcttagaatacgaggcagacagtggagaggtcacatcagttatcgtctatcagggtgatgacccaggaaaggtgagtgagaaggtgtcggcacacacgcctctggatccacccatgcgagaagccctcaagttgcgtatccaggaggagattgcaaagcgccagagccaacactgaccatgttgaaggcgttctctccaggctggattcactgcactcggaagaattctgcccagggaatttagtgtgggggtaccaggaccagtttgtctgatcttgagacccccagagctgctgcatccatagggtgttgcaggactacacctggcctgccttgcagtcattctttcttatatgttgacccatttgcccagcctgatattctggaattctttttttttttttttttttttttttttgaggattttgtgtggctaatgtgttctagaagcagagactccagggagaaccagaatttatgaagcctcgtgcaacatggtgctttctcaccgaggtcatatgcctggctgctgctgttccactcagctccatgagccacgtttgttattttatgtttcttctgtgcttttgctcatttccacccatgtgtttatagaccttttttcagccctttttctttgttcctttccctcatctttttgcctcaggtagaatccatcagttttcctccccctccaaatgactgtgtacctccagctgctcaggactttggaggtgggggcggggcctggggatctacccttctaaaaaactctccaagtaattctgataccaataaagtgggagacctccatttttgaggcctatttgcaagcatgtctccctccctttccatggctttttcgtttctcgcatgttccactgctttgcactgtctagacaggaaacctaggaagatgttggtgctaaactgaaaagatttcttacagcaaaacctgcctcggccagggctacagaattccaactttcaacttgattcctagccgtgaacagactgtcctctgctcagactaaaagggaattataaacaagtgggaacttactctccagttgtgacttaacagttctgaacatacctacaaagggaaagtcaatattagcaataattgcctgattgacagcacgccagagggaatgaaatgaggccttctctcctacctcccaggagtatgtaactcagatccttagcataaagatccccaggaataccactgctctaacccggtgaacattttttctaatgcagggttaggcttacgtctgaattccacaagacatcctccccctccagtacggaagttccaaggcacttgttttccagcatatcagcctaacctcagtgccttgaaatatggctttaagcctttgagaactgagatttcctgaaaccataggcccttgccccaggggtttctccacatccgggtgttaagacacctgatggcactgttggtttgtcccctataccccagaaaatctatcctgcaaggtagctacttcaatcttgtcattaaaatgtgtcaagtcacagctcgcaatgccaaaggaatgctggggcagtaagtgaggtggataagtgagcagggcctggtggtgaaagcggccagggaccagaatgctccagacctacagagctggtcaaggttaagtgccttaaacttaccaatcctgggctcagttctcctttgaaaggagaaagtctttgtcctctacttaggcagctgggctagaagtgccttttgacttctaatgttaactaccctccaaagcctcctgggtcaagaaggctctcccaaactccacccctgttcttcctggtcagagaaccagtcagtcattctagtcttctagtccttaaactgatctgatgacttggaacataggatttcactgcaagtctggctttttagtctggaaatacatttgaggtctgttttcgcacagctggatcacctgtttcctggttttattacacaattcagaaggctagaagaggagtttgggggcttggcacctgaaaatttagaccgcattcttattaagtaaaggaagaggtagggaggccgaggcgggcggatcatgaaatcaggagatccagaccgtcctggctaacacagaaaccccgtctctactaaaaatacaaaaaattagctgggcatggtgacatgtgcctgtagtccatcccagctactcgggaggccgaggcaagagaatcacctaaacctggaaggcggaggttgcagtgagccgagatcacaccactgcacttcaggctgggcagcagagcgagactccatctcaaaaaaaaaaaaaaaaggaagaggtaaaaggcaaggcagcatttaataagtacctgttgtatccttttaagtgtttgttgtggtaatcctcacaaagaccgggactgatggaaactccttgctattaaactttttttcttgaggaaaaaaaaaaaaaaa

SEQ ID NO: 432 - DNA, 979 bp, Homo sapiens
ctgattatagttctgaggccctagctactcactttgcaaactccaggctccggtcgcgcacgggacgaactgcggggagtgagccgcgcgggccgccgtagtcagctgctaagagcaggaagagtccgagcggcgggcggagtctgcaggatggcaccggacccctggttctccacatacgattctacttgtcaaattgcccaagaaattgctgagaaaattcaacaacgaaatcaatatgaacgaaaaggtgaaaaggcaccaaagcttaccgtgacaatcagagctttgttgcagaacctgaaggaaaagatcgcccttttgaaggacttattgctaagagctgtgtcaacacatcagataacacagcttgaaggggaccgaagacagaacctcttggatgatcttgtaactcgagagagactacttctggcatcctttaagaatgagggtgccgaaccagatctaatcaggtccagcctgatgagtgaagaggctaagcgaggagcacccaacccttggctctttgaggagccagaggagaccagaggcttgggttttgatgaaatccggcaacagcagcagaaaattatccaagaacaggatgcaggccttgatgccctttcctctatcataagtcgccaaaaacaaatggggcaggaaattgggaatgaattggatgaacaaaatgagataattgacgaccttgccaacctagtggagaacacagatgaaaaacttcgcaatgaaaccaggcgggtaaacatggtggacagaaagtcagcctcttgtgggatgatcatggtgattttactgctgcttgtggctatcgtggttgttgcagtctggccgaccaactgatggcagtaaagagaccaccagcagtgacacctggcaatgacagatgcaagcccaacacccttttggtacgcaaaacctgctctcaataaattcccccaaagctctgaaaaaaaaaaaa

SEQ ID NO: 433 - DNA, 1352 bp, Homo sapiens
ggggggaaacggaagtgagcggcggggtcgactgacggtaacggggcagagaggctgttcgcagagctgcggaagatgaatgccagaggacttggatctgagctaaaggacagtattccagttactgaactttcagcaagtggaccttttgaaagtcatgatcttcttcggaaaggtttttcttgtgtgaaaaatgaacttttgcctagtcatccccttgaattatcagaaaaaaatttccagctcaaccaagataaaatgaatttttccacactgagaaacattcagggtctatttgctccgctaaaattacagatggaattcaaggcagtgcagcaggttcagcgtcttccatttctttcaagctcaaatctttcactggatgttttgaggggtaatgatgagactattggatttgaggatattcttaatgatccatcacaaagcgaagtcatgggagagccacacttgatggtggaatataaacttggtttactgtaatagtgtgctgttcatggaaaccgagggctgcatcttgtttatagtcatctttgtactgtaatttgatgtacacaacattaaaagtactgacacctgagaatttctgctcaagtagtatcagtgatcatttaaaatttggaggggtctttggtttacagccatgtgacaattaaaagcactaaagggagatcatgttaaagctcttaatttatattaaaacagtagcctttgtctttaaaaaagttgttgctcatgaatattataaaatgatctacaggtttcaattcaacctgtttctaggtttttttgtaaatttagttttgattaagcattataagcatttgagtctataaactttatagtagcatctttcagaataaacatttttaattgatttcagtggcaactctcaaattgattacaatatgagatatatcagtgtcgtccattaacactcataagaataatatttactgtgtcagtgctattttaggattatagttattgtttgattatttcaggttgaaaagtagaagttccaaggttttgattttggtctggtctttaagtgaaaaattaaagcaaccagtagatgtaggttaaacttttacttcatagacttaatatgtgattaatatattgccaagcaacactgttaaagaaaagtaaaactcattttttcttgttcttaatttatatattacaagatactgtaaggtattctttatgaagttgatatataaaaatttacatttttagaacattagtgaatggatcatcttttacaattaaaagtatattttgattatcagtttcttagcaaaaaaaaaaaaaaaaaaaaaaaaaaaaaa

SEQ ID NO: 434 - DNA, 1986 bp, Homo sapiens
agcagccgacgccgagaggcaccgtttcttcttaaaagagaaacgctgcgcgcgcgaggtgggcccctgtcttccagcagctccgggcctgctcgctaggcccgggaggcgcaggcgcaggcgcagtgggggtgagggcgcgtgggggcgcacagcctctggtgcacatggcttcctccccggcggtggacgtgtcctgcaggcggcgggagaagcggcggcagctggacgcgcgccgcagcaagtgccgcatccgcctgggcggccacatggagcagtggtgcctcctcaaggagcggctgggcttctccctgcactcgcagctcgccaagttcctgttggaccggtacacttcttcaggctgtgtcctctgtgcaggtcctgagcctttgcctccaaaaggtctgcagtatctggtgctcttgtctcatgcccacagccgagagtgcagcctggtgcccgggcttcgggggcctggcggccaagatggggggcttgtgtgggagtgctcagcaggccataccttctcctggggaccctctttgagccctacaccttcagaggcacccaagccagcctcccttccacatactactcggagaagttggtgttccgaggccacgagtgggcaggagcttgcagatttggaatctgagcatgatgagaggactcaagaggccaggttgcccaggagggtgggacccccaccagagaccttcccacctccaggagaggaagagggtgaggaagaagaggacaatgatgaggatgaagaggagatgctcagtgatgccagcttatggacctacagctcctccccagatgatagtgagcctgatgcccccagactactgccttcccctgtcacctgcacacctaaagagggggagacaccaccagcccctgcagcactctccagtcctcttgctgtgccggccttgtcagcatcctcattgagttccagagctcctccacctgcagaagtcagggtgcagccacagctcagcaggacccctcaagcggcccagcagactgaggccctggccagcactgggagtcaggcccagtctgctccaaccccggcctgggatgaggacactgcacaaattggccccaagagaattaggaaagctgccaaaagagagctgatgccttgtgacttccctggctgtggaaggatcttctccaaccggcagtatttgaatcaccacaaaaagtaccagcacatccaccagaagtctttctcctgcccagagccagcctgtgggaagtctttcaactttaagaaacacctgaaggagcacatgaagctgcacagtgacacccgggactacatctgtgagttctgcgcccggtctttccgcactagcagcaaccttgtcatccacagacgtatccacactggagaaaaacccctgcagtgtgagatatgcgggtttacctgccgccagaaggcttccctgaactggcaccagcgcaagcatgcagagacggtggctgccttgcgcttcccctgtgaattctgcggcaagcgctttgagaagccagacagtgttgcagcccaccgtagcaaaagtcacccagccctgcttctagcccctcaagagtcacccagtggtcccctagagccctgtcccagcatctctgcccctgggcctctgggatccagcgaggggtccaggccctctgcatctcctcaggctccaaccctgcttcctcagcaatgagctctcctccagctttggctttgggaagccagactccagggactgaaaaggagcaacaaggagagggtctgcttgagaaatgccagatgcttggtccccaggaactaaggcgacagagtgcagggtgggggcaagactgggctgtaggggagctggactactttagtcttcctaaaggacaaaataaacagtattttatgcaggaaaaaaaaaaaaaaaaaaaaaaaaaaaaaaaaaaaaaaaaaaaaaaaaaaaaaaa

SEQ ID NO: 435 - DNA, 7923 bp, Homo sapiens
agcgacggcggcggctgcggcttagtcggtggcggccggcggcggctgcgggctgagcggcgagtttccgatttaaagctgagctgcgaggaaaatggcggcgggaggatcaaaatacttgctggatggtggactcagagaccaataaaaataaactgcttgaacatcctttgactggttagccagttgctgatgtatattcaagatgagtggattaggagaaaacttggatccactggccagtgattcacgaaaacgcaaattgccatgtgatactccaggacaaggtcttacctgcagtggtgaaaaacggagacgggagcaggaaagtaaatatattgaagaattggctgagctgatatctgccaatcttagtgatattgacaatttcaatgtcaaaccagataaatgtgcgattttaaaggaaacagtaagacagatacgtcaaataaaagagcaaggaaaaactatttccaatgatgatgatgttcaaaaagccgatgtatcttctacagggcagggagttattgataaagactccttaggaccgcttttacttcaggcattggatggtttcctatttgtggtgaatcgagacggaaacattgtatttgtatcagaaaatgtcacacaatacctgcaatataagcaagaggacctggttaacacaagtgtttacaatatcttacatgaagaagacagaaaggattttcttaagaatttaccaaaatctacagttaatggagtttcctggacaaatgagacccaaagacaaaaaagccatacatttaattgccgtatgttgatgaaaacaccacatgatattctggaagacataaacgccagtcctgaaatgcgccagagatatgaaacaatgcagtgctttgccctgtctcagccacgagctatgatggaggaaggggaagatttgcaatcttgtatgatctgtgtggcacgccgcattactacaggagaaagaacatttccatcaaaccctgagagctttattaccagacatgatctttcaggaaaggttgtcaatatagatacaaattcactgagatcctccatgaggcctggctttgaagatataatccgaaggtgtattcagagattttttagtctaaatgatgggcagtcatggtcccagaaacgtcactatcaagaagcttatcttaatggccatgcagaaaccccagtatatcgattctcgttggctgatggaactatagtgactgcacagacaaaaagcaaactcttccgaaatcctgtaacaaatgatcgacatggctttgtctcaacccacttccttcagagagaacagaatggatatagaccaaacccaaatcctgttggacaagggattagaccacctatggctggatgcaacagttcggtaggcggcatgagtatgtcgccaaaccaaggcttacagatgccgagcagcagggcctatggcttggcagaccctagcaccacagggcagatgagtggagctaggtatgggggttccagtaacatagcttcattgacccctgggccaggcatgcaatcaccatcttcctaccagaacaacaactatgggctcaacatgagtagccccccacatgggagtcctggtcttgccccaaaccagcagaatatcatgatttctcctcgtaatcgtgggagtccaaagatagcctcacatcagttttctcctgttgcaggtgtgcactctcccatggcatcttctggcaatactgggaaccacagcttttccagcagctctctcagtgccctgcaagccatcagtgaaggtgtggggacttcccttttatctactctgtcatcaccaggccccaaattggataactctcccaatatgaatattacccaaccaagtaaagtaagcaatcaggattccaagagtcctctgggcttttattgcgaccaaaatccagtggagagttcaatgtgtcagtcaaatagcagagatcacctcagtgacaaagaaagtaaggagagcagtgttgagggggcagagaatcaaaggggtcctttggaaagcaaaggtcataaaaaattactgcagttacttacctgttcttctgatgaccggggtcattcctccttgaccaactcccccctagattcaagttgtaaagaatcttctgttagtgtcaccagcccctctggagtctcctcctctacatctggaggagtatcctctacatccaatatgcatgggtcactgttacaagagaagcaccggattttgcacaagttgctgcagaatgggaattcaccagctgaggtagccaagattactgcagaagccactgggaaagacaccagcagtataacttcttgtggggacggaaatgttgtcaagcaggagcagctaagtcctaagaagaaggagaataatgcacttcttagatacctgctggacagggatgatcctagtgatgcactctctaaagaactacagccccaagtggaaggagtggataataaaatgagtcagtgcaccagctccaccattcctagctcaagtcaagagaaagaccctaaaattaagacagagacaagtgaagagggatctggagacttggataatctagatgctattcttggtgatctgactagttctgacttttacaataattccatatcctcaaatggtagtcatctggggactaagcaacaggtgtttcaaggaactaattctctgggtttgaaaagttcacagtctgtgcagtctattcgtcctccatataaccgagcagtgtctctggatagccctgtttctgttggctcaagtcctccagtaaaaaatatcagtgctttccccatgttaccaaagcaacccatgttgggtgggaatccaagaatgatggatagtcaggaaaattatggctcaagtatgggtgggccaaaccgaaatgtgactgtgactcagactccttcctcaggagactggggcttaccaaactcaaaggccggcagaatggaacctatgaattcaaactccatgggaagaccaggaggagattataatacttctttacccagacctgcactgggtggctctattcccacattgcctcttcggtctaatagcataccaggtgcgagaccagtattgcaacagcagcagcagatgcttcaaatgaggcctggtgaaatccccatgggaatgggggctaatccctatggccaagcagcagcatctaaccaactgggttcctggcccgatggcatgttgtccatggaacaagtttctcatggcactcaaaataggcctcttcttaggaattccctggatgatcttgttgggccaccttccaacctggaaggccagagtgacgaaagagcattattggaccagctgcacactcttctcagcaacacagatgccacaggcctggaagaaattgacagagctttgggcattcctgaacttgtcaatcagggacaggcattagagcccaaacaggatgctttccaaggccaagaagcagcagtaatgatggatcagaaggcaggattatatggacagacatacccagcacaggggcctccaatgcaaggaggctttcatcttcagggacaatcaccatcttttaactctatgatgaatcagatgaaccagcaaggcaattttcctctccaaggaatgcacccacgagccaacatcatgagaccccggacaaacacccccaagcaacttagaatgcagcttcagcagaggctgcagggccagcagtttttgaatcagagccgacaggcacttgaattgaaaatggaaaaccctactgctggtggtgctgcggtgatgaggcctatgatgcagccccagcagggttttcttaatgctcaaatggtcgcccaacgcagcagagagctgctaagtcatcacttccgacaacagagggtggctatgatgatgcagcagcagcagcagcagcaacagcagcagcagcagcagcagcagcagcaacagcaacagcaacagcaacagcagcaacagcagcaaacccaggccttcagcccacctcctaatgtgactgcttcccccagcatggatgggcttttggcaggacccacaatgccacaagctcctccgcaacagtttccatatcaaccaaattatggaatgggacaacaaccagatccagcctttggtcgagtgtctagtcctcccaatgcaatgatgtcgtcaagaatgggtccctcccagaatcccatgatgcaacacccgcaggctgcatccatctatcagtcctcagaaatgaagggctggccatcaggaaatttggccaggaacagctccttttcccagcagcagtttgcccaccaggggaatcctgcagtgtatagtatggtgcacatgaatggcagcagtggtcacatgggacagatgaacatgaaccccatgcccatgtctggcatgcctatgggtcctgatcagaaatactgctgacatctctgcaccaggacctcttaaggaaaccactgtacaaatgacactgcactaggattattgggaaggaatcattgttccaggcatccatcttggaagaaaggaccagctttgagctccatcaagggtattttaagtgatgtcatttgagcaggactggattttaagccgaagggcaatatctacgtgtttttcccccctccttctgctgtgtatcatggtgttcaaaacagaaatgttttttggcattccacctcctagggatataattctggagacatggagtgttactgatcataaaacttttgtgtcacttttttctgccttgctagccaaaatctcttaaatacacgtaggtgggccagagaacattggaagaatcaagagagattagaatatctggtttctctagttgcagtattggacaaagagcatagtcccagccttcaggtgtagtagttctgtgttgaccctttgtccagtggaattggtgattctgaattgtcctttactaatggtgttgagttgctctgtccctattatttgccctaggctttctcctaatgaaggttttcatttgccattcatgtcctgtaatacttcacctccaggaactgtcatggatgtccaaatggctttgcagaaaggaaatgagatgacagtatttaatcgcagcagtagcaaacttttcacatgctaatgtgcagctgagtgcactttatttaaaaagaatggataaatgcaatattcttgaggtcttgagggaatagtgaaacacattcctggtttttgcctacacttacgtgttagacaagaactatgatttttttttttaaagtactggtgtcaccctttgcctatatggtagagcaataatgctttttaaaaataaacttctgaaaacccaaggccaggtactgcattctgaatcagaatctcgcagtgtttctgtgaatagatttttttgtaaatatgacctttaagatattgtattatgtaaaatatgtatatacctttttttgtaggtcacaacaactcatttttacagagtttgtgaagctaaatatttaacattgttgatttcagtaagctgtgtggtgaggctaccagtggaagagacatcccttgacttttgtggcctgggggaggggtagtgctccacagcttttccttccccaccccccagccttagatgcctcgctcttttcaatctcttaatctaaatgctttttaaagagattatttgtttagatgtaggcattttaattttttaaaaattcctctaccagaactaagcactttgttaatttggggggaaagaatagatatggggaaataaacttaaaaaaaaatcaggaatttaaaaaaacgagcaatttgaagagaatcttttggattttaagcagtccgaaataatagcaattcatgggctgtgtgtgtgtgtgtatgtgtgtgtgtgtgtgtgtatgtttaattatgttaccttttcatcccctttaggagcgttttcagattttggttgctaagacctgaatcccatattgagatctcgagtagaatccttggtgtggtttctggtgtctgctcagctgtcccctcattctactaatgtgatgctttcattatgtccctgtggattagaatagtgtcagttatttcttaagtaactcagtacccagaacagccagttttactgtgattcagagccacagtctaactgagcaccttttaaacccctccctcttctgccccctaccacttttctgctgttgcctctctttgacacctgttttagtcagttgggaggaagggaaaaatcaagtttaattccctttatctgggttaattcatttggttcaaatagttgacggaattgggtttctgaatgtctgtgaatttcagaggtctctgctagccttggtatcattttctagcaataactgagagccagttaattttaagaatttcacacatttagccaatctttctagatgtctctgaaggtaagatcatttaatatctttgatatgcttacgagtaagtgaatcctgattatttccagacccaccaccagagtggatcttattttcaaagcagtatagacaattatgagtttgccctctttcccctaccaagttcaaaatatatctaagaaagattgtaaatccgaaaacttccattgtagtggcctgtgcttttcagatagtatactctcctgtttggagacagaggaagaaccaggtcagtctgtctctttttcagctcaattgtatctgacccttctttaagttatgtgtgtggggagaaatagaatggtgctcttatctttcttgactttaaaaaaattattaaaaacaaaaaaaaaataaatttttttgcaatcctttcctcagacctggctccaggctaactggaaggcagcactcccttttttatatagtagaaaaatgaagtttattataagtttttatattttctacttgttcatttggtgcaaactcaagatttcttttaataggtgcagtctttgagataatttgtttttacctgtattgccctttatcttttttaggtaattctttgtactcctgctgtctacctctcctcacaccccagcaccccccattttttcaaaccttggtatctgttgggtgaacagtataatcttttcatctgcttttagaatgtgggatatttccagtacctactttttttttttttttttgctgaatccaaagatatataaataaaatatatatattttataaagatcagaatgatataaaggagatacatgtttcttcctttaaaaaataaacggaagttacattgttaatgttcatattatgatgccacttttctaaactgcatctggattgaaaggtgtaaatatcaataacagtgctacttagttatcagtatttaatatctgaggtgagttgggggtatctatattaggggtagggtattacagaagataattggcttgatgtcctagaagttctttgatccagaggtgggtgcagctgaaagtaaacagaatggattgccagttacatgtatgcctgcccagttccctttttatttgcagaagctgtgagttttgttcacaattaggttcctaggagcaaaacctcaaggattgatttattgttttcaactccaaggcacactgttaataaacgagcagggtgttttctctcttcctttctaatatatggagtttcgaagaataaaatatgagagcaatatttaaattctcaggaattgacttatactcttgagaatgaattcagtttcaatcaagtttacattatgttgcttaaaaaaatagaaattattctttatcttgcaaagaattgaaaccacatgaaatgacttatgggggatggtgagctgtgactgctttgctgaccattttggatgtcattgtaaataaaggtttctatttaaaa

SEQ ID NO: 436 - DNA, 7935 bp, Homo sapiens
agcgacggcggcggctgcggcttagtcggtggcggccggcggcggctgcgggctgagcggcgagtttccgatttaaagctgagctgcgaggaaaatggcggcgggaggatcaaaatacttgctggatggtggactcagagaccaataaaaataaactgcttgaacatcctttgactggttagccagttgctgatgtatattcaagatgagtggattaggagaaaacttggatccactggccagtgattcacgaaaacgcaaattgccatgtgatactccaggacaaggtcttacctgcagtggtgaaaaacggagacgggagcaggaaagtaaatatattgaagaattggctgagctgatatctgccaatcttagtgatattgacaatttcaatgtcaaaccagataaatgtgcgattttaaaggaaacagtaagacagatacgtcaaataaaagagcaaggaaaaactatttccaatgatgatgatgttcaaaaagccgatgtatcttctacagggcagggagttattgataaagactccttaggaccgcttttacttcaggcattggatggtttcctatttgtggtgaatcgagacggaaacattgtatttgtatcagaaaatgtcacacaatacctgcaatataagcaagaggacctggttaacacaagtgtttacaatatcttacatgaagaagacagaaaggattttcttaagaatttaccaaaatctacagttaatggagtttcctggacaaatgagacccaaagacaaaaaagccatacatttaattgccgtatgttgatgaaaacaccacatgatattctggaagacataaacgccagtcctgaaatgcgccagagatatgaaacaatgcagtgctttgccctgtctcagccacgagctatgatggaggaaggggaagatttgcaatcttgtatgatctgtgtggcacgccgcattactacaggagaaagaacatttccatcaaaccctgagagctttattaccagacatgatctttcaggaaaggttgtcaatatagatacaaattcactgagatcctccatgaggcctggctttgaagatataatccgaaggtgtattcagagattttttagtctaaatgatgggcagtcatggtcccagaaacgtcactatcaagaagcttatcttaatggccatgcagaaaccccagtatatcgattctcgttggctgatggaactatagtgactgcacagacaaaaagcaaactcttccgaaatcctgtaacaaatgatcgacatggctttgtctcaacccacttccttcagagagaacagaatggatatagaccaaacccaaatcctgttggacaagggattagaccacctatggctggatgcaacagttcggtaggcggcatgagtatgtcgccaaaccaaggcttacagatgccgagcagcagggcctatggcttggcagaccctagcaccacagggcagatgagtggagctaggtatgggggttccagtaacatagcttcattgacccctgggccaggcatgcaatcaccatcttcctaccagaacaacaactatgggctcaacatgagtagccccccacatgggagtcctggtcttgccccaaaccagcagaatatcatgatttctcctcgtaatcgtgggagtccaaagatagcctcacatcagttttctcctgttgcaggtgtgcactctcccatggcatcttctggcaatactgggaaccacagcttttccagcagctctctcagtgccctgcaagccatcagtgaaggtgtggggacttcccttttatctactctgtcatcaccaggccccaaattggataactctcccaatatgaatattacccaaccaagtaaagtaagcaatcaggattccaagagtcctctgggcttttattgcgaccaaaatccagtggagagttcaatgtgtcagtcaaatagcagagatcacctcagtgacaaagaaagtaaggagagcagtgttgagggggcagagaatcaaaggggtcctttggaaagcaaaggtcataaaaaattactgcagttacttacctgttcttctgatgaccggggtcattcctccttgaccaactcccccctagattcaagttgtaaagaatcttctgttagtgtcaccagcccctctggagtctcctcctctacatctggaggagtatcctctacatccaatatgcatgggtcactgttacaagagaagcaccggattttgcacaagttgctgcagaatgggaattcaccagctgaggtagccaagattactgcagaagccactgggaaagacaccagcagtataacttcttgtggggacggaaatgttgtcaagcaggagcagctaagtcctaagaagaaggagaataatgcacttcttagatacctgctggacagggatgatcctagtgatgcactctctaaagaactacagccccaagtggaaggagtggataataaaatgagtcagtgcaccagctccaccattcctagctcaagtcaagagaaagaccctaaaattaagacagagacaagtgaagagggatctggagacttggataatctagatgctattcttggtgatctgactagttctgacttttacaataattccatatcctcaaatggtagtcatctggggactaagcaacaggtgtttcaaggaactaattctctgggtttgaaaagttcacagtctgtgcagtctattcgtcctccatataaccgagcagtgtctctggatagccctgtttctgttggctcaagtcctccagtaaaaaatatcagtgctttccccatgttaccaaagcaacccatgttgggtgggaatccaagaatgatggatagtcaggaaaattatggctcaagtatgggtgggccaaaccgaaatgtgactgtgactcagactccttcctcaggagactggggcttaccaaactcaaaggccggcagaatggaacctatgaattcaaactccatgggaagaccaggaggagattataatacttctttacccagacctgcactgggtggctctattcccacattgcctcttcggtctaatagcataccaggtgcgagaccagtattgcaacagcagcagcagatgcttcaaatgaggcctggtgaaatccccatgggaatgggggctaatccctatggccaagcagcagcatctaaccaactgggttcctggcccgatggcatgttgtccatggaacaagtttctcatggcactcaaaataggcctcttcttaggaattccctggatgatcttgttgggccaccttccaacctggaaggccagagtgacgaaagagcattattggaccagctgcacactcttctcagcaacacagatgccacaggcctggaagaaattgacagagctttgggcattcctgaacttgtcaatcagggacaggcattagagcccaaacaggatgctttccaaggccaagaagcagcagtaatgatggatcagaaggcaggattatatggacagacatacccagcacaggggcctccaatgcaaggaggctttcatcttcagggacaatcaccatcttttaactctatgatgaatcagatgaaccagcaaggcaattttcctctccaaggaatgcacccacgagccaacatcatgagaccccggacaaacacccccaagcaacttagaatgcagcttcagcagaggctgcagggccagcagtttttgaatcagagccgacaggcacttgaattgaaaatggaaaaccctactgctggtggtgctgcggtgatgaggcctatgatgcagccccaggtgagctcccagcagggttttcttaatgctcaaatggtcgcccaacgcagcagagagctgctaagtcatcacttccgacaacagagggtggctatgatgatgcagcagcagcagcagcagcaacagcagcagcagcagcagcagcagcagcaacagcaacagcaacagcaacagcagcaacagcagcaaacccaggccttcagcccacctcctaatgtgactgcttcccccagcatggatgggcttttggcaggacccacaatgccacaagctcctccgcaacagtttccatatcaaccaaattatggaatgggacaacaaccagatccagcctttggtcgagtgtctagtcctcccaatgcaatgatgtcgtcaagaatgggtccctcccagaatcccatgatgcaacacccgcaggctgcatccatctatcagtcctcagaaatgaagggctggccatcaggaaatttggccaggaacagctccttttcccagcagcagtttgcccaccaggggaatcctgcagtgtatagtatggtgcacatgaatggcagcagtggtcacatgggacagatgaacatgaaccccatgcccatgtctggcatgcctatgggtcctgatcagaaatactgctgacatctctgcaccaggacctcttaaggaaaccactgtacaaatgacactgcactaggattattgggaaggaatcattgttccaggcatccatcttggaagaaaggaccagctttgagctccatcaagggtattttaagtgatgtcatttgagcaggactggattttaagccgaagggcaatatctacgtgtttttcccccctccttctgctgtgtatcatggtgttcaaaacagaaatgttttttggcattccacctcctagggatataattctggagacatggagtgttactgatcataaaacttttgtgtcacttttttctgccttgctagccaaaatctcttaaatacacgtaggtgggccagagaacattggaagaatcaagagagattagaatatctggtttctctagttgcagtattggacaaagagcatagtcccagccttcaggtgtagtagttctgtgttgaccctttgtccagtggaattggtgattctgaattgtcctttactaatggtgttgagttgctctgtccctattatttgccctaggctttctcctaatgaaggttttcatttgccattcatgtcctgtaatacttcacctccaggaactgtcatggatgtccaaatggctttgcagaaaggaaatgagatgacagtatttaatcgcagcagtagcaaacttttcacatgctaatgtgcagctgagtgcactttatttaaaaagaatggataaatgcaatattcttgaggtcttgagggaatagtgaaacacattcctggtttttgcctacacttacgtgttagacaagaactatgatttttttttttaaagtactggtgtcaccctttgcctatatggtagagcaataatgctttttaaaaataaacttctgaaaacccaaggccaggtactgcattctgaatcagaatctcgcagtgtttctgtgaatagatttttttgtaaatatgacctttaagatattgtattatgtaaaatatgtatatacctttttttgtaggtcacaacaactcatttttacagagtttgtgaagctaaatatttaacattgttgatttcagtaagctgtgtggtgaggctaccagtggaagagacatcccttgacttttgtggcctgggggaggggtagtgctccacagcttttccttccccaccccccagccttagatgcctcgctcttttcaatctcttaatctaaatgctttttaaagagattatttgtttagatgtaggcattttaattttttaaaaattcctctaccagaactaagcactttgttaatttggggggaaagaatagatatggggaaataaacttaaaaaaaaatcaggaatttaaaaaaacgagcaatttgaagagaatcttttggattttaagcagtccgaaataatagcaattcatgggctgtgtgtgtgtgtgtatgtgtgtgtgtgtgtgtgtatgtttaattatgttaccttttcatcccctttaggagcgttttcagattttggttgctaagacctgaatcccatattgagatctcgagtagaatccttggtgtggtttctggtgtctgctcagctgtcccctcattctactaatgtgatgctttcattatgtccctgtggattagaatagtgtcagttatttcttaagtaactcagtacccagaacagccagttttactgtgattcagagccacagtctaactgagcaccttttaaacccctccctcttctgccccctaccacttttctgctgttgcctctctttgacacctgttttagtcagttgggaggaagggaaaaatcaagtttaattccctttatctgggttaattcatttggttcaaatagttgacggaattgggtttctgaatgtctgtgaatttcagaggtctctgctagccttggtatcattttctagcaataactgagagccagttaattttaagaatttcacacatttagccaatctttctagatgtctctgaaggtaagatcatttaatatctttgatatgcttacgagtaagtgaatcctgattatttccagacccaccaccagagtggatcttattttcaaagcagtatagacaattatgagtttgccctctttcccctaccaagttcaaaatatatctaagaaagattgtaaatccgaaaacttccattgtagtggcctgtgcttttcagatagtatactctcctgtttggagacagaggaagaaccaggtcagtctgtctctttttcagctcaattgtatctgacccttctttaagttatgtgtgtggggagaaatagaatggtgctcttatctttcttgactttaaaaaaattattaaaaacaaaaaaaaaataaatttttttgcaatcctttcctcagacctggctccaggctaactggaaggcagcactcccttttttatatagtagaaaaatgaagtttattataagtttttatattttctacttgttcatttggtgcaaactcaagatttcttttaataggtgcagtctttgagataatttgtttttacctgtattgccctttatcttttttaggtaattctttgtactcctgctgtctacctctcctcacaccccagcaccccccattttttcaaaccttggtatctgttgggtgaacagtataatcttttcatctgcttttagaatgtgggatatttccagtacctactttttttttttttttttgctgaatccaaagatatataaataaaatatatatattttataaagatcagaatgatataaaggagatacatgtttcttcctttaaaaaataaacggaagttacattgttaatgttcatattatgatgccacttttctaaactgcatctggattgaaaggtgtaaatatcaataacagtgctacttagttatcagtatttaatatctgaggtgagttgggggtatctatattaggggtagggtattacagaagataattggcttgatgtcctagaagttctttgatccagaggtgggtgcagctgaaagtaaacagaatggattgccagttacatgtatgcctgcccagttccctttttatttgcagaagctgtgagttttgttcacaattaggttcctaggagcaaaacctcaaggattgatttattgttttcaactccaaggcacactgttaataaacgagcagggtgttttctctcttcctttctaatatatggagtttcgaagaataaaatatgagagcaatatttaaattctcaggaattgacttatactcttgagaatgaattcagtttcaatcaagtttacattatgttgcttaaaaaaatagaaattattctttatcttgcaaagaattgaaaccacatgaaatgacttatgggggatggtgagctgtgactgctttgctgaccattttggatgtcattgtaaataaaggtttctatttaaaa

SEQ ID NO: 437 - DNA, 2073 bp, Homo sapiens
ggcgctactgaggccgcggagccggactgcggttggggcgggaagagccggggccgtggctgacatggagcagccctgctgctgaggccgcgccctccccgccctgaggtgggggcccaccaggatgagcaagctgcccagggagctgacccgagacttggagcgcagcctgcctgccgtggcctccctgggctcctcactgtcccacagccagagcctctcctcgcacctccttccgccgcctgagaagcgaagggccatctctgatgtccgccgcaccttctgtctcttcgtcaccttcgacctgctcttcatctccctgctctggatcatcgaactgaataccaacacaggcatccgtaagaacttggagcaggagatcatccagtacaactttaaaacttccttcttcgacatctttgtcctggccttcttccgcttctctggactgctcctaggctatgccgtgctgcggctccggcactggtgggtgattgcggtcacgacgctggtgtccagtgcattcctcattgtcaaggtcatcctctctgagctgctcagcaaaggggcatttggctacctgctccccatcgtctcttttgtcctcgcctggttggagacctggttccttgacttcaaagtcctaccccaggaagctgaagaggagcgatggtatcttgccgcccaggttgctgttgcccgtggacccctgctgttctccggtgctctgtccgagggacagttctattcacccccagaatcctttgcagcgtctgacaatgaatcagatgaagaagttgctgggaagaaaagtttctctgctcaggagcgggagtacatccgccaggggaaggaggccacggcagtggtggaccagatcttggcccaggaagagaactggaagtttgagaagaataatgaatatggggacaccgtgtacaccattgaagttccctttcacggcaagacgtttatcctgaagaccttcctgccctgtcctgcggagctcgtgtaccaggaggtgatcctgcagcccgagaggatggtgctgtggaacaagacagtgactgcctgccagatcctgcagcgagtggaagacaacaccctcatctcctatgacgtgtctgcaggggctgcgggcggcgtggtctccccaagggacttcgtgaatgtccggcgcattgagcggcgcagggaccgatacttgtcatcagggatcgccacctcacacagtgccaagcccccgacgcacaaatatgtccggggagagaatggccctgggggcttcatcgtgctcaagtcggccagtaacccccgtgtttgcacctttgtctggattcttaatacagatctcaagggccgcctgccccggtacctcatccaccagagcctcgcggccaccatgtttgaatttgcctttcacctgcgacagcgcatcagcgagctgggggcccgggcgtgactgtgccccctcccaccctgcgggccagggtcctgtcgccaccacttccagagccagaaagggtgccagttgggctcgcactgcccacatgggacctggccccaggctgtcaccctccaccgagccacgcagtgcctggagttgactgactgagcaggctgtggggtggagcactggactccggggccccactggctggaggaagtggggtctggcctgttgatgtttacatggcgccctgcctcctggaggaccagattgctctgccccaccttgccagggcagggtctgggctgggcacctgacttggctggggaggaccagggccctgggcagggcagggcagcctgtcacccgtgtgaagatgaaggggctcttcatctgcctgcgctctcgtcggtttttttaggattattgaaagagtctgggacccttgttggggagtgggtggcaggtgggggtgggctgctggccatgaatctctgcctctcccaggctgtccccctcctcccagggcctcctgggggacctttgtattaagccaattaaaaacatgaatttaaaaaaaaaaaaaaaaaaaaaaaaaaaaaaaaaaaaaaaaaaaaaaaaaa

SEQ ID NO: 438 - DNA, 1495 bp, Homo sapiens
gcatcccgggactgaacccctcctccctttcacagattacctcatccgagcaagattcctccctccctccctcctagagacctgatcccgccacatccccgcctccctctctgggcagatgtgttactcctagggcagttttcctctcgggcgtctctcgggtgatggcctcatccagggccacgttctcctggcccttggggatcgtgtcccttccagcaccttgctttcgaaaacccgatgaaccctcgcgccatccccgggccaggtccctatactgccagccactcccccttccttcacctccaccctctacccccaccccaagcagaccgatcctcccccatcccgcccttctcttctcgtcatttcattattgatccaccttttcctaggccaatcctggggcttggaaggggtgggggaagccaggttggggtgaggagagtagataagggacagttatactttagtgtggtggcggtggttgctttgggatgggagaaaaaggattatcaagcaaagttattccttagaaaggacttggggttgtctctgattcttgtaaggggacccaaggtggatgaagggtcagagcgttgccccttccccattagtactggggcaagaacggagttgcttctataaacattattcggcccccttcagcaaaaaggaaagttgcccaaggaagggaagttgagttcaggttcagccagtggcgttgcgcatttgttttccattggatgcagaaggggggagttcgaattgtagaggggggaggatggcatgggggatgctaggaggaggaagagcagctgctaggggctgaagcgaaggggggtagggggttgctgctctggagtgctcttgattgaaacagaaagggaaagataacaaccagccgtttcctgcgtgctctgccgttggtgcacacaaaatatcctgggcaaaccccttgtcccctattgtgccccgcacccctttagatttacggaaagatcctgggaagaaggggagggaggagatcccaaggaccctggcccctcctttcaaggagctggcattttttagttgttagtcttcctgcctcctttttttttaatcgtttctaaggcagcctgatcaggagactgacaacaacccgccttctgacagagcaaggaggacatgatgggggcgtgttccttgctatgtagctagctgcagcgtcccctttccctgcctctttctgctctatctccacctccttttcccagccttcagaaggcagctgcagtcagcagggttgtttgagactatttattggttgctgtagattattatttttttttgaaaggccaattctgtattttttaagctaacaacacagatcccatgtagttggagaaccaaaggccacatacatgacaaaaagactgaaccgttcaggttacttgcatggagttggtgcttaaatgtgagttgattttgcttttttaaaagatacagcagc

SEQ ID NO: 439 - DNA, 1596 bp, Homo sapiens
gagcgcgcgggttgattcgtccttcctcagccgcgggtgatcgtagctcggaaatggcgggatttggtgctatggagaaatttttggtagaatataagagtgcagtggagaagaaactggcagagtacaaatgtaacaccaacacagcaattgaactaaaattagtgaaactgcttttggttacaagggtctaaagatcctgttatactatattgctggtagcctgtcaacaatgttccgtgttgaatatgcatctaaagttgatgagaactttgactgtgtagaggcagatgatgttgagggcaaaattagacaaatcattccacctggattttgcacaaacacgaatgatttcctttctttactggaaaaggaagttgatttcaagccattcggaaccttacttcatacctactcagttctcagtccaacaggaggagaaaactttacctttcagatatataaggctgacatgacatgtagaggctttcgagaatatcatgaaaggcttcagacctttttgatgtggtttattgaaactgctagctttattgacgtggatgatgaaagatggcactactttctagtatttgagaagtataataaggatggagctacgctctttgcgaccgtaggctacatgacagtctataattactatgtgtacccagacaaaacccggccacgtgtaagtcagatgctgattttgactccatttcaaggtcaaggccatggtgctcaacttcttgaaacagttcatagatactacactgaatttcctacagttcttgatattacagcggaagatccatccaaaagctatgtgaaattacgagactttgtgcttgtgaagctttgtcaagatttgccctgtttttcccgggaaaaattaatgcaaggattcaatgaagatatggcgatagaggcacaacagaagttcaaaataaataagcaacacgctagaagggtttatgaaattcttcgactactggtaactgacatgagtgatgccgaacaatacagaagctacagactggatattaaaagaagactaattagcccatataagaaaaagcagagagatcttgctaagatgagaaaatgtctcagaccagaagaactgacaaaccagatgaaccaaatagaaataagcatgcaacatgaacagctggaagagagttttcaggaactagtggaagattaccggcgtgttattgaacgacttgctcaagagtaaagattatactgctctgtacaggaagcttgcaaattttctgtacaatgtgctgtgaaaaatctgatgactttaattttaaaatcttgtgacattttgcttatactaaaagttatctatctttagttgaatattttcttttggagagattgtatattttaaaatactgtttagagtttatgagcatatattgcatttaaagaaagataaagcttctgaaatactactgcaattgcttcccttcttaaacagtataataaatgcttagttgtgatatgttaatgtgtgatgatatgattcttaaatacttacaataaacctcattcttaaatacttaaaaaaaaaaaaaaaaaaaaaaaaaa

SEQ ID NO: 440 - DNA, 1672 bp, Homo sapiens
gagcgcgcgggttgattcgtccttcctcagccgcgggtgatcgtagctcggaaatggcgggatttggtgctatggagaaatttttggtagaatataagagtgcagtggagaagaaactggcagagtacaaatgtaacaccaacacagcaattgaactaaaattagttcgttttcctgaagatcttgaaaatgacattagaactttctttcctgagtatacccatcaactctttggggatgatgaaactgcttttggttacaagggtctaaagatcctgttatactatattgctggtagcctgtcaacaatgttccgtgttgaatatgcatctaaagttgatgagaactttgactgtgtagaggcagatgatgttgagggcaaaattagacaaatcattccacctggattttgcacaaacacgaatgatttcctttctttactggaaaaggaagttgatttcaagccattcggaaccttacttcatacctactcagttctcagtccaacaggaggagaaaactttacctttcagatatataaggctgacatgacatgtagaggctttcgagaatatcatgaaaggcttcagacctttttgatgtggtttattgaaactgctagctttattgacgtggatgatgaaagatggcactactttctagtatttgagaagtataataaggatggagctacgctctttgcgaccgtaggctacatgacagtctataattactatgtgtacccagacaaaacccggccacgtgtaagtcagatgctgattttgactccatttcaaggtcaaggccatggtgctcaacttcttgaaacagttcatagatactacactgaatttcctacagttcttgatattacagcggaagatccatccaaaagctatgtgaaattacgagactttgtgcttgtgaagctttgtcaagatttgccctgtttttcccgggaaaaattaatgcaaggattcaatgaagatatggcgatagaggcacaacagaagttcaaaataaataagcaacacgctagaagggtttatgaaattcttcgactactggtaactgacatgagtgatgccgaacaatacagaagctacagactggatattaaaagaagactaattagcccatataagaaaaagcagagagatcttgctaagatgagaaaatgtctcagaccagaagaactgacaaaccagatgaaccaaatagaaataagcatgcaacatgaacagctggaagagagttttcaggaactagtggaagattaccggcgtgttattgaacgacttgctcaagagtaaagattatactgctctgtacaggaagcttgcaaattttctgtacaatgtgctgtgaaaaatctgatgactttaattttaaaatcttgtgacattttgcttatactaaaagttatctatctttagttgaatattttcttttggagagattgtatattttaaaatactgtttagagtttatgagcatatattgcatttaaagaaagataaagcttctgaaatactactgcaattgcttcccttcttaaacagtataataaatgcttagttgtgatatgttaatgtgtgatgatatgattcttaaatacttacaataaacctcattcttaaatacttaaaaaaaaaaaaaaaaaaaaaaaaaa

SEQ ID NO: 441 - DNA, 6390 bp, Homo sapiens
cccgcgcagacttgtctccggccagtcgcgcgtgggtagaggccttaggcgggcgttgcgaagggttgtttgctagagttcggaccttgttacggcgcgaagttccctccttggggcgggggaaaggtaccgcacccgctacctagtgtgaatgaactgtggcgtgggctgctaagggcaggctgcggagtacccgggccgtggccatgaactcacccgtggaccctggcgctaggcaggcgttgaggaagaagccacccgagcggactcccgaggacttaaatactatttattcttatcttcatggaatggaaatattatcaaatctcagggaacatcagcttagattaatgtctgcaagagcacgctatgagagatacagtggcaatcaggttctcttttgttcagaaacgattgccagatgttggtatatcctactttctggatctgtgcttgtgaaaggctccatggtcttgcctccttgcagttttggtaagcagtttggaggaaaaagaggatgtgattgtcttgtattagagccttcagaaatgattgtggtagagaatgccaaagataatgaagatagtattctacaaagagaaattcctgccagacaatcccgaagaagatttcggaaaattaactataaaggagagcgccaaaccattactgatgatgtggaggttaacagctatctttctcttccagctgatcttaccaagatgcatctcacagaaaaccctcatccacaggtgactcatgtgtcttctagtcagtctggttgtagcattgccagtgactctggaagcagcagtttatctgatatctatcaggctacggagagtgaggtaggagatgtagatttgacacgtcttccagaaggacctgttgattctgaggatgacgaagaggaagatgaagagattgatcgaacagatccattgcaggggcgagatcttgttcgagaatgtcttgaaaaagaacctgcagacaaaactgatgatgacattgaacaattgctggagtttatgcaccagctccctgcatttgcaaacatgaccatgtctgtaaggagagaactctgctcagtgatgatttttgaagtggtagagcaggctggagctattattcttgaagatgggcaagagcttgactcatggtatgttattttaaacggcactgtggaaatcagtcatccagatggaaaagttgaaaatttgtttatgggaaatagttttggaattactcccactctggataagcagtacatgcatggaattgtcaggactaaagtagatgattgtcagtttgtctgcatagcccagcaagattattggagaattttaaaccatgtggaaaaaaatacccataaagttgaggaagagggagaaattgttatggtacatgagcatcgggaactagaccggagtggaaccaggaaaggacacattgtgatcaaggcaacacctgagcgtctcataatgcatttaatagaagaacattccatcgtggatccaacttatatagaagattttctattaacttacaggacatttcttgaaagtcctttggatgttgggatcaaactattggaatggtttaagatcgacagcttaagagataaggtgacacggattgtattattatgggtaaataatcattttaatgattttgaaggtgaccctgctatgactcgatttctagaggaatttgaaaaaaatctggaagatacaaagatgaatggtcatctccggttattgaatattgcctgtgctgcaaaggctaagtggagacaggttgtgctgcaaaaggcttcccgcgagtcccctctacaattcagccttaatggagggagtgagaagggatttggtatttttgttgaaggagtagaacctggtagcaaagctgctgattcaggactgaaacgtggtgatcagattatggaagtaaatggacaaaactttgagaatattacatttatgaaagccgttgaaattttgaggaataatactcatcttgcacttactgtgaagaccaacatttttgtgttcaaagagttactttttaggactgaacaagagaaatctggtgttcctcatattcccaaaattgctgaaaaaaaaagtaatcgccattctatccagcatgtgccaggagatattgaacagacatcacaggagaaaggaagtaagaaagttaaagcaaatactgtttcaggtggaagaaacaaaatcaggaagattttggataaaacacgatttagtatcttgcctccaaagctatttagtgatggaggcctaagccaatcacaagatgacagcattgtgggaacaaggcactgtaggcatagtctggctataatgcccatccctggaacactctcatccagcagccctgatctcctgcagcctaccaccagtatgttggatttttccaatccttcagatatccctgatcaagttataagagttttcaaagtggatcagcaaagttgctacattatcatcagtaaagacaccacagctaaagaagtagtttttcatgctgttcatgaatttggtttgaccggtgcatccgacacatattctctctgtgaagtttctgttactcctgagggtgtcataaaacagagaagacttccagatcagttctccaaattagctgatagaattcaactcaatggaaggtattacttaaaaaataacatggaaacagaaaccttatgttcagatgaagatgctcaagaactagttaaggaaagccagctatccatgctgcagctcagtaccattgaggtggccacccagctgtcaatgagggactttgatttgtttcgtaatattgaaccgactgagtacatcgatgacctttttaagttaaattccaaaacaggaaatactcatttgaagaggtttgaggacattgtaaaccaagagacattctgggttgcctcagaaattttaactgaagcaaatcagctcaaacgaatgaagattattaagcattttattaaaattgcacttcattgtcgagaatgtaagaacttcaattccatgtttgcaataataagtggcttgaacctggcatctgtagcaagactcagaggaacttgggaaaagttaccaagcaaatacgagaaacatcttcaagatctacaagacatttttgatccatctagaaacatggcaaagtatagaaatattcttagtagtcaaagtatgcagcctccaattattccactcttccctgttgtcaagaaagatatgacatttctacatgaaggaaatgactccaaagtagatggtttagtaaactttgagaagttaagaatgatttccaaggaaatccgccaagttgttcgaatgacttctgctaacatggacccagctatgatgtttcgacagaggtcactgagtcaaggaagcacaaattcaaacatgctggatgttcagggaggtgctcacaaaaaaagggcacgccgcagctctctgcttaatgccaagaagctatatgaggatgcccaaatggcaaggaaggtgaagcagtatctttccagtctcgatgtagagacagatgaggagaagttccagatgatgtcattacagtgggagcctgcatatggtaccttgaccaagaatttaagtgagaaaagatcagccaaatcatctgaaatgtctccagtgcctatgaggtcagctggccaaacaactaaagcccacttgcatcaaccccacagagtaagccaggtgcttcaggtgccagctgttaatttgcaccccatcaggaagaagggacaaacaaaagaccctgcactgaatacaagtttacctcagaaagttttaggaacaactgaagaaataagtggtaagaagcatacagaagacactatttctgtggcgtcatctttacattctagtcctcctgcatctcctcaaggctcccctcacaaaggttacacacttattccatcagctaaatctgacaacttgtctgactccagccatagtgagatttcttcacggtccagcatcgtgagcaattgttctgttgactccatgtctgcagctctacaggatgaacggtgttcctctcaggccctggcagtccctgaatccactggggcattggaaaagacagagcacgcttcagggataggagatcatagtcaacatggccctgggtggacactcttgaagccatctctaatcaagtgtttagctgtctcatcgtctgtgagcaatgaagagatttctcaagagcatatcattatagaagcagctgacagtggtcgtggaagttggacttcgtgttcaagcagctcccatgacaacttccaaagccttccaaacccaaaaagctgggattttttgaactcttacagacatacccatttggatgaccccattgctgaagttgaacccactgactctgagccctattcctgttctaaaagctgctctagaacttgtgggcagtgtaaaggaagcctagagagaaagagttggacctcctccagttctctgtctgacacgtatgaaccaaactatgggacagttaaacggagagtattggagagcaccccagctgagtcatctgaaggcttggaccccaaggatgccactgacccagtttataaaactgtcacttcaagtacagaaaagggcttgattgtgtactgtgtcacctcacccaagaaggacgataggtatagggagccacctcccactcctccaggatatttggggatttctttagcggacctaaaggaaggaccccacacacacctaaaacctccagattatagtgtggcagtgcagaggtcaaagatgatgcataacagcctctctagactgccaccagcttctctcagtagcaacctcgtggcctgtgttccatcgaagattgtaactcagcctcagaggcataatttgcagccattccatcctaaactaggagatgtgactgatgcagatagcgaagcagatgaaaatgaacaagtttcagcagtctagcctttggatgacctatttgaaaaccactgaaagtcgtggaggaatgggcaagaaccacctcatgattctgcaggccattgctaacgaacagctcattgctacaaccagtccagaggttttattccctctactccgagcaatgaaatagacctgagttatgcttcctttcatttaatttctgcagataaatagtttcctgagcaatggatgctatgcctggataccagtctccactttgcacgccggaactgccttgggaccacagttacagaaaaaatgtaaactcagagtgatccttgtgtatattgctatagatttttctttaacaagctattttaaagataatggcattattatttccaagccatagcttgggctgaaggacaaattgaaattgtctgccaataccaaggatattcttgtatatttgaaaaataacttattatttgaattgttgtggttttgtttgtatttgagagctcttgttagctgatattcatgtttgaggtcataaaattgtctctggtctgaccaaacagaagtcatctttacagaggtgatatgcttgatctacacagagatgtgacttgatctgtagcaccaatacaatgtaggtctcagtttgagagaaataggaagccctttgcagttgaggtgttaggaacctgctggtcatggtgtggaaggccaaatgaagctgccacagggtttcttgtcagtcctttgggaaatgggagggagtagtttggggaggagggtgggaaccctaatttccacagaatgaaattttgatgttaaatgacatgtatacaaattcttccttaagtgaaagttatgctgcatcgaattgtaactgaaagtatagatccaacaaatagagactgggttctagagagttctggtctatagaaacccaaaactaaaatctctcataactcaagtatggaatactttttttaaagaaattcttatcatgggtgttgtaataatgaagacgaatttgactttatgcagtgttctgcagcatgcctcccccacatctcatagcaccaggttgtgtctgacctgacataccctgcagctctcagctggctgcagtaacattttgtgggagaaagaggagctggagttacagaaatgattgtctcttggttctcagtttttagcccttgagaggacatacttttccagcctcatgggtatggcactcttaattaaaatttcagtggctgtttactggatgaggcagatttttcacatttttgccaattaaatatattttatatatagtaaggttaattttttcagtttttttaatgtaaaagcaagtgaaattttaataaacttctgtaatttcccaaaaaaaaaaaaaaaaaaa

SEQ ID NO: 442 - DNA, 2620 bp, Homo sapiens
gcgcacgtacacacgaagggcctgctgactacatctgccggaaagcatcgggccaagcctttctccattttgcggtctaggaagtagcagaggccccttcctgtagggagttgccatggagacgcggtggggcaccgacggagttctaatgacggccgtgattggtgcaggatcctgctaatctcaggaaggcccgtagagaagggcagacactggcctcagatacctgacctggtaccctctatgaggcctgcggtgctgggctccccagaccgagcacccccagaagatgaggggcctgtcatggtgaagctagaggactctgaggaggagggtgaggctgccttatgggacccaggccctgaagctgcacgcctgcgtttccggtgcttccgctatgaggaggccacagggccccaagaggccctggcccagctccgagagctgtgtcgccagtggctgcgtccagaggtacgctccaaggagcagatgctggagctgttggtgctggagcagttcctgggcgcactgccccctgagatccaggcccgtgtgcaggggcagcggccaggcagccccgaggaggctgctgccctagtagatgggctgcgccgggagccgggcggaccccggagatgggtcacagtccaggtgcagggccaggaggtcctatcagagaagatggagccctccagtttccagcccctacctgaaactgagcctccaactccagagcctgggcccaagacacctcctaggactatgcaggaatcaccactgggcctgcaggtgaaagaggagtcagaggttacagaggactcagatttcctggagtctgggcctctagctgccacccaggagtctgtacccaccctcctgcctgaggaggcccagagatgtgggaccgtgctggaccagatctttccccacagcaagactgggcctgagggtccctcatggagggagcaccccagggccctgtggcatgaggaagctgggggcatcttctccccagggttcgcgctgcagctaggcagcatctccgcaggtccaggtagtgtaagccctcacctccacgtcccctgggacctcggcatggctggcctttctggccagatccaatcaccctcccgcgaaggtggctttgcgcatgcgcttctgctccccagcgatctgaggagtgaacaggaccccacggacgaggatccctgccggggtgtgggccctgctctgatcaccacccgctggcgctcccccaggggccggagccggggccgccccagcactgggggcggggtggttaggggcggccgttgcgatgtatgtggcaaggtgttcagccaacgcagcaacctgctgaggcaccagaagatccacacgggtgagcgaccattcgtgtgcagcgagtgcggccgcagcttcagccgcagctcgcacctgctgcgccaccagcttacgcacaccgaggagcggccgttcgtgtgcggcgactgtggccagggcttcgtgcgcagcgcgcgcctggaagagcatcggagagtgcacacgggcgaacagcctttccgttgcgctgagtgcggccagagcttccggcagcgctccaatctgctgcagcaccagcgcatccacggcgatcccccgggccctggcgctaagcccccggcccctcctggtgcgcccgagcctcccggcccctttccgtgcagcgagtgccgcgagagcttcgcgcggcgcgccgtgctgctggagcaccaggcggtacacacgggcgacaagtcctttggctgcgtcgagtgcggcgagcgcttcggccgccgctcagtgctgctgcagcaccggcgcgtgcacagtggcgagcggcccttcgcctgtgccgagtgcggccagagcttccggcagcgctccaacctgacgcagcaccggcgcatccacaccggggagcggcccttcgcctgcgccgagtgtggcaaggccttccgccagcggcctacgctcacgcagcatctccgcgtacacacgggcgagaaaccctttgcctgccccgagtgtggccagcgcttcagccagcgcctcaagctcacgcgtcatcagaggacacacaccggcgaaaagccctaccactgcggtgagtgcggcctgggcttcacgcaggtctcgcggctcaccgagcaccagcgcatccacacgggcgaacggcccttcgcctgccccgagtgcggccagagctttcggcagcacgccaacctcacccagcaccggcgcatccacacgggtgaacggccctacgcatgccctgagtgtggcaaggccttccgccagcggcccacgctcacgcagcatctgcgcacccaccgacgagagaagcccttcgcctgccaggactgtggccgccgcttccaccagagcaccaagctcattcagcaccagcgcgtccacagcgccgagtagctccagccgggacgcactgtgtccgccatggtcagaacacctacctcccctggttattgtgaggctggcgattacataagtataagcaggtccgcccagggcttggctactgtaggtgtccaataaacagtagatggaaactgggtctccacccaaaaaaaaaaaaaaaaaa

SEQ ID NO: 443 - DNA, 2938 bp, Homo sapiens
gcgcacgtacacacgaagggcctgctgactacatctgccggaaagcatcgggccaagcctttctccattttgcggtctaggaagtagcagaggccccttcctgtagggagttgccatggagacgcggtggggcaccgacggagttctaatgacggccgtgattggtgcaggatcctgctaatctcaggaaggcccgtagagaagtgaggaaaacgtggtggggggcatgcgcgatctggtaggcggtgctgccgtctgttgtacctgagaggcttgcgcatgccgacgcacggattcgaggcggggagcatgggaagaagcggccaggagtatgacctgatcattgcgaccaccgctaggggaagggaggagagggtgtagaaacggggacgagggtgggggaagggcaaggaggcgctcgagctggtgcgcggagcatcctgggagacgtagtccagcgggagggggaagtcgaagactgcgcgtgctcaggagcgcggagcggcccgctgagcgcagaggggcagacactggcctcagatacctgacctggtaccctctatgaggcctgcggtgctgggctccccagaccgagcacccccagaagatgaggggcctgtcatggtgaagctagaggactctgaggaggagggtgaggctgccttatgggacccaggccctgaagctgcacgcctgcgtttccggtgcttccgctatgaggaggccacagggccccaagaggccctggcccagctccgagagctgtgtcgccagtggctgcgtccagaggtacgctccaaggagcagatgctggagctgttggtgctggagcagttcctgggcgcactgccccctgagatccaggcccgtgtgcaggggcagcggccaggcagccccgaggaggctgctgccctagtagatgggctgcgccgggagccgggcggaccccggagatgggtcacagtccaggtgcagggccaggaggtcctatcagagaagatggagccctccagtttccagcccctacctgaaactgagcctccaactccagagcctgggcccaagacacctcctaggactatgcaggaatcaccactgggcctgcaggtgaaagaggagtcagaggttacagaggactcagatttcctggagtctgggcctctagctgccacccaggagtctgtacccaccctcctgcctgaggaggcccagagatgtgggaccgtgctggaccagatctttccccacagcaagactgggcctgagggtccctcatggagggagcaccccagggccctgtggcatgaggaagctgggggcatcttctccccagggttcgcgctgcagctaggcagcatctccgcaggtccaggtagtgtaagccctcacctccacgtcccctgggacctcggcatggctggcctttctggccagatccaatcaccctcccgcgaaggtggctttgcgcatgcgcttctgctccccagcgatctgaggagtgaacaggaccccacggacgaggatccctgccggggtgtgggccctgctctgatcaccacccgctggcgctcccccaggggccggagccggggccgccccagcactgggggcggggtggttaggggcggccgttgcgatgtatgtggcaaggtgttcagccaacgcagcaacctgctgaggcaccagaagatccacacgggtgagcgaccattcgtgtgcagcgagtgcggccgcagcttcagccgcagctcgcacctgctgcgccaccagcttacgcacaccgaggagcggccgttcgtgtgcggcgactgtggccagggcttcgtgcgcagcgcgcgcctggaagagcatcggagagtgcacacgggcgaacagcctttccgttgcgctgagtgcggccagagcttccggcagcgctccaatctgctgcagcaccagcgcatccacggcgatcccccgggccctggcgctaagcccccggcccctcctggtgcgcccgagcctcccggcccctttccgtgcagcgagtgccgcgagagcttcgcgcggcgcgccgtgctgctggagcaccaggcggtacacacgggcgacaagtcctttggctgcgtcgagtgcggcgagcgcttcggccgccgctcagtgctgctgcagcaccggcgcgtgcacagtggcgagcggcccttcgcctgtgccgagtgcggccagagcttccggcagcgctccaacctgacgcagcaccggcgcatccacaccggggagcggcccttcgcctgcgccgagtgtggcaaggccttccgccagcggcctacgctcacgcagcatctccgcgtacacacgggcgagaaaccctttgcctgccccgagtgtggccagcgcttcagccagcgcctcaagctcacgcgtcatcagaggacacacaccggcgaaaagccctaccactgcggtgagtgcggcctgggcttcacgcaggtctcgcggctcaccgagcaccagcgcatccacacgggcgaacggcccttcgcctgccccgagtgcggccagagctttcggcagcacgccaacctcacccagcaccggcgcatccacacgggtgaacggccctacgcatgccctgagtgtggcaaggccttccgccagcggcccacgctcacgcagcatctgcgcacccaccgacgagagaagcccttcgcctgccaggactgtggccgccgcttccaccagagcaccaagctcattcagcaccagcgcgtccacagcgccgagtagctccagccgggacgcactgtgtccgccatggtcagaacacctacctcccctggttattgtgaggctggcgattacataagtataagcaggtccgcccagggcttggctactgtaggtgtccaataaacagtagatggaaactgggtctccacccaaaaaaaaaaaaaaaaaa

SEQ ID NO: 444 - DNA, 556 bp, Homo sapiens
tgacccacttccgttacttgctgcggaggaccgtgggcagccagggtcggtgaaggatcccaaaatggctgggcgaaaacttgctctaaaaaccattgactgggtagcttttgcagagatcataccccagaaccaaaaggccattgctagttccctgaaatcctggaatgagaccctcacctccaggttggctgctttacctgagaatccaccagctatcgactgggcttactacaaggccaatgtggccaaggctggcttggtggatgactttgagaagaaggtgaaatcttgtgctgagtgggtgtctctctcaaaggccaggattgtagaatatgagaaagagatggagaagatgaagaacttaattccatttgatcagatgaccattgaggacttgaatgaagctttcccagaaaccaaattagacaagaaaaagtatccctattggcctcaccaaccaattgagaatttataaaattgagtccaggaggaagctctggcccttgtattacacattctggacattaaaaataataattatacagttaaaaaa

SEQ ID NO: 445 - DNA, 628 bp, Homo sapiens
tgacccacttccgttacttgctgcggaggaccgtgggcagccagggtcggtgaaggatcccaaaatggctgggcgaaaacttgctctaaaaaccattgactgggtagcttttgcagagatcataccccagaaccaaaaggccattgctagttccctgaaatcctggaatgagaccctcacctccaggttggctgctttacctgagaatccaccagctatcgactgggcttactacaaggccaatgtggccaaggctggcttggtggatgactttgagaagaagtttaatgcgctgaaggttcccgtgccagaggataaatatactgcccaggtggatgccgaagaaaaagaagatgtgaaatcttgtgctgagtgggtgtctctctcaaaggccaggattgtagaatatgagaaagagatggagaagatgaagaacttaattccatttgatcagatgaccattgaggacttgaatgaagctttcccagaaaccaaattagacaagaaaaagtatccctattggcctcaccaaccaattgagaatttataaaattgagtccaggaggaagctctggcccttgtattacacattctggacattaaaaataataattatacagttaaaaaa

SEQ ID NO: 446 - DNA, 3097 bp, Homo sapiens
gccagacaaagcccgagatggcgaagcggagcgacggctaatggcgagccccacgcgccgcgctccgcccgccccgctccggtgaggtggctttgaccccgggttgcccggccagcacgaccgaggaggtggctggacagctggaggatgaacggagaagccgactgccccacagacctggaaatggccgcccccaaaggccaagaccgttggtcccaggaagacatgctgactttgctggaatgcatgaagaacaaccttccatccaatgacagctccaagttcaaaaccaccgaatcacacatggactgggaaaaagtagcatttaaagacttttctggagacatgtgcaagctcaaatgggtggagatttctaatgaggtgaggaagttccgtacattgacagaattgatcctcgatgctcaggaacatgttaaaaatccttacaaaggcaaaaaactcaagaaacacccagacttcccaaagaagcccctgaccccttatttccgcttcttcatggagaagcgggccaagtatgcgaaactccaccctgagatgagcaacctggacctaaccaagattctgtccaagaaatacaaggagcttccggagaagaagaagatgaaatatattcaggacttccagagagagaaacaggagttcgagcgaaacctggcccgattcagggaggatcaccccgacctaatccagaatgccaagaaatcggacatcccagagaagcccaaaaccccccagcagctgtggtacacccacgagaagaaggtgtatctcaaagtgcggccagatgccactacgaaggaggtgaaggactccctggggaagcagtggtctcagctctcggacaaaaagaggctgaaatggattcataaggccctggagcagcggaaggagtacgaggagatcatgagagactatatccagaagcacccagagctgaacatcagtgaggagggtatcaccaagtccaccctcaccaaggccgaacgccagctcaaggacaagtttgacgggcgacccaccaagccacctccgaacagctactcgctgtactgcgcagagctcatggccaacatgaaggacgtgcccagcacagagcgcatggtgctgtgcagccagcagtggaagctgctgtcccagaaggagaaggacgcctatcacaagaagtgtgatcagaaaaagaaagattacgaggtggagctgctccgtttcctcgagagcctgcctgaggaggagcagcagcgggtcttgggggaagagaagatgctgaacatcaacaagaagcaggccaccagccccgcctccaagaagccagcccaggaagggggcaagggcggctccgagaagcccaagcggcccgtgtcggccatgttcatcttctcggaggagaaacggcggcagctgcaggaggagcggcctgagctctccgagagcgagctgacccgcctgctggcccgaatgtggaacgacctgtctgagaagaagaaggccaagtacaaggcccgagaggcggcgctcaaggctcagtcggagaggaagcccggcggggagcgcgaggaacggggcaagctgcccgagtcccccaaaagagctgaggagatctggcaacagagcgttatcggcgactacctggcccgcttcaagaatgaccgggtgaaggccttgaaagccatggaaatgacctggaataacatggaaaagaaggagaaactgatgtggattaagaaggcagccgaagaccaaaagcgatatgagagagagctgagtgagatgcgggcacctccagctgctacaaattcttccaagaagatgaaattccagggagaacccaagaagcctcccatgaacggttaccagaagttctcccaggagctgctgtccaatggggagctgaaccacctgccgctgaaggagcgcatggtggagatcggcagtcgctggcagcgcatctcccagagccagaaggagcactacaaaaagctggccgaggagcagcaaaagcagtacaaggtgcacctggacctctgggttaagagcctgtctccccaggaccgtgcagcatataaagagtacatctccaataaacgtaagagcatgaccaagctgcgaggcccaaaccccaaatccagccggactactctgcagtccaagtcggagtccgaggaggatgatgaagaggatgaggatgacgaggacgaggatgaagaagaggaagatgatgagaatggggactcctctgaagatggcggcgactcctctgagtccagcagcgaggacgagagcgaggatggggatgagaatgaagaggatgacgaggacgaagacgacgacgaggatgacgatgaggatgaagataatgagtccgagggcagcagctccagctcctcctcctcaggggactcctcagactctgactccaactgaggctcagccccaccccagggcagccagggagagcccaggagctcccctccccaactgaccacctttgtttctcccccatgttctgtcccttgcccccctggcctcccccactttctttctttctttaaaaaaaaaaaaaaaaatacggtgggggtagggggctggaggagcccaggccaggactctgcagcctcagagacatcagcccttgggggtcctcctccagggacagcaactatcagactaagccagcaccggaccagcctggcccaccccacccacttctgcacttgcggttccggcatggacaatggaccggagagtgggggtggggggtcccaaagagtttgatgaggccctccacacctgcggcccaatccaaggtggggtggaagcttggggaagacccattccttcccagaggggcctgccacctggacccctgcattggaactggaggcagggaacatggggaggaggagggtcggtgccttcaagaaaacaggcactgccctggtggccctctcccctgccccctgcaggaaggagctgcctggacccgttcatgggggagggggcagaagtgttttttatatatgtgtatatatttttttttaagctctgagctgtcaacgagacgtttcctaccgaaaaa

SEQ ID NO: 447 - DNA, 2746 bp, Homo sapiens
gtcctaagatggctgctgggcgaccacttcctgacagctccagttaacgggactgccagcaggctagacatccttcgccggaatgtgcagcgcttagttctgtgcccgggaggggcttctctctcttttgggattggagtgtggcattgccgccagaaagcctgcagaattccgggttgtgcagccaagcaggaacggtgtacctttctagacccatcctcttgcaatcttggaccctaagaaaagatgtggagtgggctgctacctcctggcctaaatgaaagtgacgctgagtcaaactcggaagatgaagctacgttggagaactctggacttaacttacaggaagataaagaggatgagagcatcagaaaaacagaaatcatagatttctcaacagatgaaccaaaaactgaaacagagtcaaatgtaaatgcctatgaagagtgtccttctggaattcccatagatatgtggaataaatttcaagaattgcataaaaaacattctgaacagaaaagcacaacctcaagattcagagggaaaagaagaaaacgctccagaaaagataaattgaagaatgaaaaagaattacatagtgaaccgtcctcaaatgaaacccagtggaaagagcttactcagtattttggagtcaatgatagatttgacccgcctgttaaaaggaaaaaagttgagaagtcaggccttgaaaagaggatagaccaggctgtggaggagtggaatattgagaaggctgaggaactcagcaaccagctagctactcgagagcttggtgtaaaaattgccaaagcagttgcctgccacaactttgtaaaagccaaaaaggaggttgaaaattcacaggctgcccgaaaaaagaagaaacttgcatgggggtttgaagcaaagaagagatgggaaaccaaaagcaacatgggatacatgtaacttgccagagtgcttcaagacatttgtagactcaaatgctcaatttactgagaatgttttcctgcctatgttaatatgtcagaaaattgatagcactaaaacaaaaataagcataaaatttgggattttgattatcagctcttttcagtctttctttaaggactttgtcctattgaagtgaataaaatgaagcattctgttatttgtataagaaatgtaagaaaaaaaatatagaaagaagaggataggattttgttcatttgtatggatggacccttggtataaaatcacttttggcgctttccattcatttggtttagcacagccagtgagcttctcgtactttctttcttttttttttttttttgagacagagcctcgcttgctctgtcacccaggctagagtgcagtagcacgatcttggctcactgcaaccactgcttcctgggttcaagtgattctcatgcctcagcctcctgagtagctgggattatggacaaatgccaccacacccggctaatttttttttttttttttgtatttttagtagagacagagttttgctgtgttggtcaggctggtcttgaactcctggcctcatatgattcacctgcctctgcctcccaaagttctgggagtacagacatgagctaccatgctgcccttgtattttcttatctgtacccagtgtaactacacgtttactggaactgtgtttttaagactgacagttgtttataatggattagtcgtaagtgccaaaaagtctcagttgatattatctttacaaatgacttgaccttaatgttataaaagtagttactgttttttttttaattggaggcagacttgatatttcagagttgcatagtaaaagcaatttgttaatttttgtgtattttcagataaactattacaataaagaaaggagcagaatgtagtatttggaagatgatttaaattcagcaacgcctaaaaatgtcttcctaagtatttttctcagccatgtcattctttaaattatgagatggttcttagaagagaaaatggtgtaattgtattaaacagacaattataactcaagataatataactttgaaccttctaagaactgatttgtttggttttcctcccattccccattcctccttaaaagattgaatgaattaatgagcagaaagagaggattggtaacatgggaaatcgttttcattagatgtacatttcctggttctgacaggaaaggggctccggaaaatcataaaacaagcaggtgaacaagaccaggtgtgtcggcacctccctgctcagtgcccagcggaggtaaagaaccactcagcatggtttttgtcagttcacctcttctgtcgttgtcagaggtttcctacctgtctgatataaactttctctgggttgataatataaattcagaaacatgtaaaatgaatcatgattatattactgttatttttagacttaaaatagtaacaaaattttatttatggtggcacatttaatggctttttttttctgtgttctggaataagagaatacctagctactatttaagcatccaaaaatcatatcttgctttcatttagttgagaaaagccagcatagagaaagcaaagttttagaatattatgtgtcatactaattcagtatccagaccaaatgttggaaagtcttattttatgatttaatatcccttgttccattttacagatatgatcatgtaaaacttacctacaatattcatttcaaactgctaaattaggtaaatacagacttttagtat

SEQ ID NO: 448 - DNA, 4224 bp, Homo sapiens
gttcgagcttgtgttcccccggaagggtgagtctggacgcgggcgcggaaggagcgcggccggaggtcctcaggaagaagccgcggggactggctgcgcttgacaggctgcacttggatgggagcacctggtgcctcgggactgctccgatgcccgggtctgtgctgaatgtgtaatatgcggaactatattgaaacattacaaccatcttttgatggcaacaccctgaggacctcccttttccagatggggaaactgaggcccagaattgctaagtggcttgcttgagttgacacagggagctccaggactcaccctcagctgagccacctgccgggagcatgcctctgcgccactgggggatggccaggggcagtaagcccgttggggatggagcccagcccatggctgccatgggaggcctgaaggtgcttctgcactgggctggtccaggcggcggggagccctgggtcactttcagtgagtcatcgctgacagctgaggaagtctgcatccacattgcacataaagttggtatcactcctccttgcttcaatctctttgccctcttcgatgctcaggcccaagtctggttgcccccaaaccacatcctagagatccccagagatgcaagcctgatgctatatttccgcataaggttttatttccggaactggcatggcatgaatcctcgggaaccggctgtgtaccgttgtgggcccccaggaaccgaggcatcctcagatcagacagcacaggggatgcaactcctggacccagcctcatttgagtacctctttgagcagggcaagcatgagtttgtgaatgacgtggcatcactgtgggagctgtcgaccgaggaggagatccaccactttaagaatgagagcctgggcatggcctttctgcacctctgtcacctcgctctccgccatggcatccccctggaggaggtggccaagaagaccagcttcaaggactgcatcccgcgctccttccgccggcatatccggcagcacagcgccctgacccggctgcgccttcggaacgtcttccgcaggttcctgcgggacttccagccgggccgactctcccagcagatggtcatggtcaaatacctagccacactcgagcggctggcaccccgcttcggcacagagcgtgtgcccgtgtgccacctgaggctgctggcccaggccgagggggagccctgctacatccgggacagtggggtggcccctacagaccctggccctgagtctgctgctgggcccccaacccacgaggtgctggtgacaggcactggtggcatccagtggtggccagtagaggaggaggtgaacaaggaggagggttctagtggcagcagtggcaggaacccccaagccagcctgtttgggaagaaggccaaggctcacaaggcagtcggccagccggcagacaggccgcgggagccactgtgggcctacttctgtgacttccgggacatcacccacgtggtgctgaaagagcactgtgtcagcatccaccggcaggacaacaagtgcctggagctgagcttgccttcccgggctgcggcgctgtccttcgtgtcgctggtggacggctatttccgcctgacggccgactccagccactacctgtgccacgaggtggctcccccacggctggtgatgagcatccgggatgggatccacggacccctgctggagccatttgtgcaggccaagctgcggcccgaggacggcctgtacctcattcactggagcaccagccacccctaccgcctgatcctcacagtggcccagcgtagccaggcaccagacggcatgcagagcttgcggctccgaaagttccccattgagcagcaggacggggccttcgtgctggagggctggggccggtccttccccagcgttcgggaacttggggctgccttgcagggctgcttgctgagggccggggatgactgcttctctctgcgtcgctgttgcctgccccaaccaggagaaacctccaatctcatcatcatgcggggggctcgggccagccccaggacactcaacctcagccagctcagcttccaccgggttgaccagaaggagatcacccagctgtcccacttgggccagggcacaaggaccaacgtgtatgagggccgcctgcgagtggagggcagcggggaccctgaggagggcaagatggatgacgaggaccccctcgtgcctggcagggaccgtgggcaggagctacgagtggtgctcaaagtgctggaccctagtcaccatgacatcgccctggccttctacgagacagccagcctcatgagccaggtctcccacacgcacctggccttcgtgcatggcgtctgtgtgcgcggccctgaaaatatcatggtgacagagtacgtggagcacggacccctggatgtgtggctgcggagggagcggggccatgtgcccatggcttggaagatggtggtggcccagcagctggccagcgccctcagctacctggagaacaagaacctggttcatggtaatgtgtgtggccggaacatcctgctggcccggctggggttggcagagggcaccagccccttcatcaagctgagtgatcctggcgtgggcctgggcgccctctccagggaggagcgggtggagaggatcccctggctggcccccgaatgcctaccaggtggggccaacagcctaagcaccgccatggacaagtgggggtttggcgccaccctcctggagatctgctttgacggagaggcccctctgcagagccgcagtccctccgagaaggagcatttctaccagaggcagcaccggctgcccgagccctcctgcccacagctggccacactcaccagccagtgtctgacctatgagccaacccagaggccatcattccgcaccatcctgcgtgacctcacccggctgcagccccacaatcttgctgacgtcttgactgtgaacccggactcaccggcgtcggaccctacggttttccacaagcgctatttgaaaaagatccgagatctgggcgagggtcacttcggcaaggtcagcttgtactgctacgatccgaccaacgacggcactggcgagatggtggcggtgaaagccctcaaggcagactgcggcccccagcaccgctcgggctggaagcaggagattgacattctgcgcacgctctaccacgagcacatcatcaagtacaagggctgctgcgaggaccaaggcgagaagtcgctgcagctggtcatggagtacgtgcccctgggcagcctccgagactacctgccccggcacagcatcgggctggcccagctgctgctcttcgcccagcagatctgcgagggcatggcctatctgcactcgcagcactacatccaccgagacctagccgcgcgcaacgtgctgctggacaacgacaggctggtcaagatcggggactttggcctagccaaggccgtgcccgaaggccacgagtactaccgcgtgcgcgaggatggggacagccccgtgttctggtatgccccagagtgcctgaaggagtataagttctactatgcgtcagatgtctggtccttcggggtgaccctgtatgagctgctgacgcactgtgactccagccagagcccccccacgaaattccttgagctcataggcattgctcagggtcagatgacagttctgagactcactgagttgctggaacgaggggagaggctgccacggcccgacaaatgtccctgtgaggtctatcatctcatgaagaactgctgggagacagaggcgtcctttcgcccaaccttcgagaacctcatacccattctgaagacagtccatgagaagtaccaaggccaggccccttcagtgttcagcgtgtgctgaggcacaatggcagccctgcctgggaggactggaccaggcagtggctgcagagggagcctcctgctccctgctccaggatgaaaccaagagggggatgtcagcctcacccacaccgtgtgccttactcctgtctagagaccccacctctgtgaacttatttttctttcttggccgtgagcctaaccatgatcttgagggacccaacatttgtaggggcactaatccagcccttaaatcccccagcttccaaacttgaggcccaccatctccaccatctggtaataaactcatgttttctctgaaaaaaaaaaaaaaaaaa

SEQ ID NO: 449 - DNA, 3440 bp, Homo sapiens
ctgggcggccgggcctccgcgagtaccgggtcgacttcggagtctgcgagcccagccaggggtgcccgcttcccacccctctccccgagcggcgtccccgtcggggtcgaacctcccccgcgacaggcgcccagccgcctgttcccccaggccttgcctgcggaccgccctgggaacggcgtctgggagccccgaggggctggcgggactcggggcccgggccatgcggcagccgcccccgcccctccgcgaccatccccggcccaagcgggagccgcagcggcgtttctgctcctcgctgcgccggcgaccccggacccggcacccgtgacccctcgcgctgcctgcggcctcgcgccgaggcctgccccgggagagaccgtccatgccgtccaaggcggagaatctgcggccctccgagccggccccgcagccgccggaagggaggacgctccaaggacagcttcccggcgctccgccggcccagcgcgcggggtccccacccgatgctccgggctccgagagccccgcgcttgcctgcagcactccggccacgcccagcggcgaggacccgccagcccgagcagcacccatcgccccgcggccccccgccaggcctcgactggagcgagccctgtccctggacgacaagggctggaggaggaggcgttttcgaggcagccaggaggacctggaagcccggaatgggaccagtccctccaggggctcagtgcagagcgagggccccggggcccccgcccacagctgctccccgccctgcctgagcacctccttgcaggaaatccccaagtcccgcggggtcctgagcagtgagagagggagcccgtcctcggggggtaaccctctctctggggtggccagcagctccccgaacctcccgcacagagacgccgccgtggcggggagctcgcccaggctgcccagcctgctgcccccgcgcccaccgcctgccctgagcctggacatcgcctccgactccctgaggacagcaaacaaggtcgactcggatcttgcagactacaagctccgcgcgcagccgctcctggtgcgggcccacagcagcctgggccccggccggccgcggagccccctggcctgcgacgactgttcccttcgctcggccaaatcctccttcagcctcctggcgcccatccgcagcaaggacgtccgcagcaggagttacctggagggcagcctcctggccagcggggccctgttgggggcggatgagctggcccgctacttcccagaccggaacgtggcactcttcgtggccacctggaacatgcagggccagaaggagctcccgcccagcctggacgagttcctgctcccagccgaggccgactatgcccaggacctgtatgtcatcggggtccaggagggctgttctgacaggcgggagtgggagactcgtctgcaggagacgctgggcccgcactatgtgctgctgtcctcggcggcccacggcgtgctctacatgtcgctcttcatccgcagggacctcatctggttctgctcagaggtggagtgctccacggtgaccacacgcatcgtgtctcagatcaagaccaagggggccttgggcatcagcttcaccttttttggcacttccttcctcttcatcacgtcccacttcacctcaggtgacgggaaggtggcggagcggctgctggactacaccaggactgtacaagccctggtcctgcccagaaatgtgcccgacaccaacccctatcgctccagcgcagcggacgtcaccacccgcttcgatgaggtgttctggtttggagacttcaacttccgcctgagtggcgggcgcacagtcgtggacgccctcctgtgccagggcctggtggtggacgtgccggcgctgctgcagcacgaccagctcatccgggagatgcggaaagggtccatcttcaagggcttccaggagccggacatccacttcctcccatcatacaagtttgacatcgggaaggacacgtacgacagcacctccaagcagaggacgccctcatacacggaccgcgtcttgtacagaagccgccacaagggtgacatctgtcctgtgagctactcttcctgccccgggatcaagacgtccgaccaccgccctgtgtatggcctcttccgggtgaaagtgaggccggggcgagacaacattccgttggcagctggcaaatttgatagagaactgtacttactaggaattaaaagacggatttcgaaggagattcagaggcagcaagcactacagagtcagaactccagcaccatctgctccgtttcttgaagtttgctgaacgaggactcacagctgcaacgtggggtgattgtattgatcaaaacccactgggaaggacaaagagtttgccgcctttcggggatccgagggactgtggcgaccgtgcctctgtgccagcgtcccaggaaggaagccaaccctgagcgagcctgtcctctgtggcaggtccacacggtgtgggtgggcagggcttggacccccgtctccatggcaggtccatacagcatgggtggcagggtttggacccgcccagcagcaccacggaccccagccactctcgggggcagacgtcagaatccgttcctgagcagctcctgtgccctgggggcagtcacagagccccccaacacccccgtgctctgcaccagcctctccctccacacccgaagcaggcgtccatctgtgtcctcctggcagcccctcaaacacacaccaccccatgtcacacgggtatccagagcaaggctggatctgggctaggtgacccctggggcctcagacctctgagtgggccccagagcccagctgaggaagccacacagcctccaggacgtggcacggttcccctccacttggctgcaagtcgcctgccatggggcgaggaggcctgcaccccagtataagggcctccccagctgagtaagaagctgcttcccctcctctcataggccaagcctattgtgtgaaaccatctcatggtcttggtgacgtagaccatttttgaaaccgtctcatggtcttggtgacgtagaccgtttgcttctttaactccagccgcggaatgacattagtggaaccgggctagggaactgctggaagttcaggatgccaccaccttgaacacctaggccagggatccccaccatgtcccgggtttctttcttcgagagtatagaaccgttcattcttgctttgtgtcccattccatctcttgaaaaaatgtagtctttgaatgtgtgaaaatctagggacattcaatctagtcttttaaattatttttccatatttatatttttaaataaatgcatatattgagtcttaaaaaaaaaaaaaaaaaaaaaaaaaaaaaaaaaaaaaaaaaaaaaaaaaaaaaaaaaaaaaaaaaaaa

SEQ ID NO: 450 - DNA, 2918 bp, Homo sapiens
acggaaaagccggggaggggactcggtccggggccggagaccgacggcaacagcggctcaggacccacgctgcccccacccctcccgagcaggcgcccccatggcccgaccccgctgattccttcactcggccatgctcccgcggcccctgcggctgcttttggacacgagcccccccgggggagtcgtactgagcagcttccgaagccgggaccccgaagagggtgggggcccaggtggcctggtcgtgggcggggggcaggaggaagaggaggaggaagaagaagaggcccctgtgtccgtctgggatgaggaggaggatggtgccgtgtttaccgtcacaagccgccaatatcgacctcttgatcccttggtccctatgcctcccccacgttcctcccgacggctccgagctggcactctggaggccctggtcagacacctactggatacccggacatcagggactgatgtgagcttcatgtcagccttcctggctacccaccgggccttcacctccacgcctgccttgctagggcttatggctgacaggctggaagcccttgaatctcatcctaccgacgaactagagaggacaacagaggtagccatctctgtactgtcaacctggctggcctctcaccctgaggattttggctctgaggccaagggtcagcttgaccggcttgagagcttcttacttcagacagggtatgcagcagggaagggtgttggggggggcagcgctgacctcatccgcaatctccggtcccgggtggacccccaggcccccgaccttcctaagcccctggccctccccggcgatccccctgctgaccccacggatgtcctggtgttcctcgctgaccacttggccgaacagctgaccctgctagatgcggaactttttctcaatttgatcccctctcagtgcctgggaggcctgtggggtcacagagaccggccaggacattctcacctctgcccatctgtccgagctactgtcacacagtttaacaaggtggcaggggcagtggttagttctgtcctgggggctacttccactggagagggacctggggaggtgaccatacggccactccgtcccccacagagggcccggctcctggagaagtggatccgcgtggcagaggagtgccggctgctccgaaacttctcttcagtttatgccgtggtgtcagccctgcagtccagccccatccacaggcttcgggcagcctggggggaagcaaccagggacagcctcagagtcttttccagcctctgccagattttctccgaggaggataattattcccagagtcgggagctgctcgtgcaggaggtgaagctgcagtctcctctggagccacactccaagaaggccccgaggtctggctcccggggtgggggtgtggtcccataccttggcaccttcctgaaggaccttgtgatgctggatgcagcctccaaggatgagttggagaatggatacatcaattttgacaagcggaggaaggagtttgcagtcctttctgagttgcgacggctccagaatgaatgtcgtggctataacctccaacctgaccatgatatccagaggtggctacaggggctccggccactgacagaggctcagagccatcgtgtatcctgtgaggtggagccacctggttccagtgaccctcctgccccacgggtgcttcggccaacattggtcatctcgcagtggacagaggttttgggctctgttggggtccctaccccgcttgtgtcctgtgaccggcccagtactgggggagatgaggcgcctacaactcctgctcctctgctgactcggctggcccagcacatgaagtggccatctgtctcgtcactagactctgccttggaaagcagtccatccctgcacagtccagctgaccccagccacctctccccaccagcctcctcccctaggccttctcgaggtcaccgccgctcagcctcctgtggctccccgctgagtgggggtgcagaagaggcctccggggggactggatatgggggagagggatctgggccaggggcctctgattgccgtatcatccgagtccagatggagttgggggaagatggcagtgtctataagagcattttggtgacaagccaggacaaggctccaagtgtcatcagtcgtgtccttaagaaaaacaatcgtgactctgcagtggcttcagagtatgagctggtacagctgctaccaggggagcgagagctgactatcccagcctcggctaatgtattctacgccatggatggagcttcacacgatttcctcctgcggcagcggcgaaggtcctctactgctacacctggcgtcaccagtggcccgtctgcctcaggaactcctccgagtgagggaggagggggctcctttcccaggatcaaggccacagggaggaagattgcacgggcactgttctgaggaggaagccccgttggcttacagaagtcatggtgttcataccagatgtgggtagccatcctgaatggtggcaattatatcacattgagacagaaattcagaaagggagccagccaccctggggcagtgaagtgccactggtttaccagacagctgagaaatccagccctgtgggaactggtgtcttataaccaagttggatacctgtgtatagcttcccaccttccatgagtgcagcacacaggtagtgctggaaaaacgcatcagtttctgattcttggccatatcctaacatgcaagggccaagcaaaggcttcaaggctctgagccccagggcagaggggaatggcaaaatgtaggtcctcgcaggagctcttcttcccactctgggggtttctatcactgtgacaacactaagataataaaccaaaacactacctgaaaaaaaaaa

SEQ ID NO: 451 - DNA, 2800 bp, Homo sapiens
gaagtgactgcgggagtggagccggcgagagagtggcagcgggggctgatggaagtgcagtgggggctggagagggcaccctactgtatccagcatgctccaaggccacagctctgtgttccaggccttgctggggaccttcttcacctgggggatgacagcagctggggcagctctcgtgttcgtattctctagtggacagaggcggatcttagatggaagtcttggctttgctgcaggggtcatgttggcagcttcctattggtctcttctggccccagcagttgagatggccacgtcctctgggggcttcggtgcctttgccttcttccctgtggctgttggcttcacccttggagcggcttttgtctacttggctgacctcctgatgcctcacttgggtgcagcagaagacccccagacggccctggcactgaacttcggctctacgttgatgaagaagaagtctgatcctgagggtcccgcgctgctcttccctgagagtgaactttccatccggatagacaagagtgagaatggtgaggcatatcagagaaagaaggcggcagccactggccttccagagggtcctgctgtccctgtgccttctcgagggaatctggcacagcccggcggcagcagctggaggaggatcgcactgctcatcttggccatcactatacacaacgttccagagggtctcgctgttggagttggatttggggctatagaaaagacggcatctgctacctttgagagtgccaggaatttggccattggaatcgggatccagaatttccccgagggcctggctgtcagccttcccttgcgaggggcaggcttctccacctggagagctttctggtatgggcagctgagcggcatggtggagcccctggccggggtctttggtgcctttgccgtggtgctggctgagcccatcctgccctacgctctggcctttgctgccggtgccatggtctacgtggtcatggacgacatcatccccgaagcccagatcagtggtaatgggaaactggcatcctgggcctccatcctgggatttgtagtgatgatgtcactggacgttggcctgggctagggctgagacgcttcggaccccgggaaaggccatacgaagaaacagcagtggttggcttctatgggacaacaagcttctttcttcacattaaaacttttttccttcctctcttcttcatctcattatcctgattgactctgattataatagaaccatttttactttgctttgagggagatttttgatttaatggggaattttaaggtgtcatggaaatacagattctttgttttggccactgaatggactctctcttcagtgggattatcaaggaacttcagatcagggaaatctccacttcgggaccttctatctgcctcccaactcctcaaggtcacctatagaagcgagctaccaaaagacgtctcctaagcattttggtggcctagtgactcagggcagagtggccagcacacctctcatccgcccctcctgctccatcactgctgagcctctccccatctagaatgttggaactggagcatcataaagatagcaagctaccttccaaggccgagccagcccagagaggagcatgtcttcctttacctccccctaaggagatactacatgggagggggacacagaaaaagggaaggaaattggctagtctggctttttttttttttttttttaaaggcaaagattgacattattgaaggaaaggggatgaggacaactgtgaactcacagtgagccctgtggaaagaagagacagacagagtgtgggtttgttcggaggcctctgctgtcaatggattccaggagcaaggccatttgtcgcgctttccaaatttcttaggcatttattttgataagtttatagccatcatgtttctaagagacttggagacaccagcaaactgctagaactcaaactcttcaattactcaaagaaggagccatttcagttaactcaagtgaatgaaagagttttggaatctgctgtgggtccttccctgttgaccatttggtaacttataatctgacaaaaactcttgagctgcaacaggccttgccagagggctcaggatgggaaaggaagaaggggataggaaaagaagaggtaattttacatttcccctttaaagtaaattttagccaactcatcattctgaaatgtccctataaagaatgagtcgaactagaccagaagccagcctactccttcttacatagcttctccaacaggggtagcaatgacctgtccacttcaaacacagataaggcctgccatcctcattggttaaaggcacacgtgagactttcagtgggctctgctgagaaggaaggcagcccaggagtcaggtatgcaggcattgcattgtcagtgtctgctctcagagtttacacattcaattgcttccaagggtgaatctcctgctctgtgaatgctatcagaccccaaaggccaaccttgggctgggtctatgtacgttcttccgaagcactgatgatcaaaattgaagacacattcagaggtttgattggttgagattaactggtgtggtggttggtgtatgtatgttttatttttatgtctttgtatgtagttctacataatgcaaattgtgctttctgatggacaagacctcataactgtgattaatatcaataaaaaggggatgttgtggaaaaaaaaaaaaaaaaaaaaaaaaaaaaaaaaaaaaaaaaaaaaaaaaaaaaaaaaaaaaaaaa

SEQ ID NO: 452 - DNA, 3250 bp, Homo sapiens
ggaagctggtggcggctggtgggcgaccgggcgcatcctcattgcagtgcggcggccctacctcggccctggcctgaccccggcggccctgcccgcccctccctccagcatcatggccagcccaagaaccaggaaggttcttaaagaagtcagggtgcaggatgagaacaacgtttgttttgagtgtggcgcgttcaatcctcagtgggtcagtgtgacctacggcatctggatctgcctggagtgctcggggagacaccgcgggcttggggttcacctcagctttgtgcgctctgttactatggacaagtggaaggacattgagcttgagaagatgaaagctggtgggaatgctaagttccgagagttcctggagtctcaggaggattacgatccttgctggtccttgcaggagaagtacaacagcagagccgcggccctctttagggataaggtggtcgctctggccgaaggcagagagtggtctctggagtcatcacctgcccagaactggaccccacctcagcccaggacgctgccgtccatggtgcaccgagtctctggccagccgcagagtgtgaccgcctcctcggacaaggcttttgaagactggctgaatgatgacctcggctcctatcaaggggcccaggggaatcgctacgtggggtttgggaacacgccaccgcctcagaagaaagaagatgacttcctcaacaacgccatgtcctccctgtactcgggctggagcagcttcaccactggagccagccggtttgcctcggcagccaaggagggcgctacaaagtttggatcccaagcgagtcagaaggcgtccgagctgggccacagcctgaacgagaacgtcctcaagcctgcgcaggagaaggtgaaggagggaaagatttttgatgatgtctccagtggggtctctcagttggcgtccaaggtccagggagtcggtagtaagggatggcgggacgtcaccacctttttttcggggaaagcagagggccccttggacagcccctcggagggccacagttatcagaacagcggtctggaccacttccaaaacagcaacatagaccagagcttctgggagacctttggaagtgctgagcccaccaagacccgcaagtccccgagcagcgacagctggacgtgcgcggacacctccaccgagaggaggagctcggacagctgggaggtgtggggctcggcctccaccaacaggaacagcaacagcgacggcggggagggcggggagggcaccaagaaggcagtgccgccggccgtgcccactgatgatggctgggacaaccagaactggtagggcccactgcgcccccgtccccagcgcccccgggcgacttcgtgtttgcactctgccctcgtcgttcctcctccttccatttgacccaagaatcagcaactgcagtgtgaggacagcgtctcgggaggcaggaccctagggagacccgggtgtgcgccgcctgcgcgtggggagtcttcggtgcgtgggggcggcttgctgtccagcctgtgtgggggccgtcccgtcccacactcccctgggcattcttggactcaaggccggggctctgcgtggcttgctgggaggtgggctgcagcacagaggcctgtgactgcgttccagcggccagttcactacgcagtatctctggggcctgggaccagccacgtgccgagctgtcagcgacgtgaggtgtcccttctcgttgagatatttaactttggttttgctctagttctttctttttgaagagagtgactggagtggtaaagatggaaatgctggaaatgatactggcgctcacgctgccatccgaccaccctcggctcccgagtccacgcctgcctgggcctgtgctgtcagacccgcgtcggtcgtaaccctctgtggctcccctgcatcagcaccgtcccaccaccaagttcaccaggttcaccagacacggcctccacaatagccacacccacacctgagctgttctcagtgctggaacttgaccatcctggaacaccctggaagaaaaaggagcgcagggtgggccctcggccctgatgcaggagggtgcgatagcggacgtggccaggcaggaggggccgggttcaggagctgagcaggggatgcctgtgcgtggtgcctgggtctagggaagctccagccccaggatggggctgccctgcacaccggtgcccgccacatgccaaccctcacctccccgaggactggatgatgtgctgccacgtgtgactcgtctcccttgtctgccctgtgtgaccctcagtcttggccagccatgcatgcgcccgaagctcgtgcagtttgtacgtgaggtgctctcctccctgccaccatgctcatcactctggccttggccatgctccctggtcaccccacttcccggtcgccgtctgcagcactcctggagcagcctgggcccttcagcccctgtgctcgtcccaccctagggactcagccacttgcagaacaggatgggaccgagatttcagcgagccctcctggcgcccggtcctccctgtgggcaccagccctcttggtagctggtgtggagggccggtgtccttggctgccacggagggatttgatcaccgaagcagccacctgctgtagttggacctgaggtcagaggcggggcatcagaggctcaaggtgctgagaagccaccgggaaagcagccagcacaaagggcccaggaagccagcccccgagagctgagcgtgggggtctttgagtgtctttctccaagctgagacgtgggcggccgcgtggtatctcccgagggctgcttggaccctggtgggctgagtgctccgaggaggggtggactccaccttggacagtgggatgtggtgttccacatgtgcctgtttccacgccagcaccttgacttggcagcatggagccaaggtctgtccccgcccaggagggtgccttcctcgggggtagggggacggcccactctgccccagggagtcccttttgatgggaagtgcagtcagcagcgtggaggtgtctgggccaccttcagaaggtggatgtggtggccgagaccccgtccacggagggtgatggcctttcccttctgcaggtgcgggcaggtgggcctgggaccggtgctggggcctctccttgctgtgtgtgagggcccaggtggaaggcgcggacctgacagcattccaataaagcatacgggaacatgca

SEQ ID NO: 453 - DNA, 3274 bp, Homo sapiens
ggaagctggtggcggctggtgggcgaccgggcgcatcctcattgcagtgcggcggccctacctcggccctggcctgaccccggcggccctgcccgcccctccctccagcatcatggccagcccaagaaccaggaaggttcttaaagaagtcagggtgcaggatgagaacaacgtttgttttgagtgtggcgcgttcaatcctcagtgggtcagtgtgacctacggcatctggatctgcctggagtgctcggggagacaccgcgggcttggggttcacctcagctttgtgcgctctgttactatggacaagtggaaggacattgagcttgagaagatgaaagctggtgggaatgctaagttccgagagttcctggagtctcaggaggattacgatccttgctggtccttgcaggagaagtacaacagcagagccgcggccctctttagggataaggtggtcgctctggccgaaggcagagagtggtctctggagtcatcacctgcccagaactggaccccacctcagcccaggacgctgccgtccatggtgcaccgagtctctggccagccgcagagtgtgaccgcctcctcggacaaggcttttgaagactggctgaatgatgacctcggctcctatcaaggggcccaggggaatcgctacgtggggtttgggaacacgccaccgcctcagaagaaagaagatgacttcctcaacaacgccatgtcctccctgtactcgggctggagcagcttcaccactggagccagccggtttgcctcggcagccaaggagggcgctacaaagtttggatcccaagcgagtcagaagttttggggtcacaagcagcagccggagccggcgtccgagctgggccacagcctgaacgagaacgtcctcaagcctgcgcaggagaaggtgaaggagggaaagatttttgatgatgtctccagtggggtctctcagttggcgtccaagggagtcggtagtaagggatggcgggacgtcaccacctttttttcggggaaagcagagggccccttggacagcccctcggagggccacagttatcagaacagcggtctggaccacttccaaaacagcaacatagaccagagcttctgggagacctttggaagtgctgagcccaccaagacccgcaagtccccgagcagcgacagctggacgtgcgcggacacctccaccgagaggaggagctcggacagctgggaggtgtggggctcggcctccaccaacaggaacagcaacagcgacggcggggagggcggggagggcaccaagaaggcagtgccgccggccgtgcccactgatgatggctgggacaaccagaactggtagggcccactgcgcccccgtccccagcgcccccgggcgacttcgtgtttgcactctgccctcgtcgttcctcctccttccatttgacccaagaatcagcaactgcagtgtgaggacagcgtctcgggaggcaggaccctagggagacccgggtgtgcgccgcctgcgcgtggggagtcttcggtgcgtgggggcggcttgctgtccagcctgtgtgggggccgtcccgtcccacactcccctgggcattcttggactcaaggccggggctctgcgtggcttgctgggaggtgggctgcagcacagaggcctgtgactgcgttccagcggccagttcactacgcagtatctctggggcctgggaccagccacgtgccgagctgtcagcgacgtgaggtgtcccttctcgttgagatatttaactttggttttgctctagttctttctttttgaagagagtgactggagtggtaaagatggaaatgctggaaatgatactggcgctcacgctgccatccgaccaccctcggctcccgagtccacgcctgcctgggcctgtgctgtcagacccgcgtcggtcgtaaccctctgtggctcccctgcatcagcaccgtcccaccaccaagttcaccaggttcaccagacacggcctccacaatagccacacccacacctgagctgttctcagtgctggaacttgaccatcctggaacaccctggaagaaaaaggagcgcagggtgggccctcggccctgatgcaggagggtgcgatagcggacgtggccaggcaggaggggccgggttcaggagctgagcaggggatgcctgtgcgtggtgcctgggtctagggaagctccagccccaggatggggctgccctgcacaccggtgcccgccacatgccaaccctcacctccccgaggactggatgatgtgctgccacgtgtgactcgtctcccttgtctgccctgtgtgaccctcagtcttggccagccatgcatgcgcccgaagctcgtgcagtttgtacgtgaggtgctctcctccctgccaccatgctcatcactctggccttggccatgctccctggtcaccccacttcccggtcgccgtctgcagcactcctggagcagcctgggcccttcagcccctgtgctcgtcccaccctagggactcagccacttgcagaacaggatgggaccgagatttcagcgagccctcctggcgcccggtcctccctgtgggcaccagccctcttggtagctggtgtggagggccggtgtccttggctgccacggagggatttgatcaccgaagcagccacctgctgtagttggacctgaggtcagaggcggggcatcagaggctcaaggtgctgagaagccaccgggaaagcagccagcacaaagggcccaggaagccagcccccgagagctgagcgtgggggtctttgagtgtctttctccaagctgagacgtgggcggccgcgtggtatctcccgagggctgcttggaccctggtgggctgagtgctccgaggaggggtggactccaccttggacagtgggatgtggtgttccacatgtgcctgtttccacgccagcaccttgacttggcagcatggagccaaggtctgtccccgcccaggagggtgccttcctcgggggtagggggacggcccactctgccccagggagtcccttttgatgggaagtgcagtcagcagcgtggaggtgtctgggccaccttcagaaggtggatgtggtggccgagaccccgtccacggagggtgatggcctttcccttctgcaggtgcgggcaggtgggcctgggaccggtgctggggcctctccttgctgtgtgtgagggcccaggtggaaggcgcggacctgacagcattccaataaagcatacgggaacatgca

SEQ ID NO: 454 - DNA, 2251 bp, Homo sapiens
gccgcgtgcagaggtgctcaagcctcctcgcggtccgcagtcagtgccgccgcgcccggcctcccgcacgccccgcaggtagcgcccccgcccgcggcccagagtgcgctcgcgccggcaccagctcccggataaacggcgcgccgcgcggagatgacagccgaggagatgaaggcgaccgagagcggggcgcagtcggcgccgctgcccatggagggagtggacatcagccccaaacaggacgaaggcgtgctgaaggtcatcaagagagagggcacaggtacagagatgcccatgattggggaccgagtctttgtccactacactggctggctattagatggcacaaagtttgactccagtctggatcgcaaggacaaattctcctttgacctgggaaaaggggaggtcatcaaggcttgggacattgccatagccaccatgaaggtgggggaggtgtgccacatcacctgcaaaccagaatatgcctacggttcagcaggcagtcctccaaagattccccccaatgccacgcttgtatttgaggtggagttgtttgagtttaagggagaagatctgacggaagaggaagatggcggaatcattcgcagaatacagactcgcggtgaaggctatgctaagcccaatgagggtgctatcgtggaggttgcactggaagggtactacaaggacaagctctttgaccagcgggagctccgctttgagattggcgagggggagaacctggatctgccttatggtctggagagggccattcagcgcatggagaaaggagaacattccatcgtgtacctcaagcccagctatgcttttggcagtgttgggaaggaaaagttccaaatcccaccaaatgctgagctgaaatatgaattacacctcaagagttttgaaaaggccaaggagtcttgggagatgaattcagaagagaagctggaacagagcaccatagtgaaagagcggggcactgtgtacttcaaggaaggtaaatacaagcaagctttactacagtataagaagatcgtgtcttggctggaatatgagtctagtttttccaatgaggaagcacagaaagcacaggcccttcgactggcctctcacctcaacctggccatgtgtcatctgaaactacaggccttctctgctgccattgaaagctgtaacaaggccctagaactggacagcaacaacgagaagggcctcttccgccggggagaggcccacctggccgtgaatgactttgaactggcacgggctgatttccagaaggtcctgcagctctaccccaacaacaaagccgccaagacccagctggctgtgtgccagcagcggatccgaaggcagcttgcccgggagaagaagctctatgccaatatgtttgagaggctggctgaggaggagaacaaggccaaggcagaggcttcctcaggagaccatcccactgacacagagatgaaggaggagcagaagagcaacacggcagggagccagtctcaggtggagacagaagcatagcccctctccaccagccctactcctgcggctgcctgccccccagtctccccactccaccctgttagttttgtaaaaactgaagaattttgagtgaattagacctttatttttctatctggttggatggtggctttaggggaagggggaaaggtgtaggctgggggattgaggtggggaatcattttagctggtgtcagcccctcttcccttcctccattgcacatgaacatatgtccatccatatatattcatcagaatgttaatttattttgctccctctgttaggtccattttctaagggtagaagaggcaagtggtagggatgaggtctgataagaacccagggtggagagggagactcctgggcagccgttttcctcatcctttccctctcccagtccatttccaaatgtggcctccatgtgggtgctagggacatgggaaaaaccactgctatgccatttcttctctctgttcccttcctcacccccgacggtgtggctgatgatgtcttctggtgtcatggtgaccaccccctgttccctgttctggtatttcccctgtcagtttcccctctcggccaggttgtgtcccaaaatcccctcagcctcttctctgcacgttgctgaaggtccaggcttgcctcaagttccatgcttgagcaataaagtggaaacaataaaacctgggtgtcagacaaaaaaaaaaaaaaaaaaaa

SEQ ID NO: 455 - DNA, 2462 bp, Homo sapiens
accgccgagcgcacgggccgagccaagcctgatcccggagccggagggggactgggaccgagagaacggcgatggggggcggccccgccgcaggaggacccgggcgcgtaaccccgggggcccggcccgctccagacccagacccgcggggtgcggcaccctgagcccccctccccgccccctgccctggccatggccgcccaccccgccgcccccgggccgccagcccgctcggccccgcaagcaccggagccccggcggtggcagcagtgaacggctgtcgcaggccccgaagaccccggcccggctcggctctctagcgcgcgcccccttcccggccttgtcctctcccctccccccgccgctagcgagccccccttgcacgctgccccccgcccccggtgtccggacgatgctcaagtctcggctccgcatgtttctgaacgagctgaagctgctggtgctgacaggcggggggcggccccgggccgagccgcaaccccgggggggccggggaggcggctgcggctgggcgcccttcgctggttgctccacccgggacggcgacggcgacgaggaggagtactacgggtcggagccgcgggcccggggcctggccggcgacaaggagccgcgggccggacccctgccgccgcccgcgccgccgctgccgcccccgggcgcgctggacgccctgtcgctcagcagtagcctggacagcggactccgaacccctcagtgccggatctgcttccagggcccggagcagggggagctcttaagcccctgccgctgcgacggctcagtgcgctgcacgcatcagccctgcctcatccgctggatcagcgagaggggctcctggagctgtgagctctgctacttcaagtaccaggtcctggcgatcagcaccaagaacccactgcagtggcaggccatctccctgacggtcatcgagaaggtccagattgctgccatagttctgggctcgctcttcctggttgccagcatctcctggctcatctggtcctcactcagcccttcagccaagtggcaacgacaggatctgctctttcagatctgctacggcatgtatggcttcatggatgtcgtctgcataggcctcatcatccatgaaggctcctctgtctaccgcatcttcaagcgctggcaggcagtgaaccagcagtggaaggtcctaaattatgacaagaccaaggacataggaggagatgcagggggagggacggcagggaagtcaggccccaggaactcacggacgggccccacctctggggccacgagccgccccccagctgcccagcgcatgcggacgctcttgcctcagcgctgcggttatacaatcttgcacctccttgggcagctgcggccaccagatgcccgttccagctcccattctggccgagaggttgtcatgagggtcactacagtctgaactggactccaggagcagggatcttgagtcaatgcatcagtcagagaagaactctcatggctgctggaggtaccagctggacaaggtgtttggggcatgctgcccccgtcaccgaggatctgtgtgggtagcctcaagctggagacattgtctggcctcactgcccactgggtagagacacctggatgacatttcagtacccgctggcagctcctcccactcatccagagacggccggtgggcaggcggggagagcagctttccttccctggagagaaccgtctttacctcagctcctagggcctccagccccccagctccaccacggtgacttggtgaagggggaccaatgccagaagaaaggggctgtagacccctattccccaccccatggccacagggcatctggcaataagactagtatacattgacctcccgttccctgcatgagggcggggagttccccctgctccatcccccattgcatgggggaagggcataaagaatcatttatatgcacgtggagactcctttctcatctggggcttttctggagggttgggagatgtggggaggtttctctgcacaggttgcaaatcccaaatgcagcagtgggttctgagttgtaggtgtgactcccacttgctggtgaataattcatgttggctgctaggtggcagcactccgaggtatctaaagggtagacctggacctgccacctatgagttgtgtgatatagaaaaaaatctcttagctctggttttcctgtctacttcatagggttggaataaggataaatgagggacaggttggatgccgttgcagagaaaatcagcaatgacataaagagatttctagaatagttgatggtccatttatttcaaatagtagctggtgtaacaaattctaaaatgtgtttttcatctggagttgcacagaatcatggaattttgtgttgagtgacataataggtatggaaatatgaggggaaatagacattgcaaatgtg

SEQ ID NO: 456 - DNA, 4567 bp, Homo sapiens
ggcgcatgcgccacggtggccgacttgaaccgaggcttttattgctgtagtttatttccacccccttccctcctgtttctctctctccttctctctctctctctctctctctcttttttttccgccctagctggggctgtgttggaggagaggaagaaagagagacagaggattgcattcatccgttacgttcttgaaatttcctaatagcaagaccagcgaagcggttgcacccttttcaatcttgcaaaggaaaaaaacaaaacaaaacaaaaaaaacccaagtccccttcccggcagtttttgccttaaagctgccctcttgaaattaattttttcccaggagagagatgtcttatcaggggaagaaaaatattccacgcatcacgagcgatcgtcttctgatcaaaggaggtaaaattgttaatgatgaccagtcgttctatgcagacatatacatggaagatgggttgatcaagcaaataggagaaaatctgattgtgccaggaggagtgaagaccatcgaggcccactcccggatggtgatccccggaggaattgacgtccacactcgtttccagatgcctgatcagggaatgacgtctgctgatgatttcttccaaggaaccaaggcggccctggctgggggaaccactatgatcattgaccacgttgttcctgagcctgggacaagcctgctcgctgcctttgaccagtggagggaatgggccgacagcaagtcctgctgtgactactctctgcatgtggacatcagcgagtggcataagggcatccaggaggagatggaagcgcttgtgaaggatcacggggtaaattccttcctcgtgtacatggctttcaaagatcgcttccagctaacggattgccagatttatgaagtactgagtgtgatccgggatattggcgccatagcccaagtccacgcagaaaatggcgacatcattgcagaggagcagcagaggatcctggatctgggcatcacgggccccgagggacatgtgctgagccgacctgaggaggtcgaggccgaagccgtgaatcgtgccatcaccatcgccaaccagaccaactgcccgctgtatatcaccaaggtgatgagcaaaagctctgctgaggtcatcgcccaggcacggaagaagggaactgtggtgtatggcgagcccatcactgccagcttgggaacggacggctcccattactggagcaagaactgggccaaggctgctgcctttgtcacctccccacccttgagccctgatccaaccactccagactttctcaactccttgctgtcctgtggagacctccaggtcacgggcagtgcccattgcacgtttaacactgcccagaaggctgtaggaaaggacaacttcaccctgattccggagggcaccaatggcactgaggagcggatgtccgtcatctgggacaaggctgtggtcactgggaagatggatgagaaccagtttgtggctgtgaccagcaccaatgcagccaaagtcttcaacctttacccccggaaaggccgcattgctgtgggatccgatgccgacctggtcatctgggaccccgacagcgttaaaaccatctctgccaagacacacaacagctctctcgagtacaacatctttgaaggcatggagtgccgcggctccccactggtggtcatcagccaggggaagattgtcctggaggacggcaccctgcatgtcaccgaaggctctggacgctacattccccggaagcccttccctgattttgtttacaagcgtatcaaggcaaggagcaggctggctgagctgagaggggttcctcgtggcctgtatgacggacctgtgtgtgaagtgtctgtgacgcccaagacagtcactccagcctcctcggccaagacgtctcctgccaagcagcaggccccacctgtccggaacctgcaccagtctggattcagtttgtctggtgctcagattgatgacaacattccccgccgcaccacccagcgtatcgtggcgccccccggtggccgtgccaacatcaccagcctgggctagagctcctgggctgtgccgtccactggggactggggatgggacacctgaggacattctgagacttctttcttccttcctttttttttttttgtttttttttttaagagcctgtgatagttactgtggagcagccagttcatggggtcccccttggggccccacaccccgtctctcaccaagagttactgattttgctcatccacttccctacacatctatgggtatcacacccaagactacccaccaagctcatacagggaaccacacccaacacttagacatgcgaacaagcagcccccagcgagggtctccttcgccttcaacctcctagtgtctgttagcatcttccttttcatggggggagggaagataaagtgaattgcccagagctgcctttttcttttctttttaaaaattttaagaagttttctttgtggggctggggaggggccggggtcagggagagtcttttttttttttttttttaaatactaaattggaacatttaattccatattaatacaaggggtttgaactggacatcctaatgatgcaattacgtcatcacccagctgattccgggtggttggcaaactcatcgtgtctgtcctgagaggctccacaatgcccacccgcatcgccattctgtagtcttcagggtcagctgttgataaaggggcaggcttgcgttattggcctagattttgctgcagattaaatcctttgaggattctcttctcttttaccatttttctgcgtgctctcactctctctttctctctctagctttttaattcatgaatattttcgtgtctgtctctctctctctctgtgtttcctccagcccttgtctcggagacggtgttttcctcccttgccccattatcttttcacctcccaggtctaccatttcatggtggtcgttgggtccgcctaaaggatttgagcgtttgccattgcaagcatagtgctgtgtcatcctggtccatgtaggactggtgctaaccacctgccatcatgaggatgtgtgctagagtgtgggaccctggccaagtgcaggaatgggccatgccgtctcacccacagtatcacacgtggaaccgcagacagggcccagaagctttagaggtatgaggctgcagaaccggagagattttcctctgtgcagtgctctctggctaaagtcacggtcaaacctaaacaccgagcctcattaacccaagtgaaccaaccaaagtcaccagttcagaagtgctaagctaataggagtctgacccgagggcctgctgcttcctggttaagtatcttttgagattctagaacacatgggagctttttattttcggggaaaaaccgtatttttttcttgtccaattatttctaaagacacactacatagaaagaggccctataaactcaaaaagtcattgggaaacttaaagtctattctactttgcaagaggagaaatgtgttttatgaacgatagatcacatcagaactcctgtggggaggaaaccttataaattaaacacatggcccccttagagaccacaggtgatgtctgtctccatccttccctctccttttctgtcacctttccccctagctggctcctttggacctacccctgtccttgctgacttgtgttgcattgtattccaaacgtgtttacaggttctcttaagcaatgttgtatttgcaggcttttctgaataccaaatctgctttttgtaaagcgtaaaaacatcacaaagtaggtcattccatcaccacccttgtctctctacacattttgcctttggggatctggttggggttttgggttttttgttgttgttgtttatttgttattttaaaggtaaattgcacttttaaaaaaataattggttgacttaatatatttgctttttttctcacctgcacttagaggaaatttgaacaagttggaaaaaaacaatttttgtttcaattctaagaaacacttgcagctctagtattcacttgagtcttcctgtttttcctgtaccgggtcatggtaatttttggttgttttggttgttttcttaaaaaacaagttaaaacctgacgatttctgcaggctgtgtaagcatgtttacctgttggcttgctttgtgtgtctgttaaatgaatgtcatatgtaaatgctaaaataaatcgacagtgtctcagaactgaataactgcagtgacttgatgctctaaaacagtgtaggatttaagaatagatggtttttaatcctggaaattgtgattgtgacccatgagtggaggaactttcagttctaaagctgataaagtgtgtagccagaagagtacttttttttttgtaaccactgtcttgatggcaaaataattatggtaaaaaacaagtctcgtgtttattattccttaagaactctgtgttatattaccatggaacgcctaataaagcaaaatgtggttgtttcaggaaaaaaaaaaaaaaaaaaaaaaaaaaa

SEQ ID NO: 457 - DNA, 2390 bp, Homo sapiens
ggatttgcggagcgccgcgccgctgccgggagccggcaggcccgagagtgaccggagtcacggcgggcgccggcggagctgcggcgtcggacccgcctcctggaggagctcagccccgaccaggcccggccccattcccgccccgcgccgcctccccgccgccgccgccgccgccgccgcgggagcgctcccctgcccaccccgcccccgcggccgagcccgggagtcgagtgggagtcggccggccggcgcgggcagcgccgggaccccgcgggggacactgcagccggagcccgggaggggccgcgccgccaccgtctgaactaggatgtcccgacatgaaggtgtcagctgtgatgcatgtttaaaaggaaattttcgaggtcgcagatataagtgtttaatttgctacgattacgatctttgtgcatcttgttatgaaagtggtgcaacaacaacaaggcatacaactgaccacccaatgcagtgcatattaacaagggtagattttgatttatactatggtggggaagctttctctgtagagcagccacagtcttttacttgtccctattgtggaaaaatgggctatacggagacatctcttcaagaacatgttacttctgaacatgcagaaacatcaacagaagtgatttgtccaatatgtgcagcgttacctggaggcgatcctaatcatgtcacggatgactttgcagctcatcttacacttgaacacagagcccctagagatttagatgaatcgagtggtgttcgacatgtacgtagaatgtttcaccctggccggggattaggaggtcctcgtgctcgtagatcaaacatgcactttactagcagttctactggtggactttcttcttctcagagttcatattctccaagcaatagggaagccatggatcctatagctgagcttttatctcagttatcaggagtgagacgttctgcaggaggacagcttaattcctctggcccttccgcttctcagttacaacaactgcagatgcagctgcagctagaacggcagcatgcccaggcagcacggcaacaactggagaccgcacgcaacgcaacccggcgtactaacacaagcagtgtcaccactacaatcacacaatccacagcaacaaccaacatagctaatacagaaagcagtcagcagactctacagaattcccagtttcttttaacaaggttgaatgatcctaaaatgtctgaaacggagcgccagtccatggaaagcgagcgtgcagaccgcagcctgtttgtccaagagctccttctgtccactttagtgcgtgaagagagctcatcctcagatgaggatgatcggggggagatggcagattttggtgctatgggctgtgtagatattatgcctttagatgttgctttagaaaacctaaatttaaaagagagtaataaaggaaatgagcctccaccacctcctctttgatgacatcccaattcgcagacaatgtcctctgtgctgtatttgccaatgaaagtggacaacaactatcttgggtttgtttggtgattgtaatttcaggtctgtcactcttgttacattgtgtacattcaaaaggaagagagaaaatatatatgataatcatttccacttaactaatttttacttctagcaggtaaatgtaggtagcagtgcaggggtgatctctgcttcctgtaccttgacatgcaaaaggctctcctaatactccacattcaaactgaagaggaaaattgaaatctctaatgaagctgctgtgtgtatttatgaatattaatgaataaaaactgcttggatggtttaccttaactactgcatgaggttttttgcagcgtgcatgagttttagtgaccttgttatttaagaagttaaatacaaggagtaaaacttaaaaaaaaaatacaaagcccaaagctttcccaaacattattcaatggttacacgacgaagtagcttttgaataatgtctgcctgaatcacctttctttgtgtgcctcctacgcacaaagccagctctgcagtggaatctggggattatagccgggtgtggcactccgccctgtgtgactgtcctgtcgccctgttagtcatcttgcctgtgtggagctcagcctgtctctttaactcatctgtagaagacacaccagtaaagctactgttggaatctgctgcaggggcctttgtgtgccctaaaaacaaatcctgttcatgtttgtttaaagtttttactttttgtggttgtttaaaattttttcaattgttaaatatgttttattcaggtgtagatgaatttcatttattgactgttcaacagagttaacctgaattatgttgtctttgtttttaaaaatctcacattctc

SEQ ID NO: 458 - DNA, 2327 bp, Homo sapiens
cgggggtgacagcagcccggagccgcggagcctcagcttccgcctggacccagcctcgtgggagccccgcgggtcctgcccagatgtggaagactgaggcctgttgaaagtgcagagctcagccctggcaccctctgttcccaagagctccatgcaggtgccacaggatggagaagaccttgctggccaaccctggtaccacggcctcctgtcccgccagaaggctgaagctcttcttcagcaagatggcgacttcctggttcgcgcctctgggtcccgtgggggcaaccccgtgatctcctgccgctggcggggctcagccctccattttgaggtgttccgtgtggccctgcgtccccggccaggccgacccacagccctctttcaactggaggatgagcaattccccagcataccggctctggttcacagttatatgacaggcaggcgcccactgtcccaggccacaggggctgtggtctccaggcctgtgacttggcaggggcctctgcgacgcagctttagcgaggacaccctgatggatggcccagctcggatagagcctctcagggcaaggaagtggagcaacagtcagcctgcagatttggcacatatggggcggtcaagagaagaccccgctgggatggaagcctccaccatgcccatatctgccttgccccgaacgagcagtgacccggtgttgctgaaggcccctgctcccctgggaactgttgccgacagtctcagggcctccgatgggcagcttcaagccaaggcaccaacgaagcccccccggacaccctccttcgaactgcctgatgcctctgaacgtcccccgacgtactgcgagctggtgccccgagtgcccagtgtccagggaacatccccgagccaaagctgcccagagccagaggccccatggtgggaggccgaggaggatgaggaggaagagaatagatgttttacaagaccacaggctgagatctctttctgcccccatgatgccccctcctgcctgctgggcccccagaatcggcccctggaaccccaagtcctgcataccctccgtggcctgttcctggagcaccatcctgggagcaccgcccttcacctgctattggtagactgccaggccacaggcctcctgggagtgaccagagatcagcggggcaacatgggagtctcatctggcctggagctgctcactcttccccatggacaccacttgaggttggaactgctggagaggcatcagacactggcgctggccggggcgctggcggtgctgggctgctcggggccgctggaggagcgcgcagccgcactgaggggactggtagagctggcgctggcgctgcggccaggggcggcgggggacctgcccgggctggctgcagtcatgggcgccctgctcatgccccaggtgtcccggttggagcacacgtggcgccagctccgaaggagccacacggaggctgcgctggcctttgagcaggagctgaagccgctgatgcgggctctggatgagggcgctggaccctgcgaccccggcgaggtggcgctgccgcacgtggcacccatggttcgcctactggagggcgaggaagtcgcggggccgctggacgagagctgtgagcggctgttgcgcaccctgcacggggcgcgtcacatggtccgggacgcacccaaattccgcaaggtggcagcccagcgcctgcgaggattccggcctaacccggagctgagggaggccctgaccaccggcttcgtgcggaggctgctctggggtagccggggcgcgggagctccgcgcgctgaacgctttgagaagttccagcgcgtcctcggcgtcctgtcgcagcgcctggagcctgaccgctgagagcgcagacacccttcttcacacccgggacccccaggtttttgcgaaccccagaagagaccaaaggagtcgtcccaggctcctcgcgcctcaggtggaatcctgccctgtgcctcacagaagaggtggggaccgcagtcagggtcacctggaccatggtgaacatgtgacctgcagatctggcatcagaggccagagttcaaatgtgactccacctcttaaaagccgtgatttctagcagttgacttcacctctgtgtcggcctttaacaaaatcatagccatacagcagctcaggcctgtaatctcagcactttgggaggccgaggcggaaggaaggcttgaggccaggagttcaagaccagccagggcaacatggtgagacctcatctctacaaaaactgaaaaataaaaaacttttaaaaaatgtaaaaaaaaaaaaaaaa

SEQ ID NO: 459 - DNA, 3750 bp, Homo sapiens
gcgctgctcgccagcttgctcgcactcggctgtgcggcggggcaggcatgggagccgcgcgctctctcccggcgcccacacctgtctgagcggcgcagcgagccgcggcccgggcgggctgctcggcgcggaacagtgctcggcatggcagggattccagggctcctcttccttctcttctttctgctctgtgctgttgggcaagtgagcccttacagtgccccctggaaacccacttggcctgcataccgcctccctgtcgtcttgccccagtctaccctcaatttagccaagccagactttggagccgaagccaaattagaagtatcttcttcatgtggaccccagtgtcataagggaactccactgcccacttacgaagaggccaagcaatatctgtcttatgaaacgctctatgccaatggcagccgcacagagacgcaggtgggcatctacatcctcagcagtagtggagatggggcccaacaccgagactcagggtcttcaggaaagtctcgaaggaagcggcagatttatggctatgacagcaggttcagcatttttgggaaggacttcctgctcaactaccctttctcaacatcagtgaagttatccacgggctgcaccggcaccctggtggcagagaagcatgtcctcacagctgcccactgcatacacgatggaaaaacctatgtgaaaggaacccagaagcttcgagtgggcttcctaaagcccaagtttaaagatggtggtcgaggggccaacgactccacttcagccatgcccgagcagatgaaatttcagtggatccgggtgaaacgcacccatgtgcccaagggttggatcaagggcaatgccaatgacatcggcatggattatgattatgccctcctggaactcaaaaagccccacaagagaaaatttatgaagattggggtgagccctcctgctaagcagctgccagggggcagaattcacttctctggttatgacaatgaccgaccaggcaatttggtgtatcgcttctgtgacgtcaaagacgagacctatgacttgctctaccagcaatgcgatgcccagccaggggccagcgggtctggggtctatgtgaggatgtggaagagacagcagcagaagtgggagcgaaaaattattggcattttttcagggcaccagtgggtggacatgaatggttccccacaggatttcaacgtggctgtcagaatcactcctctcaaatatgcccagatttgctattggattaaaggaaactacctggattgtagggaggggtgacacagtgttccctcctggcagcaattaagggtcttcatgttcttattttaggagaggccaaattgttttttgtcattggcgtgcacacgtgtgtgtgtgtgtgtgtgtgtgtgtaaggtgtcttataatcttttacctatttcttacaattgcaagatgactggctttactatttgaaaactggtttgtgtatcatatcatatatcatttaagcagtttgaaggcatacttttgcatagaaataaaaaaaatactgatttggggcaatgaggaatatttgacaattaagttaatcttcacgtttttgcaaactttgatttttatttcatctgaacttgtttcaaagatttatattaaatatttggcatacaagagatatgaattcttatatgtgtgcatgtgtgttttcttctgagattcatcttggtggtgggtttttttgtttttttaattcagtgcctgatctttaatgcttccataaggcagtgttcccatttaggaactttgacagcatttgttaggcagaatattttggatttggaggcatttgcatggtagtctttgaacagtaaaatgatgtgttgactatactgatacacatattaaactataccttatagtaaaccagtatcccaagctgcttttagttccaaaaatagtttcttttccaaaggttgttgctctactttgtaggaagtctttgcatatggccctcccaactttaaagtcataccagagtggccaagagtgtttatcccaacccttccatttaacaggatttcactcacatttctggaactagctatttttcagaagacaataatcagggcttaattagaacaggctgtatttcctcccagcaaacagttgtggccacactaaaaacaatcatagcattttacccctggattatagcacatctcatgttttatcatttggatggagtaatttaaaatgaattaaattccagagaacaatggaagcattgcctggcagatgtcacaacagaataaccacttgtttggagcctggcacagtcctccagcctgatcaaaaattattctgcatagttttcagtgtgctttctgggagctatgtacttcttcaatttggaaacttttctctctcatttatagtgaaaatacttggaagttactttaagaaaaccagtgtggcctttttccctctagctttaaaagggccgcttttgctggaatgctctaggttatagataaacaattaggtataatagcaaaaatgaaaattggaagaatgcaaaatggatcagaatcatgccttccaataaaggcctttacacatgttttatcaatatgattatcaaatcacagcatatacagaaaagacttggacttattgtatgtttttattttatggctctcggcctaagcacttctttctaaatgtatcggagaaaaaatcaaatggactacaagcacgtgtttgctgtgcttgcaccccaggtaaacctgcattgtagcaatttgtaaggatattcagatggagcactgtcacttagacattctctgggggattttctgcttgtctttcttgagctttttggaaggataattctgataaggcactcaagaaacgtacaaccacagtgctttcttcaaatcatatgagaaatactatgcatagcaaggagatgcagagccgccaggaaaattctgagttccagcacaattttctttggaatctaacaggaatctagcctgaggaagaagggaggtctccatttctatgtctggtatttgggggttttgtttgtttttgctttagcttggtgaaaaaaagttcactgaacaccaagaccagaatggatttttttaaaaaaatagatgttccttttgtgaagcaccttgattccttgattttgattttttgcaaagttagacaatggcacaaagtcaaaatgaaatcaatgtttagttcacaagtagatgtaatttactaaagaatgatacacccatatgctatatacagcttaactcacagaactgtaaaagaaaattataaaataattcaacatgtccatctttttagtgataataaaagaaagcatggtattaaactatcatagaagtagacagaaaaagaaaaaaggactcatggcattattaatataattagtgctttacatgtgttagttatacatattagaagcatatttgcctagtaaggctagtagaaccacatttcccaaagtgtgctccttaaacactcatgccttatgattttctaccaaaagtaaaaagggttgtattaagtcagaggaagatgcctctccattttccctctctttatcagaggttcacatgcctgtctgcacattaaaagctctgggaagacctgttgtaaagggacaagttgaggttgtaaaatctgcatttaaataaacatctttgatcacaaaaaaaaaaaaaaaaaaaa

SEQ ID NO: 460 - DNA, 2012 bp, Homo sapiens
gcggctgtccagtcgtagcccggccgcccgcgcctgtccggtccggtccggccacggaggcagcgcagcggcgggactccgagcctaccccgccgagtgagctgcgccgcaccgtgccgtcccacccggcacccaccagtccgatggggccgcagcggcggctgtcccctgccggggccgccctactctggggcttcctgctccagctgacagccgctcaggaagcaatcttgcatgcgtctggaaatggcacaaccaaggactactgcatgctttataacccttattggacagctcttccaagtaccctagaaaatgcaacttccattagtttgatgaatctgacttccacaccactatgcaacctttctgatattcctcctgttggcataaagagcaaagcagttgtggttccatggggaagctgccattttcttgaaaaagccagaattgcacagaaaggaggtgctgaagcaatgttagttgtcaataacagtgtcctatttcctccctcaggtaacagatctgaatttcctgatgtgaaaatactgattgcatttataagctacaaagactttagagatatgaaccagactctaggagataacattactgtgaaaatgtattctccatcgtggcctaactttgattatactatggtggttatttttgtaattgcggtgttcactgtggcattaggtggatactggagtggactagttgaattggaaaacttgaaagcagtgacaactgaagatagagaaatgaggaaaaagaaggaagaatatttaacttttagtcctcttacagttgtaatatttgtggtcatctgctgtgttatgatggtcttactttatttcttctacaaatggttggtttatgttatgatagcaattttctgcatagcatcagcaatgagtctgtacaactgtcttgctgcactaattcataagataccatatggacaatgcacgattgcatgtcgtggcaaaaacatggaagtgagacttatttttctctctggactgtgcatagcagtagctgttgtttgggctgtgtttcgaaatgaagacaggtgggcttggattttacaggatatcttggggattgctttctgtctgaatttaattaaaacactgaagttgcccaacttcaagtcatgtgtgatacttctaggccttctcctcctctatgatgtattttttgttttcataacaccattcatcacaaagaatggtgagagtatcatggttgaactcgcagctggaccttttggaaataatgaaaagttgccagtagtcatcagagtaccaaaactgatctatttctcagtaatgagtgtgtgcctcatgcctgtttcaatattgggttttggagacattattgtaccaggcctgttgattgcatactgtagaagatttgatgttcagactggttcttcttacatatactatgtttcgtctacagttgcctatgctattggcatgatacttacatttgttgttctggtgctgatgaaaaaggggcaacctgctctcctctatttagtaccttgcacacttattactgcctcagttgttgcctggagacgtaaggaaatgaaaaagttctggaaaggtaacagctatcagatgatggaccatttggattgtgcaacaaatgaagaaaaccctgtgatatctggtgaacagattgtccagcaataatattatgtggaactgctataatgtgtcattgattttctacaaatagacttcgactttttaaattgacttttgaattgacaatctgaaagagtcttcaatgatatgcttgcaaaaatatatttttatgagctggtactgacagttacatcataaataactaaaacgctttgcttttaatgttaaagttgtgccttcacattaaataaaacatatggtctgtgtaaaaaaaaaaaaaaaaaaaaaaaaaaaaaaaaaaaaaaaaaaaaaaaaaaaaaaaaaaaaaaaaaaaaaaaaaaaaaaaaaaaa

SEQ ID NO: 461 - DNA, 5246 bp, Homo sapiens
ggcgcttttcccggccggctctggtgctcggtgtccctccgccgccgctcccgtttccggcgggggagatggccaggatctgacccgggaggaggccgcacccgcgccgcgctctgcggctggctctaggcgatgccgagcagctcggacacggcgctggggggaggcgggggcctgagctgggcggagaagaggttggaggaacgccgcaagcggaggcgattcctgtcccctcagcagccgccgctgctgttgccgctcctgcagccgcagctcctgcaaccgccgccgcccccgccgcctctgctcttcctggctgctcccggcacggccgccgccgcagccgccgccgccgcggcctcctcctcttgcttcagcccgggcccccctctggaggtcaagcggctggcgagaggcaagaggcgcgcaggagggcggcagaagcggcgtcgcgggccccgcgccgggcaggaggcggagaagcgtcgggtcttctcgctgccccagccgcagcaggacggcggtggcggtgctagtagcggcgggggtgtgaccccgctggtggaatacgaggatgtgagctcccagtccgagcaggggctgctgctggggggggccagcgcggcaacggcggcgacggctgccgggggaacggggggcagcggcgggagtccggcctcctcctccggcacccagcggcgcggggaggggtcggagcgcaggccccgccgggaccgccgcagcagcagtggccgcagcaaagagcgccaccgcgagcaccggcggcgggatgggcagcgcggtggcagcgaggcctccaagtcccgcagccgccacagccacagcggcgaggaacgggccgaggtcgccaagagcggcagcagcagcagcagcggcggccgccggaaaagcgcttcggccacatccagcagcagtagcagccgcaaggaccgggactcgaaggcccaccgcagccggactaagtcgtccaaggagccgccttcggcctacaaggaaccgcccaaggcctaccgggaggacaagaccgagcctaaggcctacaggcggcggcggtccctcagcccactgggaggccgggacgacagcccggtgtcccacagggcctctcagagcctgaggagccgcaagtcccccagcccggcaggaggtggcagcagcccctattctcggcggctgccgcgctccccgagcccctacagtcgccgccgctcccccagctacagccgccacagctcctacgagcggggcggcgacgtgtcccctagtccctacagcagcagcagctggcgccgctctcgcagtccctacagccctgtgctcagacggtctggaaaatcccgaagcagaagcccgtattcatctaggcattcaagatctcgtagcaggcacagattgtctagatccagaagtcgtcattctagtatttctcctagcacactaactctgaagagtagcctggcagctgaattgaacaagaataaaaaagcacgagcagcagaggcagcaagagccgcagaagcagcgaaagctgcagaagcaactaaggctgctgaggctgctgccaaggctgcaaaagcttcaaacacttctacacctaccaaggggaacacggaaactagtgccagtgcatcacaaacaaaccatgtgaaggatgtgaagaaaattaaaattgaacatgcaccttctccctcaagtggtggaactttaaaaaatgacaaagcaaaaacaaagccacctcttcaggtaacgaaggtggaaaataatttgattgtagataaagccaccaagaaagcagtcatagttggaaaggagagtaaatctgctgctacaaaggaggaatcagtatctcttaaagagaaaaccaaaccacttacaccaagcataggagccaaggagaaggagcaacatgtagctttagtcacctctacattaccaccgttacctttgcctcccatgctgcctgaagataaagaagctgatagcttacgaggaaatatttcagtaaaagcagttaaaaaagaagtagaaaagaaactccgatgtcttcttgctgatttaccgctgccccctgagctaccaggaggagatgatctttcaaagagtccagaggaaaagaaaacaacaacacagttacatagtaaaaggaggcctaaaatatgtgggcctcgctatggtgaaaccaaagaaaaagatattgactggggaaaactctgcgtggataaatttgatatcatcggaattattggagaaggtacttacggacaagtttacaaagccagggataaagacactggagaaatggtagccttaaaaaaagtacgtctggataatgaaaaggaaggctttccaattacagcaattcgagaaattaaaattctccggcagcttacccatcagagtattatcaatatgaaggaaatagtgactgataaagaagatgctttggatttcaagaaggacaaaggtgcattttatctggtgtttgaatatatggaccatgatctgatgggactactggaatcaggcttggttcattttaatgaaaatcacataaagtcatttatgagacagctcatggagggtctggattattgtcataagaagaactttttgcatagagatattaaatgttccaatatccttctaaataatagagggcagataaaacttgcagactttggacttgctcgattgtatagctcagaagaaagtcggccgtatactaacaaggtaattactttatggtaccgtccacctgaactgctactgggagaagaacgatacacaccagccattgatgtatggagctgtggctgtatccttggcgaactcttcactaaaaaacctatatttcaagcaaatcaggaacttgcacaactagaattaataagccgaatatgtgggagtccatgtcctgcagtgtggcctgatgtaatcaaactaccatatttcaacaccatgaaaccaaagaagcaatatcgtcgaaagttaagagaagaatttgtttttattcctgcagctgcgctagacttatttgattacatgcttgccttggatcctagtaagcgctgcactgctgaacaggctcttcagtgcgagttcctccgagatgtggaaccctcaaaaatgcctccaccagatctccctttatggcaagattgtcatgagttatggagtaaaaagcgaagaagacagaagcagatgggcatgactgatgatgtttccacaattaaagcccccaggaaggacttgtctctgggcttggatgacagcagaaccaacacaccccagggtgtgctgccatcttcacagctgaaatctcagggcagctcaaatgtggcacctgtaaaaacaggccctggacagcacttaaaccacagtgaattggcaattctactaaacctactacaatctaaaacaagtgttaatatggctgattttgtccaagtgttgaacattaaggtaaactctgagactcaacagcagctaaataaaataaaccttcctgctggaattttggcaacaggtgaaaaacagacagatccatcaacaccacaacaggagtcttcgaaaccgttgggaggaattcagccttcttctcagaccatccagcctaaaatggagactgatgctgcccaggcggctgtgcagagtgcatttgcagttctgttgactcagttaataaaggctcagcagtcaaagcagaaagatgtgctactagaagagagggaaaatggatcgggacatgaagcgtcattacaactcaggccacctccagaacctagcactccggtgtcgggacaagatgacctcatccagcatcaagatatgaggatcttggagctaacgccagaaccagaccggcctcgaattctgcctcctgaccaacgacctcccgagcctcctgaaccaccaccagtcactgaggaagatctagattatcggacagaaaaccagcatgtacccaccaccagttcttcattaactgaccctcatgccggagtgaaggcagccctgttacagctgcttgctcagcatcagccccaggatgaccccaaaagagaaggtgggattgattatcaagcaggagacacttacgtgtccacttcagactacaaggacaactttggatcctcttctttctcttctgctccttatgttagcaatgatggtctaggaagcagttctgctccaccactagaacgacgtagtttcattggaaattcagatattcagtctttggataactacagtactgcttcatctcattctggtggtccacctcagccttctgccttttctgagtcatttcccagttcagtagctggatatggagacatttacctcaatgctggtcccatgttgtttagtggagacaaggaccatagatttgaatatagccatggtcctattgcagtcctggcaaacagcagtgacccttccacggggccagagagtactcatcctttgccagcaaagatgcacaactataactatggtggtaacttacaggaaaatccgagtggccccagcctcatgcatggacagacctggacttctcctgcccaaggacctggatattcacaaggatacaggggacatattagcacatcaactggcagaggcagaggcagagggttaccatactgagtatctgtttttcctcaggcacatcatttttatctggaaagacttttctagctgcaatttaaggcagcaatccaagagacttgaataataataattcaacaacagctttatttttatgtggagaagggtcttgcatacaatagtttaaaaaagacaaaaaaaacctttgcttaaattcatgctgttctaaaaactagatcgattgtacatcttcacaaattctagttaacaattttattttgtattcttgcagttttaagtggatgctaattttaggggcataagccttttatggccctcttgcagatcttctgaactatgcacatttgtgctttttttgtaagtttggaccaacttttatgtaacaaacagcccctccccacctccagttttacaacaatcagaaagggcactgatttatttggtatttttctttttacaaagctacctttagtcaaaggtcactgtcagtctttgcacctgctttcagtgttattgtgaaaggtgtactttgtgctcatttcagaaaataaaacacaacctttctcttgatgcaacagttttataaaaaaaaa

SEQ ID NO: 462 - DNA, 5066 bp, Homo sapiens
ggcgcttttcccggccggctctggtgctcggtgtccctccgccgccgctcccgtttccggcgggggagatggccaggatctgacccgggaggaggccgcacccgcgccgcgctctgcggctggctctaggcgatgccgagcagctcggacacggcgctggggggaggcgggggcctgagctgggcggagaagaggttggaggaacgccgcaagcggaggcgattcctgtcccctcagcagccgccgctgctgttgccgctcctgcagccgcagctcctgcaaccgccgccgcccccgccgcctctgctcttcctggctgctcccggcacggccgccgccgcagccgccgccgccgcggcctcctcctcttgcttcagcccgggcccccctctggaggtcaagcggctggcgagaggcaagaggcgcgcaggagggcggcagaagcggcgtcgcgggccccgcgccgggcaggaggcggagaagcgtcgggtcttctcgctgccccagccgcagcaggacggcggtggcggtgctagtagcggcgggggtgtgaccccgctggtggaatacgaggatgtgagctcccagtccgagcaggggctgctgctggggggggccagcgcggcaacggcggcgacggctgccgggggaacggggggcagcggcgggagtccggcctcctcctccggcacccagcggcgcggggaggggtcggagcgcaggccccgccgggaccgccgcagcagcagtggccgcagcaaagagcgccaccgcgagcaccggcggcgggatgggcagcgcggtggcagcgaggcctccaagtcccgcagccgccacagccacagcggcgaggaacgggccgaggtcgccaagagcggcagcagcagcagcagcggcggccgccggaaaagcgcttcggccacatccagcagcagtagcagccgcaaggaccgggactcgaaggcccaccgcagccggactaagtcgtccaaggagccgccttcggcctacaaggaaccgcccaaggcctaccgggaggacaagaccgagcctaaggcctacaggcggcggcggtccctcagcccactgggaggccgggacgacagcccggtgtcccacagggcctctcagagcctgaggagccgcaagtcccccagcccggcaggaggtggcagcagcccctattctcggcggctgccgcgctccccgagcccctacagtcgccgccgctcccccagctacagccgccacagctcctacgagcggggcggcgacgtgtcccctagtccctacagcagcagcagctggcgccgctctcgcagtccctacagccctgtgctcagacggtctggaaaatcccgaagcagaagcccgtattcatctaggcattcaagatctcgtagcaggcacagattgtctagatccagaagtcgtcattctagtatttctcctagcacactaactctgaagagtagcctggcagctgaattgaacaagaataaaaaagcacgagcagcagaggcagcaagagccgcagaagcagcgaaagctgcagaagcaactaaggctgctgaggctgctgccaaggctgcaaaagcttcaaacacttctacacctaccaaggggaacacggaaactagtgccagtgcatcacaaacaaaccatgtgaaggatgtgaagaaaattaaaattgaacatgcaccttctccctcaagtggtggaactttaaaaaatgacaaagcaaaaacaaagccacctcttcaggtaacgaaggtggaaaataatttgattgtagataaagccaccaagaaagcagtcatagttggaaaggagagtaaatctgctgctacaaaggaggaatcagtatctcttaaagagaaaaccaaaccacttacaccaagcataggagccaaggagaaggagcaacatgtagctttagtcacctctacattaccaccgttacctttgcctcccatgctgcctgaagataaagaagctgatagcttacgaggaaatatttcagtaaaagcagttaaaaaagaagtagaaaagaaactccgatgtcttcttgctgatttaccgctgccccctgagctaccaggaggagatgatctttcaaagagtccagaggaaaagaaaacaacaacacagttacatagtaaaaggaggcctaaaatatgtgggcctcgctatggtgaaaccaaagaaaaagatattgactggggaaaactctgcgtggataaatttgatatcatcggaattattggagaaggtacttacggacaagtttacaaagccagggataaagacactggagaaatggtagccttaaaaaaagtacgtctggataatgaaaaggaaggctttccaattacagcaattcgagaaattaaaattctccggcagcttacccatcagagtattatcaatatgaaggaaatagtgactgataaagaagatgctttggatttcaagaaggacaaaggtgcattttatctggtgtttgaatatatggaccatgatctgatgggactactggaatcaggcttggttcattttaatgaaaatcacataaagtcatttatgagacagctcatggagggtctggattattgtcataagaagaactttttgcatagagatattaaatgttccaatatccttctaaataatagagggcagataaaacttgcagactttggacttgctcgattgtatagctcagaagaaagtcggccgtatactaacaaggtaattactttatggtaccgtccacctgaactgctactgggagaagaacgatacacaccagccattgatgtatggagctgtggctgtatccttggcgaactcttcactaaaaaacctatatttcaagcaaatcaggaacttgcacaactagaattaataagccgaatatgtgggagtccatgtcctgcagtgtggcctgatgtaatcaaactaccatatttcaacaccatgaaaccaaagaagcaatatcgtcgaaagttaagagaagaatttgtttttattcctgcagctgcgctagacttatttgattacatgcttgccttggatcctagtaagcgctgcactgctgaacaggctcttcagtgcgagttcctccgagatgtggaaccctcaaaaatgcctccaccagatctccctttatggcaagattgtcatgagttatggagtaaaaagcgaagaagacagaagcagatgggcatgactgatgatgtttccacaattaaagcccccaggaaggacttgtctctgggcttggatgacagcagaaccaacacaccccagggtgtgctgccatcttcacagctgaaatctcagggcagctcaaatgtggcacctggtgaaaaacagacagatccatcaacaccacaacaggagtcttcgaaaccgttgggaggaattcagccttcttctcagaccatccagcctaaaatggagactgatgctgcccaggcggctgtgcagagtgcatttgcagttctgttgactcagttaataaaggctcagcagtcaaagcagaaagatgtgctactagaagagagggaaaatggatcgggacatgaagcgtcattacaactcaggccacctccagaacctagcactccggtgtcgggacaagatgacctcatccagcatcaagatatgaggatcttggagctaacgccagaaccagaccggcctcgaattctgcctcctgaccaacgacctcccgagcctcctgaaccaccaccagtcactgaggaagatctagattatcggacagaaaaccagcatgtacccaccaccagttcttcattaactgaccctcatgccggagtgaaggcagccctgttacagctgcttgctcagcatcagccccaggatgaccccaaaagagaaggtgggattgattatcaagcaggagacacttacgtgtccacttcagactacaaggacaactttggatcctcttctttctcttctgctccttatgttagcaatgatggtctaggaagcagttctgctccaccactagaacgacgtagtttcattggaaattcagatattcagtctttggataactacagtactgcttcatctcattctggtggtccacctcagccttctgccttttctgagtcatttcccagttcagtagctggatatggagacatttacctcaatgctggtcccatgttgtttagtggagacaaggaccatagatttgaatatagccatggtcctattgcagtcctggcaaacagcagtgacccttccacggggccagagagtactcatcctttgccagcaaagatgcacaactataactatggtggtaacttacaggaaaatccgagtggccccagcctcatgcatggacagacctggacttctcctgcccaaggacctggatattcacaaggatacaggggacatattagcacatcaactggcagaggcagaggcagagggttaccatactgagtatctgtttttcctcaggcacatcatttttatctggaaagacttttctagctgcaatttaaggcagcaatccaagagacttgaataataataattcaacaacagctttatttttatgtggagaagggtcttgcatacaatagtttaaaaaagacaaaaaaaacctttgcttaaattcatgctgttctaaaaactagatcgattgtacatcttcacaaattctagttaacaattttattttgtattcttgcagttttaagtggatgctaattttaggggcataagccttttatggccctcttgcagatcttctgaactatgcacatttgtgctttttttgtaagtttggaccaacttttatgtaacaaacagcccctccccacctccagttttacaacaatcagaaagggcactgatttatttggtatttttctttttacaaagctacctttagtcaaaggtcactgtcagtctttgcacctgctttcagtgttattgtgaaaggtgtactttgtgctcatttcagaaaataaaacacaacctttctcttgatgcaacagttttataaaaaaaaa

SEQ ID NO: 463 - DNA, 1770 bp, Homo sapiens
agtgctctatcttgttgccggaagtgggaagagagaaaggttgtgatggcggctatagctgcatccgaggtgctggtggacagcgcggaggaggggtccctcgctgcggcggcggagctggccgctcagaagcgcgaacagagactgcgcaaattccgggagctgcacctgatgcggaatgaagctcgtaaattaaatcaccaggaagttgtggaagaagataaaagactaaaattacctgcaaattgggaagccaaaaaagctcgtttggagtgggaactaaaggaagaggaaaagaaaaaggaatgtgcggcaagaggagaagactatgagaaagtgaagttgctggagatcagtgcagaagatgcagaaagatgggagaggaaaaagaagaggaaaaaccctgatctgggattttcagattatgctgctgcccagttacgccagtatcatcggttgaccaagcagatcaaacctgacatggaaacatatgagagactgagagaaaaacatggagaagagtttttcccaacatccaatagtcttcttcatggaacacatgtgccttccacagaggaaattgacaggatggtcatagatctggaaaaacagattgaaaaacgagacaaatatagccggagacgtccttataatgatgatgcagatatcgactacattaatgaaaggaatgccaaattcaacaagaaagctgaaagattctatgggaaatacacagctgaaattaaacagaatttggaaagaggaacagctgtctaatcccttcaagaactgtttatagaagcttgagaatggggtaaaaatttctgctagcaaaatcaagttctttttgaaattttatcagtaatccagaatttagtagtccatgccttctcactcagcatttagaaataaaaatgtggtttcttaaacgtatatcctttcatgtatatttccacatttttgtgcttggatataagatgtatttcttgtagtgaagttgttttgtaatctactttgtatacattctaattatattatttttctatgtattttaaatgtatatggctgtttaatctttgaagcattttgggcttaagattgccagcagcacacatcagatgcagtcattgttgctatcagtgtggaatttgatagagtctagactcgggccacttggagttgtgtactccaaagctaaggacagtgatgaggaagatggcagtggccaccggaggactggagcagtccctcctcatggcggcctgtgaccaaggtcggggaggagtggagctatccttccatgatctgatcatgtacagttccctttttaaaaagcaataaatgcttgggattagaatttctaacatttttagtctatcatttaaaacaaacatttgtatatatacatttgtttatatacatacatgcttccattctacaaacactgaaagaatattttattatgggaaattccatacacccaatacccctggtgagtcccatatacccagtaccctgttcaacaatcattaactcatggccagtcctgcttcatctttatttccatttactttcttcatgactcttattttgacgcatatactagatatataatttcatctataattattttagtatgtatctctgaaagataaagacttaaatgaccacaatactattatcactgcaatagatttatttttataaaactccagagggaaaggttgttattttttctctatgttgaattaaatgctaaatatctaaaaa

SEQ ID NO: 464 - DNA, 1644 bp, Homo sapiens
agtgctctatcttgttgccggaagtgggaagagagaaaggttgtgatggcggctatagctgcatccgaggtgctggtggacagcgcggaggaggggtccctcgctgcggcggcggagctggccgctcagaagcgcgaacagagactgcgcaaattccgggagctgcacctgatgcgggaatgtgcggcaagaggagaagactatgagaaagtgaagttgctggagatcagtgcagaagatgcagaaagatgggagaggaaaaagaagaggaaaaaccctgatctgggattttcagattatgctgctgcccagttacgccagtatcatcggttgaccaagcagatcaaacctgacatggaaacatatgagagactgagagaaaaacatggagaagagtttttcccaacatccaatagtcttcttcatggaacacatgtgccttccacagaggaaattgacaggatggtcatagatctggaaaaacagattgaaaaacgagacaaatatagccggagacgtccttataatgatgatgcagatatcgactacattaatgaaaggaatgccaaattcaacaagaaagctgaaagattctatgggaaatacacagctgaaattaaacagaatttggaaagaggaacagctgtctaatcccttcaagaactgtttatagaagcttgagaatggggtaaaaatttctgctagcaaaatcaagttctttttgaaattttatcagtaatccagaatttagtagtccatgccttctcactcagcatttagaaataaaaatgtggtttcttaaacgtatatcctttcatgtatatttccacatttttgtgcttggatataagatgtatttcttgtagtgaagttgttttgtaatctactttgtatacattctaattatattatttttctatgtattttaaatgtatatggctgtttaatctttgaagcattttgggcttaagattgccagcagcacacatcagatgcagtcattgttgctatcagtgtggaatttgatagagtctagactcgggccacttggagttgtgtactccaaagctaaggacagtgatgaggaagatggcagtggccaccggaggactggagcagtccctcctcatggcggcctgtgaccaaggtcggggaggagtggagctatccttccatgatctgatcatgtacagttccctttttaaaaagcaataaatgcttgggattagaatttctaacatttttagtctatcatttaaaacaaacatttgtatatatacatttgtttatatacatacatgcttccattctacaaacactgaaagaatattttattatgggaaattccatacacccaatacccctggtgagtcccatatacccagtaccctgttcaacaatcattaactcatggccagtcctgcttcatctttatttccatttactttcttcatgactcttattttgacgcatatactagatatataatttcatctataattattttagtatgtatctctgaaagataaagacttaaatgaccacaatactattatcactgcaatagatttatttttataaaactccagagggaaaggttgttattttttctctatgttgaattaaatgctaaatatctaaaaa

SEQ ID NO: 465 - DNA, 10217 bp, Homo sapiens
ctgcggctgcgtttcccccaccgggtacaaagcaaggagccaacgcccaaggtgaaacgaaaagggctagggggtgctggtgggggcagctctccctccaagtcaccccccgtgctggggccacagcaggccctgtctgaccggccctgccttgtggtcctgcataagccactggacaaactgctcatcaggtatgagaagctgcccttggactaccgggcacccttcttgctgacattggagccaccaggtccactgcccttggtgtcaggccgctcagcctcttctagcctggcgtcactgtcccgctacctctaccatcagcgctggctttggagtgtcccgtcaggactggcccctgcgctgcctctcagtgccattgcccagctcctctccatcctcactgaagtccgactttctgaaggattccacttcgcctgcagtggggaaggaatcatcaacatggttctggagcttccaattcagaatgaaccaccagggcaggctgcagctgaagagaagcacacctgtgttgtccagtacatcctcttccccccacactctacctccaccaaagacagcttctcgacagatgatgacaatgatgtggaagtggaggccctggagggagactcagagctcaatctggtcactgaggtgtgggtggagccacagtatgggcgagtgggacctggccctggaatctggaagcacctccaggacctgacgtattctgagatcccgcaagctctccacccacgggatgctgcctgcataggctccatgctgagctttgaatacctgatacagctgtgtcagagcaaggaatggggtcctctgcccccagagccgagggtctctgatggattggatcagggaggagacacctgcgtccatgagatccctttccattttgacctaatgggattgctgccacagtgccagcagctccagatgttcttcctcttgcttgccagaggtgccgaggggccactgctgggggttcatgggatcccgaaggagcaagcagtcggcagcacccaggccacaggagactccgcttttacttccctgagtgtaggtcttcctgaaactctcaagcctctcatctctgcccagccccctcagtggcgctgctatgcaaggcttgtgaacccccagcatgtgtttctgacttttctcccagctaccttctcagatgtccagcgtctggctgcctgtggcctggagggaccccctcaagaggagacaaagcctaagtttggggattggagtggggctcccagtctgaaagatctaggaggaactgggatcaaagctacaaagtcccacgtccctgtcctcagtgtgaccctggctagtgacaatgcccagaatcaaggagagctaagtccaccattccgtcgagacttacaggcttacgctgggcgtcaggcttcccagacagagagtgcggatgggccccggacccggtgtcctgtctacatctacagctgttcactggaagcgctgagggaacaaatggttggcatgcagccccctcaggcgccccgagacctcatcttccggactcagttcctcgaccacccctccccatcctcagcctggatggaaccccggtacaaggaggcagctaaccactgtgccctgctgcaggagcatgcacagcggtgctatgtccgtgggctattccgcagcttgcagcaagcacagagtgtgacctcccaggatttgctgacagcggtagatgcctgtgaggagctactacaagaaatagacatcaccccatttctccttgcattgtgtggccacacttggggtttgcctcatgcacccccaagtcctggtcctctcagccctgggcccttcagcagcagcatggaggagggtgctgaacctcgggaacgagctatcctagcttctgaatccagcatagagaccgaggacctaagcgagcctgagtttcagagcacccgtgtccctggcattccagaccctgggccagagatctctctgacagatgtctgccagctcagaggagaggcccatggtgcccttcatagcgtcatccaggagaagttcctagagatcagtcgtctccacttccgcacagtgccttccaatccccactacttcttctattgccctccatccagcaggcgagaagatgaggggcctcgggacacagtagacagaaaaatcagtgacctggagttttcagaggctgagcttatgggagaagaaggagacacatctgcctgctgtgtggtcactgagagtgacccagagctagaggtagaataccgggagagccgtgaatcagacctggggcctgctgggctagactctgcctcgctgtcagacgtagacactgtgaatcctgatgaagactccttcagtatcttggggggcgactcacccactgggcctgagagcttccttcatgacctgccaccgctcttcctgcacctcacgtgctccgtgcggctacgtgggcagcacagctcagtacctgtgtgcagcctgcctacctgcctgggccaggtgctttccagtctggagggccccccagttggaggccgagttcccttgagggacctcagtgtgactctggatgtcttcatgctgactttgcccctggaagtggagctccccacggcctcggaccctcagcaccaccggtcaacatctgaaagcagtgcttcatttccacgatccccagggcagccatcatctttaaggtcagatgatggcctcgggcccccactgccacccccagaagaggagaggcacccaggactatccaatttggccacgccccacagactggctattgagaccaccatgaatgagatccgctggttgttggaagatgagatggtgggggcactccgaagagggggcatcccacagagtcctgccctgcaccgcgcagctgcccatatccatagttctcctggacgctccacctgccttcgccaaactctgccactgagttttgtatttgggccagagcgttccctcacacaattcaaggaggagttccgccgcctccatctccctggccatgttcttcttgaagaccctgacagtggcttcttctttgtggcagctggccaacagccaggtgggtcccatggggagccttcttcagcggcctgggcttggcacagtcatgaggacagggctgaaggcatcgaaggggagaccctgacagccagcccccaagcacctgggtccccagaggattctgagggtgtccccctcatcagcctgccccgcgtgccacagggagggagtcagcctgggcccagccggggattaagtctcatgtccagtcagggcagtgtggactcagaccacctaggttatgatggtggcagcagtggctcagacagtgagggtcccaatgacacccttggtgagaaggcccccttcacattgcggactccacctgggccagcacctccacagccttcactctcaggcctccctgggccctgcctgcctgacttctggctcattgtccgggtcctgcaggaccgtgtggaagtgtatgcacatgcacggagcctgattcgggaggatggggggccgggcactgagtgtcgccacctgcagcagctcctggtgaggcgagttggggagatctgcagggaggtcaaccagcgactgcttcttcaagaccttcatgacagccacgtgtgtaactctcttctggtggccgagagtgaagaagatctgtggcgcagtgagactcccttccactcccgtcagcgggcaccactgcccagtgatgattatgctgctgatgagagctgtgcgccccgtgggtacctggcagccacaatgcagtttgtccctggccatttctcctgtgacgttgtgtggggaactgtgatccgagtccattcacgcctcaaaatggggcccagcatgggggtctctcgggccatccaggccctgcgctctgtgctcaatgccttctctgtggtgaaccggaaaaacatgtttgtttaccaggagcgagcaacaaaggctgtgtactatcttcggctcctagagacatcctgcagtgaccggccatggaaaggggatgcgctgcccccttccctcgctctgtcccgaagccaagagcccatctactctgaggaagcctcgggtcctcgttctcccttagacatggtctctagccgcagttcagatgctgctcgtcctgtgggccaagtggacagacatatccagctgctggtccatggtgttgggcaggcaggtcctgagatcacggatgagctcgtgcgagttctatgtcggcgcctggatgaggccacgctggacgtcatcacagttatgcttgttcggaactgcaagctgacaccagctgatgtggagttcatccagccccctggaagtctcccctcagaggtgctgcatctggccctacccacctcctgcaggccctggcttccagccctggcatggtacctacggcagaacttgctcatcttcctgcactctcccaagtacacagatagcaacagccggaaccacttccaacatccactcccaccacagggtggcctccctgacttggacatctacttgtataacaagcctggtggacagggcactgggggcaaaggggttgcctgcatcactctagcctttgtggatgaaggaggggcccccttgtcactggcgttgtggcccccctcctctccggggcccccagacccactgcgagaggaggaatttgagcaactgacccaggtcatccgctgcccggttgttgtggacagttcttcagctcagaatggggccccacggcttcgattggatgtgtgggaaaaggggaacattagtattgtgcagctggaggagaaactccgaggagcagctcgccaggccctggccgatgccatcatcgagcttcagctgctgccagcttcactatgtacagaggacacacccacaggaagtctcaggaacggatcgttggaaactaagagctctgcaggccgagctagcacctttccccctgcccctgtccctggggagcctgtgactccacccagcaaagcgggccggcgtagcttctgggatatgctgagtaaaacagaatgtggggatttgggttcccccaaaacaactgatgacattgtcctggatcggccagaagacactcggggccggaggcgtcacaaaaccgagagtgttcggactcctggtggagctgagcgggcgccaggctcagattctggagcccagagacaaaagcgccggacaacacagctagaagagggtgaggtggggacccttcatcctgtgtttgcccgtgttgctcagcgctggatggagtttatggttcagattggttgtgcctcagtgtccagaagctctgcccacatggtgtcccggttcctccttccatccatcctgtctgagttcaccgcactggtcacctcaatggctggagacaccagtgtccgcatctttgagcagcatttgggttcagagccagagatcttcggcccttgttcccctgggcaactgggcccctctccccgccctgcagctgagcggcatctgctgcttctgggaaggaacttcttgcagtggaggagaccaacacagcaggctgccaaagccatgcagcgcttcgagccaggaggtgatgggagctcagggcgaaatgctccccggcagaggctcttgctactagaggttgtggacaagaagctacagctgctgacctacaactgggctccagacctgggggcagcattgggccgagcgctggttcgcctggtgcagtggcagaatgcacgagcccatctcatcttctgcctactcagccagaagcttggcctcttccatcattatggccagttggacttccccgtgcgagatgaaaaggagccaaacccattcctgctgccgaccatggaagtggagaccctcatccggagtgcaagtcccccgctgagccgtgagcagggccgactgagtgggtcctctcgtggtgggggtcctcttcccctggacacattcccctttgacgaggccctaagggatatcacggctgcccgccccagctccgtacttggtcctgtgcccagacctcctgatcctgtcacctaccatggacaacagttcctagagatcaagatggcagagcgcagagagctggagcgccagatgaagatggaaaacctgtttgtaacctggcagcagcgttctaccccagccaccatgcccatcagtgctggagagctggagaccctgaagcagtcatcccgcctggtgcattactgtgcaacagccatgctcttcgacccagctgcctggctgcatgggcccccagagacctctggaccccctgacgggcagcggcgccatcgccctgagtcagggtctgggagccgagaggcccccacaagctgtgaatccttggatgtgtcgcccccgggagcccgtgaggagccttggctgaaggagctgagcttggctttcctgcagcaatatgtgcagtatctgcagagcataggttttgtgctggtaccactgcggcccccctcacccgcccgcagcaccagccggccacgggccatggctatccttggaacagagggtcgaggctccttctcctgccctaaaaccaagactgatgggagccccaagagcactagctctccggtaaccacctaccacctgcagcgggcactgcctgggggcatcatcctcatggaactggcattccagggctgttacttctgtgtcaaacagtttgccctggaatgttcccgaatcccaatggggcaggctgtcaactcacagctgtccatgctgttcacagaggagtgtgacaaggtgcgggacctgatgcacgtgcactcgttcagctatgacttccatctgcgcctcgtgcatcagcacgtgctaggtgcccatctggtgctgcggcacggctaccacctcaccacctttctgcgacacttcctggcccaccaccctgacggaccccactttggccgcaatcacatttaccaagggacattggagctccccacaccactcattgctgcccaccagctatacaactacgtggctgatcacgccagctcttaccacatgaagccattgcgaatggcccggccagggggcccagaacacaacgagtatgccctggtgtcggcatggcacagttctggctcctacctggactctgagggacttcgacaccaggatgactttgatgtgtctctgcttgtctgtcactgtgctgcaccctttgaggagcaaggagaggctgagcggcacgttctgcggctacagttcttcgtggtgctcaccagccagcgagagctcttccccaggctcactgctgacatgcgccgcttccggaagccacccagactgccccctgagccagaggctcctgggagttcagctggcagccctggggaggcctcagggcttattctagcgcctggaccggctcctctgttcccaccactggctgcagaggtgggcatggcacgagcacggctggctcagctggtgcggctggctggagggcactgccgtcgggacaccctttggaagcgcctcttcttgctggagccaccggggcctgatcgactgcggctaggggggcgcctggccctggcagagctggaggaactcctagaagcagtccatgccaaatccattggggacatcgacccccagctggactgcttcctatccatgacggtctcctggtaccagagcctgatcaaagttctcctaagccgcttcccccagagctgtcgccatttccaaagcccagacttgggaactcagtacctggttgtgctgaatcagaagttcactgactgctttgtgctagtgtttctggactcccacttaggaaagacgtctctgacagtggttttccgagagcccttcccagtacagccccaggacagcgagagcccccctgcccaactggtctccacctaccaccacctggagtctgtcatcaacacagcctgtttcaccctctggacccgcctcctctgagggagtggactggaccactgaatgtcactgttccttgaatcatgggcctaccagattgcctgccagaggcaggactgaccagcccttctgggccccagggcaagccagacactgagtgacaccaaaggctttgtaactatgtcttgagggtctgctgccccagcctggcagcaggaaccgccctccccaaacacccacagccactgacccatccaggactccagagagtcaggtcaaccccgaggaccccttgggcccttctggggtactcctttcggcccccctggtagagtctcgggagttcacacagggtggcaaacaccccctagagctcctctgcctgaatcctgccccctagcctttgaccactgtcagccacctgtgtcccttgagccttcgggtcttcacttcccacttggacatcactgctggacattcccatcgagatgacacctgggttccaatcccagctctgcctttgaagcacttgtggccaccgtcaagtccctttgctctcggaccctgggtttctcatcctttaatgaggtgggttcagaagctctcccatcttcacagcaaccctggcactggcttctcaatgggagggaagcagcagagaaactgaagtgttagacactatgtgtcccaccaccccattacagagacatatgacaatgttcagcaggtcatctttaatgcagaggaggagatgggatgtcactcgctgtctggaggcacgtgggtggtgtgcgggccctcactggccagcctctgggtggccccgcctatcccagtatgaacgtagccaactcaagccctctactgtgtctcctgcagggagagggaggcctcggcacctcagcccacaaggagaaaacagcccctgtccgggtccctccagagctcccttccccagggccacgcctcacctcgaggctgatactcacagcccacgaagcctttgtagccttcatcttccagcagttgaaacagataggggaaattcagctctccggggctgctgggctcccctcggcctgggacctgtgccacctgcacatgccctggggacagatgtggacaaatgtggggtccaggctcctgccagggcctgaaggacagatgtggggattgaaagggtgggagggcaaaggaaggtcctctcaccaacaatgggcaggaactcccggatgtttcctgtcaggttcccatccatgatctgccagtggaatatgtcctagggaagaggatactacattccgagaccccgcaggccccgccctccttccgatctgcgaagtacccccttccacttaccatttgtaattggaggttgggtcttcctaccttctgtaagatggctgccgctgtaagagaagccagggaggggaccgtgagcctcaagagcacaggaatcaaaagggacagaaggagagacagggctggggtcgtaccctgctggggcgtgtccaggaagtactgggggtcagtgatgcgggtgttgatgggctccagcagtcccacgaggtcctcctagcagcatgtcgggtgctgtgaatagagctccttcccaagtttgtcccccatcagtcagtcactggtcaaggccctcacctgttcctctgacctaggctggcagcctcacgtgctgtccccactgtgcacccccttctccgcacacccacagagacatgtaagtacgtgtgtgtttccacctttctcacctgagccaaaaccccagctgcatgcctcaggttctccagaaaaacggcctccatctcagccttgactgctattcgatcagctccctggggtactcggccagccatcaggtggatcctgtggggaagatggactggaggccttgcctcccttggctctctctgcacctcttccaggattccctgactgtgccagccctcgtccgtctccccaggtctccagtccatggcacctgggtcacgatgcccaggtatcccagcactttcagagacacttcagtgatggctgaggggcaagccctttcccagacatctcagtgtccacccaccgcctcctgcctccagtactttccaaaacctttccttccctcggtccttctccgcaacctgtaacctgctaaattctcacctttaaaaattgtcctgaccttt

SEQ ID NO: 466 - DNA, 14123 bp, Homo sapiens
tgcaacggaaacttttggctccacgaacagaaaagcaagagcaaaaactcagttaaatgcgttcttcctccatctttgcctagtccaaaaggaaaaaaaaagaaacagaaaaaagaaaaactgtttggaagagtagcgttgaggtttgctttttacctgtttttcctctagaacagccaggtggattcacatgatccaattttttaattgtcttctatgtcccactccgaataacccggatgccccagcacaatcagagagatcgttttttttaaaaaaaatttcagcctccaaaggtaggaggggagtgttaggggagaaagtactttaattaaaaatcaataactcgaggtttttgggatacggtttgccatttcctaattaagaaatgggtttgacagtccctttgtacacactgctatgcaaaccccaaagggttggcggctgtccgggcgatgacactccggtcccctgcgagaccccgggccagccaggcccgtccgccgccggcctctggggtccgtccccggctcgcgcagacctctcgcttctctcggctctgtctcctgcgctcagctctgctcggggccggccgcctcaggctcgccgccaccaggtcgttgcaaataccttttccctccccggggccccagcgcgcggccacctcccagcctccccccctcccaccctggcagcggggccctttcccggctcaggaacagcagcagcccgggccgcgccggcaggaagcgaggcccatgttgctgctgttccctggcgcgcctccccgccctccgggggccgccacggctcttccgcgctcccgggcacccccctccgcgcctgcgctgtgccccacgggggcggggctcagattcctgtcagcggcggcggcggtggcggcgaccgtcagttttcgctgaggagaaacacgaaacggaccctttggctctcccccttccccttccccgtcctgaacccctctcctggtcaccgagaatcagtccccgtggagttccccctccacctcgccatcgtttcctcggtcctcggcccagtggaagtcactaccctcgaggaggaggcagcggcagccgccctcgcgtcgccgcccccggttcggtgcccgcggtcccggagaggaggtgccgccgccaccgccgctccccccctcccgctgccctcgggccgggctgggtcgagctgcgatgccctcggacttcatctcattgctcagcgcggacctagacctggaatcgcccaagtccctctactcgcgagaatctgtctatgatcttctcccaaaggagttacagttacctccatctagagaaacatctgtagcatcaatgagtcagacaagcggtggtgaggcaggctcgcctcctccagctgttgttgctgctgatgcttcttcagctccctcctcttcctccatgggcggtgcttgcagctcctttaccacctcttccagccctaccatttattctacctcagtcaccgacagcaaggctatgcaagtggagagctgctcctcagccgtgggggtaagtaacagaggggtaagtgaaaagcagttaaccagtaacacagttcagcagcatccatcaacaccgaagaggcacacagtcttgtacatctcaccaccacctgaggacttgctggataacagtcggatgtcctgccaggatgaggggtgtggattggaatctgagcagagctgcagtatgtggatggaggattccccctccaacttcagtaacatgagcaccagttcctacaatgataacactgaggtacctcgtaaatcacgaaaacgaaatccaaagcagaggccgggggtcaaacgacgagattgtgaagaatctaatatggatatatttgatgccgacagtgccaaagcacctcactatgtgctttctcagcttaccacggacaacaaaggcaactcaaaagcgggaaatggaacattggaaaaccaaaaaggaactggagtaaagaagagccctatgttgtgtggacaatatcctgttaaaagtgagggaaaggagctgaagatagttgtacaacctgagacacagcaccgagctcggtacctgactgagggcagccgtggctcagtgaaagatagaacacagcaaggctttcctacagtaaagctggaaggccataatgaacctgtagtgttgcaagtgtttgtgggcaacgactctggacgagtgaaaccacatggattttatcaggcctgcagagtaactggacgaaatacaactccttgcaaagaagtggacattgaaggcactactgttatagaagtcggccttgatcctagcaacaacatgacactggcggtggactgcgtagggatattgaaattgaggaatgctgatgtcgaagccagaataggaattgctggttccaagaagaaaagcactcgtgccagattggtttttcgagttaatatcatgaggaaagatggctccactttgacactgcaaacaccctcttctccaattttgtgtactcagccagcaggagtgccagaaatcttaaagaaaagcttgcatagctgttcagtgaaaggagaagaagaagtgtttttaatcggcaagaactttctgaaaggaactaaagttattttccaagaaaatgtttctgatgaaaactcttggaagtcagaagctgaaattgatatggaactatttcatcagaatcatcttattgtgaaggttcctccctatcatgaccaacatataactttgcctgtgtcagtgggaatatatgtagtgacaaatgctggaagatctcatgatgttcaaccattcacttacactccagacccagcagcagctggtgctttgaatgtaaatgtgaagaaggaaatatctagtccagcaagaccttgctcttttgaagaggccatgaaagcaatgaaaactactggatgtaatttagataaggtaaatattatccctaatgccctgatgactccactcataccaagcagtatgattaagagtgaagatgttactccaatggaagtaacagcagaaaaaagatcttccactatttttaagactacaaagtctgttggatcaactcagcaaacattagaaaacatctcaaacatagcaggaaatggctctttttcatcaccatcatcttcccacctaccttctgaaaatgaaaaacagcagcagattcagcccaaggcatacaacccagagaccctgacaactattcaaacccaggacatctcacagcctggtacttttccagcagtttctgcttctagtcagctgcccaacagcgatgcactattgcagcaggctacacagtttcagacaagagaaactcagtctagagagatattacagtcagatggtacagtggttaatttgtcacaactgactgaggcatcacaacaacagcagcagtcaccactacaagaacaagcacagactttacagcagcagatttcatcaaatatttttccatcaccaaatagtgtgagtcagcttcagaatactattcagcagctgcaagcagggagtttcacaggcagtactgctagtggcagcagtggaagtgttgacttggtccaacaagttttagaggcacagcagcagttatcttcagttttattttctgctccagatggtaatgagaatgttcaagagcagcttagtgcagatatttttcaacaagtcagtcaaattcagagtggtgtaagccctggaatgttttcctcaacagagccaacagtccataccagaccagataatttattacctggaagagctgaaagtgttcatccacagtctgaaaacacgttatctaatcaacagcagcagcagcagcagcaacagcaagtgatggaatcttcagccgcaatggtgatggagatgcaacagagtatctgccaggcagctgcccagattcagtcagagttattcccttcaactgcttcagcaaatggaaaccttcagcaatcgccagtttaccagcagacttctcacatgatgagtgcattgtctaccaatgaggatatgcaaatgcagtgtgaattgttttcttctcctcctgcagtttctggaaatgaaacttctacaactaccacacagcaggttgcaacccctggcactaccatgtttcagacatcaagttcaggagatggagaagaaactggaacacaagcaaaacagattcagaacagtgtctttcagaccatggtccaaatgcaacatagtggggacaatcaacctcaagttaaccttttttcatccacaaaaagtatgatgagtgttcagaatagtggtacccaacaacaaggtaatggtttattccagcaagggaatgagatgatgtcacttcaatctggaaattttttgcagcagtcttctcattcacaggcccaactttttcatcctcaaaatcctattgccgatgctcagaacctttcccaggaaactcaaggttctctctttcatagtccaaatcctattgtccacagtcagacttctacaacctcctctgaacaaatgcagcctccaatgtttcactctcaaagtaccattgctgtgttacagggctcttcagttcctcaagaccagcagtcaaccaacatatttctttcccagagtcccatgaataatcttcagactaacacagtagcccaagaagcattttttgcagcaccgaactcaatttctccacttcagtcaacatcaaacagtgaacaacaagctgctttccaacagcaagctccaatatcacacatccagactcctatgctttcccaagaacaggcacaacccccgcagcagggtttatttcagcctcaggtggccctgggctcccttccacctaatccaatgcctcaaagccaacaaggaaccatgttccagtcacagcactcaatagttgccatgcagagtaactctccatcccaggaacagcagcagcagcagcaacagcagcagcaacagcagcagcaacaacaacagagcattttattcagtaatcagaataccatggctacaatggcgtctccaaagcaaccaccaccaaacatgatattcaacccaaatcaaaatccaatggctaatcaggagcaacagaaccagtcaatttttcaccaacaaagtaacatggccccaatgaatcaagagcaacagcccatgcaatttcagagtcagtccacagtttcctcacttcagaacccaggtcctacccagtcggaatcatcacagacccccttgttccatagctctcctcagattcagttggtacaagggtcacctagttctcaagagcagcaagtaactctcttcttatctccagcatccatgtctgccttgcagaccagtataaatcaacaagatatgcaacagtctcctctttattcccctcagaacaacatgcctggaattcaaggagccacatcttcgcctcaaccacaggctactttatttcacaacacagcaggaggcacaatgaaccaactgcagaattctcctggctcatctcagcagacatcaggaatgttcttatttggcattcaaaataactgtagtcagcttttaacctctggaccagctacattgcctgatcagttgatggccataagtcagccaggccaaccacaaaacgagggccagccacctgtgacaacacttctttctcagcaaatgccagagaattctccactggcatcctctataaacaccaaccagaacatcgaaaagattgatttgcttgtttcattgcaaaaccaagggaacaacttgactggctccttttaactggatataaattccacgaagaaaatcctgattccaagatgtcctgagatcttgtggttccatgagaattattactttaaaaacaaaacaaaatataaaaaactgtgtttgagtaaactgatagattttactctgactgcaaaagagcacacctatgctgcttgttgcagtaactaaccaccaatgttaacatcttcatattttatattcctaataacagtgatgactgagaatctatttgagtttccagctggcagaattaattgttattattttcctaggcgcaatttccttaaacgtacagtttaaattcaaggctggaccactcagttattattgctattagaaaataatatatcatgtttacttttgttcttcattattttctttcctgcattgttttagtcaagtaatggcttttgaaaaagtaaagttcaataataactaaggctgtgatttttttcaatataaaaggcacagctgttggccaaagtgaaggaatcttttttcagttttattggagaaactgaagggtaacattctaacaagtaaactgtatgtgcagataaaagtactcttgatttaacacaaaggcagatgatacacttataaaactgggaacagctggaatgcttcttgattttattttttcagagagttgttagttctctgggtttctactaaggggtttagccataactgtgcatagaaaaataattatctgtaaaaaatgaaggggataatatatgataaattatgttctgatatcctcctacagtagtttaaattgacagaaaaatttgaatgttttcttcttaacccagtcttaggctggtattccctttttatatatatctatattacttttcacctctttttcactttactttagagaactattaatatactactggcttcatgaccctgtagcatctttggccactttaatctagggtgacctagcaatcctgcagcacagggcagagagtactgtcttaggaattattaggagttgattcctgagaaacaacacatttttccccatgaacggtgctgttctgaagtcttcaaatttttccctctaataggaaacagtataaattttaattaaaaaaaaaaggcaaactaaaatttcttgaaatatcacttctccctgatctgcagtgagtataaattcacttgtcacctcagtgctttacagtttgaagtggtcacttacctgatggttcccacaagccttaggctttacagggttgtatcattgacttaaaatgaagaattaacttgtgttacatctataaagagcaaaataacacactccagaacttggcagttgtagcattagttatacagttttgggtgttcttgccacccgtgggatgcctgcttctcactaccacctgtgtctggacacatgcttatgtctcattttccttttggcatgtggaaagctgtcaatgcagtgtaaggccaacgtgtgtgtggcttctatgtgttgagataatgttttggtatccttgtccgtttcatttattttttaagtgtacaaaaaataacctgttaattgttgaaggctacttttctgttctttttttttttttttttctatcctgtacatttagttgaactgtgcggaattgtggtgttggttttgtttacacagccagatttttccttctttttgttttgtgatgatcttcctttgttctttgaatgtgctcttttgtctttttctcttttttctcatgttttcttccctccacctccacccctttctttctttctctctctgattgagaggcattgaattacgttttcagtagtacaggcttcttgccgatatgaagggaacttttcagaaagagacctactctgggtcatttaattttgaatacagttttcaatcgttcaagttttggatggtttatatctaatgtgtgtttcatttttttggaaagctatattttgtatttaggaaatggtatactattttgctatttgtactgagtgagtacattggcataaatatagaaatttatatatatacatatatataaactattcttttttgccacacatttttgtggtaaatttgtgagtttgtctgatgttctaccacaacgtggcgtctgataacagtgagggggggtggggtttgttatgtctttattgagtatttaagtatcttttgaaacaaatgacctgttcatctgtggccattccatcaggcagttagttccttgatgtcagtagtgggctaaaggcagcttactgtgtgtttgctggagctttcactcagccaagtgttagagtcaggaaacccattgaggcaatggcgtcaaatggtgtttcacaagaatgagccattcagtctttgctcactatatatttaatattttattattgttgttattgttattattaattggctttctgtattctatgccttttatttataaagacactaagaaaacccatgtttgtaattttaataacatttttcccatcttgtaatatccagagctactttataaattctctgaaccaaaagtattttcctcagtgtatctcttctcccccagcccctattgggaaaaattacccagtatagttcaggttatgaggaggatcagccacacaatccagtgcttcagtttgaaaatgtaaaattctaaccctaaagtagggttggttgaaatttcagacaaagcaaacccagcaggtataaaaagtagtataaatacaaatctgtaagttatttttgaattttctgaacttttttctaagagattacataggagactaaagaaatctatctgttcaagttctaattaggatgattgttaatactgcactgtggatgaagtggcgactggcttgtgtgctgacttctgtggtttagcaagaggtttattgttatcaaatgctaattggcaatgccaagtcactgggaccaattttctgttttataatatctaagtttagaacagaatatatacctgaactgtagtggtttgatcggatggagacagaaaacccgatttttattctcataaattttgtggttatttatacaagggctgtgctatgctaccatattcttgttcaataataataggtttgttgttttttttacattgttaaatgttccttacccctaaaggtcaatgttaagtacaacattctgaaaatacaatttggctacgaagagtattcatcttctttgaagctcagtggttgatatttgtgctaataatgcaatttcctgattactgttacaagttatagctacatatgggagagactcagtgagccagcaaaggccatagaaacaacaatttattaaatgtatttatggcagaaggacctaaataaactgtgagccaccttttcttctttatattgttacatttaagtgttcttgctttcagcaactcacattaatgcttggagcttatctctttctctctctctctctctctctctgtgtgtgtgtgtgtatgtgtgtgtgtgtgtgtgtgtgtttccttattgtcattccattatatatccacaccaacatgggtgacgataattcaaagtcatattttgcctctaagcttgatcatgttacctttatgattaaagtatcatgttatttagccaatgcaaatctgttttaaaacaaatagtttaaaaaaagaacaagtttttaagggctttattatagaagaagtattaatgaaggactttccttcctccctccctttcctcccctccctgcctcccttcttcccttccatctccccctcctccctgccttctttgtttctccttcccttattcctccctccctcctttctcccttccttcctttcttccattcatccttccttgccttttatttttattttttgtaatatcacatgtgctgtagtttggaattttattctagtgcatttcttgctcatcagaacctcagctaatctacctaggaaaaatagtatcaaaggaaatgagaaagttgtatctgagtccctccagaactaagataattctttttgaccatttaagcctttataaatgcgttttgaccatttaagcctttataaatgcttgttttaggaaagtgaatctgttagatgcatcaacaaataatgaccaggacaaaacgatttaataattaaagtctcaaatcaccatggttatacattttcaccagaaatagtaatcttacaatttttcatttttctgatgaagatttctgttccaatatctgtttcctaatagattttttaaattaattagctttcctctgctttatgaccacaggttttatccctaaccgagacagctgtcttatatctgcatgccttagactgtgtggagggactccatgaagaaagaccataggttagaaaaataactcatagtatataccctagtaagtgggttagtagaatctcataacatgtattaaaaagaggttttcttctctgcttgtttgtgtcactagagcaaaattgtagagataatgctcataatgcagtaaatatcagaataatatctacaatatcatttgtggatggtcccaggtcccagtgctctagttactttacttctttttttttttttgagatggagtcttgctctgtctctcaggctagagcagtgtgcgatctcagctcactgcagcctccacctcccaggttcaagcgattctcctgcctcagcctcccaagtagccaggattacaggcaccctccactaggcccggctaattttttttgtatttttttagtagagatggggttttgccatgttggccaggctggtttcgaactcctaacctccagtgatccacctgcctcggcgtcccaaagtgctaggattacaggcatgagccaccacatccggcctaattacttctttaatccccatttatttttatgccattctagcctcatttattaataaaattatgtttttactttctctttcaggaaattttttaaattaatattttatatctagatctaatgctatggaaaagtgcctttttatcatttataatttcatttttcactatttccaaaaacacataaacaaatagtttcagtaggtcccagcttttactttttccatttaaaccttcttttctccatttcttccctttggcttaagaataaaagaaaaggtacattgctagaattgtttctttgggagagggtaaaagattacagaattagactgttcagcctttatataaactaaatttgtcttcatctcaaccagctaatggtaggtcttatctgaatactcatgagaattttagcatctgtgaaactccatgcaccagatgtgtgtaaatttcaggaagaaagtgttgaaagcattttctctgatgttaattagatggaaataaatcactaaaacatagtttaggtaaagcctgattatgccacttttttttaactagacagggcaaagttgtttatgttagtgtacttcttgtctatcctcagttaatttacctagacaaaaagtgtcaaaggaaatgagaaaaaggttatatctgactccctccagacctaagataattccttttgatcagatacagtcagatggagtgccttggtttttgttaattttgcctctattccagctccttaccacagcggtggtgcttaaagaaaggatcatcagcaacaggtcaggatagttctacctttgggatagggctgctttccccgtgctagtatttctgtgactgttagtggcactgaggactgcaaacttttatgcaatattcttaataccctattgatattatgcactttaatcattccaaagaagccaagaatgctgtatagtgatgattccttcctaatgaattcatcttaactatttagaatgttatgtcccttttcttttggatagccaacttggtataaatgttatatggatttttctaaaatgactatataggacttaagactttgaaatgtaatttacttataaggggaaataattatgctttagcacatcattttagaaacgtcacattttagaaacattcagcttgctaacctacatgtttgggaattcattaaaaccagttgtctatatattttgtgccatgtatataagaacattacaatatatctttttctacatatgtagtatgtgcaaccagtggttctcagagtatggttctcagcccaccagctagtatcagtatcacctgggaactagttagaaatgtaaattctttggccccatcccagacatactgagtcagaaactctggaatagggcccccgcaatctgttttcacaagccctccaggtgattctgatgcacactttaaagtttaggaaccactgggctaagactctgttgagatatagagtttttcttccactcagactgatatagttatacattgttcttcatgtaaattcagcttaacctggttatctataatcttttattggcaaaagttaattctcagtactgcctatagagatacagtgtattttatgtacatacacaattagtctaattcttgataattcagttaatttagtttggcattttcctaccacttactaaaaggtttacattaaatgactgatttaaatatataggtgcaatgttctatgtttattttaattgttatgacatttaagtagctaatataattgaccggtgctaaagtctcctgtttatccataaaatgggtacattatgggcagtgtaatacaagctttcttttcattgcctagtactttaccagcagaccacagttttgccctggctagaccaaccctcagaacaaaatcatcattccttgtatttatatttgtatctgagatagtaaacaagatggctggccaggtcaacatggcaccttaacttatttttttaataggtaaaacttcttcaaaagtagcttgctttgtataagaactaagctatcagtatagatatagctatccttggagcttatgtttcagacaagaattatttactaaaataaataataaacaagataatgcattatacaatttgggcatttctcgtttctcaagtgtatgcatcatggtaaatataaactaaccacaagataggtagattgattcatttcattttaatctccttgtgtaattcagtacctccataattgttctaatcttcttcccactgtttacaaattaccagttaattaactcgtgaaagaaaaattcacatatcagaataaaaataaatgtatactcactttataaaaatcaccactgctgtctttccttaatactagcagtggaaatgtaagtggcttactctacaaattttggtgctggcaaatacataggcaaactgttgggagctgctctagttacattcctcccttcttattccctttttctcttcctcactttattgcataacatattcctgtacccaaagcattctaccacagttctatttgactcccacttgtaataactcctttaaaaaattccatgtttaaccatatgaccctgcttgcttactcatattctccctccctctccccttcctttctctctcttccagaagtcatttgcctggtttgaaatattttgtagggattgcttattatattattttagctgatgaacctcaggacaacgtctacacacacacacatacatacacgcacacaaaatctcagctgttgaagagtgggcttggaatcagacttctgtgtccagtaaaaaactcctgcactgaagtcattgtgacttgagtagttacagactgattccagtgaacttgatctaatttcttttgatctaatgaatgtgtctgcttaccttgtttccttttaattgataagctccaagtagttgctaattttttgacaactttaaatgagtttcattcacttcttttacttaatgttttaagtatagtaccaataatttcattaacctgttctcaagtggtttagctaccattctgccatttttaatttttatttaattttatttgcttgagcacactgatcaaccactgaactgccttcttccattgtcctgcaatgatataagggttacatttttgtgtatatggctttcatagttgggatttcagagcactgataccagatattttcagtttgttctctgggggaatttcatttgcatctatgtttttagctatctgtgataacttgttaaatattaaaaagatattttgcttctattggaacatttgtatactcgcaactatatttctgtaaacagctgcagtcaaaaataaaacactgaaagttaaaaaaaaaaaaaaaaaaaa

SEQ ID NO: 467 - DNA, 14177 bp, Homo sapiens
tgcaacggaaacttttggctccacgaacagaaaagcaagagcaaaaactcagttaaatgcgttcttcctccatctttgcctagtccaaaaggaaaaaaaaagaaacagaaaaaagaaaaactgtttggaagagtagcgttgaggtttgctttttacctgtttttcctctagaacagccaggtggattcacatgatccaattttttaattgtcttctatgtcccactccgaataacccggatgccccagcacaatcagagagatcgttttttttaaaaaaaatttcagcctccaaaggtaggaggggagtgttaggggagaaagtactttaattaaaaatcaataactcgaggtttttgggatacggtttgccatttcctaattaagaaatgggtttgacagtccctttgtacacactgctatgcaaaccccaaagggttggcggctgtccgggcgatgacactccggtcccctgcgagaccccgggccagccaggcccgtccgccgccggcctctggggtccgtccccggctcgcgcagacctctcgcttctctcggctctgtctcctgcgctcagctctgctcggggccggccgcctcaggctcgccgccaccaggtcgttgcaaataccttttccctccccggggccccagcgcgcggccacctcccagcctccccccctcccaccctggcagcggggccctttcccggctcaggaacagcagcagcccgggccgcgccggcaggaagcgaggcccatgttgctgctgttccctggcgcgcctccccgccctccgggggccgccacggctcttccgcgctcccgggcacccccctccgcgcctgcgctgtgccccacgggggcggggctcagattcctgtcagcggcggcggcggtggcggcgaccgtcagttttcgctgaggagaaacacgaaacggaccctttggctctcccccttccccttccccgtcctgaacccctctcctggtcaccgagaatcagtccccgtggagttccccctccacctcgccatcgtttcctcggtcctcggcccagtggaagtcactaccctcgaggaggaggcagcggcagccgccctcgcgtcgccgcccccggttcggtgcccgcggtcccggagaggaggtgccgccgccaccgccgctccccccctcccgctgccctcgggccgggctgggtcgagctgcgatgccctcggacttcatctcattgctcagcgcggacctagacctggaatcgcccaagtccctctactcgcgagattctctgaagttacacccatcacagaattttcatagagctggactattggaagaatctgtctatgatcttctcccaaaggagttacagttacctccatctagagaaacatctgtagcatcaatgagtcagacaagcggtggtgaggcaggctcgcctcctccagctgttgttgctgctgatgcttcttcagctccctcctcttcctccatgggcggtgcttgcagctcctttaccacctcttccagccctaccatttattctacctcagtcaccgacagcaaggctatgcaagtggagagctgctcctcagccgtgggggtaagtaacagaggggtaagtgaaaagcagttaaccagtaacacagttcagcagcatccatcaacaccgaagaggcacacagtcttgtacatctcaccaccacctgaggacttgctggataacagtcggatgtcctgccaggatgaggggtgtggattggaatctgagcagagctgcagtatgtggatggaggattccccctccaacttcagtaacatgagcaccagttcctacaatgataacactgaggtacctcgtaaatcacgaaaacgaaatccaaagcagaggccgggggtcaaacgacgagattgtgaagaatctaatatggatatatttgatgccgacagtgccaaagcacctcactatgtgctttctcagcttaccacggacaacaaaggcaactcaaaagcgggaaatggaacattggaaaaccaaaaaggaactggagtaaagaagagccctatgttgtgtggacaatatcctgttaaaagtgagggaaaggagctgaagatagttgtacaacctgagacacagcaccgagctcggtacctgactgagggcagccgtggctcagtgaaagatagaacacagcaaggctttcctacagtaaagctggaaggccataatgaacctgtagtgttgcaagtgtttgtgggcaacgactctggacgagtgaaaccacatggattttatcaggcctgcagagtaactggacgaaatacaactccttgcaaagaagtggacattgaaggcactactgttatagaagtcggccttgatcctagcaacaacatgacactggcggtggactgcgtagggatattgaaattgaggaatgctgatgtcgaagccagaataggaattgctggttccaagaagaaaagcactcgtgccagattggtttttcgagttaatatcatgaggaaagatggctccactttgacactgcaaacaccctcttctccaattttgtgtactcagccagcaggagtgccagaaatcttaaagaaaagcttgcatagctgttcagtgaaaggagaagaagaagtgtttttaatcggcaagaactttctgaaaggaactaaagttattttccaagaaaatgtttctgatgaaaactcttggaagtcagaagctgaaattgatatggaactatttcatcagaatcatcttattgtgaaggttcctccctatcatgaccaacatataactttgcctgtgtcagtgggaatatatgtagtgacaaatgctggaagatctcatgatgttcaaccattcacttacactccagacccagcagcagctggtgctttgaatgtaaatgtgaagaaggaaatatctagtccagcaagaccttgctcttttgaagaggccatgaaagcaatgaaaactactggatgtaatttagataaggtaaatattatccctaatgccctgatgactccactcataccaagcagtatgattaagagtgaagatgttactccaatggaagtaacagcagaaaaaagatcttccactatttttaagactacaaagtctgttggatcaactcagcaaacattagaaaacatctcaaacatagcaggaaatggctctttttcatcaccatcatcttcccacctaccttctgaaaatgaaaaacagcagcagattcagcccaaggcatacaacccagagaccctgacaactattcaaacccaggacatctcacagcctggtacttttccagcagtttctgcttctagtcagctgcccaacagcgatgcactattgcagcaggctacacagtttcagacaagagaaactcagtctagagagatattacagtcagatggtacagtggttaatttgtcacaactgactgaggcatcacaacaacagcagcagtcaccactacaagaacaagcacagactttacagcagcagatttcatcaaatatttttccatcaccaaatagtgtgagtcagcttcagaatactattcagcagctgcaagcagggagtttcacaggcagtactgctagtggcagcagtggaagtgttgacttggtccaacaagttttagaggcacagcagcagttatcttcagttttattttctgctccagatggtaatgagaatgttcaagagcagcttagtgcagatatttttcaacaagtcagtcaaattcagagtggtgtaagccctggaatgttttcctcaacagagccaacagtccataccagaccagataatttattacctggaagagctgaaagtgttcatccacagtctgaaaacacgttatctaatcaacagcagcagcagcagcagcaacagcaagtgatggaatcttcagccgcaatggtgatggagatgcaacagagtatctgccaggcagctgcccagattcagtcagagttattcccttcaactgcttcagcaaatggaaaccttcagcaatcgccagtttaccagcagacttctcacatgatgagtgcattgtctaccaatgaggatatgcaaatgcagtgtgaattgttttcttctcctcctgcagtttctggaaatgaaacttctacaactaccacacagcaggttgcaacccctggcactaccatgtttcagacatcaagttcaggagatggagaagaaactggaacacaagcaaaacagattcagaacagtgtctttcagaccatggtccaaatgcaacatagtggggacaatcaacctcaagttaaccttttttcatccacaaaaagtatgatgagtgttcagaatagtggtacccaacaacaaggtaatggtttattccagcaagggaatgagatgatgtcacttcaatctggaaattttttgcagcagtcttctcattcacaggcccaactttttcatcctcaaaatcctattgccgatgctcagaacctttcccaggaaactcaaggttctctctttcatagtccaaatcctattgtccacagtcagacttctacaacctcctctgaacaaatgcagcctccaatgtttcactctcaaagtaccattgctgtgttacagggctcttcagttcctcaagaccagcagtcaaccaacatatttctttcccagagtcccatgaataatcttcagactaacacagtagcccaagaagcattttttgcagcaccgaactcaatttctccacttcagtcaacatcaaacagtgaacaacaagctgctttccaacagcaagctccaatatcacacatccagactcctatgctttcccaagaacaggcacaacccccgcagcagggtttatttcagcctcaggtggccctgggctcccttccacctaatccaatgcctcaaagccaacaaggaaccatgttccagtcacagcactcaatagttgccatgcagagtaactctccatcccaggaacagcagcagcagcagcaacagcagcagcaacagcagcagcaacaacaacagagcattttattcagtaatcagaataccatggctacaatggcgtctccaaagcaaccaccaccaaacatgatattcaacccaaatcaaaatccaatggctaatcaggagcaacagaaccagtcaatttttcaccaacaaagtaacatggccccaatgaatcaagagcaacagcccatgcaatttcagagtcagtccacagtttcctcacttcagaacccaggtcctacccagtcggaatcatcacagacccccttgttccatagctctcctcagattcagttggtacaagggtcacctagttctcaagagcagcaagtaactctcttcttatctccagcatccatgtctgccttgcagaccagtataaatcaacaagatatgcaacagtctcctctttattcccctcagaacaacatgcctggaattcaaggagccacatcttcgcctcaaccacaggctactttatttcacaacacagcaggaggcacaatgaaccaactgcagaattctcctggctcatctcagcagacatcaggaatgttcttatttggcattcaaaataactgtagtcagcttttaacctctggaccagctacattgcctgatcagttgatggccataagtcagccaggccaaccacaaaacgagggccagccacctgtgacaacacttctttctcagcaaatgccagagaattctccactggcatcctctataaacaccaaccagaacatcgaaaagattgatttgcttgtttcattgcaaaaccaagggaacaacttgactggctccttttaactggatataaattccacgaagaaaatcctgattccaagatgtcctgagatcttgtggttccatgagaattattactttaaaaacaaaacaaaatataaaaaactgtgtttgagtaaactgatagattttactctgactgcaaaagagcacacctatgctgcttgttgcagtaactaaccaccaatgttaacatcttcatattttatattcctaataacagtgatgactgagaatctatttgagtttccagctggcagaattaattgttattattttcctaggcgcaatttccttaaacgtacagtttaaattcaaggctggaccactcagttattattgctattagaaaataatatatcatgtttacttttgttcttcattattttctttcctgcattgttttagtcaagtaatggcttttgaaaaagtaaagttcaataataactaaggctgtgatttttttcaatataaaaggcacagctgttggccaaagtgaaggaatcttttttcagttttattggagaaactgaagggtaacattctaacaagtaaactgtatgtgcagataaaagtactcttgatttaacacaaaggcagatgatacacttataaaactgggaacagctggaatgcttcttgattttattttttcagagagttgttagttctctgggtttctactaaggggtttagccataactgtgcatagaaaaataattatctgtaaaaaatgaaggggataatatatgataaattatgttctgatatcctcctacagtagtttaaattgacagaaaaatttgaatgttttcttcttaacccagtcttaggctggtattccctttttatatatatctatattacttttcacctctttttcactttactttagagaactattaatatactactggcttcatgaccctgtagcatctttggccactttaatctagggtgacctagcaatcctgcagcacagggcagagagtactgtcttaggaattattaggagttgattcctgagaaacaacacatttttccccatgaacggtgctgttctgaagtcttcaaatttttccctctaataggaaacagtataaattttaattaaaaaaaaaaggcaaactaaaatttcttgaaatatcacttctccctgatctgcagtgagtataaattcacttgtcacctcagtgctttacagtttgaagtggtcacttacctgatggttcccacaagccttaggctttacagggttgtatcattgacttaaaatgaagaattaacttgtgttacatctataaagagcaaaataacacactccagaacttggcagttgtagcattagttatacagttttgggtgttcttgccacccgtgggatgcctgcttctcactaccacctgtgtctggacacatgcttatgtctcattttccttttggcatgtggaaagctgtcaatgcagtgtaaggccaacgtgtgtgtggcttctatgtgttgagataatgttttggtatccttgtccgtttcatttattttttaagtgtacaaaaaataacctgttaattgttgaaggctacttttctgttctttttttttttttttttctatcctgtacatttagttgaactgtgcggaattgtggtgttggttttgtttacacagccagatttttccttctttttgttttgtgatgatcttcctttgttctttgaatgtgctcttttgtctttttctcttttttctcatgttttcttccctccacctccacccctttctttctttctctctctgattgagaggcattgaattacgttttcagtagtacaggcttcttgccgatatgaagggaacttttcagaaagagacctactctgggtcatttaattttgaatacagttttcaatcgttcaagttttggatggtttatatctaatgtgtgtttcatttttttggaaagctatattttgtatttaggaaatggtatactattttgctatttgtactgagtgagtacattggcataaatatagaaatttatatatatacatatatataaactattcttttttgccacacatttttgtggtaaatttgtgagtttgtctgatgttctaccacaacgtggcgtctgataacagtgagggggggtggggtttgttatgtctttattgagtatttaagtatcttttgaaacaaatgacctgttcatctgtggccattccatcaggcagttagttccttgatgtcagtagtgggctaaaggcagcttactgtgtgtttgctggagctttcactcagccaagtgttagagtcaggaaacccattgaggcaatggcgtcaaatggtgtttcacaagaatgagccattcagtctttgctcactatatatttaatattttattattgttgttattgttattattaattggctttctgtattctatgccttttatttataaagacactaagaaaacccatgtttgtaattttaataacatttttcccatcttgtaatatccagagctactttataaattctctgaaccaaaagtattttcctcagtgtatctcttctcccccagcccctattgggaaaaattacccagtatagttcaggttatgaggaggatcagccacacaatccagtgcttcagtttgaaaatgtaaaattctaaccctaaagtagggttggttgaaatttcagacaaagcaaacccagcaggtataaaaagtagtataaatacaaatctgtaagttatttttgaattttctgaacttttttctaagagattacataggagactaaagaaatctatctgttcaagttctaattaggatgattgttaatactgcactgtggatgaagtggcgactggcttgtgtgctgacttctgtggtttagcaagaggtttattgttatcaaatgctaattggcaatgccaagtcactgggaccaattttctgttttataatatctaagtttagaacagaatatatacctgaactgtagtggtttgatcggatggagacagaaaacccgatttttattctcataaattttgtggttatttatacaagggctgtgctatgctaccatattcttgttcaataataataggtttgttgttttttttacattgttaaatgttccttacccctaaaggtcaatgttaagtacaacattctgaaaatacaatttggctacgaagagtattcatcttctttgaagctcagtggttgatatttgtgctaataatgcaatttcctgattactgttacaagttatagctacatatgggagagactcagtgagccagcaaaggccatagaaacaacaatttattaaatgtatttatggcagaaggacctaaataaactgtgagccaccttttcttctttatattgttacatttaagtgttcttgctttcagcaactcacattaatgcttggagcttatctctttctctctctctctctctctctctgtgtgtgtgtgtgtatgtgtgtgtgtgtgtgtgtgtgtttccttattgtcattccattatatatccacaccaacatgggtgacgataattcaaagtcatattttgcctctaagcttgatcatgttacctttatgattaaagtatcatgttatttagccaatgcaaatctgttttaaaacaaatagtttaaaaaaagaacaagtttttaagggctttattatagaagaagtattaatgaaggactttccttcctccctccctttcctcccctccctgcctcccttcttcccttccatctccccctcctccctgccttctttgtttctccttcccttattcctccctccctcctttctcccttccttcctttcttccattcatccttccttgccttttatttttattttttgtaatatcacatgtgctgtagtttggaattttattctagtgcatttcttgctcatcagaacctcagctaatctacctaggaaaaatagtatcaaaggaaatgagaaagttgtatctgagtccctccagaactaagataattctttttgaccatttaagcctttataaatgcgttttgaccatttaagcctttataaatgcttgttttaggaaagtgaatctgttagatgcatcaacaaataatgaccaggacaaaacgatttaataattaaagtctcaaatcaccatggttatacattttcaccagaaatagtaatcttacaatttttcatttttctgatgaagatttctgttccaatatctgtttcctaatagattttttaaattaattagctttcctctgctttatgaccacaggttttatccctaaccgagacagctgtcttatatctgcatgccttagactgtgtggagggactccatgaagaaagaccataggttagaaaaataactcatagtatataccctagtaagtgggttagtagaatctcataacatgtattaaaaagaggttttcttctctgcttgtttgtgtcactagagcaaaattgtagagataatgctcataatgcagtaaatatcagaataatatctacaatatcatttgtggatggtcccaggtcccagtgctctagttactttacttctttttttttttttgagatggagtcttgctctgtctctcaggctagagcagtgtgcgatctcagctcactgcagcctccacctcccaggttcaagcgattctcctgcctcagcctcccaagtagccaggattacaggcaccctccactaggcccggctaattttttttgtatttttttagtagagatggggttttgccatgttggccaggctggtttcgaactcctaacctccagtgatccacctgcctcggcgtcccaaagtgctaggattacaggcatgagccaccacatccggcctaattacttctttaatccccatttatttttatgccattctagcctcatttattaataaaattatgtttttactttctctttcaggaaattttttaaattaatattttatatctagatctaatgctatggaaaagtgcctttttatcatttataatttcatttttcactatttccaaaaacacataaacaaatagtttcagtaggtcccagcttttactttttccatttaaaccttcttttctccatttcttccctttggcttaagaataaaagaaaaggtacattgctagaattgtttctttgggagagggtaaaagattacagaattagactgttcagcctttatataaactaaatttgtcttcatctcaaccagctaatggtaggtcttatctgaatactcatgagaattttagcatctgtgaaactccatgcaccagatgtgtgtaaatttcaggaagaaagtgttgaaagcattttctctgatgttaattagatggaaataaatcactaaaacatagtttaggtaaagcctgattatgccacttttttttaactagacagggcaaagttgtttatgttagtgtacttcttgtctatcctcagttaatttacctagacaaaaagtgtcaaaggaaatgagaaaaaggttatatctgactccctccagacctaagataattccttttgatcagatacagtcagatggagtgccttggtttttgttaattttgcctctattccagctccttaccacagcggtggtgcttaaagaaaggatcatcagcaacaggtcaggatagttctacctttgggatagggctgctttccccgtgctagtatttctgtgactgttagtggcactgaggactgcaaacttttatgcaatattcttaataccctattgatattatgcactttaatcattccaaagaagccaagaatgctgtatagtgatgattccttcctaatgaattcatcttaactatttagaatgttatgtcccttttcttttggatagccaacttggtataaatgttatatggatttttctaaaatgactatataggacttaagactttgaaatgtaatttacttataaggggaaataattatgctttagcacatcattttagaaacgtcacattttagaaacattcagcttgctaacctacatgtttgggaattcattaaaaccagttgtctatatattttgtgccatgtatataagaacattacaatatatctttttctacatatgtagtatgtgcaaccagtggttctcagagtatggttctcagcccaccagctagtatcagtatcacctgggaactagttagaaatgtaaattctttggccccatcccagacatactgagtcagaaactctggaatagggcccccgcaatctgttttcacaagccctccaggtgattctgatgcacactttaaagtttaggaaccactgggctaagactctgttgagatatagagtttttcttccactcagactgatatagttatacattgttcttcatgtaaattcagcttaacctggttatctataatcttttattggcaaaagttaattctcagtactgcctatagagatacagtgtattttatgtacatacacaattagtctaattcttgataattcagttaatttagtttggcattttcctaccacttactaaaaggtttacattaaatgactgatttaaatatataggtgcaatgttctatgtttattttaattgttatgacatttaagtagctaatataattgaccggtgctaaagtctcctgtttatccataaaatgggtacattatgggcagtgtaatacaagctttcttttcattgcctagtactttaccagcagaccacagttttgccctggctagaccaaccctcagaacaaaatcatcattccttgtatttatatttgtatctgagatagtaaacaagatggctggccaggtcaacatggcaccttaacttatttttttaataggtaaaacttcttcaaaagtagcttgctttgtataagaactaagctatcagtatagatatagctatccttggagcttatgtttcagacaagaattatttactaaaataaataataaacaagataatgcattatacaatttgggcatttctcgtttctcaagtgtatgcatcatggtaaatataaactaaccacaagataggtagattgattcatttcattttaatctccttgtgtaattcagtacctccataattgttctaatcttcttcccactgtttacaaattaccagttaattaactcgtgaaagaaaaattcacatatcagaataaaaataaatgtatactcactttataaaaatcaccactgctgtctttccttaatactagcagtggaaatgtaagtggcttactctacaaattttggtgctggcaaatacataggcaaactgttgggagctgctctagttacattcctcccttcttattccctttttctcttcctcactttattgcataacatattcctgtacccaaagcattctaccacagttctatttgactcccacttgtaataactcctttaaaaaattccatgtttaaccatatgaccctgcttgcttactcatattctccctccctctccccttcctttctctctcttccagaagtcatttgcctggtttgaaatattttgtagggattgcttattatattattttagctgatgaacctcaggacaacgtctacacacacacacatacatacacgcacacaaaatctcagctgttgaagagtgggcttggaatcagacttctgtgtccagtaaaaaactcctgcactgaagtcattgtgacttgagtagttacagactgattccagtgaacttgatctaatttcttttgatctaatgaatgtgtctgcttaccttgtttccttttaattgataagctccaagtagttgctaattttttgacaactttaaatgagtttcattcacttcttttacttaatgttttaagtatagtaccaataatttcattaacctgttctcaagtggtttagctaccattctgccatttttaatttttatttaattttatttgcttgagcacactgatcaaccactgaactgccttcttccattgtcctgcaatgatataagggttacatttttgtgtatatggctttcatagttgggatttcagagcactgataccagatattttcagtttgttctctgggggaatttcatttgcatctatgtttttagctatctgtgataacttgttaaatattaaaaagatattttgcttctattggaacatttgtatactcgcaactatatttctgtaaacagctgcagtcaaaaataaaacactgaaagttaaaaaaaaaaaaaaaaaaaa

SEQ ID NO: 468 - DNA, 14239 bp, Homo sapiens
tgcaacggaaacttttggctccacgaacagaaaagcaagagcaaaaactcagttaaatgcgttcttcctccatctttgcctagtccaaaaggaaaaaaaaagaaacagaaaaaagaaaaactgtttggaagagtagcgttgaggtttgctttttacctgtttttcctctagaacagccaggtggattcacatgatccaattttttaattgtcttctatgtcccactccgaataacccggatgccccagcacaatcagagagatcgttttttttaaaaaaaatttcagcctccaaaggtaggaggggagtgttaggggagaaagtactttaattaaaaatcaataactcgaggtttttgggatacggtttgccatttcctaattaagaaatgggtttgacagtccctttgtacacactgctatgcaaaccccaaagggttggcggctgtccgggcgatgacactccggtcccctgcgagaccccgggccagccaggcccgtccgccgccggcctctggggtccgtccccggctcgcgcagacctctcgcttctctcggctctgtctcctgcgctcagctctgctcggggccggccgcctcaggctcgccgccaccaggtcgttgcaaataccttttccctccccggggccccagcgcgcggccacctcccagcctccccccctcccaccctggcagcggggccctttcccggctcaggaacagcagcagcccgggccgcgccggcaggaagcgaggcccatgttgctgctgttccctggcgcgcctccccgccctccgggggccgccacggctcttccgcgctcccgggcacccccctccgcgcctgcgctgtgccccacgggggcggggctcagattcctgtcagcggcggcggcggtggcggcgaccgtcagttttcgctgaggagaaacacgaaacggaccctttggctctcccccttccccttccccgtcctgaacccctctcctggtcaccgagaatcagtccccgtggagttccccctccacctcgccatcgtttcctcggtcctcggcccagtggaagtcactaccctcgaggaggaggcagcggcagccgccctcgcgtcgccgcccccggttcggtgcccgcggtcccggagaggaggtgccgccgccaccgccgctccccccctcccgctgccctcgggccgggctgggtcgagctgcgatgccctcggacttcatctcattgctcagcgcggacctagacctggaatcgcccaagtccctctactcgcgagattctctgaagttacacccatcacagaattttcatagagctggactattggaagaatctgtctatgatcttctcccaaaggagttacagttacctccatctagagaaacatctgtagcatcaatgagtcagacaagcggtggtgaggcaggctcgcctcctccagctgttgttgctgctggatttgcctctgaagcagggagtgtctgcattaaaaatgacctgtagttctctgcttcatagatgcttcttcagctccctcctcttcctccatgggcggtgcttgcagctcctttaccacctcttccagccctaccatttattctacctcagtcaccgacagcaaggctatgcaagtggagagctgctcctcagccgtgggggtaagtaacagaggggtaagtgaaaagcagttaaccagtaacacagttcagcagcatccatcaacaccgaagaggcacacagtcttgtacatctcaccaccacctgaggacttgctggataacagtcggatgtcctgccaggatgaggggtgtggattggaatctgagcagagctgcagtatgtggatggaggattccccctccaacttcagtaacatgagcaccagttcctacaatgataacactgaggtacctcgtaaatcacgaaaacgaaatccaaagcagaggccgggggtcaaacgacgagattgtgaagaatctaatatggatatatttgatgccgacagtgccaaagcacctcactatgtgctttctcagcttaccacggacaacaaaggcaactcaaaagcgggaaatggaacattggaaaaccaaaaaggaactggagtaaagaagagccctatgttgtgtggacaatatcctgttaaaagtgagggaaaggagctgaagatagttgtacaacctgagacacagcaccgagctcggtacctgactgagggcagccgtggctcagtgaaagatagaacacagcaaggctttcctacagtaaagctggaaggccataatgaacctgtagtgttgcaagtgtttgtgggcaacgactctggacgagtgaaaccacatggattttatcaggcctgcagagtaactggacgaaatacaactccttgcaaagaagtggacattgaaggcactactgttatagaagtcggccttgatcctagcaacaacatgacactggcggtggactgcgtagggatattgaaattgaggaatgctgatgtcgaagccagaataggaattgctggttccaagaagaaaagcactcgtgccagattggtttttcgagttaatatcatgaggaaagatggctccactttgacactgcaaacaccctcttctccaattttgtgtactcagccagcaggagtgccagaaatcttaaagaaaagcttgcatagctgttcagtgaaaggagaagaagaagtgtttttaatcggcaagaactttctgaaaggaactaaagttattttccaagaaaatgtttctgatgaaaactcttggaagtcagaagctgaaattgatatggaactatttcatcagaatcatcttattgtgaaggttcctccctatcatgaccaacatataactttgcctgtgtcagtgggaatatatgtagtgacaaatgctggaagatctcatgatgttcaaccattcacttacactccagacccagcagcagctggtgctttgaatgtaaatgtgaagaaggaaatatctagtccagcaagaccttgctcttttgaagaggccatgaaagcaatgaaaactactggatgtaatttagataaggtaaatattatccctaatgccctgatgactccactcataccaagcagtatgattaagagtgaagatgttactccaatggaagtaacagcagaaaaaagatcttccactatttttaagactacaaagtctgttggatcaactcagcaaacattagaaaacatctcaaacatagcaggaaatggctctttttcatcaccatcatcttcccacctaccttctgaaaatgaaaaacagcagcagattcagcccaaggcatacaacccagagaccctgacaactattcaaacccaggacatctcacagcctggtacttttccagcagtttctgcttctagtcagctgcccaacagcgatgcactattgcagcaggctacacagtttcagacaagagaaactcagtctagagagatattacagtcagatggtacagtggttaatttgtcacaactgactgaggcatcacaacaacagcagcagtcaccactacaagaacaagcacagactttacagcagcagatttcatcaaatatttttccatcaccaaatagtgtgagtcagcttcagaatactattcagcagctgcaagcagggagtttcacaggcagtactgctagtggcagcagtggaagtgttgacttggtccaacaagttttagaggcacagcagcagttatcttcagttttattttctgctccagatggtaatgagaatgttcaagagcagcttagtgcagatatttttcaacaagtcagtcaaattcagagtggtgtaagccctggaatgttttcctcaacagagccaacagtccataccagaccagataatttattacctggaagagctgaaagtgttcatccacagtctgaaaacacgttatctaatcaacagcagcagcagcagcagcaacagcaagtgatggaatcttcagccgcaatggtgatggagatgcaacagagtatctgccaggcagctgcccagattcagtcagagttattcccttcaactgcttcagcaaatggaaaccttcagcaatcgccagtttaccagcagacttctcacatgatgagtgcattgtctaccaatgaggatatgcaaatgcagtgtgaattgttttcttctcctcctgcagtttctggaaatgaaacttctacaactaccacacagcaggttgcaacccctggcactaccatgtttcagacatcaagttcaggagatggagaagaaactggaacacaagcaaaacagattcagaacagtgtctttcagaccatggtccaaatgcaacatagtggggacaatcaacctcaagttaaccttttttcatccacaaaaagtatgatgagtgttcagaatagtggtacccaacaacaaggtaatggtttattccagcaagggaatgagatgatgtcacttcaatctggaaattttttgcagcagtcttctcattcacaggcccaactttttcatcctcaaaatcctattgccgatgctcagaacctttcccaggaaactcaaggttctctctttcatagtccaaatcctattgtccacagtcagacttctacaacctcctctgaacaaatgcagcctccaatgtttcactctcaaagtaccattgctgtgttacagggctcttcagttcctcaagaccagcagtcaaccaacatatttctttcccagagtcccatgaataatcttcagactaacacagtagcccaagaagcattttttgcagcaccgaactcaatttctccacttcagtcaacatcaaacagtgaacaacaagctgctttccaacagcaagctccaatatcacacatccagactcctatgctttcccaagaacaggcacaacccccgcagcagggtttatttcagcctcaggtggccctgggctcccttccacctaatccaatgcctcaaagccaacaaggaaccatgttccagtcacagcactcaatagttgccatgcagagtaactctccatcccaggaacagcagcagcagcagcaacagcagcagcaacagcagcagcaacaacaacagagcattttattcagtaatcagaataccatggctacaatggcgtctccaaagcaaccaccaccaaacatgatattcaacccaaatcaaaatccaatggctaatcaggagcaacagaaccagtcaatttttcaccaacaaagtaacatggccccaatgaatcaagagcaacagcccatgcaatttcagagtcagtccacagtttcctcacttcagaacccaggtcctacccagtcggaatcatcacagacccccttgttccatagctctcctcagattcagttggtacaagggtcacctagttctcaagagcagcaagtaactctcttcttatctccagcatccatgtctgccttgcagaccagtataaatcaacaagatatgcaacagtctcctctttattcccctcagaacaacatgcctggaattcaaggagccacatcttcgcctcaaccacaggctactttatttcacaacacagcaggaggcacaatgaaccaactgcagaattctcctggctcatctcagcagacatcaggaatgttcttatttggcattcaaaataactgtagtcagcttttaacctctggaccagctacattgcctgatcagttgatggccataagtcagccaggccaaccacaaaacgagggccagccacctgtgacaacacttctttctcagcaaatgccagagaattctccactggcatcctctataaacaccaaccagaacatcgaaaagattgatttgcttgtttcattgcaaaaccaagggaacaacttgactggctccttttaactggatataaattccacgaagaaaatcctgattccaagatgtcctgagatcttgtggttccatgagaattattactttaaaaacaaaacaaaatataaaaaactgtgtttgagtaaactgatagattttactctgactgcaaaagagcacacctatgctgcttgttgcagtaactaaccaccaatgttaacatcttcatattttatattcctaataacagtgatgactgagaatctatttgagtttccagctggcagaattaattgttattattttcctaggcgcaatttccttaaacgtacagtttaaattcaaggctggaccactcagttattattgctattagaaaataatatatcatgtttacttttgttcttcattattttctttcctgcattgttttagtcaagtaatggcttttgaaaaagtaaagttcaataataactaaggctgtgatttttttcaatataaaaggcacagctgttggccaaagtgaaggaatcttttttcagttttattggagaaactgaagggtaacattctaacaagtaaactgtatgtgcagataaaagtactcttgatttaacacaaaggcagatgatacacttataaaactgggaacagctggaatgcttcttgattttattttttcagagagttgttagttctctgggtttctactaaggggtttagccataactgtgcatagaaaaataattatctgtaaaaaatgaaggggataatatatgataaattatgttctgatatcctcctacagtagtttaaattgacagaaaaatttgaatgttttcttcttaacccagtcttaggctggtattccctttttatatatatctatattacttttcacctctttttcactttactttagagaactattaatatactactggcttcatgaccctgtagcatctttggccactttaatctagggtgacctagcaatcctgcagcacagggcagagagtactgtcttaggaattattaggagttgattcctgagaaacaacacatttttccccatgaacggtgctgttctgaagtcttcaaatttttccctctaataggaaacagtataaattttaattaaaaaaaaaaggcaaactaaaatttcttgaaatatcacttctccctgatctgcagtgagtataaattcacttgtcacctcagtgctttacagtttgaagtggtcacttacctgatggttcccacaagccttaggctttacagggttgtatcattgacttaaaatgaagaattaacttgtgttacatctataaagagcaaaataacacactccagaacttggcagttgtagcattagttatacagttttgggtgttcttgccacccgtgggatgcctgcttctcactaccacctgtgtctggacacatgcttatgtctcattttccttttggcatgtggaaagctgtcaatgcagtgtaaggccaacgtgtgtgtggcttctatgtgttgagataatgttttggtatccttgtccgtttcatttattttttaagtgtacaaaaaataacctgttaattgttgaaggctacttttctgttctttttttttttttttttctatcctgtacatttagttgaactgtgcggaattgtggtgttggttttgtttacacagccagatttttccttctttttgttttgtgatgatcttcctttgttctttgaatgtgctcttttgtctttttctcttttttctcatgttttcttccctccacctccacccctttctttctttctctctctgattgagaggcattgaattacgttttcagtagtacaggcttcttgccgatatgaagggaacttttcagaaagagacctactctgggtcatttaattttgaatacagttttcaatcgttcaagttttggatggtttatatctaatgtgtgtttcatttttttggaaagctatattttgtatttaggaaatggtatactattttgctatttgtactgagtgagtacattggcataaatatagaaatttatatatatacatatatataaactattcttttttgccacacatttttgtggtaaatttgtgagtttgtctgatgttctaccacaacgtggcgtctgataacagtgagggggggtggggtttgttatgtctttattgagtatttaagtatcttttgaaacaaatgacctgttcatctgtggccattccatcaggcagttagttccttgatgtcagtagtgggctaaaggcagcttactgtgtgtttgctggagctttcactcagccaagtgttagagtcaggaaacccattgaggcaatggcgtcaaatggtgtttcacaagaatgagccattcagtctttgctcactatatatttaatattttattattgttgttattgttattattaattggctttctgtattctatgccttttatttataaagacactaagaaaacccatgtttgtaattttaataacatttttcccatcttgtaatatccagagctactttataaattctctgaaccaaaagtattttcctcagtgtatctcttctcccccagcccctattgggaaaaattacccagtatagttcaggttatgaggaggatcagccacacaatccagtgcttcagtttgaaaatgtaaaattctaaccctaaagtagggttggttgaaatttcagacaaagcaaacccagcaggtataaaaagtagtataaatacaaatctgtaagttatttttgaattttctgaacttttttctaagagattacataggagactaaagaaatctatctgttcaagttctaattaggatgattgttaatactgcactgtggatgaagtggcgactggcttgtgtgctgacttctgtggtttagcaagaggtttattgttatcaaatgctaattggcaatgccaagtcactgggaccaattttctgttttataatatctaagtttagaacagaatatatacctgaactgtagtggtttgatcggatggagacagaaaacccgatttttattctcataaattttgtggttatttatacaagggctgtgctatgctaccatattcttgttcaataataataggtttgttgttttttttacattgttaaatgttccttacccctaaaggtcaatgttaagtacaacattctgaaaatacaatttggctacgaagagtattcatcttctttgaagctcagtggttgatatttgtgctaataatgcaatttcctgattactgttacaagttatagctacatatgggagagactcagtgagccagcaaaggccatagaaacaacaatttattaaatgtatttatggcagaaggacctaaataaactgtgagccaccttttcttctttatattgttacatttaagtgttcttgctttcagcaactcacattaatgcttggagcttatctctttctctctctctctctctctctctgtgtgtgtgtgtgtatgtgtgtgtgtgtgtgtgtgtgtttccttattgtcattccattatatatccacaccaacatgggtgacgataattcaaagtcatattttgcctctaagcttgatcatgttacctttatgattaaagtatcatgttatttagccaatgcaaatctgttttaaaacaaatagtttaaaaaaagaacaagtttttaagggctttattatagaagaagtattaatgaaggactttccttcctccctccctttcctcccctccctgcctcccttcttcccttccatctccccctcctccctgccttctttgtttctccttcccttattcctccctccctcctttctcccttccttcctttcttccattcatccttccttgccttttatttttattttttgtaatatcacatgtgctgtagtttggaattttattctagtgcatttcttgctcatcagaacctcagctaatctacctaggaaaaatagtatcaaaggaaatgagaaagttgtatctgagtccctccagaactaagataattctttttgaccatttaagcctttataaatgcgttttgaccatttaagcctttataaatgcttgttttaggaaagtgaatctgttagatgcatcaacaaataatgaccaggacaaaacgatttaataattaaagtctcaaatcaccatggttatacattttcaccagaaatagtaatcttacaatttttcatttttctgatgaagatttctgttccaatatctgtttcctaatagattttttaaattaattagctttcctctgctttatgaccacaggttttatccctaaccgagacagctgtcttatatctgcatgccttagactgtgtggagggactccatgaagaaagaccataggttagaaaaataactcatagtatataccctagtaagtgggttagtagaatctcataacatgtattaaaaagaggttttcttctctgcttgtttgtgtcactagagcaaaattgtagagataatgctcataatgcagtaaatatcagaataatatctacaatatcatttgtggatggtcccaggtcccagtgctctagttactttacttctttttttttttttgagatggagtcttgctctgtctctcaggctagagcagtgtgcgatctcagctcactgcagcctccacctcccaggttcaagcgattctcctgcctcagcctcccaagtagccaggattacaggcaccctccactaggcccggctaattttttttgtatttttttagtagagatggggttttgccatgttggccaggctggtttcgaactcctaacctccagtgatccacctgcctcggcgtcccaaagtgctaggattacaggcatgagccaccacatccggcctaattacttctttaatccccatttatttttatgccattctagcctcatttattaataaaattatgtttttactttctctttcaggaaattttttaaattaatattttatatctagatctaatgctatggaaaagtgcctttttatcatttataatttcatttttcactatttccaaaaacacataaacaaatagtttcagtaggtcccagcttttactttttccatttaaaccttcttttctccatttcttccctttggcttaagaataaaagaaaaggtacattgctagaattgtttctttgggagagggtaaaagattacagaattagactgttcagcctttatataaactaaatttgtcttcatctcaaccagctaatggtaggtcttatctgaatactcatgagaattttagcatctgtgaaactccatgcaccagatgtgtgtaaatttcaggaagaaagtgttgaaagcattttctctgatgttaattagatggaaataaatcactaaaacatagtttaggtaaagcctgattatgccacttttttttaactagacagggcaaagttgtttatgttagtgtacttcttgtctatcctcagttaatttacctagacaaaaagtgtcaaaggaaatgagaaaaaggttatatctgactccctccagacctaagataattccttttgatcagatacagtcagatggagtgccttggtttttgttaattttgcctctattccagctccttaccacagcggtggtgcttaaagaaaggatcatcagcaacaggtcaggatagttctacctttgggatagggctgctttccccgtgctagtatttctgtgactgttagtggcactgaggactgcaaacttttatgcaatattcttaataccctattgatattatgcactttaatcattccaaagaagccaagaatgctgtatagtgatgattccttcctaatgaattcatcttaactatttagaatgttatgtcccttttcttttggatagccaacttggtataaatgttatatggatttttctaaaatgactatataggacttaagactttgaaatgtaatttacttataaggggaaataattatgctttagcacatcattttagaaacgtcacattttagaaacattcagcttgctaacctacatgtttgggaattcattaaaaccagttgtctatatattttgtgccatgtatataagaacattacaatatatctttttctacatatgtagtatgtgcaaccagtggttctcagagtatggttctcagcccaccagctagtatcagtatcacctgggaactagttagaaatgtaaattctttggccccatcccagacatactgagtcagaaactctggaatagggcccccgcaatctgttttcacaagccctccaggtgattctgatgcacactttaaagtttaggaaccactgggctaagactctgttgagatatagagtttttcttccactcagactgatatagttatacattgttcttcatgtaaattcagcttaacctggttatctataatcttttattggcaaaagttaattctcagtactgcctatagagatacagtgtattttatgtacatacacaattagtctaattcttgataattcagttaatttagtttggcattttcctaccacttactaaaaggtttacattaaatgactgatttaaatatataggtgcaatgttctatgtttattttaattgttatgacatttaagtagctaatataattgaccggtgctaaagtctcctgtttatccataaaatgggtacattatgggcagtgtaatacaagctttcttttcattgcctagtactttaccagcagaccacagttttgccctggctagaccaaccctcagaacaaaatcatcattccttgtatttatatttgtatctgagatagtaaacaagatggctggccaggtcaacatggcaccttaacttatttttttaataggtaaaacttcttcaaaagtagcttgctttgtataagaactaagctatcagtatagatatagctatccttggagcttatgtttcagacaagaattatttactaaaataaataataaacaagataatgcattatacaatttgggcatttctcgtttctcaagtgtatgcatcatggtaaatataaactaaccacaagataggtagattgattcatttcattttaatctccttgtgtaattcagtacctccataattgttctaatcttcttcccactgtttacaaattaccagttaattaactcgtgaaagaaaaattcacatatcagaataaaaataaatgtatactcactttataaaaatcaccactgctgtctttccttaatactagcagtggaaatgtaagtggcttactctacaaattttggtgctggcaaatacataggcaaactgttgggagctgctctagttacattcctcccttcttattccctttttctcttcctcactttattgcataacatattcctgtacccaaagcattctaccacagttctatttgactcccacttgtaataactcctttaaaaaattccatgtttaaccatatgaccctgcttgcttactcatattctccctccctctccccttcctttctctctcttccagaagtcatttgcctggtttgaaatattttgtagggattgcttattatattattttagctgatgaacctcaggacaacgtctacacacacacacatacatacacgcacacaaaatctcagctgttgaagagtgggcttggaatcagacttctgtgtccagtaaaaaactcctgcactgaagtcattgtgacttgagtagttacagactgattccagtgaacttgatctaatttcttttgatctaatgaatgtgtctgcttaccttgtttccttttaattgataagctccaagtagttgctaattttttgacaactttaaatgagtttcattcacttcttttacttaatgttttaagtatagtaccaataatttcattaacctgttctcaagtggtttagctaccattctgccatttttaatttttatttaattttatttgcttgagcacactgatcaaccactgaactgccttcttccattgtcctgcaatgatataagggttacatttttgtgtatatggctttcatagttgggatttcagagcactgataccagatattttcagtttgttctctgggggaatttcatttgcatctatgtttttagctatctgtgataacttgttaaatattaaaaagatattttgcttctattggaacatttgtatactcgcaactatatttctgtaaacagctgcagtcaaaaataaaacactgaaagttaaaaaaaaaaaaaaaaaaaa

SEQ ID NO: 469 - DNA, 14185 bp, Homo sapiens
tgcaacggaaacttttggctccacgaacagaaaagcaagagcaaaaactcagttaaatgcgttcttcctccatctttgcctagtccaaaaggaaaaaaaaagaaacagaaaaaagaaaaactgtttggaagagtagcgttgaggtttgctttttacctgtttttcctctagaacagccaggtggattcacatgatccaattttttaattgtcttctatgtcccactccgaataacccggatgccccagcacaatcagagagatcgttttttttaaaaaaaatttcagcctccaaaggtaggaggggagtgttaggggagaaagtactttaattaaaaatcaataactcgaggtttttgggatacggtttgccatttcctaattaagaaatgggtttgacagtccctttgtacacactgctatgcaaaccccaaagggttggcggctgtccgggcgatgacactccggtcccctgcgagaccccgggccagccaggcccgtccgccgccggcctctggggtccgtccccggctcgcgcagacctctcgcttctctcggctctgtctcctgcgctcagctctgctcggggccggccgcctcaggctcgccgccaccaggtcgttgcaaataccttttccctccccggggccccagcgcgcggccacctcccagcctccccccctcccaccctggcagcggggccctttcccggctcaggaacagcagcagcccgggccgcgccggcaggaagcgaggcccatgttgctgctgttccctggcgcgcctccccgccctccgggggccgccacggctcttccgcgctcccgggcacccccctccgcgcctgcgctgtgccccacgggggcggggctcagattcctgtcagcggcggcggcggtggcggcgaccgtcagttttcgctgaggagaaacacgaaacggaccctttggctctcccccttccccttccccgtcctgaacccctctcctggtcaccgagaatcagtccccgtggagttccccctccacctcgccatcgtttcctcggtcctcggcccagtggaagtcactaccctcgaggaggaggcagcggcagccgccctcgcgtcgccgcccccggttcggtgcccgcggtcccggagaggaggtgccgccgccaccgccgctccccccctcccgctgccctcgggccgggctgggtcgagctgcgatgccctcggacttcatctcattgctcagcgcggacctagacctggaatcgcccaagtccctctactcgcgagaatctgtctatgatcttctcccaaaggagttacagttacctccatctagagaaacatctgtagcatcaatgagtcagacaagcggtggtgaggcaggctcgcctcctccagctgttgttgctgctggatttgcctctgaagcagggagtgtctgcattaaaaatgacctgtagttctctgcttcatagatgcttcttcagctccctcctcttcctccatgggcggtgcttgcagctcctttaccacctcttccagccctaccatttattctacctcagtcaccgacagcaaggctatgcaagtggagagctgctcctcagccgtgggggtaagtaacagaggggtaagtgaaaagcagttaaccagtaacacagttcagcagcatccatcaacaccgaagaggcacacagtcttgtacatctcaccaccacctgaggacttgctggataacagtcggatgtcctgccaggatgaggggtgtggattggaatctgagcagagctgcagtatgtggatggaggattccccctccaacttcagtaacatgagcaccagttcctacaatgataacactgaggtacctcgtaaatcacgaaaacgaaatccaaagcagaggccgggggtcaaacgacgagattgtgaagaatctaatatggatatatttgatgccgacagtgccaaagcacctcactatgtgctttctcagcttaccacggacaacaaaggcaactcaaaagcgggaaatggaacattggaaaaccaaaaaggaactggagtaaagaagagccctatgttgtgtggacaatatcctgttaaaagtgagggaaaggagctgaagatagttgtacaacctgagacacagcaccgagctcggtacctgactgagggcagccgtggctcagtgaaagatagaacacagcaaggctttcctacagtaaagctggaaggccataatgaacctgtagtgttgcaagtgtttgtgggcaacgactctggacgagtgaaaccacatggattttatcaggcctgcagagtaactggacgaaatacaactccttgcaaagaagtggacattgaaggcactactgttatagaagtcggccttgatcctagcaacaacatgacactggcggtggactgcgtagggatattgaaattgaggaatgctgatgtcgaagccagaataggaattgctggttccaagaagaaaagcactcgtgccagattggtttttcgagttaatatcatgaggaaagatggctccactttgacactgcaaacaccctcttctccaattttgtgtactcagccagcaggagtgccagaaatcttaaagaaaagcttgcatagctgttcagtgaaaggagaagaagaagtgtttttaatcggcaagaactttctgaaaggaactaaagttattttccaagaaaatgtttctgatgaaaactcttggaagtcagaagctgaaattgatatggaactatttcatcagaatcatcttattgtgaaggttcctccctatcatgaccaacatataactttgcctgtgtcagtgggaatatatgtagtgacaaatgctggaagatctcatgatgttcaaccattcacttacactccagacccagcagcagctggtgctttgaatgtaaatgtgaagaaggaaatatctagtccagcaagaccttgctcttttgaagaggccatgaaagcaatgaaaactactggatgtaatttagataaggtaaatattatccctaatgccctgatgactccactcataccaagcagtatgattaagagtgaagatgttactccaatggaagtaacagcagaaaaaagatcttccactatttttaagactacaaagtctgttggatcaactcagcaaacattagaaaacatctcaaacatagcaggaaatggctctttttcatcaccatcatcttcccacctaccttctgaaaatgaaaaacagcagcagattcagcccaaggcatacaacccagagaccctgacaactattcaaacccaggacatctcacagcctggtacttttccagcagtttctgcttctagtcagctgcccaacagcgatgcactattgcagcaggctacacagtttcagacaagagaaactcagtctagagagatattacagtcagatggtacagtggttaatttgtcacaactgactgaggcatcacaacaacagcagcagtcaccactacaagaacaagcacagactttacagcagcagatttcatcaaatatttttccatcaccaaatagtgtgagtcagcttcagaatactattcagcagctgcaagcagggagtttcacaggcagtactgctagtggcagcagtggaagtgttgacttggtccaacaagttttagaggcacagcagcagttatcttcagttttattttctgctccagatggtaatgagaatgttcaagagcagcttagtgcagatatttttcaacaagtcagtcaaattcagagtggtgtaagccctggaatgttttcctcaacagagccaacagtccataccagaccagataatttattacctggaagagctgaaagtgttcatccacagtctgaaaacacgttatctaatcaacagcagcagcagcagcagcaacagcaagtgatggaatcttcagccgcaatggtgatggagatgcaacagagtatctgccaggcagctgcccagattcagtcagagttattcccttcaactgcttcagcaaatggaaaccttcagcaatcgccagtttaccagcagacttctcacatgatgagtgcattgtctaccaatgaggatatgcaaatgcagtgtgaattgttttcttctcctcctgcagtttctggaaatgaaacttctacaactaccacacagcaggttgcaacccctggcactaccatgtttcagacatcaagttcaggagatggagaagaaactggaacacaagcaaaacagattcagaacagtgtctttcagaccatggtccaaatgcaacatagtggggacaatcaacctcaagttaaccttttttcatccacaaaaagtatgatgagtgttcagaatagtggtacccaacaacaaggtaatggtttattccagcaagggaatgagatgatgtcacttcaatctggaaattttttgcagcagtcttctcattcacaggcccaactttttcatcctcaaaatcctattgccgatgctcagaacctttcccaggaaactcaaggttctctctttcatagtccaaatcctattgtccacagtcagacttctacaacctcctctgaacaaatgcagcctccaatgtttcactctcaaagtaccattgctgtgttacagggctcttcagttcctcaagaccagcagtcaaccaacatatttctttcccagagtcccatgaataatcttcagactaacacagtagcccaagaagcattttttgcagcaccgaactcaatttctccacttcagtcaacatcaaacagtgaacaacaagctgctttccaacagcaagctccaatatcacacatccagactcctatgctttcccaagaacaggcacaacccccgcagcagggtttatttcagcctcaggtggccctgggctcccttccacctaatccaatgcctcaaagccaacaaggaaccatgttccagtcacagcactcaatagttgccatgcagagtaactctccatcccaggaacagcagcagcagcagcaacagcagcagcaacagcagcagcaacaacaacagagcattttattcagtaatcagaataccatggctacaatggcgtctccaaagcaaccaccaccaaacatgatattcaacccaaatcaaaatccaatggctaatcaggagcaacagaaccagtcaatttttcaccaacaaagtaacatggccccaatgaatcaagagcaacagcccatgcaatttcagagtcagtccacagtttcctcacttcagaacccaggtcctacccagtcggaatcatcacagacccccttgttccatagctctcctcagattcagttggtacaagggtcacctagttctcaagagcagcaagtaactctcttcttatctccagcatccatgtctgccttgcagaccagtataaatcaacaagatatgcaacagtctcctctttattcccctcagaacaacatgcctggaattcaaggagccacatcttcgcctcaaccacaggctactttatttcacaacacagcaggaggcacaatgaaccaactgcagaattctcctggctcatctcagcagacatcaggaatgttcttatttggcattcaaaataactgtagtcagcttttaacctctggaccagctacattgcctgatcagttgatggccataagtcagccaggccaaccacaaaacgagggccagccacctgtgacaacacttctttctcagcaaatgccagagaattctccactggcatcctctataaacaccaaccagaacatcgaaaagattgatttgcttgtttcattgcaaaaccaagggaacaacttgactggctccttttaactggatataaattccacgaagaaaatcctgattccaagatgtcctgagatcttgtggttccatgagaattattactttaaaaacaaaacaaaatataaaaaactgtgtttgagtaaactgatagattttactctgactgcaaaagagcacacctatgctgcttgttgcagtaactaaccaccaatgttaacatcttcatattttatattcctaataacagtgatgactgagaatctatttgagtttccagctggcagaattaattgttattattttcctaggcgcaatttccttaaacgtacagtttaaattcaaggctggaccactcagttattattgctattagaaaataatatatcatgtttacttttgttcttcattattttctttcctgcattgttttagtcaagtaatggcttttgaaaaagtaaagttcaataataactaaggctgtgatttttttcaatataaaaggcacagctgttggccaaagtgaaggaatcttttttcagttttattggagaaactgaagggtaacattctaacaagtaaactgtatgtgcagataaaagtactcttgatttaacacaaaggcagatgatacacttataaaactgggaacagctggaatgcttcttgattttattttttcagagagttgttagttctctgggtttctactaaggggtttagccataactgtgcatagaaaaataattatctgtaaaaaatgaaggggataatatatgataaattatgttctgatatcctcctacagtagtttaaattgacagaaaaatttgaatgttttcttcttaacccagtcttaggctggtattccctttttatatatatctatattacttttcacctctttttcactttactttagagaactattaatatactactggcttcatgaccctgtagcatctttggccactttaatctagggtgacctagcaatcctgcagcacagggcagagagtactgtcttaggaattattaggagttgattcctgagaaacaacacatttttccccatgaacggtgctgttctgaagtcttcaaatttttccctctaataggaaacagtataaattttaattaaaaaaaaaaggcaaactaaaatttcttgaaatatcacttctccctgatctgcagtgagtataaattcacttgtcacctcagtgctttacagtttgaagtggtcacttacctgatggttcccacaagccttaggctttacagggttgtatcattgacttaaaatgaagaattaacttgtgttacatctataaagagcaaaataacacactccagaacttggcagttgtagcattagttatacagttttgggtgttcttgccacccgtgggatgcctgcttctcactaccacctgtgtctggacacatgcttatgtctcattttccttttggcatgtggaaagctgtcaatgcagtgtaaggccaacgtgtgtgtggcttctatgtgttgagataatgttttggtatccttgtccgtttcatttattttttaagtgtacaaaaaataacctgttaattgttgaaggctacttttctgttctttttttttttttttttctatcctgtacatttagttgaactgtgcggaattgtggtgttggttttgtttacacagccagatttttccttctttttgttttgtgatgatcttcctttgttctttgaatgtgctcttttgtctttttctcttttttctcatgttttcttccctccacctccacccctttctttctttctctctctgattgagaggcattgaattacgttttcagtagtacaggcttcttgccgatatgaagggaacttttcagaaagagacctactctgggtcatttaattttgaatacagttttcaatcgttcaagttttggatggtttatatctaatgtgtgtttcatttttttggaaagctatattttgtatttaggaaatggtatactattttgctatttgtactgagtgagtacattggcataaatatagaaatttatatatatacatatatataaactattcttttttgccacacatttttgtggtaaatttgtgagtttgtctgatgttctaccacaacgtggcgtctgataacagtgagggggggtggggtttgttatgtctttattgagtatttaagtatcttttgaaacaaatgacctgttcatctgtggccattccatcaggcagttagttccttgatgtcagtagtgggctaaaggcagcttactgtgtgtttgctggagctttcactcagccaagtgttagagtcaggaaacccattgaggcaatggcgtcaaatggtgtttcacaagaatgagccattcagtctttgctcactatatatttaatattttattattgttgttattgttattattaattggctttctgtattctatgccttttatttataaagacactaagaaaacccatgtttgtaattttaataacatttttcccatcttgtaatatccagagctactttataaattctctgaaccaaaagtattttcctcagtgtatctcttctcccccagcccctattgggaaaaattacccagtatagttcaggttatgaggaggatcagccacacaatccagtgcttcagtttgaaaatgtaaaattctaaccctaaagtagggttggttgaaatttcagacaaagcaaacccagcaggtataaaaagtagtataaatacaaatctgtaagttatttttgaattttctgaacttttttctaagagattacataggagactaaagaaatctatctgttcaagttctaattaggatgattgttaatactgcactgtggatgaagtggcgactggcttgtgtgctgacttctgtggtttagcaagaggtttattgttatcaaatgctaattggcaatgccaagtcactgggaccaattttctgttttataatatctaagtttagaacagaatatatacctgaactgtagtggtttgatcggatggagacagaaaacccgatttttattctcataaattttgtggttatttatacaagggctgtgctatgctaccatattcttgttcaataataataggtttgttgttttttttacattgttaaatgttccttacccctaaaggtcaatgttaagtacaacattctgaaaatacaatttggctacgaagagtattcatcttctttgaagctcagtggttgatatttgtgctaataatgcaatttcctgattactgttacaagttatagctacatatgggagagactcagtgagccagcaaaggccatagaaacaacaatttattaaatgtatttatggcagaaggacctaaataaactgtgagccaccttttcttctttatattgttacatttaagtgttcttgctttcagcaactcacattaatgcttggagcttatctctttctctctctctctctctctctctgtgtgtgtgtgtgtatgtgtgtgtgtgtgtgtgtgtgtttccttattgtcattccattatatatccacaccaacatgggtgacgataattcaaagtcatattttgcctctaagcttgatcatgttacctttatgattaaagtatcatgttatttagccaatgcaaatctgttttaaaacaaatagtttaaaaaaagaacaagtttttaagggctttattatagaagaagtattaatgaaggactttccttcctccctccctttcctcccctccctgcctcccttcttcccttccatctccccctcctccctgccttctttgtttctccttcccttattcctccctccctcctttctcccttccttcctttcttccattcatccttccttgccttttatttttattttttgtaatatcacatgtgctgtagtttggaattttattctagtgcatttcttgctcatcagaacctcagctaatctacctaggaaaaatagtatcaaaggaaatgagaaagttgtatctgagtccctccagaactaagataattctttttgaccatttaagcctttataaatgcgttttgaccatttaagcctttataaatgcttgttttaggaaagtgaatctgttagatgcatcaacaaataatgaccaggacaaaacgatttaataattaaagtctcaaatcaccatggttatacattttcaccagaaatagtaatcttacaatttttcatttttctgatgaagatttctgttccaatatctgtttcctaatagattttttaaattaattagctttcctctgctttatgaccacaggttttatccctaaccgagacagctgtcttatatctgcatgccttagactgtgtggagggactccatgaagaaagaccataggttagaaaaataactcatagtatataccctagtaagtgggttagtagaatctcataacatgtattaaaaagaggttttcttctctgcttgtttgtgtcactagagcaaaattgtagagataatgctcataatgcagtaaatatcagaataatatctacaatatcatttgtggatggtcccaggtcccagtgctctagttactttacttctttttttttttttgagatggagtcttgctctgtctctcaggctagagcagtgtgcgatctcagctcactgcagcctccacctcccaggttcaagcgattctcctgcctcagcctcccaagtagccaggattacaggcaccctccactaggcccggctaattttttttgtatttttttagtagagatggggttttgccatgttggccaggctggtttcgaactcctaacctccagtgatccacctgcctcggcgtcccaaagtgctaggattacaggcatgagccaccacatccggcctaattacttctttaatccccatttatttttatgccattctagcctcatttattaataaaattatgtttttactttctctttcaggaaattttttaaattaatattttatatctagatctaatgctatggaaaagtgcctttttatcatttataatttcatttttcactatttccaaaaacacataaacaaatagtttcagtaggtcccagcttttactttttccatttaaaccttcttttctccatttcttccctttggcttaagaataaaagaaaaggtacattgctagaattgtttctttgggagagggtaaaagattacagaattagactgttcagcctttatataaactaaatttgtcttcatctcaaccagctaatggtaggtcttatctgaatactcatgagaattttagcatctgtgaaactccatgcaccagatgtgtgtaaatttcaggaagaaagtgttgaaagcattttctctgatgttaattagatggaaataaatcactaaaacatagtttaggtaaagcctgattatgccacttttttttaactagacagggcaaagttgtttatgttagtgtacttcttgtctatcctcagttaatttacctagacaaaaagtgtcaaaggaaatgagaaaaaggttatatctgactccctccagacctaagataattccttttgatcagatacagtcagatggagtgccttggtttttgttaattttgcctctattccagctccttaccacagcggtggtgcttaaagaaaggatcatcagcaacaggtcaggatagttctacctttgggatagggctgctttccccgtgctagtatttctgtgactgttagtggcactgaggactgcaaacttttatgcaatattcttaataccctattgatattatgcactttaatcattccaaagaagccaagaatgctgtatagtgatgattccttcctaatgaattcatcttaactatttagaatgttatgtcccttttcttttggatagccaacttggtataaatgttatatggatttttctaaaatgactatataggacttaagactttgaaatgtaatttacttataaggggaaataattatgctttagcacatcattttagaaacgtcacattttagaaacattcagcttgctaacctacatgtttgggaattcattaaaaccagttgtctatatattttgtgccatgtatataagaacattacaatatatctttttctacatatgtagtatgtgcaaccagtggttctcagagtatggttctcagcccaccagctagtatcagtatcacctgggaactagttagaaatgtaaattctttggccccatcccagacatactgagtcagaaactctggaatagggcccccgcaatctgttttcacaagccctccaggtgattctgatgcacactttaaagtttaggaaccactgggctaagactctgttgagatatagagtttttcttccactcagactgatatagttatacattgttcttcatgtaaattcagcttaacctggttatctataatcttttattggcaaaagttaattctcagtactgcctatagagatacagtgtattttatgtacatacacaattagtctaattcttgataattcagttaatttagtttggcattttcctaccacttactaaaaggtttacattaaatgactgatttaaatatataggtgcaatgttctatgtttattttaattgttatgacatttaagtagctaatataattgaccggtgctaaagtctcctgtttatccataaaatgggtacattatgggcagtgtaatacaagctttcttttcattgcctagtactttaccagcagaccacagttttgccctggctagaccaaccctcagaacaaaatcatcattccttgtatttatatttgtatctgagatagtaaacaagatggctggccaggtcaacatggcaccttaacttatttttttaataggtaaaacttcttcaaaagtagcttgctttgtataagaactaagctatcagtatagatatagctatccttggagcttatgtttcagacaagaattatttactaaaataaataataaacaagataatgcattatacaatttgggcatttctcgtttctcaagtgtatgcatcatggtaaatataaactaaccacaagataggtagattgattcatttcattttaatctccttgtgtaattcagtacctccataattgttctaatcttcttcccactgtttacaaattaccagttaattaactcgtgaaagaaaaattcacatatcagaataaaaataaatgtatactcactttataaaaatcaccactgctgtctttccttaatactagcagtggaaatgtaagtggcttactctacaaattttggtgctggcaaatacataggcaaactgttgggagctgctctagttacattcctcccttcttattccctttttctcttcctcactttattgcataacatattcctgtacccaaagcattctaccacagttctatttgactcccacttgtaataactcctttaaaaaattccatgtttaaccatatgaccctgcttgcttactcatattctccctccctctccccttcctttctctctcttccagaagtcatttgcctggtttgaaatattttgtagggattgcttattatattattttagctgatgaacctcaggacaacgtctacacacacacacatacatacacgcacacaaaatctcagctgttgaagagtgggcttggaatcagacttctgtgtccagtaaaaaactcctgcactgaagtcattgtgacttgagtagttacagactgattccagtgaacttgatctaatttcttttgatctaatgaatgtgtctgcttaccttgtttccttttaattgataagctccaagtagttgctaattttttgacaactttaaatgagtttcattcacttcttttacttaatgttttaagtatagtaccaataatttcattaacctgttctcaagtggtttagctaccattctgccatttttaatttttatttaattttatttgcttgagcacactgatcaaccactgaactgccttcttccattgtcctgcaatgatataagggttacatttttgtgtatatggctttcatagttgggatttcagagcactgataccagatattttcagtttgttctctgggggaatttcatttgcatctatgtttttagctatctgtgataacttgttaaatattaaaaagatattttgcttctattggaacatttgtatactcgcaactatatttctgtaaacagctgcagtcaaaaataaaacactgaaagttaaaaaaaaaaaaaaaaaaaa

SEQ ID NO: 470 - DNA, 5304 bp, Homo sapiens
ggcggtggcggcgaccgtcagttttcgctgaggagaaacacgaaacggaccctttggctctcccccttccccttccccgtcctgaacccctctcctggtcaccgagaatcagtccccgtggagttccccctccacctcgccatcgtttcctcggtcctcggcccagtggaagtcactaccctcgaggaggaggcagcggcagccgccctcgcgtcgccgcccccggttcggtgcccgcggtcccggagaggaggtgccgccgccaccgccgctccccccctcccgctgccctcgggccgggctgggtcgagctgcgatgccctcggacttcatctcattgctcagcgcggacctagacctggaatcgcccaagtccctctactcgcgagaatctgtctatgatcttctcccaaaggagttacagttacctccatctagagaaacatctgtagcatcaatgagtcagacaagcggtggtgaggcaggctcgcctcctccagctgttgttgctgctggatttgcctctgaagcagggagtgtctgcattaaaaatgacctgtagttctctgcttcatagatgcttcttcagctccctcctcttcctccatgggcggtgcttgcagctcctttaccacctcttccagccctaccatttattctacctcagtcaccgacagcaaggctatgcaagtggagagctgctcctcagccgtgggggtaagtaacagaggggtaagtgaaaagcagttaaccagtaacacagttcagcagcatccatcaacaccgaagaggcacacagtcttgtacatctcaccaccacctgaggacttgctggataacagtcggatgtcctgccaggatgaggggtgtggattggaatctgagcagagctgcagtatgtggatggaggattccccctccaacttcagtaacatgagcaccagttcctacaatgataacactgaggtacctcgtaaatcacgaaaacgaaatccaaagcagaggccgggggtcaaacgacgagattgtgaagaatctaatatggatatatttgatgccgacagtgccaaagcacctcactatgtgctttctcagcttaccacggacaacaaaggcaactcaaaagcgggaaatggaacattggaaaaccaaaaaggaactggagtaaagaagagccctatgttgtgtggacaatatcctgttaaaagtgagggaaaggagctgaagatagttgtacaacctgagacacagcaccgagctcggtacctgactgagggcagccgtggctcagtgaaagatagaacacagcaaggctttcctacagtaaagctggaaggccataatgaacctgtagtgttgcaagtgtttgtgggcaacgactctggacgagtgaaaccacatggattttatcaggcctgcagagtaactggacgaaatacaactccttgcaaagaagtggacattgaaggcactactgttatagaagtcggccttgatcctagcaacaacatgacactggcggtggactgcgtagggatattgaaattgaggaatgctgatgtcgaagccagaataggaattgctggttccaagaagaaaagcactcgtgccagattggtttttcgagttaatatcatgaggaaagatggctccactttgacactgcaaacaccctcttctccaattttgtgtactcagccagcaggagtgccagaaatcttaaagaaaagcttgcatagctgttcagtgaaaggagaagaagaagtgtttttaatcggcaagaactttctgaaaggaactaaagttattttccaagaaaatgtttctgatgaaaactcttggaagtcagaagctgaaattgatatggaactatttcatcagaatcatcttattgtgaaggttcctccctatcatgaccaacatataactttgcctgtgtcagtgggaatatatgtagtgacaaatgctggaagatctcatgatgttcaaccattcacttacactccagacccagcagcagctggtgctttgaatgtaaatgtgaagaaggaaatatctagtccagcaagaccttgctcttttgaagaggccatgaaagcaatgaaaactactggatgtaatttagataaggtaaatattatccctaatgccctgatgactccactcataccaagcagtatgattaagagtgaagatgttactccaatggaagtaacagcagaaaaaagatcttccactatttttaagactacaaagtctgttggatcaactcagcaaacattagaaaacatctcaaacatagcaggaaatggctctttttcatcaccatcatcttcccacctaccttctgaaaatgaaaaacagcagcagattcagcccaaggcatacaacccagagaccctgacaactattcaaacccaggacatctcacagcctggtacttttccagcagtttctgcttctagtcagctgcccaacagcgatgcactattgcagcaggctacacagtttcagacaagagaaactcagtctagagagatattacagtcagatggtacagtggttaatttgtcacaactgactgaggcatcacaacaacagcagcagtcaccactacaagaacaagcacagactttacagcagcagatttcatcaaatatttttccatcaccaaatagtgtgagtcagcttcagaatactattcagcagctgcaagcagggagtttcacaggcagtactgctagtggcagcagtggaagtgttgacttggtccaacaagttttagaggcacagcagcagttatcttcagttttattttctgctccagatggtaatgagaatgttcaagagcagcttagtgcagatatttttcaacaagtcagtcaaattcagagtggtgtaagccctggaatgttttcctcaacagagccaacagtccataccagaccagataatttattacctggaagagctgaaagtgttcatccacagtctgaaaacacgttatctaatcaacagcagcagcagcagcagcaacagcaagtgatggaatcttcagccgcaatggtgatggagatgcaacagagtatctgccaggcagctgcccagattcagtcagagttattcccttcaactgcttcagcaaatggaaaccttcagcaatcgccagtttaccagcagacttctcacatgatgagtgcattgtctaccaatgaggatatgcaaatgcagtgtgaattgttttcttctcctcctgcagtttctggaaatgaaacttctacaactaccacacagcaggttgcaacccctggcactaccatgtttcagacatcaagttcaggagatggagaagaaactggaacacaagcaaaacagattcagaacagtgtctttcagaccatggtccaaatgcaacatagtggggacaatcaacctcaagttaaccttttttcatccacaaaaagtatgatgagtgttcagaatagtggtacccaacaacaaggtaatggtttattccagcaagggaatgagatgatgtcacttcaatctggaaattttttgcagcagtcttctcattcacaggcccaactttttcatcctcaaaatcctattgccgatgctcagaacctttcccaggaaactcaaggttctctctttcatagtccaaatcctattgtccacagtcagacttctacaacctcctctgaacaaatgcagcctccaatgtttcactctcaaagtaccattgctgtgttacagggctcttcagttcctcaagaccagcagtcaaccaacatatttctttcccagagtcccatgaataatcttcagactaacacagtagcccaagaagcattttttgcagcaccgaactcaatttctccacttcagtcaacatcaaacagtgaacaacaagctgctttccaacagcaagctccaatatcacacatccagactcctatgctttcccaagaacaggcacaacccccgcagcagggtttatttcagcctcaggtggccctgggctcccttccacctaatccaatgcctcaaagccaacaaggaaccatgttccagtcacagcactcaatagttgccatgcagagtaactctccatcccaggaacagcagcagcagcagcaacagcagcagcaacagcagcagcaacaacaacagagcattttattcagtaatcagaataccatggctacaatggcgtctccaaagcaaccaccaccaaacatgatattcaacccaaatcaaaatccaatggctaatcaggagcaacagaaccagtcaatttttcaccaacaaagtaacatggccccaatgaatcaagagcaacagcccatgcaatttcagagtcagtccacagtttcctcacttcagaacccaggtcctacccagtcggaatcatcacagacccccttgttccatagctctcctcagattcagttggtacaagggtcacctagttctcaagagcagcaagtaactctcttcttatctccagcatccatgtctgccttgcagaccagtataaatcaacaagatatgcaacagtctcctctttattcccctcagaacaacatgcctggaattcaaggagccacatcttcgcctcaaccacaggctactttatttcacaacacagcaggaggcacaatgaaccaactgcagaattctcctggctcatctcagcagacatcaggaatgttcttatttggcattcaaaataactgtagtcagcttttaacctctggaccagctacattgcctgatcagttgatggccataagtcagccaggccaaccacaaaacgagggccagccacctgtgacaacacttctttctcagcaaatgccagagaattctccactggcatcctctataaacaccaaccagaacatcgaaaagattgatttgcttgtttcattgcaaaaccaagggaacaacttgactggctccttttaactggatatgtaagtattgcattttggcttcttattgaaaagcatcagattttattcttcttaacagatttaggttaagtaatagtagttctaatcttttaaaatgtggctttctcacaagatgatacttttttactctgaataaaattattctgaatgatagcttatggtcatatagttaatacagaccaggccgggcgtggtggctcatgcctgtaatcccagcactttgagagaccaaggtgggcggatcacgaggtcaggcgatcgagaccatcctggctaacatggtgaaaccccgtctctactaaaaaatacaaaaaaaaaaaaa

SEQ ID NO: 471 - DNA, 2796 bp, Homo sapiens
gcggcggcttccaacaggctctggggcgccgagcggacaggaacgcagcacgggggctccgaggcggggtctgggtgttgaggggcgactggagccatggcggagtcggcgcctgctcggcacaggagaaaacgacgctccacacctttaacttcttccacacttccttcacaagcaacagagaaaagctcctattttcagaccaccgagatttcactctggacggtggtggccgctattcaggctgtggagaagaagatggagtcccaggctgcccggctacagagcctggaggggcgcacggggacagccgagaagaagctggctgactgcgagaagatggccgtggagttcgggaaccagctggagggcaagtgggccgtgctggggaccctgctgcaggagtatgggctactgcagaggcggctggagaacgtggagaacctgctgcgcaacaggaacttctggatcctgcggctgcccccgggcagcaagggggaggcccccaaggtgtccaggtcactggagaatgatggcgtctgtttcaccgagcaggaatgggagaatctggaggattggcagaaggagctctacagaaacgtgatggagagtaactatgagacactggtctctctgaaggtccttggccagacagagggagaagcggagttgggtacagagatgctgggtgacttggaagaggaaggtcctggtggtgcccacccagcaggtggggtcatgatcaaacaggagctacagtatacacaggaaggccctgcggatcttcctggagagttctcatgcattgctgaagagcaggctttcctgagcccagagcagaccgaactctggggtggtcagggcagttctgtcctcttggaaacaggtcctggggactctactctagaggagcctgttggtagtagagttcctagcagcagcagaactgtgggctgcccgaagcagaaatctcataggcaggtacagctggaccaggaatgtgggcagggcctgaagctgaaaaaggacacttcccgcccctacgaatgttctgagtgtgagatcaccttccgctataagcagcagctggccacacatctgcgcagccactctgggtgggggtcttgtacacctgaggagccagaggagagccttaggcccaggccacggctgaaaccacagaccaaaaaggccaagctgcatcagtgtgatgtgtgcctgaggagcttcagctgcaaggtgagcctggtgacccatcagcgttgccacctgcaggaggggcccagtgccggccagcatgtccaagagaggttctcacccaacagcctggttgccctgcctggccacatcccttggaggaaaagccggagttccctcatctgtggttactgtggcaagagcttcagtcacccatctgacttggtgcggcaccagcgcatccacacgggtgagcggccctacagctgcactgagtgtgagaagagctttgtccagaagcagcacctcctgcagcaccagaagatccaccagcgggagcggggtgggctggccctggagcccggaaggcccaatggcctgctttaagggtgcagcccctcgcccgtctgggggatggaggggggtggcattggttcccccgaagagacactgcagtcagggactgagttcttcctgagggcagttgtttgtgattgccttcccttgtcccagtaccaagccaagcccaaaggctgtcctgaaaaccctgtggaagaagagtccaggccaggtcttcatcctgctgccaagtttgctgtttcttggcaccttcaggtctctggttttctcattcatgccaatgcttgtgggctggggttggcgttctgaccccacagggactggtggctggttccagggctcgtcccggcatttcatgtcttcccacggggttgagtcgggccataggggtgagcagctgcctggaagagttctgggaagtataaccctccattttttcttgttttataatctctttgtttaataataagtagaagaaataatttaaatgaactgcttagccctgctctgaagaaccttttttggaattagattttagttgattttttaaagaatacagcccaacacttgttttttacattttaagagttgtagaagttgttcctaacttggggactggacctaccctctaggagggagttgttaatggggctcttttagcccactgatgcttacttaggccggagagcaggggacacggtgctaggttccctcgtgcagtgcctggtgctctcaaattgtctcaaaaggaccaagaggaaaagagtcggaggggtagaccctgcagccctgttgagaagaaagattccagtgaagttgctgatggtatggctgtggtctgggacttgcggtgtctcggcatacccctctcctcttcccacctcctcctggctatgttctgcagcctcccagagtagaaaactactttgttacttaaggttgttcaccttgtaccagtggttatttgagtttgttcctattacaccaatccttacttgaggtggttcggattacagtttccaaatgcattctgggattgcctattccagagagggtacagaaaaagcacacagatggcttgtctcaggagtgttgaatgtgtgccccgctgctgtctggggggatgggagtgggctctggggtcatatgtgaacatccccttggatgatttgcggttgcttagaataaaacttgctactagcaaaagaaaaaaaaaaaaaaaaaaaaaaaaaaaaaaaa

SEQ ID NO: 472 - DNA, 2385 bp, Homo sapiens
ccacctccctctcatggctagtaggagagactggtgcttgccccgcccggtggactaactcgcttaattttaaataaaaagtcgaggacacggcggtcgttttcccgaagacatgggccctcccatgggccatttgctccctggaggccctcgcgtcttgctgagcccggggagttaggatgacgcgagcggtgagggaacccggaacaattccttcacagaacaattgaggcgaggcctttgggagtactttgtggaacgaaccccggcgggccctgccagacgcacagggatggcggcggaggcggccgatttggggctgggggccgccgtccccgtggagctgaggcgggagcgacgcatggtgtgcgtggagtacccgggagtggtgcgtgatgtggctaagatgctgccgactctgggcggtgaggaaggcgtctcccggatctacgcagaccccaccaagaggctggagctgtacttccggcccaaggacccatactgccacccagtgtgcgccaaccgcttcagtaccagcagcctgctgctccgcatcaggaagagaacgaggcggcagaaaggggtgctgggcactgaggcccactccgaggtcacatttgacatggagatccttggcatcatctccaccatttacaaatttcaggggatgtctgacttccagtacttggctgtgcatacggaagcaggcggcaagcatacgtcaatgtatgacaaggtgctcatgctccggcccgagaaggaggcctttttccaccaggagctgccgctctacatccccccacccatcttctcccggctggacgccccggtggactacttctaccgaccagagacccagcaccgggaaggctacaacaatccccccatctcaggtgagaatctgattggcctgagcagagcccggcgcccccacaatgccatctttgtcaactttgaggatgaggaggtgcccaagcagccactggaggctgcagcccagacgtggaggagagtctgcactaaccccgtggaccggaaggtggaggaggagctgaggaagctgtttgacatccgtcccatctggtcccgaaatgctgtcaaggccaacatcagcgtccacccagacaagctcaaggtcttgcttcccttcatagcctattacatgataacaggcccctggcgcagcctatggattcgatttgggtatgacccccgaaaaaacccagatgccaagatttatcaagtcctcgatttccgaatccgttgtggaatgaaacacggttacgcccccagtgacttgccggtcaaagcaaagcgcagcacctacaactacagcctccccatcaccgtcaagaagacatccagccagcttgtcaccatgcatgacctgaagcagggcctgggccggtcggggacgagtggtgctcggaaaccagcttccagcaagtacaagctcaaggactctgtctacatcttccgggaaggggccttgccaccctatcggcagatgttctaccagttatgcgacttgaatgtggaagagttgcagaagatcattcaccgcaatgacggggcagagaattcctgcacagaacgggatgggtggtgcctccccaagaccagcgacgagctcagggacaccatgtccctcatgatccggcagaccatccgctccaagaggcctgctctcttttccagctcagccaaggctgatggcggaaaagagcagctgacgtacgagtctggggaagacgaggaggatgaggaggaggaggaagaggaggaggaggacttcaagccatccgacggcagtgaaaacgaaatggagacagagattctggactacgtgtgacagggcccaaggctgggcctccctgacccaaccagactggtgtctggcctaatgagggagccttgctccccattgccacccacagtgcccggaatggccctaggaggccctctgaggagagctagagtcccagcaaagggtgcagctgaccctagcactggctgtgacatgctgcttggtgctgcctctggtcctgaggggttagggacatcccaaaggtataccctgctctgccacccatgaaccagcccagcatccagccagtgagtggcacccaatgcctctcaggatgagaccagtaaatgccggaggtggagctgggcagctgtggagccccacgcacaggccagtctcgcttggctctcatgactgtggtggtggagatagcgtggggagcctcgcccatggtctcacgtggcaagaagtgcctttagctctggatcccaaccgtttggcacagctttgccacagccaggcccctctggaattgtccttattaaaccagtttcccgaaaaaaaaaaaaaaaaaaaaa

SEQ ID NO: 473 - DNA, 1586 bp, Homo sapiens
tccgaaagtgcccgagcggtgccggacggactaatcgggcctcggccgtggctcggacgtccgctcccgaaacgcggcgcggtcgggccccttcgtcaggagacgcgaaaatggccgaaggagcgcgagcgcgcgggccgagaggctgccgggatcgcgacggaccggcgggcggggcggggagaggatcctccacagtgctctcttcagttccccttcaaatgctgttttatctcagcggaacgtactacgccctgtatttcctcgccacgctcctgatgatcacgtataaaagtcaggtgttcagctatcctcaccgctacctggtcctcgatcttgctctgctgtttctgatggggattctagaagcagttcggttatacctgggcaccaggggcaacctgacagaggctgagaggccgctggccgccagcctggccctcacggctggcaccgccctcctctctgcccacttcctgctttggcaggccctagtgttgtgggcggactgggccctcagcgccacgctcctggcccttcacggcctggaggccgtcctgcaggtggttgccatcgcggccttcaccaggtagctacggacacccgggataccccacactggggccctcctcctgggcctgaccagtcccccagctgtcacctccccattcctggacaggaagggcacttttcctagtgactggccatagatggttttggatggttccatctgttctggcaggagtgggagcaggagccagggcagaacaaactgctggaggccctggtgttgggaacagctgcggggagggtagggaccagacagaactgccttcaagatgagtcccaggagcgcacactcagccctgtcagtggggtctggctttagcagccaggcctccacagacccccatgggcccccagggccgagagggaggacagagcccttcagaacagaggcctcatctcactgcatcccccatcaccccctagttccccaatggtcctaatttgtgttctgagatcccagtttactctgtggccaggccccacctgtgtttccaagtcgggctggagacgcaggatggggtaggccttgtgctctgagcaaccccagctctgcctcacaggcaggcaggcccggtgcaagagtggactctgggttcctaaagcaataaatgcaaacaagccaacagctctgctgcctagcaatttccatcttagccacacttctcccttcaggggcttcggaggagaggtcagggctaaggccggggatgagactgcaggagagagagcagcggagggccacattcggagcctccgtccactccagttttatcagcttttgccttttgcacggagtgctaaacaaattctagctctgtgtttttttcccattcccagatttactatcagttctccttaaaaagtatctaagctgttacagtagctttcccttcacttgattctattgtgtgttttctatgtttggaataattacacccaaatatctagatattttctcttcaccgcattttgtaaataaagagatgtgtatgcctccctgaaaaaaaaaaaaaaaa

SEQ ID NO: 474 - DNA, 2892 bp, Homo sapiens
gcgccggcacacctattggcccccgcggcgtcccgtcgccgcgtcgcgttgctggcccgtcggagcgacgccgctcgggtcagtcggcggccggactgggaagatggacgcagctactctgacctacgacactctccggtttgctgagtttgaagattttcctgagacctcagagcccgtttggatactgggtagaaaatacagcattttcacagaaaaggacgagatcttgtctgatgtggcatctagactttggtttacatacaggaaaaactttccagccattggggggacaggccccacctcggacacaggctggggctgcatgctgcggtgtggacagatgatctttgcccaagccctggtgtgccggcacctaggccgagattggaggtggacacaaaggaagaggcagccagacagctacttcagcgtcctcaacgcattcatcgacaggaaggacagttactactccattcaccagatagcgcaaatgggagttggcgaaggcaagtccataggccagtggtacgggcccaacactgtcgcccaggtcctgaagaagcttgctgtcttcgatacgtggagctccttggcggtccacattgcaatggacaacactgttgtgatggaggaaatcagaaggttgtgcaggaccagcgttccctgtgcaggcgccactgcgtttcctgcagattccgaccggcactgcaacggattccctgccggagctgaggtcaccaacaggccgtcgccatggagacccctggtacttctcattcccctgcgcctggggctcacggacatcaacgaggcctacgtggagacgctgaagcactgcttcatgatgccccagtccctgggcgtcatcggagggaagcccaacagcgcccactacttcatcggctacgttggtgaggagctcatctacctggacccccacaccacgcagccagccgtggagcccactgatggctgcttcatcccggacgagagcttccactgccagcacccgccgtgccgcatgagcatcgcggagcttgacccgtccatcgctgtggggtttttctgtaagactgaagatgacttcaatgattggtgccagcaagtcaaaaagctgtctctgcttggaggtgccctgcccatgtttgagctggtggagctgcagccttcacatctggcctgccccgacgtcctgaacctgtccctagattcttctgatgtagagcgactggaaagattcttcgactcagaagatgaagactttgaaatcctgtccctttgaaaatcctggggtcgggggtggcacctgtgagagcctggggctcctggtgccgctgcgtttcatccatcccgcccgctcgcctgccgagggctgcgccccgtgctgcctccccccagagggccacccgctgtgctcgtggactgaggctgcgctgcccgggaggccttactgcttggtgtcagactgcccagctcagagtgcccgtcagggcctgtgcatccgcacgcggagccgtctgttaggagcttccagagtgttctctcgacactgccagccccgtgttagcacctgggcctcagtcccacttgctcccaggcgccggttctgtggttggtttggaattaaagtcctgtttgaagttgtcagacacagacatgaatttctgggcgctccctgagtcagagtctcagaagacctgtgcaggctggcgtgagaggagcggcagccacactgcggccccacgcccaaggactgggctgctctcgaggggggcgcgcccaccgctgtgtcctctctgcccagcctggcttaccaagggctacctcagtgggagatgaggttggaggaacgaaggcgaggttcctccttgctttggggagaaaagtattcaggaagtgggtgtgtgggaaacctgaagatggcgtgcacaggacacagcgtgggcggcctgggcagaagggcggctggctgtcctggagctgctgctggagcctgccctcagagtgtccctttccagtgctgtggcattctgtggcagcttccccaggtgtggtgacggggggggggcggggcctccacctgtgacagccaggcttgagggtggacggcgtgcctctcccaggagccttccccatgtccttgccttgctgagaattgccctcccatgccgctgaggtgttaggtggtttagggccaaaaggggaaaaccacttgagtcttgtggtgtgtggtgggcagacaccacagggtggcatcacctggtggcatttccagaacctcagccccgattccagcacccaccaccgcctgaccctgtgtaacctgctgtcccgggtcccagagtgcactctgccccgctgctctgctgcctgtcctgggaaagtatctttgccccactaggaaatgtaaacaggagggcttggggagcgtgggcacttttctcatgagcagctactgcggcgttggcaggactcgctgctgctgctgctgcttgtgtaggtcggggagccagagatccccgaggacgcgcgccggacagtcggcactgaccggcccacctggtagcagaggacacccccagccccccaagcattgaagacatagtgtatttcctcgtatcctttctcccttgggtgtagttggggtggggaagcagggaaggctggtgcgatctccattccttgggctccacgtccgagttcatggtgcgccgctgtgctgggagctgcagtggtaatgtgtgggacaccttgaccaaaggggagctttgtctcgtgtgttttgaaaaaggcttaatgaagagaatgttgttcattcttagtagtatagtttgcaattcttaatggcaaataataagtttcagtagaaaacaaaaaaaaaaaaaaaaa

SEQ ID NO: 475 - DNA, 2912 bp, Homo sapiens
gcgccggcacacctattggcccccgcggcgtcccgtcgccgcgtcgcgttgctggcccgtcggagcgacgccgctcgggtcagtcggcggccggactgggaagatggacgcagctactctgacctacgacactctccggtttgctgagtttgaagattttcctgagacctcagagcccgtttggatactgggtagaaaatacagcattttcacagaaaaggacgagatcttgtctgatgtggcatctagactttggtttacatacaggaaaaactttccagccattggggggacaggccccacctcggacacaggctggggctgcatgctgcggtgtggacagatgatctttgcccaagccctggtgtgccggcacctaggccgagattggaggtggacacaaaggaagaggcagccagacagctacttcagcgtcctcaacgcattcatcgacaggaaggacagttactactccattcaccagatagcgcaaatgggagttggcgaaggcaagtccataggccagtggtacgggcccaacactgtcgcccaggtcctgaagaagcttgctgtcttcgatacgtggagctccttggcggtccacattgcaatggacaacactgttgtgatggaggaaatcagaaggttgtgcaggaccagcgttccctgtgcaggcgccactgcgtttcctgcagattccgaccggcactgcaacggattccctgccggagctgaggtcaccaacaggccgtcgccatggagacccctggtacttctcattcccctgcgcctggggctcacggacatcaacgaggcctacgtggagacgctgaagcactgcttcatgatgccccagtccctgggcgtcatcggagggaagcccaacagcgcccactacttcatcggctacgttggtgaggagctcatctacctggacccccacaccacgcagccagccgtggagcccactgatggctgcttcatcccggacgagagcttccactgccagcacccgccgtgccgcatgagcatcgcggagcttgacccgtccatcgctgtggggtttttctgtaagactgaagatgacttcaatgattggtgccagcaagtcaaaaagctgtctctgcttggaggtgccctgcccatgtttgagctggtggagctgcagccttcacatctggcctgccccgacgtcctgaacctgtccctaggtgagagctgccaagtccagattcttctgatgtagagcgactggaaagattcttcgactcagaagatgaagactttgaaatcctgtccctttgaaaatcctggggtcgggggtggcacctgtgagagcctggggctcctggtgccgctgcgtttcatccatcccgcccgctcgcctgccgagggctgcgccccgtgctgcctccccccagagggccacccgctgtgctcgtggactgaggctgcgctgcccgggaggccttactgcttggtgtcagactgcccagctcagagtgcccgtcagggcctgtgcatccgcacgcggagccgtctgttaggagcttccagagtgttctctcgacactgccagccccgtgttagcacctgggcctcagtcccacttgctcccaggcgccggttctgtggttggtttggaattaaagtcctgtttgaagttgtcagacacagacatgaatttctgggcgctccctgagtcagagtctcagaagacctgtgcaggctggcgtgagaggagcggcagccacactgcggccccacgcccaaggactgggctgctctcgaggggggcgcgcccaccgctgtgtcctctctgcccagcctggcttaccaagggctacctcagtgggagatgaggttggaggaacgaaggcgaggttcctccttgctttggggagaaaagtattcaggaagtgggtgtgtgggaaacctgaagatggcgtgcacaggacacagcgtgggcggcctgggcagaagggcggctggctgtcctggagctgctgctggagcctgccctcagagtgtccctttccagtgctgtggcattctgtggcagcttccccaggtgtggtgacggggggggggcggggcctccacctgtgacagccaggcttgagggtggacggcgtgcctctcccaggagccttccccatgtccttgccttgctgagaattgccctcccatgccgctgaggtgttaggtggtttagggccaaaaggggaaaaccacttgagtcttgtggtgtgtggtgggcagacaccacagggtggcatcacctggtggcatttccagaacctcagccccgattccagcacccaccaccgcctgaccctgtgtaacctgctgtcccgggtcccagagtgcactctgccccgctgctctgctgcctgtcctgggaaagtatctttgccccactaggaaatgtaaacaggagggcttggggagcgtgggcacttttctcatgagcagctactgcggcgttggcaggactcgctgctgctgctgctgcttgtgtaggtcggggagccagagatccccgaggacgcgcgccggacagtcggcactgaccggcccacctggtagcagaggacacccccagccccccaagcattgaagacatagtgtatttcctcgtatcctttctcccttgggtgtagttggggtggggaagcagggaaggctggtgcgatctccattccttgggctccacgtccgagttcatggtgcgccgctgtgctgggagctgcagtggtaatgtgtgggacaccttgaccaaaggggagctttgtctcgtgtgttttgaaaaaggcttaatgaagagaatgttgttcattcttagtagtatagtttgcaattcttaatggcaaataataagtttcagtagaaaacaaaaaaaaaaaaaaaaa

SEQ ID NO: 476 - DNA, 2988 bp, Homo sapiens
gccatggccggcctgtcggacctggaactgcggcgggagctgcaggccctgggcttccagccaggacccatcaccgacaccacccgggatgtctaccgcaacaagctgcgccgcctgcggggcgaggcccggctgcgcgacgaggagcggctgcgggaggaggcccggccgcggggcgaggagcggttacgggaagaggcccggttacgcgaggatgcgccgctgcgcgcccggcccgccgcggcctctccgcgggcggagccctggctctcccagccggcctcgggctcggcctacgcgacccctggggcctacggtgatatccggccctccgcggcttcctgggtagggagccgcggcctcgcctatcctgcccgcccggcgcaactcaggcgccgcgcctcggtccggggcagctccgaggaggacgaggacgcccggacgcccgacagggccacgcagggcccgggtctcgcggcccgccgctggtgggcagcgtctcccgccccggcgcggctgccttcctccctcctcggtcccgacccgcgcccgggcctgcgggcgactcgagcgggccctgctggcgcggcgagggcccggcctgaggtggggcgccggctggagcgctggctctctcggcttctgctctgggccagcctagggctactgctcgtcttcctgggcatcctttgggtgaagatgggcaagccctcagcgccgcaggaggcggaggacaacatgaagttattgccagtggactgtgagagaaaaacagatgagttctgtcaggccaagcagaaggcagccttgctggagctgctgcatgaactctacaatttcctggccatccaagctggtaattttgagtgtggaaatccagagaatctaaaaagcaaatgcattcctgttatggaagcccaagaatatatagccaatgtgaccagcagctcctccgccaagtttgaagccgcactgacctggatactgagcagtaacaaggacgtgggcatctggttgaaaggagaagaccagtctgaattggtgacgactgtggacaaggtggtctgcctggaatctgcccacccccgcatgggtgttggctgccgcctgagccgagccttgctcactgctgtcaccaacgtgctcatcttcttctggtgcttggcttttttgtgggggctcctaattctcctaaaatatcggtggcgaaagttagaagaggaggaacaagccatgtatgagatggtgaagaagattatagacgtggtccaggaccattacgtggactgggagcaggacatggagcgctatccatatgtaggcatcctgcacgtgcgcgacagcttgatccctccacagagccggaggcgcatgaagcgtgtctgggaccgagctgtggagttcctggcctccaacgaatcccggatccagacggagtcccaccgcgttgcaggagaggacatgctggtgtggagatggactaagccctcttccttctctgactcagagcgataagccccgggcggggacttgttcctggtcagcctgtcccaggacagcccactccagaggcacaggagggtcaccaggcctgcggtgctgaattcacacttgccttgactttcagtctcgtcctgacacgattccaaaggtctgccatactcttcagaggagttcggctcgcaggaaaatgtgggcttcctttaaagggagggggagaagccagggtgatagcccagactctgccctgttgtgctggcagaaacggggagaagggttgagttttcatgaatagaaaacaagagcagcagctgtcaggcccagctgacaagcgtggggctggtgggctggggcatggccacgccagggagtctgtcacctgggaggtggggcaaggatggtgtttcgggtggcgggatggggagcagcttggtccatgtgccttcagggggttgttacctgagagctccagggtgaagggagaaagcctgtgctctggctggctgggcctctatcctgaagagggaaggtgctagaaattagaacaagtgactgtaggggggaccgtctagaaacaccaggcccagacacacggtccctcaggtcaggaggagtgagcagccggcacagcctcctgggaggatcccgaagtagggactggggctgagagcagagaggagggtcgggcgggcccgcctcagtgttgcttctcacagaagctgcgactctagaccaggcctgcagccagaacgccgattccgggagcttgggagccctgcgtcagggcccagagcctcgcacttgctgtgtgcgaagatcgccttgctttactgtgaccacagccccgacgcggggctgtttaacaagaacttcagcgcagccggcgtttctgttaccccggccgcggctcttggcggcgggagaggcgcagtggctgcaggctgccccctgccggccacaagggagcagcgtccgcgccgccgcccaccggccctcccgccagctcctcagcctgctccctgggaggcaggctccagaagcaccccgacggggggccttattaagtgcgagaagcctctccagcgagtcttccccgtgtgtcctcatctgcggcaggcaggagagggggagcaaacaggaaattccacagctgcctccagaaacattaaccacccctctctagtcttactggtattttttgtttccttaataaagctccagtctccctcatttgagcaatactctcatttcctctgatgtctggatgatcggcagggcaggaatctgagcgctggccccgtggtgaggccatgttctcataatcaggctccagccagaaaaataagaaacaccgcaacaggcttcagtatcagggctgaaactgctggatgaataaactatttattaaaaacggaaaaaaaaaaaaaaaaaaaaaaaaaaaaaaaaaaaaaaaaaaaaaaaaaaaaaaaaaaaaaaaaaaaaaaaaaa

SEQ ID NO: 477 - DNA, 3000 bp, Homo sapiens
caggccacaccggtggtctgggctggggaccgcgggtcgggtccggtttccagggggttcctggtgctcgaggctggcggcgaggaaggaccagatggcctttgaggatgtggctgtgtacttctcccaggaggagtgggggctcctggacacagcccagagggccctgtaccgccgcgtgatgctagacaacttcgcacttgtggcctcgctgggactctccacctctcgacctcgtgtggtcatccaactggagcgtggcgaggagccctgggttcccagtggaacggacacaaccctgtccaggaccacctacaggaggcgcaaccctggttcctggagtttgacagaggatagagatgtttctggagaatggccacgagctttcccagataccccacctgggatgactactagcgtcttccctgttgccggtgcctgccacagtgtaaaaagcctgcagagacaacggggtgcctccccatctcgggagagaaaacccacgggggtgtcggtgatctactgggagaggctcctgctaggctcaggcagtgggcaagccagcgtcagcctgcgactgacctccccgcttaggcctcccgagggcgtccggcttagggaaaagacactcacagagcatgcgttgctggggaggcagcccaggacgcctgagcggcagaaaccatgtgcacaggaggtccctgggagaacctttgggagcgcccaggacctggaggctgccggcggtcggggacatcaccgaatgggtgcagtttggcaggagcctcatagactcctcggtggccaggagccctcgacctgggacgagctgggcgaggctcttcacgctggggagaagtccttcgaatgcagggcgtgcagcaaagtgttcgtgaagagctccgacctcctcaagcacctacgcacccacaccggggagcggccctacgagtgcgcccagtgcggcaaggccttcagccagacgtcgcacttgacgcagcaccagcgcatccacagcggcgagacgccctacgcgtgccccgtgtgcggcaaggccttccggcatagctcctcgctggtgcggcaccagcgcatccacacggccgagaagtccttccgctgctccgagtgcggcaaggccttcagccacggctccaacctcagccagcaccgcaagatccacgcgggtgggcgtccttatgcttgcgcacagtgtggccgccgcttctgccgcaactcgcacctgatccagcacgagcgtacgcacacaggcgagaagcccttcgtgtgcgcgctctgcggtgctgccttcagccagggctcctcgctctttaagcaccagcgcgtgcacacaggcgagaagcccttcgcctgcccacagtgcggccgcgcctttagccacagctccaacctcacccagcaccagctcctgcacacgggcgagcggcccttccgctgcgtggactgtggcaaggccttcgccaagggcgccgtgctgctcagccaccggcgcattcacacgggcgagaagcccttcgtgtgtacgcagtgtggccgcgccttccgtgagcgcccggccctcttccaccaccagaggatccataccggcgagaagaccgtccggcgatccagggccagcctgcacccccaggccaggtctgttgccggggcatcatcagaaggtgcgccagcgaaggaaaccgagcccactcccgcctcgggcccagccgccgtctcgcagccagcggaggtctgaggtcacaggttgcagccctggccttctgtgaatcccttccacagctaaagggcatatgtcctctgcagatccacagcagagaaaaagtcccgtgcttgctagtcagggacaagggaggccctttggctgtgatttcatttgcacgtggggacaggatttgccagttcacccacagatcacacctccatccccaaagaggtagcactgcagcaacatcagggggaggacgtggtggctgaactctagtggggccgagactattcagagccagtaggaggccgacagtcacagcactgcactgtggtgcggcttcatgtgatatgacagtggatgctaaggtgagagggatgcaggcatgggttgggggtggcccagagaaacttatgacagctgtacacaaactggccgctggagagatgcccgctgagggtattctcccctcaacccactgcctctgttcatccaagacttcctaggggccagcctagcagacaagagaccacaagggactggggatcagggtctgggctctgtcagccgccacctctgggaaagagaaaaggtttgggtccactgaacatcatgtttgtagacgctgacaggtggggtcctaatgagagccaacacatgctcactgccagctcctgtcctgagtactgggaagtttctcctgaagccctgtgagatggctctgtggctggtatcccgacttggaagatgaggaaactgaggcacacggcctggcctggcttcacacacatagccgactcaggagagggatgcccatgggggaacatgtgactctcagcattggaaggacagagctaggatgatggctttccggtggcactcgttcaggtttttgcccaagtctcagcttggccaaggcctgtcactgactggtttaccaaagtcgatgtgaggaggaggctttatacctgaggggatgatgttaacttcagacaagatggagctgctcacttttgccgggtttggtggccacttcacccccaaccctgtctcacccccattatccctcctcaattggaggctggacagagctgaataggaaagacttgctattgcctaaggctatgtgtgacaccctcctgaggacctccccaccccagtgtaatggcccttcatggcagggacagaaaggtggactgggggccatttgcttcctgtggccttcagcagaccaggccctgtccctacctggagcctcacctccaaggaaattc

SEQ ID NO: 478 - DNA, 1844 bp, Homo sapiens
gctcgcctctgggcccgccttcggggcccggatctcaaacagtcgggaagaagcaccgtggctgctattatctgctctccgcgcctgacccctcccaggactcgtgatgccaaggccgctgcgagcggctacgaagagtcggggttgagccccagctgagccgagggctcgcactcttctggtctcccaggcccaacccacctgaagaaatgagtggtggattggctccaagtaagagcacagtgtatgtatccaacttgcctttttccctgacaaacaatgacttgtaccggatattttccaagtatggcaaagttgtaaaggttaccatcatgaaagataaagataccaggaagagtaaaggggttgcatttattttatttttggataaagactctgcacaaaactgtaccagggcaataaacaacaaacagttatttggtagagtgataaaagcaagcattgctattgacaatggaagagcagctgagttcatccgaaggcgaaactactttgataaatctaagtgttatgaatgtggggaaagtggacacttaagttatgcctgtccgaaaaatatgctcggagaacgtgagcctccaaagaagaaagaaaaaaagaaaaaaaagaaagctcctgaaccagaagaagaaattgaggaagtagaagaaagtgaagatgaaggggaggatcctgctcttgacagcctcagtcaggccatagcattccagcaagccaaaattgaagaagaacaaaaaaaatggaaacccagttcaggagtcccctcaacatcagatgattcaagacgcccaaggataaagaaaagcacatatttcagtgatgaggaagaacttagtgattaaaatcttgccccagcacagtaataaaaatcaagatttgttagtaacaatcttgaagagctaattttaataaaaataagaaaaattaatactatcatgttaatactattattgtcatcccaagaaaaaagatattttaaaaatttatttgaaaagttcattataagggctttattcatgcctgatttgtttacatgaggacttctgaaattaatccttaaaacaaacttcctgaagaccgaaaagttgaatgatttattgttacttatattaataaacttttcaagagaattttgtctttaaatatgggtgttttgtcatcatatttcttgtagctttatcccaatctggataaattgtaaatacctataaaataaattataaatacctataaaatataaagtaacatagctctaaaaggcttaaaatcaaacacaggtgttatttgtctgccctacccatagcaccaaattccattccctagaagaaactacttacatgtgcacacatgtagctaaataaagtacatatatttcagtcacttaataaaagaataaaggagaattattcaatctcttatacttctcctaccttcctcaatattcccaatgtggctgtattaaaaatttgggggaatccatatatatcttttttaataaccaagtaaatacttttcatttctgagccaaggaatatgctatgattacgttttttcctagagttaataattgtctattttttttccatgtattgtctttgtatttatgactaaatcttcccattctgtctgcaggtgggtatatggtaatgggattagagagcctttaattttctgctttgtatatttctatattgtttaactttgtaagaatgcccattacttttttaactagtaaaagcaatagaaataagttaatactatcatagtaatattattattgtcatcccaagaaaaaatatattaaaaagatatttgaaatttca

SEQ ID NO: 479 - DNA, 1329 bp, Homo sapiens
gggaagcaccgcccacagctgcccgggactccagtgatcgccgcggctcgctcgcgccccggaaactgccccttctcgggggtcatgatgggcagcaagatggcgtctgctagtagggtcgttcaggtagtcaaaccacacactccattaataaggtttcctgacagaagagacaatcctaaacccaatgtatcagaagctttgagatcagcagggctaccatctcactcttctgtaatttcacaacattctaaaggaagtaaatcaccagatttgctgatgtatcagggtccaccagacactgcagaaataataaaaacattacctcagaaatacagaaggaaacttgtgtctcaagaagaaatggaatttatccaacgtggaggtcctgaataaccatggtggctgctgtttgtcatcagacaatagaattgtctttacaataaaggacttccaaaatgacagatgagaaactgtatattaaacacctttaataaatattatgaaaaaaatgaaatatagaaaatttagatggacacttgtatttcctaatttatgtatcttggtcagcttctccacaagcttacctaattgtttatatactttatacttattaaagtatacatttttaaatgttagcctattaatttactcttgattatcaaacattaccagtgttgaactattaaaagcacacaatgtgtagtaaactatcataggattcccataatttcactttactttctgtttaggcatggaaaaatttatcagtcagaattgctgttttagggacatgattttcctgaaattgggtgaggatcagtgaaataattactctattacttgttcttaattctctgttctctaatgttttttcattcacaagtttactggagtataactggcttagtaagtatatcctactctgaatgataaaaatatagtcaagctaaaataggtgactatactattaagatagagatcatacaaaagattccaaagaaagtcaaaaagtgtaaaatggaaaataagagatcaaaatgaatatagcataggaataaagatttcactagaaattgcaatttattatgttttggaggttgtaaggaagtcttgttttttggtttattttactgttttgtgatcttgtatgcaaatcctgataaccattaaccttctcaaacttaatgtctgagagcctcataaaatcaacatatttacttattaagcagtttatgaaactttaatggggcccctcctgtgccaagggtacgtatattgtgaagtaaagcctcacaaagctaaataaattctcttccatacctttaa

SEQ ID NO: 480 - DNA, 3105 bp, Homo sapiens
cgcggcggcagcagcagcagcagcagcgagaggcagaggcggcggcggcggggaggacagcacggccgaggctgcccagcggcgcctcctccacaccccccgccgcagcagcaccggcgacagattttttaaaaaatggatttggccaaccatggacttattctactgcaacagttaaacgctcagcgagagtttggtttcctgtgtgactgcacggttgcaatcggcgatgtatacttcaaggcacacaaatcagttcttgcttcattctccaattactttaagatgttgtttgtccatcagaccagtgagtgtgtccgcttgaaaccaactgacatacagcccgacatcttcagctatctcttacacttgatgtacactgggaagatggcgcctcagctcatcgacccggttcgattagaacagggcatcaagtttctgcacgcctacccgctcattcaggaagccagcctcgccagccagggagccttttctcaccctgaccaagttttcccactggcttcttcattgtatggcattcagattgcagatcatcagttgagacaagccaccaagattgcttcagcacctgaaaaactcgggcgagatccacggccacagacctccaggataagccaggagcaggtccctgaggcctcacagctctcccagctgacttcaaatctggcccaggtgaatcggacaaatatgactccctcagaccccctgcagacctcgctgtctccagaacttgtttccactcctgttcctccccctcctcccggggaggagaccaatctggaagcatcttcctccgatgagcagcctgcgtccctcacaatagcccacgtcaagccaagcatcatgaagaggaatgggagctttccaaagtactatgcctgccacctgtgtggacggcgcttcactctccggagcagcttacgtgaacacctccagatccacacaggagtacctttcacatctagccaacagggagaaagtcgcgtccccctgactctctgtagcaatgcagctgacctcgggaaagatgccatggaagtgcctgaagccgggatgataagtgacagtgagctgcagcacatctctgattctcccatcatcgatgggcagcagcagtcggaaaccccacccccctcagacattgctgacattgacaacctggagcaggccgaccaggagagggaggtgaagaggcggaagtacgagtgcacaatatgtggacgcaaatttatccagaaaagccactggagggaacacatgtacatacacaccgggaagcctttcaagtgcagcacttgtgacaaaagcttttgcagggccaaccaggctgcccgccacgtgtgcctcaaccagagcatcgacacttacaccatggtggacaaacagactctggaactctgcacatttgaggaagggagtcagatggacaacatgctggtgcaaacaaacaaaccctacaaatgcaacttgtgtgacaaaacattctccactcccaatgaggttgttaaacattcatgccaaaaccagaactcggatgtttttgccctagacgaagggcgatccattctcctgggcagtggggactcggaagtaacggagcctgaccacccagtgttagcttccatcaaaaaggaacaagaaaccgtcttactagactgaatgtcacttatctttttaaaaaactctcatttttacaaagactatcttccctcccttccctgaattcagaactgtagttctccatggcatgatacaaacaggtccttgttctcttctcctcttccccttttccacatcccagccccacctctgtaaaggctttgtgcattataaacctggaatgtatcgactttctttcaggggatattggaaagataatggtcattatacttataaactcaaattttgagaggttttagattattcagaagcatacttggaactaatgaagggtatataataaaacaactggaatccaatttggtaagctaaaattatgactttccctgggtaaaaagtcttctcagaaaaacaatgtcagaaaataacagcgtgctgcttagaaatacggctgggctctgtactatgcaaaatctagaaagtgtggggaaactttaaacccaagaaaacgttcttagtattcatcctccaggtgtcttacttcagaatgcatcctttgagattatgtccacttaagagaaatcatcagttaagaaatctactttaacaaaacaaaaaggagaaaaagtaataatgtgatggcaatcttaatttttgggtacaacatgacaagctgtgagtttgtgtgtttgtaagagaaaaatgtgtgggtacttgctaataaacaggtgaattaatgcacatccttatctcattgctggcttctttccaagttgagcaacaacaaaatgctgtatttgagtttctgacaaatttgttttaaaaatcaaatttgaatgtactattctataaattgcctttctgaatagaacatgacatgccattttctagcagctgccagtgataatttgttttacactaacttttaaatcagtgtgtgtactgcagggaaaaggatataggaatactcatcttacaggggaatttgtgaccagaagatgtagtaacttcaatgactgaaagtcaatgctgatagtttactggcaacattaattgaagcatcaaaaataaatggcaaagagaaatcaggacaaaaaatctaattgctgtttgggaaaaaacttgattttgatgtttattctccaggtttttggttgtttttttttctttcttctttcttaatgcctgaaattttctccattggcccgaaagcagtaaaaattgttcattaatcttccgttaggccaataaaagaagggcctcacaagacaaaacaggagccagaagtaaggactgaaggagaaggggagaatagctaatagctatagtatatgtatatgttaaaaactgaatatcccatcatcctatttcatgtatagttgagttctcaaatttgtaagtttttatacatcctttcattgaataaacgtttaattaaatgagtaaaaaaaaaaaaaaaaaaaa

SEQ ID NO: 481 - DNA, 1584 bp, Homo sapiens
gttggttggagcgtcgcgcagtcgggaggtccgggaaagtttctttggaggtccggcccggagcggccatgtcccacggccccaagcagcccggcgcggccgccgcgccggcgggcggcaaggctccgggccagcatgggggcttcgtggtgactgtcaagcaagagcgcggcgagggtccacgcgcgggcgagaaggggtcccacgaggaggagccggtgaagaaacgcggctggcccaagggcaagaagcggaagaagattctgccgaatgggcccaaggcaccggtcacgggctacgtgcgcttcctgaacgagcggcgcgagcagatccgcacgcgccacccggatctgccctttcccgagatcaccaagatgctgggcgccgagtggagcaagctgcagccaacggaaaagcagcggtacctggatgaggccgagagagagaagcagcagtacatgaaggagctgcgggcgtaccagcagtctgaagcctataagatgtgcacggagaagatccaggagaagaagatcaagaaagaagactcgagctctgggctcatgaacactctcctgaatggacacaagggtggggactgcgatggcttctccaccttcgatgttcccatcttcactgaagagttcttggaccaaaacaaagcgcgtgaggcggagcttcggcgcttgcggaagatgaatgtggccttcgaggagcagaacgcggtactgcagaggcacacgcagagcatgagcagcgcgcgcgagcgtctggagcaggagctggcgctggaggagcggaggacgctggcgctgcagcagcagctccaggccgtgcgccaggcgctcaccgccagcttcgcctcactgccggtgccgggcacgggcgaaacgcccacgctgggcactctggacttctacatggcccggcttcacggagccatcgagcgcgaccccgcccagcacgagaagctcatcgtccgcatcaaggaaatcctggcccaggtcgccagcgagcacctgtgaggagtgggcgggcccacgatgcagaggagaagctgtgggcgcggccctgccacaccccaccccgtggacgagaggctgggggtccaccctttggggcctggtcccatcctgcaccttgggggctccagcccccctaaaattaaatttctgcagcatccctttagctttcaatctccccagccccctgaacccggaaaaagcactcgctgcgcgatacacccagaagaacctcacagccgagggtgcccctcctcggaggacagccacgcgctacactggctctccgggccacccccaggacacagggcagacgaaacccacccccagcacacggcaggaccccccaaattactcactacggggggctgtgccataggccacacaggaagctgccttgtggggacttacctggggtgtcccccgcatgcctgtaccccagatgggtgggggccggctttgcccatcctgctctcctccagccgagggaccctggtgggggtggctccttctcactgctggatccggactttttaaataaaaacaagtaaaatttgtgttttaa

SEQ ID NO: 482 - DNA, 1317 bp, Homo sapiens
agctcccgcgcgctagagccgcctgctggtctcacccagccgggaccgctgacctggcgctttgtgcggctccaggcctccgagtggactccagaaagcctgaaaagctatcatggcagcaaggcccaagctccactatcccaacggaagaggccggatggagtccgtgagatgggttttagctgccgccggagtcgagtttgatgaagaatttctggaaacaaaagaacagttgtacaagttgcaggatggtaaccacctgctgttccaacaagtgcccatggttgaaattgacgggatgaagttggtacagacccgaagcattctccactacatagcagacaagcacaatctctttggcaagaacctcaaggagagaaccctgattgacatgtacgtggaggggacactggatctgctggaactgcttatcatgcatcctttcttaaaaccagatgatcagcaaaaggaagtggttaacatggcccagaaggctataattagatactttcctgtgtttgaaaagattttaaggggtcacggacaaagctttcttgttggtaatcagctgagccttgcagatgtgattttactccaaaccattttagctctagaagagaaaattcctaatatcctgtctgcatttcctttcctccaggaatacacagtgaaactaagtaatatccctacaattaagagattccttgaacctggcagcaagaagaagcctccccctgatgaaatttatgtgagaaccgtctacaacatctttaggccataaaacaacacatccatgtgtgagtgacagtgtgttcctagagatggtattgtctacagtcatgtcttaatggatcccagctctgtcatggtgctatctatgtattaagttgggtcctaagttgggtcttttgtgtcaacgagatcatctcttctagaaatatcaaccttttttgtccagtaaataattgttaggggatctttattggaaaacttttttggagaggctggtatttaagttagatctgattgggctactcatgtcctgtagccagttcatcctcataataagaatgggcaggatctcttgttctctcctgagtgtctttctactctcctgagcgtctttctgctctccttatcctgttctcttatccttatcccctccagtctctgcctaatttttagtgtttaataacaaccgaatgtctagtaaatgactctcctctgagctgtaataaataaaatggtagtaatgaatgcaatcagtattagccaaaataaagaatttatgagtcattaaaaaaaaaaaaaaaaaaa

SEQ ID NO: 483 - DNA, 5297 bp, Homo sapiens
gtctgcctccgggttgcacgaagagtccgagtcatttctcagaaggttttgataggtgggccttagaggagacgccgccgagcaccgcaagaactggaaaacacacccctctctgtctgcctgggagagccacggaaattggcacttctctgagtgaagctgaggagaaggctgtaaatctgccaaaacagccttgaagtattcttttgtcatgaggaagtgacggctgctggagggaggtgaacaccacaaggagagatggcatctggcctgggccccgcctagcagcagctccacctcctaggccaggccctgtgggatgcgccactagaccaccatggacggatcccacagcgcagccctgaagctgcagcagctgcctcccacaagtagctccagcgccgtaagcgaggcctccttctcctacaaggaaaacctgattggcgccctcttggcgatcttcgggcacctcgtggtcagcattgcacttaacctccagaagtactgccacatccgcctggcaggctccaaggatccccgggcctatttcaagaccaagacatggtggctgggcctgttcctgatgcttctgggcgagctgggtgtgttcgcctcctacgccttcgcgccgctgtcactcatcgtgcccctcagcgcagtttctgtgatagctagtgccatcataggaatcatattcatcaaggaaaagtggaaaccgaaagactttctgaggcgctacgtcttgtcctttgttggctgcggtttggctgtcgtgggtacctacctgctggtgacattcgcacccaacagtcacgagaagatgacaggcgagaatgtcaccaggcacctcgtgagctggcctttccttttgtacatgctggtggagatcattctgttctgcttgctgctctacttctacaaggagaagaacgccaacaacattgtcgtgattcttctcttggtggcgttacttggctccatgacagtggtgacagtcaaggccgtggctgggatgcttgtcttgtccattcaagggaacctgcagcttgactaccccatcttctacgtgatgttcgtgtgcatggtggcaaccgccgtctatcaggctgcgtttttgagtcaagcctcacagatgtacgactcctctttgattgccagtgtgggctacattctgtccacaaccattgctatcacagcaggtgcaatattttacctggacttcatcggggaggacgtgctgcacatctgcatgtttgcactggggtgcctcattgcattcttgggcgtcttcttaatcacgcgtaacaggaagaagcccattccatttgagccctatatttccatggatgccatgccaggtatgcagaacatgcacgataaagggatgactgtccagcctgaacttaaagcttctttttcctatggggctctggaaaacaatgacaacatttctgagatctacgctcctgccaccctgccagtcatgcaagaagagcacggctccagaagtgcctctggggtcccctaccgagtcctagagcacaccaagaaggaatgagactcgcctccctctatttataactgtcccctccaggctgacagtggttcaaccctgaatcctaaaacttgcctttcaagtctcattttgtttctaactgagaactctatggatgatgatctcaaaaagcctttgtctctgggaaaggatgcgttatcttggtcttggaaatttcaaatgatgagggttgggggatggaagcattattccaggtggacgggatagaatccagcctctgcctggattagcccagggggatttggaaagcctttctaccatccttgaggatggtaactgagcttcctctgacagtgaccaaaggatgctgtatccttcagagctaaggcaagacagagagtctgctgttaattctcaaatccagcgaaaggctagacatctctaaatctcgtcttcctccacctcatgtgcatgcctgatctcaccctgacactcctgatgccgcatctgtgatagcactcgtgttgccttcacatggcaggctgggccaaccctgggtggaaggttctgacatttgtgttttcagaaatgtacatctgccttccagtcatctgtgcccttctagggaagatgtgcttgatatgttcaaattggatctactctgaaaacgaaacttggttttggtcctgtgaggactacttgtttgtccacctcctccaccaaaggaattaggaagttaagagaaggggaagaatatggaggataggagagggtgatgatgctttagcccattaaggaagaaaagttccccttactcttacaaaaggtgattgcaccacttaaaaaaggataggtagaaaatctggccattttatgtgttatttttttcctgcataccagtgccccctggaaagatggggatgctcatttcagagacagcctcttcacctgtcctccgtctctccattacagagccacaagccaagcttgagttactggttaatttccttgaagtcaatagagactctctgggtcctcatccccatgcatatatgtctgggagaagcaagcattctccaaaacagggctgttgctttcttcctggccgcatatgtgactgtcttcccctagactgatggtatacttttgagaggggcggataaaggtttgcaaactttaatgggcataaggatcccctagaagcatatgtaaaatgcagattcctgcaccccaactgcagacactgttaagtgggactggagtggggcccacgggtctgcattcttaactggtaccaccagtgattctgatgcgatgcttcaatcccgagatttcacatctggaaagcctaagaatttacaaagatgttctgctaaaacccccagggccccatgcagtcttgctagaaaatttcctccctagggttcctttggaaggttaaatactccccataggatctgtggcatttctccatccaatgaatactacttagagctacactcaccacttccctagacagcctttaataggcatgataacagtgttaatagaccagtgtgatagatcacttatctttatggattgtgcttaatactgatttagtatcttgactccaaaaactgacatctgttgtctgtgataaccacttctgtattgcgtcttaaccacttctgtattgtgtggtcttaactgcctaaggcggcaatgggcagtgggcccctttcccttaggatgggtatcaattcaacaatatttataaggcatttactgtgtgctaagcatttggaagacccaggctacaaaataagacatagttcctgccctccaggccagcagagggaggcacaaatacccaggaatctctgatgggtgtgaagtgcggtcgtgggccacagaaaatgaccgtcatggagaccctgctaaaggtcggaccctgagcccaaaggggtattcagaagtggagatgattttggccccactcatagatgggtggcaaatctaagatttgtataaagcatataaaatagggtgatcacccccgaggcagaggggccagcatttgcaaaggcacagagctaagaggagctgggcaaagaaaggaaacccagggaaggtggtgggagatgagtctcaaagctaagtagtggaagctgggcacagtggctcatgcctgcaatcccagcactttgggaggccaaggctggaggatcacttgagcccaggagttttatatcagcctgggcaacatagcaagacctcatctctgctaaaaattaaaaataaataaattagctgggtgtggtggtgcatgcctgtgatcctagctactcaggaggctgaggtgggaggatcgctagagcccagagaaccaaggctacagtgagccatgatcatgctactgcactccagcctgggtgacaatgagaccatggctcaaaaaaaaaaaaaaaaaaaagataagcagtggaggccgaatcatggagggtcttgaatacctggctaaggagtttaaagtgtatccaagaggacgtgggagccactgatggttcatgaggaagagaagggcaggaccagcactgattgaaaaggagggcttgttcagtgtggaggaagaatcagaagggggaataagttaccttctccgagcctgcaagaacaaaaaacaaaaagcagaaattaaaatcaggtttcactgctatttatatatttctcctttcccaaatgatttttctaaagctgggagtggaggcaggagggagaaacagaaggtgagcagggaggctatttagatgtgtcaaacccgggtgatcattaataatttgggcatatatatgctcccaaacttactctgcccccttccttccctttttttttttttttttttggtatgggccttttaggcttgggccagccagctttcttgagatgagtgaataaaagcgtattgtaatttcatgtctgcttcagatcatggggacagtgccacccaggaactgctgctgaggcctgggaagctcccttgccttcgggtttggagcagtggcatcatcccaccaacctgagtcatgaaagggctgagcagaaagttaaatggtagtttcctgactggaagccacacgtaggtcacttgagtagtcaggaagcacagtgggtgtggagccatcatctgtcttgggctggttcctcccaatctttgtccagtggtataaatggactgtctgctgatggccatacgcagcactggctgttaagatggggaaggggtacatcaggattccactcatagccctggttcgttattgttactcatggctctgacgtccccaagccctcttgaatgttgcaagcaatgttaaatatcacacctcggtctccttttgagcagcccaggtacctaaagcaaggtcaccaaacttgggtttaaacttcagttgccatcacagcagggttcaggttatgcagtttttgcagtgtggagttgaacgctgggtaaagaagggagagctgactctccattgcttttctagtggaaaccagccagtttgacggcacggtgcggatacaggactccatcaggctagtgttggggaaccagcccggcagccttccatgtgaattccaaagctgtttcaacactggctgataggcagacaaaaggttacttgtgtgtttctctgagaagcggtgtaaaggaagtcaccttagaatatattctgtgcggatgcttatattttgttaacttcacgacttatggcatgtcttatttaaaaaaaaaaaaaaa

SEQ ID NO: 484 - DNA, 2185 bp, Homo sapiens
aatgactcagtaagttcagcgcgcccgctccggccggccctgcgcctcccgccgcgcccgggatgtattcgtccccgctctgcctcacccaggatgagttccacccgttcatcgaggccctgctgcctcacgtccgcgccttcgcctacacctggttcaacctgcaggcgcggaagcgcaagtacttcaagaagcacgagaagcggatgtcgaaggacgaggagcgtgcggtcaaggacgagctgctgggcgagaagcccgaggtcaagcagaagtgggcgtcgcggctgctggccaagctgcgcaaggacatccggcccgagtgccgcgaggacttcgtgctgagcatcaccggcaagaaggcgccgggctgcgtgctctccaaccccgaccagaagggcaagatgcggcgcatcgactgtctccggcaggcggacaaggtgtggcggctggacctggtcatggtcatcctgttcaagggcatcccgctggagagcaccgacggcgagcgcctggtcaaggctgcgcagtgcggtcacccggtcctgtgcgtgcagccgcaccacattggcgtggccgtcaaggagctggacctctacctggcctacttcgtgcgtgagcgagatgcagagcaaagcggcagtccccggacagggatgggctctgaccaggaggacagcaagcccatcacgctggacacgaccgacttccaggagagctttgtcacctccggcgtgttcagcgtcactgagctcatccaagtgtcccggacacccgtggtgactggaacaggacccaacttctccctgggggagctgcaggggcacctggcatacgacctgaacccagccagcactggcctcagaagaacgctgcccagcacctcctccagtgggagcaagcggcacaaatcgggctcgatggaggaagacgtggacacgagccctggcggcgattactacacttcgcccagctcgcccacgagtagcagccgcaactggacggaggacatggaaggaggcatctcgtccccggtgaagaagacagagatggacaagtcaccattcaacagcccgtccccccaggactctccccgcctctccagcttcacccagcaccaccggcccgtcatcgccgtgcacagcgggatcgcccggagcccacacccgtcctccgctctgcatttccctacgacgtccatcctaccccagacggcctccacctacttcccccacacggccatccgctacccacctcatctcaacccccaggacccgctcaaagatcttgtctcgctggcctgcgacccagccagccagcaacctggaccgtcctggtatctgggatagcaaaggtcttcttccctcgccccttctccatcgtcccaggaatcccagggggcagcacagccggcccccggcccacgttttcggtggaaaattagagtgaacaagaacacccctgccgactcccagcccggccaaaaagacaaaacacatagacgcacacactcaggaggaaaagaaaaaacaaaggcagaagaagaagaagaagaaataaaaacccacccaagcaagaagacaaaaggtaaagacgcaacgtttccaactctcgggacgccaaggccgcaggactggagggccaggccccgccacccccacgggagacccgggacagggcgtcttcctaagttattcatctcctctccgcctgctgctcgggaaggacagacgccggccgcccgcccgcgccccggaggccctggctctgtccggagaccaggtgagcacagcctggagcctgtgcccagggccgacaggcgcgacacccagcaaggccacctctccccgggcccccgcgcctctgccggacacggaccggcccctcagcccccaccgaggacgcagccactggggggaaagggagacacagcggaccccggccgggcagcggagaccgcagaggcgggcagggtggggcaggcgagtggtgtcgcgggggtgcgtggcgcttgcgagccctggccaggggaggaagtgaggcccaggcacctgctgcccctcgagggggccctgcctgccgcggggcctccccacaagcccctcccaaagcgccggccgactcgctgtctcgctggggactctttcagccctcgcgcccgcccgtttgggaggagaagtctcta

SEQ ID NO: 485 - DNA, 2401 bp, Homo sapiens
ccccccctcgccggggaccgagcgcgctcgctccggcgccggcctcgcctcctcgcagcagcgccatggatgagttccacccgttcatcgaggccctgctgcctcacgtccgcgccttcgcctacacctggttcaacctgcaggcgcggaagcgcaagtacttcaagaagcacgagaagcggatgtcgaaggacgaggagcgtgcggtcaaggacgagctgctgggcgagaagcccgaggtcaagcagaagtgggcgtcgcggctgctggccaagctgcgcaaggacatccggcccgagtgccgcgaggacttcgtgctgagcatcaccggcaagaaggcgccgggctgcgtgctctccaaccccgaccagaagggcaagatgcggcgcatcgactgtctccggcaggcggacaaggtgtggcggctggacctggtcatggtcatcctgttcaagggcatcccgctggagagcaccgacggcgagcgcctggtcaaggctgcgcagtgcggtcacccggtcctgtgcgtgcagccgcaccacattggcgtggccgtcaaggagctggacctctacctggcctacttcgtgcgtgagcgagatgcagagcaaagcggcagtccccggacagggatgggctctgaccaggaggacagcaagcccatcacgctggacacgaccgacttccaggagagctttgtcacctccggcgtgttcagcgtcactgagctcatccaagtgtcccggacacccgtggtgactggaacaggacccaacttctccctgggggagctgcaggggcacctggcatacgacctgaacccagccagcactggcctcagaagaacgctgcccagcacctcctccagtgggagcaagcggcacaaatcgggctcgatggaggaagacgtggacacgagccctggcggcgattactacacttcgcccagctcgcccacgagtagcagccgcaactggacggaggacatggaaggaggcatctcgtccccggtgaagaagacagagatggacaagtcaccattcaacagcccgtccccccaggactctccccgcctctccagcttcacccagcaccaccggcccgtcatcgccgtgcacagcgggatcgcccggagcccacacccgtcctccgctctgcatttccctacgacgtccatcctaccccagacggcctccacctacttcccccacacggccatccgctacccacctcatctcaacccccaggacccgctcaaagatcttgtctcgctggcctgcgacccagccagccagcaacctggaccgttaaatggaagtggtcagctcaaaatgcccagccactgcctttctgctcagatgctggcacctccgcccccggggctgccacggctggcgctcccccctgccaccaaacccgccaccacctccgagggaggagccacgtcgccgacctcgccttcctactctccgcccgacacgtcccctgcaaaccgttcctttgtgggattaggaccaagggatcctgcgggcatttatcaggcacagtcctggtatctgggatagcaaaggtcttcttccctcgccccttctccatcgtcccaggaatcccagggggcagcacagccggcccccggcccacgttttcggtggaaaattagagtgaacaagaacacccctgccgactcccagcccggccaaaaagacaaaacacatagacgcacacactcaggaggaaaagaaaaaacaaaggcagaagaagaagaagaagaaataaaaacccacccaagcaagaagacaaaaggtaaagacgcaacgtttccaactctcgggacgccaaggccgcaggactggagggccaggccccgccacccccacgggagacccgggacagggcgtcttcctaagttattcatctcctctccgcctgctgctcgggaaggacagacgccggccgcccgcccgcgccccggaggccctggctctgtccggagaccaggtgagcacagcctggagcctgtgcccagggccgacaggcgcgacacccagcaaggccacctctccccgggcccccgcgcctctgccggacacggaccggcccctcagcccccaccgaggacgcagccactggggggaaagggagacacagcggaccccggccgggcagcggagaccgcagaggcgggcagggtggggcaggcgagtggtgtcgcgggggtgcgtggcgcttgcgagccctggccaggggaggaagtgaggcccaggcacctgctgcccctcgagggggccctgcctgccgcggggcctccccacaagcccctcccaaagcgccggccgactcgctgtctcgctggggactctttcagccctcgcgcccgcccgtttgggaggagaagtctcta

SEQ ID NO: 486 - DNA, 29260 bp, Homo sapiens
ggagggcttccgcccgggtgagcgcggggctgctgggtgacccggctcctgcttgccccgcagccccggccccctgcccaccatgaacgccagcggttctggctacccgcttgcctcgctttacgtgggcgatctgcaccccgacgtgaccgaggccatgctctatgagaagttctctcccgccggccccatcctgtccatccgcgtgtgccgcgatgtagccacccggcgctcgctgggctacgcctacatcaacttccagcagcccgcggacggtgagccccggggatggggcgggaggggaaggaccgacggacaagcaggcggacagacagaagccggaactgggccgcttgcgctttcatcttacactttgcagccggggaaactgaggctcaaagataacagggcgttggcagaggcctggcccctgagacgggaattggtaattagtgtggtttactgctattcctctacagaggagagagattagggtcgagtgaaaacagatacaggctttgtgggggtgggggtgggggtcaggcggaccagggatagaagcccagcagccgtgtgactctgggcaagttactcgaccattctgagcttcagatgcgtgtctggaaaatgggggtcctagctgccttatagagtgcttgtgaggatgagagattcaaagcacctggtgaggaagatgcccaaggcaacacagctggtgagcaggggaggcaggagaacccagccttgggctcaggcctttcccagcgcgacgtgagatccacactgggcgcctctacctgcacgggctctgaaaaaccgctgcctccaggccgcaaggccgctttctcagagctgatagcattgattagagcttgtccgatgagtttgcctgcacttctgttgagagtggagaggatgagtgagcttgggcaagccttcacgctctgcaccttttcatctgcaaaatggggctaaggcgtattctccaataacataaagaatggagaactgctgtctatgcataaagaatggtaactgcttgttacctcgtaaacgctcttaagtggtaacctaaaataaataaataaataaataaataaataaataaataaataaataaggccaggcgcagtggctcacgcctgtaatcccagcatcttaggaggccgaggtgggcagatcacttgaggtcaggagttcgagaccagcctggccaacatagcgaaaccctttctctactaaaaatacaaaaaatagctgggcatgatggcggacgcctgtaatcccaactgctggggaggctgaggcacgagaatcgcttgaatccgggaggcagaggttgcagtgagccgagactgcgccattgcactccagcccgggcaacagagcgagactccatctcaacacaaaacaaaacaacaaacaaaaaagaaacaacaacgaaaatagtggctttaacattctgatgtaagactccagaaactcacccaaaaaatggccggcgtccactagagggatcccttgcgccaggtcgcctgggtgaacctggtggttgcctgagtgggtggtttgctagggaaggggttgttccgccgggcctgttccccgccccttactgggctggattcctgggcacttttctgtttgttctgctttgctccacctcctgcctcttcccatcttcctccaagccctgtgaatgaagtgggactcggcctggaaaccgtgctgcagagagaagggttttgccccaggtatttatgataagactaggtggagaatccgggcttcctgaaacttgctccactgtgttccccacagcccccttccatgtctctgcactagcagactccctgaaacaggtcacgtgtatcacccaggagagacacaggctgcagcagtggccggaggctgggcatcggctgctgttttgagacattattttgtgtcaggcacaaagttacaaacaaggcacttttacataccttctttatttttcagtccctccaacaacctggtagttggtagtatctccctttgttaggtgtggaaaagtaggtaatattaccatcattccccctttacaggtgaggaacaggctcagagaggtaatgtccactttccccagagccggactgcttgagatctaacctcagctctgccctgcagcacctctgagttttaatttcctcaaagtgctgccaccccttgtcatatggacattgttatccactcagtgtactttagaatccagaatagacctgacgctgccacagacctttcatgtttcttattctcagttttcccatctgtaaaatgaggggcaggaatccatgctcatgtggctgcagggagttggttgaatgagatcataactggaaggttgggggagcaccatacacactaattctcagcttatccttcctgagcctttgggctcttatctcagttatttgggctcttatcttggcttattgtctgggacccagacaatgactttctctttattggctcccagttaagcacctcgaggggtgggtgatcaaggtaagaaaattccctaaacttgctaatttctctcctcttccttctgtccagcggagcgggcactggacacaatgaactttgagatgctcaaaggccagcctattcgcatcatgtggtcccagcgagacccaggacttcgcaagtcaggtgtgggcaacatcttcatcaagaacctggaggactccattgacaacaaggctttatatgataccttctccacctttgggaacatcctctcttgcaaggtagaggatgaagggtgtacgtctttgggtagatcggtgtcaactacctgcctggtagaggggtgacaagcaacacctcactttacagtttacaaggtcctttcagtcaagtttcaggtacagcaagcacctgaatgacagccgttctttcagtttcatcttccgtgaatgaccagacattacctgtgtatcagtcagctctcgctgtgtaaccaccttcaaatttagtggccgtcaacaacaatcatttatttagctaataattccacagttggcaatgggcaaagttcagctgggcagttcttctggtcttggctgggttccctcctatgcccactgaaagctgagtgggagctctcgctgggtatatgagggagcgactggctgtcagctggaacatcttggctttcctccctatggccttttgtcctccagtaggctagtccaggctattctcatggtattctcatggcaatggcaggggctcagaagacaagagtggaagcacaccaggcctcttgagaactaaatgcagaactggaaccatcacttccactacgttttttttttttaattgagatgcagtcttactctgttgcctaggctggagtacagtggcatgatctcagcttactgcaacttcctgggttcaagcctcctgagttcaaacgattctcctgcctcagcctcccgagtagctggaattacaggtgcgagccaccatgcctggataatttttgtatgtttagtggagacagggtgggtttcactgtgttggccaggctggtctcgaactcctgacctcccaaaatgctgggattacagccatgagccaccgcacctggcctctttcactacattctattgaccaaagcaagtcacaagaccagcccacattcagagtgagaggggagtagaaattataggatgaagggtgtggctacaggaaggccattaattggggccatcaaggcaattaagttattgaatcttgtttttaagattgtcttacattagatgtaagttccatcagtgatcttgttcttagtcattattgtatcccaatacttagaataagatgtgaaacatattaggtgctcaataaatatatgttgagccagtggaggtatgtcatttgagaaggattctgattatttctctgactttttatatgaggatgttgaggatcagcggccatatagcaggtcagtatgtctggaacagagggcttaaacctgggtgttctgtctctagattttataaggatagttgatcagttaccccgtagcctttggagtgtctgctattctagggaggatggggacagtttttgtagcctatgtgtcagaacttttttttttttttttttttgagacggagtctcactctgttgcccaggctggagtgcagtggcgcgatctcagctcactgcaacctcctcctcccaggttcacgccattctcctgcctcagcctcctgagtagctgggactacaggtgcccgccaccacgcccagctaattttttttgtatttttagtagagacggggtttcaccgtgttagccaggatggtctcgatctcctgaccttgtgatccgcccgcctcagtctcccaaagtgctgggattacaggcgtgagccactgcacctggcatgtcagaacttttatcaagtgctactgtgtgccaagcataatccttaagttctcaacgagggctctcaaattcccagtcaataagaggctatccctgtggctcagaggagcaggtagacttgaggagatgtagtaatgcactaagggttatctgtgacagagagacggggctgtttcctgtctttgaggatcaaaggaagaaagactcttaactgtgtattaagttcttcacaataataatggcagatttatcatgtactttctgtgtgttaggttttctgcatacatgtatactccttaaaagggtacctggcatactgttaagcttctaagtgataactgtaacaatcaaagaattacttctgttggctgaccttggacaagtcatttattctcattttccctctggggctcagaggttaagaaatgactgaaaggattctcttatgactggcatagataacaagggaagtatgtaatgcccttagcaggttcttgacccacagtggggacccagtcaacgtggttaaatccaagctgaggcttgagttgaaagtggaaggcccctgtttcaggatgagaggtggaggggtatgtgcaaggcatgggtttggaagcaagatctgttgtgcaacacccactggggagcctcaaatgccaagttgatatagttctgtggatagaagctactagagattgaagggatgtggtcagaattacattttagaaagagcatcacagtggtagtgtgcaagctaggctgggaggcagtgcttgtcatccaggcagaaaatgccactagctgagctgagcctgtagccacagggatgagtggagccacagtcaccttgaagtggggggttagtggtctttctgcgagttcaacaagagggatgggggctatgtgaactagaaggtctttccttgttctcaagttctgtcctgctggcctgagtcaggagggttacagaatgggaataggatattgtgcatctttaaaaaaattgaggcggggtgcagtggctcatgctcctaatcccagcactttgggaggcccaggtgggtggatcacctgaggtcaggagtccaggaccagcctagccaacatggtgaaactccatctctactaaaaatacaaaaaactagccaggcatggtggcatgcacctgtaatctcagctactcgggagtctgaggcaggagaatcgcttgaacctgggaggcgggggttgcagggagccaagattgtgccattgcactccagcctgggcaacaagagtgaaactctatctcaaaaaaaaaaaaaaaaaaaattgaaatgagtctgttgttgcagtaattcatgtattggcaaagtttaaacaatgtggaagggaagaaagtgaaaaacaagactccatttctttcagccctagtccccaaaagtaatatgaatacattttatgtgtctttttcaaaatttccaatgtgtagatgcctactttagcctgaatggattttttttttcacttaacaagactgtcaggccatgtaacctaccacattctcttcaactgtgcacatacagtagactggtgtacaattgaggctcccccttgatgaataccccggttgtttctagtttgctgatagaaacaaggatgcagatatgggggtttgaatctaacccttttgcccattgccttaggaagacaattaaaagccagtatgcagtatagatgaaacctgtgttcatttcgttctccctcttaaatctgttttttcttttctgtttttatttttttgacacagagtctcactctgtcacccaggatggagttcagtggtgcaatatcagctcaccgcaacctccgcctcctcggttcaagcaattcccctgcctcagcctcctgagtagctgggattacaggcacccaccaccacatctggctaattttttgtatttttaatagagacagggttgcaccatgttgtccaggctggtctcgaactcctgacctcaagtgatatgcccacctcggcctcccaaagtgctgggattacaggcatgagccactgcacccagccttccttaatccgttaacttgagtggtgacactctttgagcttccataccccatccctaacatgcaggattgccttttccaggcacagcaggcatgcagagactggtcgtgatcacctttgccattcctttctacctgaaccctctgtcagtactcttcctgtccttcctccctgtggcccaggtggcgtgtgacgagcatggctcccggggtttcggctttgtccattttgagacccatgaggccgcacagcaggccatcaacaccatgaatgggatgctgctgaatgaccgcaaagtgtgagtggctgggcccgagggaggggcggaggctgcagggacagaagcatggcaccaccgactaggaatcgatgctaccctcaagctgctaatgggcaccaggcacttgagcggcaggcagccctcctagaagtgtgagcccggagcagctgctcaacctctcagggactctttcctcacataaagatggagctgatgatctgcattagagtatggtaaaggaagtggtgattttaaaactctagagggactggctaatggtcatatcatcaatggactcagtgttttcatctgttttccagccttctcagtatggggtgtatgtgtgtgtgacagggtcttgctatgtagcccaggctggagtgcagtggcatgaacacagctcactgcagccttgacctccttggctcaagtaatcctcctgtctcagcctcctttgtagctgggaccacaggtgaccacatgccaccatacctggctaattttttgatttttttttttttttttgtagagatggggtctcactttgttgcccaggctggtcttgaactcttgggttcaagtgatcctcctgcctcagcctcctaaagtgttaaaatgctgggattacaggcatgagctactgcgcctgactttttctttaaaccttttgtgtttcatgagattttggcagaaagaaaagtaggcatatgctaagcctgccctcatcatactgttaacttcgatatcatccccactacacagatgggaaaactgagaggcagataatagagagaatctgcctctggctgttccctgcccagaattttgattttgttcatctgagaggccagctcacatggtcagggccatggagagaaggtggctttgagctgggggatgcactgagagtcattttgtccagggttactcagaggagggtccagtcaacctgtcaaacaaatcttggtgggcttttcccagttctcagaagaatgctcttcgttagctccaatttactcaagttcacctttgccactcagttttcttcaaattttggtgcctggtacaactttgtttgtgctaaacgtgctatagataccatcagaatttattattatttttttaatctgggatgctttcctagatgtgtttacatgaacttggaaatgaacttttaaaattaatcttgtgactgggtgtggtggctcacacctgtaaccccagcactttgtgaggcagaggtgggtgaatcatctgaggtcaggagtttgagactagcctggccaacatggtgaaactccatctctaccaaaaatacaagaattagccatgcgtggtggcacatacctgtaatcccagctacttggaaggctgagtgaagcaggagaatcgcttgaacccaggaggtggagcttgcagtgagctgagatggcaccactgtactccagcctgggcgatagagcgaaactcagtgtcaaaaacataataaataaaaataaaattaatcttgtatttaagtgattttagtcaatgccccccatagcaacactagcattgactgcgtctaattcacttacccctgcttccccagtgcacccaatacatgttaataagcaaagccccatgatgagaatttgagtcccaattttacagcaatgaactctgaggctcagagaggttaagtagcttgcccagggtcacacagctaggcaactgcagagcgaggattcaagcccttgtctgtctgactctcaggctcattcttctgtgctctcagctgcctggtatataatagtaattatgtgtgcatttgtcgcaagaatgaaatcttcttaaccttctgctggggacaagctctggaacataatataatatcttggctattggaggtagccgggccttggggatgttctaaggagtattgtcctgcccagtttcctgatgagggatatgtaagcctggagaagggcagcagttgagcaggagttggcatgggggtggctgatggctggtagctgtccacagccatgagccagtgtgtcatgtccacagctttgtgggtcacttcaagtctcgacgggagcgggaggcggagctgggggcgcgggccctggagttcaccaacatctacgtgaagaacctcccggtggatgtggacgagcaaggcctgcaggacctcttctcccagtttggtgggtgtgtccccaagggagcggggggatcactgtttttcctcttcccttccaaagtctggtagggaggaggggctctcctggggtttcctgaggacttcccagactcccctttgagccaggttggtcctttgcagggaaaatgctgagtgtgaaggtgatgagggacaacagcggccactcgcggtgctttggctttgtcaactttgagaagcatgaggaagcccagaaggtaggagcctccccatggctctgttctgcagcagggggaccgagctgggactaagaagagggtcccagctgcctgtggaggggaagaaagtccctccccggcctaagccaagagggtgggagagtcctgtgtgcaggcaaagcccttccttctgtggtcaaaggccaagggcttcattctttggtcacttctaagccctgatgtccgcagagctgaatatttaggtagggatgcagaagtcattattatataaaaatatttactcatgaactgaccacttaaatcagtttccaccgggtgtggtggtgtgcacctgtagtctcagcctacgtgataggctgaggcaggaggaccccttgagcccagtggtttgagtccagcctgggcaacatagcaagaccctgtctctaattttttaaaaactctccagatgtgatggctcatgcttgtaatcccagcacttggggaggctgggtgggaagactgcttgagttcagttcgagaccagctggacaaaacggcaagatgccatcttcacacacaaaaaggctctcacagttagcaaagaggattattttgtgccttgaaatccaactcaaagtaaggatgttgatgatgctgtcatgccattatgagagaattatgcttgctactttgttcaaattatccatgtgtagttgcagttagaacctaaatttttttaagttctttaagttcttttttcagtgtagttttaagttcagagcaacgtttagtggaagttatggaggttttctgtataccccattcccccaacacatgaacagcctctgccattatcaatgtcctgctcccaagggttacgtctgttacaagtgattcacttactttgacacatcattaacacacacagtcccaagtttacattaggatttacttttggtgtagagtctaggggtttggacaaatgcataatgacatgtatccactattatggtatcatgcagactactttcagtgccctaaacatcccctgtgctccatctgttcattcctccatgccccttaacccctggcaaccaatgatctttttgcttgctccatagttttgccttttctgggacagagactatgtcacctagactggcttctttcacttagtaatacgcatttaaaatatgggaatatataaatatttacattttattttatttttatttatttatttttgagacagagtctcactctgtcacccaggatggaatgcagtgacgtgatctcggctcattgcaacctccgcctcctgggttcaagtaattctcctgcctcaacctcccgagtagctgggactacaggcgcccgccaccatgcccggctaatttttgtgtttttagtagagaaggggtttcaccatgttggccaggctggtatcgaactcgtgacctcaagtgatccacccgccttggcctcccaaagtgctaggattacaggcgtgagccaccatgcccggccatatttacattgtaaatatgggaaaatttgcaaatctcaattttatttttatgtttattttattaagatggagtctgtctgtcgtccaggctgtagtgcagtggcgtgatctcagctcactgcaacctccacctcccagtttcaagggattctcccacctcagcctcctaagtagctgggattacaggcacctgccaccatgcctggctaatttttgtatttttagtagagatggggtttcaccaagttggccaggctggtttcgaactcctgacctcaagtgatccaaccgccttggcctcccaaagtgctgtaattaccaggtgtgagccactgtgcctggccatcaattttgtttcttaaaatacagccccagtccgaattttttttttttttttgagatggagtttcactcttgttgcccaggctggagtgcaatggcgtgatctcagctcaccgcaacctccacctcccaggttcaacgattctcctgcctcagcctcccgagtagctgggattacaggcatgtgcttccatgcctggctaattttgtatttttagtagagacggggtttctccatgttggtcaggctggtctcgaattcctgacctcagatgatccgtccccctcggccacccaaagtgctgggattacaggcatgagccaaagtgggtatacttaaatggcctttgtcctggtactgattattctcagctagtgtggccagcctggtttgcaggtggcccctctagatccagaagatgagcctgggccagggccacatctgagtggttaccaagcatgttccctcctcctttccccaggccgtggtccatatgaacgggaaggaggtgagcgggcggctgctgtacgcgggccgggcccaaaagcgcgtggagcggcagaatgaactgaagcgcaggtttgagcagatgaagcaggaccggctgaggcgttaccaggtgaggtcaggcttcctggtggcagccacttctgtgtgagagcagctgtgtgtcgggggccctgagtggtgactgtttcttctagtgatcctacttctgggcacttggctcaaggcgggaattgaatgagcatgggatggcccccactgcctaatgtataacagtgagaaactgcgcacaacccaactgtccaaccatcataggggttagtaggggtgctggggaccttttggttagaataatccttcacgtgggactggttagcatcccacccagcccactcaatcccagttgcatcctctagtctcagacaaccaaagtaccccgcatattgccagatgcccctagaggaaatcctactcctggctgagaataatcaggccaaatatgttacatccaaaagttggaatgttggacagcctttgaattatgtggagttaataattaaagtgaatattgtggatcagtgcaatttaaaacttcattgggaagtgaacccctctaagattttatttatttacttattttttgagacagagtattgctcttgtcacccaggctggagtgcagtggcatgatcttggttcactgcaacctctcactcctgggttcaagaaagtctcagcctcccaagtagctgggattacaggtgcgtgccaccatgcccggcaaatttttgtatttttagtagagacagggtttcaccatgttgcccaggctggtcttgaactcctgaccttgtgatctgcccgcctcagcctcccaaagtgctgggattacaggtgtgagccactgcgcctggcctcatttttgtatttttaatagagatggagttcatcatattggtcaggctggtctcgaactcctgaccttagttgatctgcccgctttggcctcccaaagttatgggattacaggcatgagccaccacgcctggccccctctaagatttttcataaaagttctagatccttcatggagaggggcatataaatatacatatccacacaaaacacgcacacatactcagtagttctcagtgaggagcagttttgcctcctgggggacatttggcaatgtctagaattttcattgtcgtgtgggtggtggggtgctactgtcatccacagggtagaggccagggatgctggcaggcatcctacagtgcccaggacaatgccacagcaaggaactgtctggcacaaaatgtcactagatctgaggctgagaaacacatacatcctcttgtgtacatacagcgtgtccaggggctttcatacctgcagaacaaaatactcatcacataatctgcaagagcaggatgctatgctgtacaattgtgcggtctctgttctcttgtacattcatacactgttgtgtttgggaggtctggaaggagaaaagtcaaggtgctagaggcagctgtcactcaacagtgagatgcacagactctgaagttagtctgcctgggttgtcctgtctctgccacttagctactgtatgatctggggcaacttatttagcctctttgtgtttcagttttgtctgtaaaacaaggataaaagttttcttcacgcagggttgttgtgaggattaaaaatcaaaacgtggcctgtcgtggtggctcgtgcctgtaatcccagcactttgggaggccaaggtgggcagatcacctgaggtcaggagttcaagactggcctgaccaacatggagaaaggagaaacccgtctctactaaaaaatacaaagttagctgggtctggttgcacgtacctgtaatcccagctacttgggaggctgaggcaggagaatcacttgaacccgcgaggcagaggttgcactgagccgagattgcaccattgcactccagcctaggcaacaagagcaaaaatccatctcaaaaaaaaaaagtcttaaaaaaaaaatcaaaatgtatgggaaagcttagagtggcacctggcaccaacatgagtaagtgcccgaggttcctgggctggcaggggatggaggggcagctcacctgtgttagggttctggtcatgggccagccagggaggagctctgactcctgctgcccgacatccaccatctggagagcttggcttgggcatgctctgcacctcagcctgccacgggacctgggacatcctcgtgggccccatctgtgaaatggggaatagctgtggtgaggctgggaccagtgcagatgtgtgagaactgcaggggaatttgggatgtgggggctacagcttgcatgtgatgggcacgctgagggatgggggtacctgggtgctgagggagacggggagcaggaggctgggctggtggggctccccatgccccttgtacctgcgtcagttccctgatctccccaaggcagttggggcttggaggagaaggggacatccagcagtttcccttccatcccagggtgtgaacttgtatgtgaagaatctggacgactccattgatgacgacaaactgaggaaagagttctctccctatggagtaattaccagtgcgaaggtgaggactgggggcacctccgggggacagcgttcccctccatcctctcaccaccatccccccacaaccccacccctccaccctctcgcccagcagccttcagggggttggtgccggctaccccttctggggctctgctgaccccgttggagcttgtagccatctgcagccttgtctgggctggaggggaagagggtagaaatatagtcccagtcacacagctggacttggggctcactgtcaccttggcatttattgagtgcctactgtatgccagattccagaaattcatatcttagtatttccattgacttttgttgtctggcctctgccagtgacattaccctcctgggcctccgttttcccatctggaaagtgagagggctggacttcgtcattcttcatttgttcttccctatttctggagcaccaattgtgtgcccaaccctgttaggcccctgagatgtggcaactggcccatcagcagctctatgagctttagcagatgttgtcttatagataaggacactgggctcactggatggctttccgaccctggcttctcattacaaccccctgggcaattcttaaatacacacacctcagtcaggcatagaatgtggatccccggggtagggcctgggctttttattttttttttttaaagctcccagaggctgggcaatatggctcacgcctgtaatcccagcactttgggaggctgaggcaggcagatcatgaggtcaggagatcgagaccatcctcgctaacacggtgaaaccccatctctactaaaaatacaaaaaattagccgggcatgatggcacgtgcctatagtcccaggtattccggaggctgaggcaggagaatggcatgaacccaggaggcggagcttgcagtgagccaagatcgtgccactgcactccagcctgggcaacagcgagactctgtctcaaaaaaaaaaaaaaaaaaaagcgcccagatggtttttaagatgatgatccagtgtttcttcattctatacttaaatacctgctgttttaccaggctctgtgggaaacaggagcaaatcagatgtgatccttgctttcaagtagcttatagtctagtgaggaagtcagcccgtcactaactcaaatggattataagatgggggacagtatgggaggcaaagctacaggagttcagtggaacagaagggaaggctgcctggaagaagtggcagtagcagcagtgtttgacttggctgtgaggaggtagggagctggagtgggaatgaggaattttccaaagagatcagtgtgagtgacaggatggggggacccgcctgaatgatgtgatgttgggttctgaggaagtggtctagaagttctcttttggctactgagtccagttgtaaacatccttcagggagccttgtgtttggaggaaaaaaggttgtcttttaggttaagatccttttgaaaaatgcgagagaaggctgtggcacatgtaaattaggcatcagtaaatttgattacacatcataaaaagctataggtcctctttccaagcaaatgcatatacatttgatgtagaaacatggttgaaagctggaattttaaagttaatcaggtttaaatgtaaaccccagtcctaccattacctagctgtagaaactgaggcaagtggctttgcttttcggaccttgtttactcacctataaagtgggagcaacatttctcacctctccaggtgtcctaagaactactaaagaggctgcatgtacagcatctgcattcaataagtagtgaaatagtgattgtcgtaatgattcatcatacaccttgcatacagcttcaggagatggaccttcttgaggactccccgaacaaaggaaatgtgtaaatttggattgcttagagttaaggcacacctggggtgaccatctttttaacaggacaaacggtataaaatggggattataaatatatctattttttgtgtgtgtgatggagtctagctctgttgcccaggctagagtgcagtggcgccatctcggctcactacaacctccgcctcccgggttcaagtgattcttctccctcagcctcctgagtagctgggattacaggcacctgccaccatgcccagctaatttttgtatttttagtagagacggggtttcactgtgttggccgggctggtctcaaactcctgacctagtaatccgcccgcctcagcctcccaaagtgctgcaattacaagaatgagccaccacgcccagcctacatatatatatatattatacaattatttatttattttgagatagagtttccttcttgtcgcccaggctggagtgcaatggcgcgatcttggctcactacaacttctgcctcccaggttcaagcaattctcctgcctcagccttctgagtagctgggattacaggcgcccgccaccaagccctactaatgtttgtatttttagtaaagatgaggtttcaccatgttagccaggatggtcctgaactcttgacctcaggtgatctgcccgccttggcctcccaaagtgctgagattataggcgtgaaccactgtgcctggcctatgttatgcgattttatatattttggtttattattattttttattagatgcaggttcttattctgttgcccaggctggagggccatgatgtgatcatggcacgccacaacctcaacctcctgggctcaagtgatcctcccacctgagcctcctaagtagctgggaccacaggcatgtgccaccatgcccagctgatttaaaaaaaaatttttttttggtagaaattgggagtcttgctgtgttgtccaggcttgtcttgaactcctgggctcaagcagtcctcctacctcagcctcccaaagtgctgggattataggcatgagccactgcatctggcctgtattttgttttatataaaaataattatgaaaattaaaggaattaatggatataaatacttataccactatcaagttcatggtaagctctgcataagtgttagctttgctaaattttatcattattaactaccgactgccagaagttcttaacaatatatatatatttttttttttttgagatggagttttgctcttgttgcccaggctagagtgcaatggtgcaatcttagctcactgtaacctttgcctcctgggttcaagtgattctcctgcttcagcctcctgagtagctgggattacaggcgcctctcaccatgcccagctaattttttgtatttttagtagagatggggtgtcactattttggccaggctggtctcgaacttctgacctcaggtgatccacctgcctcagcctcccaaagtgctaggattacaggcgtgagccactgtgcccggccctttggctatctgatgaagcctgtggaacccttctaagaatattttttaaaaacttttttgagacagagtctcgctctatcacccaggctggaatgcagtggtgccatcacagctcactgcagcctccaactcctggcctcaagtgatctcctgtctcagcctcccaagtagctgagactataggagcaccactatgcctggataattattttttatattacccaggctggtctcaaacccctgggctcaagcaattcttccgcctctgcttcccaaaaataggcatgagccaccaaacctggccctaagaatatttttaaatgcataaaataagattcttaggtgtacaaaaaaatcatactgaaaaaatataatggtcaaaatactaaagtgaaagcagtatgtgcttcttttattatttttatttttatttttttgagacgaagtcccactctgtcgcccagactggagcgcagtggcatgatcttggctcactacaacctctgcctcccaggttcaagaacctgggttctgcctcaacctcctgggaagctgagattacaggcacccgccaccataaccagctaatttttgtatatttttagtagagatggggtttcaccatgttggccaggctggtctcgaactcctgacctcaggtgatctgcccaccttggcctcccaaagtgctgggattacaggcataagccattgcgctcggctgagattagcaataattaatgtgatatgaaaatattttctttttcttcatgacaaattcatggctaatactgccaggatttttttgttgttgcccatattcataatagaaggaaatgctaatatgaaaataaagatgtcactttttccccaatccatgcaatttccccctaaattgtatccatgacctacctgagggggatccatggactctcaggttaagacccctctactgaagggtagcagagtacagtttcaaaattactgattaagagcgtgggctcaccaggagttcaagcccagccggggcaacaggatgagacctcatctttacaaaaaatgaacaaaattaggcatggtggtgcttgtctgcagtcccagctacttgggagactgagttgagaggatcacttgaggctgagaggttgagggtgcagttgagctgagattgcaccactgcactccagcctgagtgacagagtgagatcctgactcaaaaaaaaaaaaaaaaaaaaagaaaaaaaaaaaggaaaaaaagaagattttaaaaataactctagtccttatgggctgtatgagccaggccggtgtcttcaccctaaaaaaaggttaaaaacccagggccaggtgtggtggctcctgcctgtaatccctgcaccttgggagacctaggtaggaggatctcttgagaccagcctgggcaacatagtgattgctgatctctacaaacttaaaaaaaaaaattagctgggtgtggtggcatgtacctatagccctaactacttgagaggctgaggcaggaggatccctggagcccgggagtttgaggctgcagtgagctatgatcataccactgcactccagcctggatgacagagtgagaccccatctctttaaaaaacaaacaaataaacaaaaagacaaaccctaaatgccatgtgggttggatcctggaagagaaaaagaatattaggggaaaaaagagtgaaattccagtgaagtctggagttcagttaatagcattgtagttaataggagctaatggtataaaatagttaatagcattgcaccagtgttaattttgtagttttgaaaaatgtaccatgttcacattgggggaaactgggtgaaagatatacagcaggccaggcatggtggctcacgcctgtaatcccagcactttgggaggctgaggcaggcagatcacttgaggtcaggagtttgagaccagcctggccaacatggtgaaaccctctctctactgaaaatacaaaaattagccaggtgtggtggcacacgcctgtagtcccatctacccaggaggctaaggcaggagaattgcttgaacccgggaggctgaggttgcagttagccgagatcgtgccactccactctagcctgagtgacagagtgaaactatgtctcaaaaaaaaaaaaaaagatatatagcaaccctctgtactgtttttgtaactttttctgtaaatctaaagttactccaaagtaaaaaggttattttaacaaaaaggctaagaacctcttccccaaattcctaaagaacttggcttggtacttagcagaggcgatagaagcttaccagaacaatgtgttgggttgagtcctggctaacgtatgaaccacaggctgagtgaccccagacaagtcactctttcgagtctctcttatcccggctgtaaagtgggagccgcgatgcctcccgcatcgggaggttgtacatgtgaggtgtgaagacatgtaaagtatctggcatgcagcaggcctcatagatgggggtgcgtgctgcatccctcaaacagctcagtaaacagggtgcacgctacatccctccatcactcctcagtaaatgggggtgcacgctacatccctccatcacagcttgctaaacgggggtgcacactacatccctcgaacacagcttagtaaacaggggtgcacgctacatccctccatcacagctttctcgcgggcctgcccagtgctgggcttagcccatggggaggagggaggcagcgcagccccaggagccttccttccccaccccagcagctcttgtcttgtcttgcttttaggtgatgacagagggtggccacagcaaggggtttggctttgtgtgtttttcctccccagaagaggcgacaaaggccgtgacagagatgaacgggcgcatcgtgggcaccaagccactctacgtggcactggcccagcgcaaagaggagcggaaggccatcttgaccaaccagtacatgcagcgcctctccaccatgcggaccctgagcaaccccctcctgggctcctttcagcagccctccagctacttcctgcctgccatgccccaggtgacggcctgcccgcaactcccaccgcagccttcccccctgccccagcaaggcagagcatgaagactagagttctagggaaatggaggtttctaacttgcttctgccgaggactcattaggaagtctttgtttccctctctataaaagggagagatagtgttagtcaaatggcatttcccagtgagagaagctcgtgaatgttgtgctgaaaaagactcttaatgatccagcaagtttgggaaatgctgcgttaagcaagacctacatttttccttcctcccttccttcccttccctcccttccctcccttccctcccttcccttcccttcccttccctccctccctccctccctccctcccttccttccttccttccttcgtggggtctccatgtcacccaggctggtgagcaatggcgtgatcatggctccttccttcttccctcccttcctcccttcctcccttccttcacggggtctccatgtcacccaggctggagagcaatggcatgatcatggctcactgcagccttgaattcctgggcttgagtgatcctcccactgtagcctcctgagtaggtgggactacaggtgtgtgccaccatgcccagctaatttttttgtttattttaaagaaggggtctcgccatgttgcccaggctggtctcaaactcctgggctcaagcaattctcctgccttggcctcccaaagtgctggcattacaggagtaagccaccgtcccccgccctacatttttttaaaaattaaatttttatttttttggagacagagtcttgctctgttgcccagaatggagtgcagtgacaccatcttggctcgctgcaaactcttcctcctgggttcaagtgattcttgtgcctcagcctcccgggtagctgggattacaggtgcgtgccaccacactcagctaattttttgtatttttagtagagacggggtttcaccatgttggccaggctggtcttgaactcctgacctcaagtgatgtgccctccttgacctcctaaagtgctgggattacaggcatgagccaccatgatcggccctaaatttctttactatctacactattctaccctaagatgccaatgtctactgagactctccaaaacaggcacagattatccagcatttccccagcttagatggtcatttttttgtgggatgcctgttaacatctcccctggatgttaatgttctgaggagcatggtttgggaaaggacctcgtgggacttacaggaagtagaaagatgtcacccattaaaggccaccacggtaagaacattcctctccttttagcagttgcttaagctgcacaagttggagtaagatgtcaccctttttatccaggtcattgggttagctgacagggagccaagattgaaatctaagatctttgccctgcaggattcagggctaatggacatcctgagatgggaggaaggagctttcattacagccttgtgggtcttgactcaccagtccctgcaggagccagtggagttcctgccatggtgtccctgaggaggtgtagcttctcacctaccctgccgccaagcccctcagtctgggtcttcttttcccatgcagcctccagcccaggctgcatactatggctgtggcccagtgacacccacccagcctgcccccaggtggacatcccagccacctagaccttcctgtgagtgacccagccccttccactctcagactggcctattggtgtgggccccgtgaggcagtcataacacagggatgaaacctggctctgccacttcccaaggtgggtgacttcacttctctgagcctcagtttcctcttctgagcatgggcctgaatgagacgtgtgtaaagtaccaagcacagtggtgagccaatggaagacacgcagctagccaccagcagtcatcaccaaagatgcctctgatttgtgactctgaaaattcttgcaaagctgagaaggtgaaattcctctggctatattgttgaccaaaggccctcctctgtaagagtgaattgcacgctcacttgaaactatcttgagggactaaggtgtacaatcctggtgcttatgcagtttggggctctaggtagacacgagctggctttgaaattgtagattcctacactccccctttctggagttctgggtctaagtgaattgactcctatttctgttgtgaatgttgtagtttcccttcccattctcttggtggccctggaagcttctaggcacagtgtgccaccctgattattcccaccactccatccaacttttctctctctgtggtgtctgcaccacaagctgcctaccctccaggtgcctcaatggtccggccaccagttgtgcctcggcgccccccggcccacatcagcagtgtcaggcaggcctccacccaggtgccacgcacggtgcctcatacccagagagtaggtgagtgtgggtagggccaaggggaatgggggtggggcaaagttggcactaggagtcaggaccagcctccatggtgaccttgccatatgccctctcggtgagcaaagctgactttggagactgtagcgtggtagttagcttggcctccagttcctgggaccaactgactatgaggcccttgctgactactatatctgtcacctaatctttaaaatggggacaaaaatagtacccccattttattgtagagaatttaaatgtttttttttttctttttgaggcagaatttcattcttgttgcccaggctggagtgcaatggcatgatctctgctcactgcaacctccgcctcccaggttcaagcgattgtcctgcctcagcttcccaagtagctgggattgtaggcatgcgccaccatgcctgggtaattttgtgtttttagtagagacggggtttctccatgttggtcaggttggtcttgaactcctgatctcaggtgatccgcccacctcagcctcccaaagtgctgagattacaggcatgagccactgtgcccagccttaattttttttttttttttttttgagatcgagtcttgctctgtcgcccaggctggagagtaatggtgtgatctcggctcactgcaacctctgcctccggggttctaagcgattctcctgcctcagcctcctgagtagctgggattacaggcatgcgccaccatacttggctaatttttgtatttttagtagggacagggtttcaccatgttggccaggctggtctcgaactcctgaccttaggtgatccaccagcctcggcctcccaaagtgctgggattacaggcatgagccaccatgcccggcttgttgttgaggatcaatgagatcatgcatgaaagggcttagcactgggcctaaagcctggtaagtattgcagtgactataaacaagggtgtaggttttggctgtacagcaagcacatctgttctttcattctgcaaatgttctcacatccacagtgtgctggggccccaagctcagcactggaggttctgcgtgaacgaggtatactcagtctctggccttaggttgctgccaggccctgacacccctgcttattcctttttattgtggtaaaatacacataacaaaatttaccacttaactatttttcagtgtacagatcaatggcattaagtatattcacactgttgtgcactgtcaccaccatccactctccagaactctgttcagcttgtagagccgaaattctgtacccatcaaaccataacttctcgttcctcctcccgctagcccttggcaactgccattctactttgtctctgtgaatttgactgttcttgcttggtacctcatgtaagtagaatcatagagtatttgtctttttgtggctagtttttttactttacatgtctcaggatgtatctatgttgtggcgtgtgtcagaatctccttattaaggctaaataatattccattgtatgtatagacctcatttttacttattcattcatctatcaatggacacttttctaccctttgggtattgtgaataatgctgctgtgaaaatggttgtgcaggctgggcgtgatggcttacgcctgtaatcccagcactttgggaggctgaggcaggtggatcatgaggtcaggagttcgaaaccagcctgaccaacatggtgaaaccctgtctctactaaaaatacaaaaattagccggacgtggtggcatgtgcttgtaatcccagctacttggtaggctgagacaagagaattgattgaacccaggagggggaggttgcagtgagccgagataacaccactgcactatagcctgggtgacagagcaagactctgtctcaggaaaaaaaaaaaaaagaaagaaaatgtttgtacaaatagctctttgaaaccctgctttcaattcttttgggtatatacccagaggtaaaattgatggatgatatggtaattctgtttaactgtttgagaaagccctatactgtttttctgtagtggctacatcattttacattcctaccaacagtgcacagtcttctaatttctttacattcttgtcaacgcttgttattttctgttttggtgttgttttgttttgttttgtttttggatagcagctatttgaactctgctttttttgttttgttttgttttgttttgcagccaacattggtactcagaccacaggacccagtggggtaggatgctgtacaccaggccggccgctcctgccgtgcaaatgttcctcagcagcacatagcacctatcgggtaaggccagcccagctgcctgctcttagcctgggctcctggccgcctggctcagaaccttagctaaggtgttgggccttggctttttttcttttcttggcttgtaaagtttcgtttattaatgtgtacaatcaataagagatcacccttactgcgagaaggggaaagagggccagcattacgttttatttacaatttgttttgcttcggttattaccaaaattaatttggatatccttagtatttgtgatgaacaccaaggaaaggtattctaagaatatgctgattattgaagggatgtacttaatcttcaaaacagaaaatacttactgtaatcaaagactgtgtatttatctccctcccctaaaaaaggcctaaaattcagcattatcatatcctgtgtagaatttcaatgtgtctcttttgaactatttcctgcaaaatgaatgagaacagtctttaaacagcaaaaatgtctatttttttttttggacagggtcttttttttgacagcacccaggttagagtgcagtggtgtgatcatagctcactgcagccttgaactcctaggctcaagtgatcctcccacctcagcctccaagtacaggcatgtgacaccatgcctggttaattttgtgtatttttttgtagtgacaggggtctcattatgttgccaaggctgatctcaaactcctggcctcaagcgatcctcccactttggccttccaaagttctaggattataggtgtgagccaccacacctggccaaaatgttttaaaattaccaagatgtgaaagggtgagaggtgtgccggggacatgtccataaatctacttgataaaaagtgctttatttggcacaaagttattggtaacacagggctttcctttatcaacgttcatcagggacctttataagttcgtagcactacaggaaacgtctaagctagaggcatgactttgtcttctaatccactttgcccttgttggggactctccaccccacctgatcatccagaccttgccctctgttcccctcctccagtgcctccctggccttctgctcacttgccagggtaagtattttgaggacatgcctgtccatggtgattaagggatgtgtccccggcaccatgcaggtccaggagccggctgtgcacatcccaggacaggagcccctgaccgcgtccatgctggctgcggcgcccctgcatgagcaaaagcagatgattggtgagtggctggttctcctactgtggagcaagaagaggagggctgcgagctggctagcctgctgggaaacacctcacctggtggtccaacgtgaggtcaaattccagctttgtcaccgacccccctactgggtgaccgtggccaagctggctctattctctaggcacctgttatcttgtcttaaaacgctggtcagactggatggtcctgagctttcttccactgctgctgtcctgtgactttgaggttgggagacagtccagatgtggggagatcaggggacaaagggaggagtaggggtatggtcttgggtttctgctgagaaatggcttgtaggtggggggttaaagttcctcacacctctcctgaacgggaggaagctgctgttcaccagtttccagtgctcaatgcgggcaggtggggcatctgtgcgtttggtaaatacatgatgtttcccatagattctggattccttgtgcaattcatcttcacccctagtgtccatggcaggccctgataaaaatgccactaagtgaacacaagcttgttcctggttggcaggttctttactgcatggcccccgagacctccagaccctttactgaaggcccccattaccactgccccattgtttcctcagcttacttagggttttgccacattaccccttcccctcaccccgaaatttttttttttttccctgagatggagtcttgctctgctgccccggctggagtgcagtggcacgattttggctcactgcaacctccacctcccgggttcaagtgattctcctgcctcagccttctgagtagctgggcttacaggcacatgccaccatgaccagctaagttttgtatttttattagagatggggtttcaccatgttggccaggctggtttcaaactcctgatctcaggtgatccacccacctcagcctcccaaagtactgtgattacaggtgtgagccaccatgcctggcctcacccagaaacattttgaatgagcttaatggaagtagaagtctttgttagtagttctctgtaaacattttcactttcttcatgggacgatcctttccgcccccacttaaggcacccagtcctggctgggccctggacacattgctgagatgggctgaccaccaataccaggcccagtcattaaaagtacctgatgttagaagatcaagtgttaaatgtcatagcctagaaggagcagttctgggagaagaacccagatgtcctcagtgctccactccatacgagccctgggatgctggggtgtgagctaggccgtgcacaagccattagaaggtgttccacacaggggagcgtctctacccccttatccatgatgtccacacccagctggctggcaagatcacgggcatgctgctggagattgacaactcagagctgttgctcatgctggagtctccagaatccctccatgccaaggtaagcaggagcctgggcagcagggagcccgagggggcaggaggagagctaacgacaagggctctcctagtggagccagtggatagctgtttggccagataaagtgtttcttcttgctaatacctgaaggcctgctgaatcttaagagtggaaggggccttaggtaagggtttgctacttcagcccttccgtagactaattctgtgttgttctgtaggtaggtcttttggtacaaggaagtgtgttgtgactcagtgtaagggttaagatttttccagctgtccagcaatgtacctctgtgtcaaaggtgacagacagggccatgggatcttgcaagcagtggtggatgggagggttccacagaaaccctgtggatggaggaggatcctgtatccaggatggtgagcgagggggagatcaaggctcttctgtgacctgctaagatagctgcactaagcccccccgccactcatgtctcacagatagacgaggcagtggccgtgctgcaggcacaccaggctatggagcagccgaaggcgtacatgcactgaaaccaggtgggtggaatggtgacagaagcagctgagcccgggagaagctgtaaggaaataggcagggactgactttcacaaacactgagaattgcgccgtgttcctggctttctctgaagcaccaaagagtttggaggaagttgtgagaatcagaggagatgattaactgtgatcggaatggggggtggtggagggtgaaggaggtgccctcttgccagctgccctgcctggcttcatgcagaatagtttgggctttcccagggccctgcctggctccattctgcctgcctgaaggcctggccaggatgtaaccaccttctttattgaagactgggtgtctgccatactttaaaaacacttatttttacctttttgtcctcagaaaaggaaatcctcgcttccatggctgccaaaaggacagtgtttctggctctcagccctaaggccctgcaaactctaacttatttcccaattagtctgtatctatacttgggctctgtatgtgaatgaaggttggtcacccatccagcctattaccttttgctttgtgtattaaaagtgctgcaaaatctgccttg

SEQ ID NO: 487 - DNA, 2044 bp, Homo sapiens
ggacgtggggcttttgcagctcagctggttccggctggggaagatggcggtggctggggcggtgtccggggagccgctggtgcactggtgcacccagcagttgcggaagactttcggcctggatgtcagcgaggagatcattcagtacgttttgtcaattgagagtgctgaagagatacgagaatatgttactgatctcctccagggaaatgaaggcaaaaaaggtcaattcatagaagaacttataaccaaatggcaaaagaatgatcaggagttgatttcggatcctttgcagcagtgcttcaaaaaagatgaaattttagatgggcagaaatcaggcgaccatctaaagcggggtaggaagaaagggagaaacagacaggaagttcctgcatttactgaacctgacacgactgcagaggttaaaacaccttttgatttggccaaggcacaagagaacagcaactccgtaaagaagaagacaaagtttgtcaatttatacacaagagagggacaggacaggcttgcagtcctgctccctggtcgtcacccttgtgattgcctgggccagaagcacaagctcatcaataactgtctgatctgtgggcgcattgtctgtgaacaagaaggctcaggcccttgcttattctgtggcactctggtgtgtactcatgaggaacaagatattttacagcgtgactcaaacaagagccagaaactgctaaagaaactcatgtcaggagtggagaattctggaaaggtggacatctctaccaaggaccttcttcctcatcaagaattgcgaattaagtctggtctggagaaggctatcaagcataaagacaaactgttagagtttgacagaactagtattcgaaggacccaagtcattgatgatgagtcagattactttgccagtgattctaaccaatggttgtccaaacttgagcgggaaaccttgcagaagcgagaggaggagctgagagaacttcgacacgcctctcgactttctaagaaggtcaccattgactttgcaggaaggaagatcctggaagaagaaaattcactagcagagtatcatagcagactagatgagacaatacaggccattgccaatggaaccttgaaccagccactgaccaaattggatagatcttctgaagagcctttgggagttctggtaaatcccaacatgtaccagtcccctccccagtgggttgaccacacaggtgcagcctcacagaagaaggctttccgttcttcaggatttggactagagttcaactcatttcagcaccagttgcgaatccaggatcaagaatttcaggaaggctttgatggtggctggtgcctctctgtacatcagccctgggcttctctgcttgtcagagggattaaaagggtggagggcagatcctggtacaccccccacagaggacgactttggatagcagccacagctaaaaaaccctcccctcaagaagtctcagaactccaggctacatatcgtcttcttcgtgggaaagatgtggaatttcctaatgactatccgtcaggttgtcttctgggctgtgtggacctaattgactgcttgtcccagaagcaatttaaggagcagtttccagacatcagtcaagagtctgattctccatttgttttcatctgcaaaaatcctcaggaaatggttgtgaagtttcctattaaaggaaatccaaaaatctggaaattggattccaagatccatcaaggagcaaagaaggggttaatgaagcagaataaagctgtctgacccaggagaaaaggaactatacagcatagtggagttttgtgtactaaaattgctatctactggtcctttggaattgaagtagtagaaacctaaaggcttggcgtcaggcttgaatatctcagaacttaaactcttaccaaaatctgtatatttttcttaaggagtgggattcctactttatgtaatggggtcgaaatctttgaacacattatttataaaaacctgtttaaaaattctaaaaaaaaaaaaaaaaaa

SEQ ID NO: 488 - DNA, 5129 bp, Homo sapiens
ctccgacttcggacatggcgcacgctggcggtggcagcggtggcagcggtgccggcggccccgcgggccgggggctgagcggcgcccgctggggtcgctcgggctccgcaggccacgagaagctgccggtgcacgtagaagacgccctcacctatctggaccaggtgaagatccgctttggcagcgaccctgccacctacaacggcttcctggagatcatgaaggagttcaaaagccagagcatcgatactcctggagtcatcagacgtgtctcgcagctcttccacgagcaccctgacctcattgttggattcaacgcttttcttcccctcggatatagaatagacattcccaagaatggcaagttaaacatacagtcgcctctgacaagccaggagaattcgcacaaccacggggacggtgcagaggacttcaagcagcaggtgccgtataaagaggacaaaccccaggtgcccctggagtccgattccgtggaattcaacaacgccatcagctatgtgaataagattaaaacccgcttcctagaccacccagaaatctacaggtcattcctggagatcctgcacacgtaccagaaggagcagctgaacacgaggggccggccattccgaggcatgtctgaagaggaggtgttcaccgaggtggccaacctcttccggggccaggaggacctgctctcagagtttggacagttcctgcccgaagccaagcggtctctgttcacaggaaacgggccgtgcgagatgcacagcgtgcagaagaacgagcacgacaagaccccggagcacagcaggaagcgctcccggccctcgctcctccgccccgtgtctgcacccgccaagaaaaaaatgaaacttcgtggtaccaaagacctgtccatcgctgcagtggggaagtacgggactctgcaggaattttctttctttgacaaggtccgccgggtgctgaagagccaggaggtgtatgaaaacttcctccgctgcatcgcactcttcaaccaggagctggtgtctggctctgagctcctgcagctcgtcagcccatttctggggaaatttccagaactctttgcacagttcaagtccttcctgggggtaaaagagctgtccttcgcgccacccatgagcgacagatccggggacgggataagccgggaaattgattatgcatcctgcaagcgcataggatccagctaccgggcactccccaaaacctaccagcagcccaagtgcagtgggaggacagccatctgcaaggagcttgaccattggacacttctccagggttcgtggacagacgattactgcatgtccaagttcaagaatacctgctggattccaggatatagtgcaggggtactgaacgacacctgggtctccttcccttcctggtctgaggactccacgttcgtcagctccaagaagacaccgtacgaggagcagcttcaccgctgtgaggacgagcgcttcgagttagacgttgtcctggagacgaacctggccacaatccgtgtgttggaaagtgtgcagaagaagctgtctcggatggcgccggaagaccaggagaagttccggctggacgactccctgggaggcacgtcggaggtgatccagcgccgtgccatttatcgcatctatggcgacaaggccccggagatcatcgagagcctcaagaagaaccctgtcaccgctgtccccgttgtcctgaaaagactgaaggccaaggaagaggagtggcgggaggcccagcagggcttcaacaagatctggcgggagcagtatgagaaggcgtacctcaagtcccttgaccaccaggctgtgaacttcaagcagaacgacaccaaggccctgcgctccaagagcttgctcaacgagatcgagagcgtctacgacgagcaccaggagcagcactcggagggccgcagtgccccctctagcgagccgcacctcatctttgtgtacgaggaccggcagatcctggaggacgcagcagcgctcatcagctactacgtgaagcggcagccggccatccagaaggaggaccagggcaccatccaccagctgctgcaccagttcgtgcccagcctcttcttctctcagcagctggacctgggcgcctccgaggagtcagctgatgaggaccgggacagcccccaggggcagaccacagaccccagtgagcggaagaagccggcgccaggaccccacagtagccccccagaggagaagggggccttcggggatgccccggccactgagcagccacccctgccgcccccagccccgcacaagcccctggacgatgtctacagcctattttttgccaacaacaactggtacttcttcctgcgcctgcaccagaccctgtgctccaggctgctgaagatctaccgccaggcgcagaagcagcttctggagtatcggaccgagaaggagcgggagaagctgctgtgtgagggccgcagggagaagggcagcgaccccgccatggagctgcggctgaagcagcccagtgaagtggagctggaggagtactacccggccttcctggacatggtgcggagcctgctggagggcagcatcgaccccacgcagtacgaggacaccctacgcgagatgttcaccatccatgcctacgtgggcttcaccatggacaagctggtgcagaacattgcgcggcagctgcaccacctcgtgagcgatgacgtctgcctgaaggtggtggagctctacctgaacgagaagaagcggggtgccgctggtgggaacctgtcctcccgctgcgtccgcgctgctagggagaccagctaccagtggaaggctgagcgctgcatggccgacgagaactgcttcaaggtgatgttcctgcagcgcaaagggcaggtgatcatgaccatcgagctcctggacaccgaggaggcccagacggaggaccctgtggaggtccagcacctggctcggtacgtggagcagtatgtggggaccgagggcgcgtccagctcgcccactgagggcttcctcctgaaacctgtgttcctgcagaggaacctcaagaagttccgccgccggtggcagagcgagcaggcgcgggccctgcgcggtgaggccaggagctcctggaagcggctggtgggcgtggagagcgcctgcgacgtggactgccgcttcaagctcagcactcacaagatggtgttcatcgtgaactccgaggactacatgtaccgtcgcgggaccctctgccgggccaagcaggtgcagcccctggtcctgctccgccaccaccagcactttgaggagtggcacagccgctggctggaggacaatgtgacggtggaggcggctagcctggtgcaggactggctgatgggtgaggaggacgaggacatggtaccctgcaagacgctgtgtgagacagtgcacgtgcacggcctgcccgtgacccgctaccgcgtgcagtacagccgccgcccggcctcgccctgacccgccctcatgggcaccgggcaggcgcctcacagagcacagacgtgccctcggccttggtcgtgtcggggccgttttcttgaacgacgtgagaggcatctcccagcccctctgctgccggacagcgcactccagggcaggacgccgcccccgtggctcccggtctcctgtgggcctgctgtgtgccaaacctgagctacctgcacccgagccctggggctcagccccaccacaggggcgggtggacgtgctggccgaggaacaagcaatcatgtttgcgtccccgtccgtcacatgtgccaaatccctggcaggcagatggctcctgccccatattcttgccgtgtcttggaaaagtcacaggtgacagccctcctgaggcccacactttggagggggtccatgtccaagagaccctgacaaggaaggagttgagccctgggtaggcttgcttgaaaagtgagtccttccagaatattctcagagctgccagaaacatcatctgagggtttgggcatcagctctgcctggctggtgttcaggccctcagtcactttggaagtgagaagaacccttcagccaaacctttgggatcccattttgaagtccagagctggagcaggcgggcagtgccctgggagaccccgctctggataagacacccaaccccaactccagcagctggactctgggcccacaaggggagggaccccagccagtattccctcagagccggcacgaccctgctgtggggcggcgggcccagtcgtgttcctgcagtgggcaccctaggcgtatgtgtatacacgcacagatatttattcctttcgcttttagtggttgttatttctgtagcagccaagtcctgcggctccctggggctgagatctccctttgtggaactccgagagccgccctgacagtcccagccgccacccaaggagccccatccgcccacccaccctgggacccacgcggccactccagggatcattgttgtccttttgtgaggggctgaggcgactgtcccatggaggcatccaaggctttctgtgccaagaatcccaagtgactggggctggggaccacttctccaggcctctctccccgaccatgagagcccctggccctggcccctgcacaccagtaggcccagaataaccgccacccttgccatcctgcaacagctggactcaagtttccaggaagtggagatgtgtttctagaagtttcctgtggaacctggaggctcctgatgcctttgactccaggctgggcgattccgatgctgacccgtcctcctgggctccccacccccgctccccaagtgtcacacaggcactttgtacacatcctggttttctaagaagggaacttgccatcaagattcctgtaccaggcccacggccgtctcgggcagagccacctgggccccgggtgcagccggagaccccgccgagcccctcctcccagtattcccatccccgcatgcttctagggagcgcctcttttccgttcttgaggaatttctgttctggggcttgtccttcctttgcagctgttttgaatgtagttttccttttctatttatttgcacattaaagttaataattgaatattgacatc

SEQ ID NO: 489 - DNA, 1998 bp, Homo sapiens
cggcgcgatgcgcggagacccccgcgggggcggcggcggccgtgagccccgatgaggcccgagcgtccccggccgcgcggcagcgcccccggcccgatggagaccccgccgtgggacccagcccgcaacgactcgctgccgcccacgctgaccccggccgtgcccccctacgtgaagcttggcctcaccgtcgtctacaccgtgttctacgcgctgctcttcgtgttcatctacgtgcagctctggctggtgctgcgttaccgccacaagcggctcagctaccagagcgtcttcctctttctctgcctcttctgggcctccctgcggaccgtcctcttctccttctacttcaaagacttcgtggcggccaattcgctcagccccttcgtcttctggctgctctactgcttccctgtgtgcctgcagtttttcaccctcacgctgatgaacttgtacttcacgcaggtgattttcaaagccaagtcaaaatattctccagaattactcaaataccggttgcccctctacctggcctccctcttcatcagccttgttttcctgttggtgaatttaacctgtgctgtgctggtaaagacgggaaattgggagaggaaggttatcgtctctgtgcgagtggccattaatgacacgctcttcgtgctgtgtgccgtctctctctccatctgtctctacaaaatctctaagatgtccttagccaacatttacttggagtccaagggctcctccgtgtgtcaagtgactgccatcggtgtcaccgtgatactgctttacacctctcgggcctgctacaacctgttcatcctgtcattttctcagaacaagagcgtccattcctttgattatgactggtacaatgtatcagaccaggcagatttgaagaatcagctgggagatgctggatacgtattatttggagtggtgttatttgtttgggaactcttacctaccaccttagtcgtttatttcttccgagttagaaatcctacaaaggaccttaccaaccctggaatggtccccagccatggattcagtcccagatcttatttctttgacaaccctcgaagatatgacagtgatgatgaccttgcctggaacattgcccctcagggacttcagggaggttttgctccagattactatgattggggacaacaaactaacagcttcctggcacaagcaggaactttgcaagactcaactttggatcctgacaaaccaagccttgggtagcatcagttaacagttttatggacgattcctcagatgaaaagcttcagaaaagcatagtgacagctgaatttttagggcacttttccttaagaaatagaacttgatttttatttgttacaggtttccaatggccccataggaataagcaataatgtagactgataaacccttattttagtactaaagagggagccttgctatttcagtgggtataatttaaactttttaaagaaaatctgtacttttataaagatgtattttgtataacttaaataataatgctaaagtatactagggtttttttttcttgagaatgttactgcaatcatgttgtagtttgcacagacttttatgcataattcactttaaaaatatagaatatatggtctaatagttttttaaagcttttggactaaagtattccacaaatcttacctctttaggtcactgatggtcactccgattctgagtgccacattggtagactcctaaaatacagttgacaacttagccaattgcaactccagtgttgataattaaaatgaaatggtaaagcagcagactgtaaggtctttagagatttttttttaaggttcaggccgtaggttcctcaaggaatctcttaagttttgcccaaagactggtacttcctttcagtagggcgctaatgtatacacattaatgataagttgataacattaaaaatgtagctgacttatcctattaaacctcctctgctatgttcac

SEQ ID NO: 490 - DNA, 1608 bp, Homo sapiens
ctagatccggggaagggttttgcagaagtacccagaactgtgtccaaggtttcctcagatttgggctgttccgcagcggcaggtcccgggaaccaaggcaacagacatcttcctaggctcgcgagagcgcccccttgtcccacggctgctggggccccccagtagccatggctccggtgtccggctcacgcagcccggatagggaggcctcgggctcggggggaagacgtcgcagttcgtcgaagagtccgaagcccagcaaatctgcccgctccccgcggggccgccgctctcgctcgcactcttgctctcggtccggggaccggaatggactcgcccatcagctgggtggcctcagccaaggctcccgaaaccagtcctaccgctcacgctcgcggtcgcgttctagagagcggccctctgcgccccggggcatccccttcgcttctgcctcctcgtcagtctattacggcagctactcgcgcccctacgggagcgacaagccttggcctagcctcctcgacaaggagagggaggagagcctgcggcagaagagattaagtgagagagagagaattggagaattgggagctcctgaagtatggggactttctccaaagaatcctgaaccagattctgatgaacatacaccagtggaggatgaagagccaaagaaaagcactacttcagcttctacttcagaagaagaaaaaaagaagaagtctagccgttcaaaagaaaggtccaagaaaaggagaaagaaaaaatcatcgaaaagaaaacataagaagtattctgaagatagcgacagtgactctgattctgaaacagactccagtgatgaagataacaaaaggagagcaaagaaagccaagaaaaaggaaaagaagaagaaacacagatcgaagaaatataagaaaaagaggtctaagaagagcagaaaagagtccagtgattcaagctctaaagaatcccaagaagagtttctggaaaatccctggaaggatcgaacaaaggctgaagaaccatcagatttaattggcccagaggctccaaaaacacttacctctcaagatgataaacctttgaactatggccatgctctgttacctggtgaaggtgcagctatggctgaatatgtaaaagctggaaaacgtatcccacgaagaggtgaaattggcttgacaagtgaagaaattgcatcatttgaatgctcaggttatgtaatgagtggtagcaggcatcgccgaatggaggctgtgcgactgcgaaaagagaaccagatctacagtgctgatgagaagagagcccttgcatcctttaaccaagaagagagacgaaagagagagaacaagattctggccagttttcgagaaatggtttacagaaagaccaaagggaaggatgacaaataaagattttctgattgtccagaagacatttttaacaacaaaaaagaaagtctgggttccacacatacatagaaaaagattattatgttctgagaaagctttacagtgctactgtgccttctatttaattctttcagtccttcaataaaaagctgcttattgaaaaaaaaaaaaaaaaaaaaaaaaaaaaaaaaaa

SEQ ID NO: 491 - DNA, 1977 bp, Homo sapiens
cggggctgctcagtcctccaggcgtcggtactcagcggtgttggaacttcgttgcttgcttgcctgtgcgcgcgtgcgcggacatggcctcaaacgattatacccaacaagcaacccaaagctatggggcctaccccacccagcccgggcagggctattcccagcagagcagtcagccctacggacagcagagttacagtggttatagccagtccacggacacttcaggctatggccagagcagctattcttcttatggccagagccagaacacaggctatggaactcagtcaactccccagggatatggctcgactggcggctatggcagtagccagagctcccaatcgtcttacgggcagcagtcctcctaccctggctatggccagcagccagctcccagcagcacctcgggaagttacggtagcagttctcagagcagcagctatgggcagccccagagtgggagctacagccagcagcctagctatggtggacagcagcaaagctatggacagcagcaaagctataatccccctcagggctatggacagcagaaccagtacaacagcagcagtggtggtggaggtggaggtggaggtggaggtaactatggccaagatcaatcctccatgagtagtggtggtggcagtggtggcggttatggcaatcaagaccagagtggtggaggtggcagcggtggctatggacagcaggaccgtggaggccgcggcaggggtggcagtggtggcggcggcggcggcggcggtggtggttacaaccgcagcagtggtggctatgaacccagaggtcgtggaggtggccgtggaggcagaggtggcatggggccctcgggaccaaggatcacgtcatgactccgaacaggataattcagacaacaacaccatctttgtgcaaggcctgggtgagaatgttacaattgagtctgtggctgattacttcaagcagattggtattattaagacaaacaagaaaacgggacagcccatgattaatttgtacacagacagggaaactggcaagctgaagggagaggcaacggtctcttttgatgacccaccttcagctaaagcagctattgactggtttgatggtaaagaattctccggaaatcctatcaaggtctcatttgctactcgccgggcagactttaatcggggtggtggcaatggtcgtggaggccgagggcgaggaggacccatgggccgtggaggctatggaggtggtggcagtggtggtggtggccgaggaggatttcccagtggaggtggtggcggtggaggacagcagcgagctggtgactggaagtgtcctaatcccacctgtgagaatatgaacttctcttggaggaatgaatgcaaccagtgtaaggcccctaaaccagatggcccaggagggggaccaggtggctctcacatggggggtaactacggggatgatcgtcgtggtggcagaggaggctatgatcgaggcggctaccggggccgcggcggggaccgtggaggcttccgagggggccggggtggtggggacagaggtggctttggccctggcaagatggattccaggggtgagcacagacaggatcgcagggagaggccgtattaattagcctggctccccaggttctggaacagctttttgtcctgtacccagtgttaccctcgttattttgtaaccttccaattcctgatcacccaagggtttttttgtgtcggactatgtaattgtaactatacctctggttcccattaaaagtgaccattttagttaaattttgttcctcttcccccttttcactttcctggaagatcgatgtcccgatcaggaaggtagagagttttcctgttcagattaccctgcccagcaggaactggaatacagtgttcggggagaaggccaaatgatatccttgagagcagagattaaacttttctgtcatggggaaaaaaaaaa

SEQ ID NO: 492 - DNA, 2012 bp, Homo sapiens
cggggctgctcagtcctccaggcgtcggtactcagcggtgttggaacttcgttgcttgcttgcctgtgcgcgcgtgcgcggacatggcctcaaacgattatacccaacaagcaacccaaagctatggggcctaccccacccagcccgggcagggctattcccagcagagcagtcagccctacggacagcagagttacagtggttatagccagtccacggacacttcaggctatggccagagcagctattcttcttatggccagagccagaacacaggctatggaactcagtcaactccccagggatatggctcgactggcggctatggcagtagccagagctcccaatcgtcttacgggcagcagtcctcctaccctggctatggccagcagccagctcccagcagcacctcgggaagttacggtagcagttctcagagcagcagctatgggcagccccagagtgggagctacagccagcagcctagctatggtggacagcagcaaagctatggacagcagcaaagctataatccccctcagggctatggacagcagaaccagtacaacagcagcagtggtggtggaggtggaggtggaggtggaggtaactatggccaagatcaatcctccatgagtagtggtggtggcagtggtggcggttatggcaatcaagaccagagtggtggaggtggcagcggtggctatggacagcaggaccgtggaggccgcggcaggggtggcagtggtggcggcggcggcggcggcggtggtggttacaaccgcagcagtggtggctatgaacccagaggtcgtggaggtggccgtggaggcagaggtggcatgggcggaagtgaccgtggtggcttcaataaatttggtggccctcgggaccaaggatcacgtcatgactccgaacaggataattcagacaacaacaccatctttgtgcaaggcctgggtgagaatgttacaattgagtctgtggctgattacttcaagcagattggtattattaagacaaacaagaaaacgggacagcccatgattaatttgtacacagacagggaaactggcaagctgaagggagaggcaacggtctcttttgatgacccaccttcagctaaagcagctattgactggtttgatggtaaagaattctccggaaatcctatcaaggtctcatttgctactcgccgggcagactttaatcggggtggtggcaatggtcgtggaggccgagggcgaggaggacccatgggccgtggaggctatggaggtggtggcagtggtggtggtggccgaggaggatttcccagtggaggtggtggcggtggaggacagcagcgagctggtgactggaagtgtcctaatcccacctgtgagaatatgaacttctcttggaggaatgaatgcaaccagtgtaaggcccctaaaccagatggcccaggagggggaccaggtggctctcacatggggggtaactacggggatgatcgtcgtggtggcagaggaggctatgatcgaggcggctaccggggccgcggcggggaccgtggaggcttccgagggggccggggtggtggggacagaggtggctttggccctggcaagatggattccaggggtgagcacagacaggatcgcagggagaggccgtattaattagcctggctccccaggttctggaacagctttttgtcctgtacccagtgttaccctcgttattttgtaaccttccaattcctgatcacccaagggtttttttgtgtcggactatgtaattgtaactatacctctggttcccattaaaagtgaccattttagttaaattttgttcctcttcccccttttcactttcctggaagatcgatgtcccgatcaggaaggtagagagttttcctgttcagattaccctgcccagcaggaactggaatacagtgttcggggagaaggccaaatgatatccttgagagcagagattaaacttttctgtcatggggaaaaaaaaaa

SEQ ID NO: 493 - DNA, 1280 bp, Homo sapiens
tcgagagttgggttcagtcctggcccgttgtggggacggcacgcgggggaaggggaggggacggagaccgaagaacggaggtccttatgtttcttttctttccttaaatcttgcccggcctgaagaggccggaagttgcatctctggacaagtaaactctgagacctgggaatggcgggcgggacccgctcctcccttggggtctagaggagacccccggagatggtccctgatgagcagcgtgatggtggaaagctggactggtctcccgaaaggcgaagccgaggcttcttcctctgaacttttgggccagctgaggggcccacggacatagggcacccacaataggcgtgtgtctgctgtgtgtttgtgttcggccgtcctgcttctctgcttccacacgtacacatgcccctgtgttactttggttcatcttctgtactctgtcagttttctgctggtcagaacatctgtgactgtgacagagctgtccaggattgcagtggataggaatttcttcacatggctcctggagaagtgaccatcacagttcgcctcatccgttcctttgaacatcgcaatttcaaacctgtagtgtatcacggagtgaatttggaccaaactgtaaaggaatttatcgtatttctaaagcaagatgtccctttaaggaccaacctgccaccaccattcagaaattataaatatgatgcactaaagattattcatcaagcacataaatcaaagacaaatgaacttgtgttgagtttggaagatgacgaaagactcctgctgaaagaagacagcactctgaaagcagctggaatcgccagtgaaactgaaattgcattcttctgtgaagaagattataggaactacaaagctaatcccatttcatcctggtgaaaacatctcgagggcttcctttttgcatacctgtattaagctctttattccactgctgagtttttgaaattgacaaacaaatcttaaaaaattaatcccaggctatactctttgagctaaaatctggttatttctttctcttcaggtctttctttccttctctctttctttttctttgttgttgtaaaataatatattatgagaaaaacatttgatccttttaaagggaaataaattgttattaaaaattaaaaaaaaaaaaaaaaaaaaaaaaaaaaaaaaaaaaaaaaaaaaaaaaaaaaaaaaaaaaaaaaaaaaaaaaaaaaaaaaaaaaaaaaaaaaaaaaaaaaaaaaaaaaaaaaaaaaaaaaaaaaaaa

SEQ ID NO: 494 - DNA, 2697 bp, Homo sapiens
gctgagcagtcaacagcatttcttgttccaagatcacccttctgagtacctctctggctgccaaattgccagggccttcacagtttgattccattctcagctccaagcattaggtaaacccaccaagcaatcctagcctgtgatggcgtttgacgtcagctgcttcttttgggtggtgctgttttctgccggctgtaaagtcatcacctcctgggatcagatgtgcattgagaaagaagccaacaaaacatataactgtgaaaatttaggtctcagtgaaatccctgacactctaccaaacacaacagaatttttggaattcagctttaattttttgcctacaattcacaatagaaccttcagcagactcatgaatcttacctttttggatttaactaggtgccagattaactggatacatgaagacacttttcaaagccatcatcaattaagcacacttgtgttaactggaaatcccctgatattcatggcagaaacatcgcttaatgggcccaagtcactgaagcatcttttcttaatccaaacgggaatatccaatctcgagtttattccagtgcacaatctggaaaacttggaaagcttgtatcttggaagcaaccatatttcctccattaagttccccaaagacttcccagcacggaatctgaaagtactggattttcagaataatgctatacactacatctctagagaagacatgaggtctctggagcaggccatcaacctaagcctgaacttcaatggcaataatgttaaaggtattgagcttggggcttttgattcaacggtcttccaaagtttgaactttggaggaactccaaatttgtctgttatattcaatggtctgcagaactctactactcagtctctctggctgggaacatttgaggacattgatgacgaagatattagttcagccatgctcaagggactctgtgaaatgtctgttgagagcctcaacctgcaggaacaccgcttctctgacatctcatccaccacatttcagtgcttcacccaactccaagaattggatctgacagcaactcacttgaaagggttaccctctgggatgaagggtctgaacttgctcaagaaattagttctcagtgtaaatcatttcgatcaattgtgtcaaatcagtgctgccaatttcccctcccttacacacctctacatcagaggcaacgtgaagaaacttcaccttggtgttggctgcttggagaaactaggaaaccttcagacacttgatttaagccataatgacatagaggcttctgactgctgcagtctgcaactcaaaaacctgtcccacttgcaaaccttaaacctgagccacaatgagcctcttggtctccagagtcaggcattcaaagaatgtcctcagctagaactcctcgatttggcatttacccgcttacacattaatgctccacaaagtcccttccaaaacctccatttccttcaggttctgaatctcacttactgcttccttgataccagcaatcagcatcttctagcaggcctaccagttctccggcatctcaacttaaaagggaatcactttcaagatgggactatcacgaagaccaacctacttcagactgtgggcagcttggaggttctgattttgtcctcttgtggtctcctctctatagaccagcaagcattccacagcttgggaaaaatgagccatgtagacttaagccacaacagcctgacatgcgacagcattgattctcttagccatcttaagggaatctacctcaatctggctgccaacagcattaacatcatctcaccccgtctcctccctatcttgtcccagcagagcaccattaatttaagtcataaccccctggactgcacttgctcgaatattcatttcttaacatggtacaaagaaaacctgcacaaacttgaaggctcggaggagaccacgtgtgcaaacccgccatctctaaggggagttaagctatctgatgtcaagctttcctgtgggattacagccataggcattttctttctcatagtatttctattattgttggctattctgctattttttgcagttaaataccttctcaggtggaaataccaacacatttagtgctgaaggtttccagagaaagcaaataagtgtgcttagcaaaattgctctaagtgaaggaactgtcatctgctggtgaccagaccagacttttcagattgcttcctggaactgggcagggactcactgtgcttttctgagcttcttactcctgtgagtcccagagctaaagaaccttctaggcaagtacaccgaatgactcagtccagagggtcagatgctgctgtgagaggcacagagccctttccgcatgtggaagagtgggaggaagcagagggagggactgggcagggactgccggccccggagtctcccacagggaggccattccccttctactaccgacatccctcccagcaccacacaccccgcccctgaaaggagatcatcagcccccacaatttgtcagagctgaagccagcccactacccacccccactacagcattgtgcttgggtctgggttctcagtaaatgtagccatttgagaaacttacttggggacaaagtctcaatccttattttaaatgaaaaaagaaaagaaaagcataataaatttaaaagaaaagg

SEQ ID NO: 495 - DNA, 3028 bp, Homo sapiens
cgcaccccggcaagcagcagcgggccgcgacgcccagcctgccagtgagctgcgacgggcacaccccggagcgtcggcgactgcggacaggttagagtgggggcaggggcgggcgcgggagcagcccagggccagagagggagcccgagccaggccatctccaaccatgtccgacgaggcctcggccatcacttcctacgagaagtttctaacccccgaggagcccttcccactcctgggacctcctcgcggggtgggcacctgcccgagcgaggagccgggctgcctggacatcagcgacttcggctgccagctgtcctcctgccatcgcaccgacccgctccaccgcttccacaccaacaggtggaacctaacttcttgtggaacaagtgttgccagctcagaaggcagtgaggagctgttttcatctgtgtctgttggagatcaagatgattgctattccctgttagatgatcaggacttcacttcttttgatttatttcctgaggggagtgtctgcagtgatgtctcttcttctattagcacttactgggattggtcagatagcgagtttgaatggcagttaccaggcagtgacattgccagtgggagtgatgtactttctgatgtcatacccagtattccaagttcaccttgcctgcttcctaaaaagaaaaacaagcaccggaatttagatgaactcccttggagtgcaatgacaaatgatgagcaggtggaatatattgagtatctgagtcggaaagtgagtactgagatgggtcttcgggagcaacttgatattattaagatcattgatccttctgctcaaatctcccctacagacagtgagtttattattgaacttaactgtctcacagatgaaaaactgaagcaggtcagaaactatatcaaggaacatagccctcgccaacggcctgcaagagaggcctggaagagaagcaactttagttgtgcaagcaccagtggagtgagcggtgccagtgccagcgccagcagcagcagtgccagcatggtcagttctgcaagcagcagtgggtccagtgttggaaactctgcttcaaactccagtgccaacatgagtcgagcacacagtgacagcaacctgtctgcaagtgcagcagagcggattcgggattcaaaaaagcgatccaagcagcggaagttacagcagaaggccttccgcaagaggcagctgaaggagcagaggcaggcccggaaggagaggctcagtgggctcttccttaacgaagaggtgctgtccttgaaagtgactgaggaagaccatgaagcagatgttgatgttttgatgtaataagggtgaatttatcaacgttctttgtgagcattaaaatactccatccttatgggtttacatgcatcttgaccaaaattttggttagggctgtgctgatgtaccattaataatttaagccagtggttcttggcaggtgatcccaagacctgcagcttcagcatcacttgagaagttgttaggaatgcatactagtgggccccgcccccagacatagtgaatcagaaaccaacagggaggcgcctagcattgtttttttaacaagtgctgggttattctgatgcacagtctagtttaagaaccactactttgggtaaacgttttgactgtttaaagtttatggcggtgaagtgggcgtcttcaaagactagtacttacacagtttagaagatttcaaggtactgctgacagtagtttattatgtcagtatacatacatgtgtagagatcataatttagttcccttcttaatgttacaatttcttagtttacttttcctaaagggccatagcataattcttgattcctggtggaaatcttttctgaggtgtgggggtgggcaaggtgtggattgctgtttacgatagtgccttcattagttttagttctgtctgttttcattcattattgactcaaaggtattagaacaggcccttatctttttcctattagatttatttttgttttttactttatgtaagttcagaatccttttttaagtgatgactactgatgaaataatgttactagtagctgaattttagacttgatgctatgttgattaatatttaaatggtgaaagtaattaggcaaaataagcaattctgcttttctgttgctttcagaatttttaggctgtaaaattgtctcaggcaggaagtcagtctatatctctctcaagttcttattgtaggtcatttttttttcagcacagctctaatttttaaatatttggtataacagcttctggcatgtgacctagttaatgttgaaaattaactgatgaaaacccttgtagatctgctaaacttctctataaattgctagaaatatacagagcaatgagatatagaaaacaccttagcttgttggttattaatagagctctaattttaactgtgaaatcatggagtttctttaaatgttttcctagagtgttcgttatcatgaacattagaaatagcattattccttttcttctaccacatgtcttgaacattcacatgggttaaagaagatggaaactgatactactgacaatcaagctgctttctgactttcataattttctttatattgtggatagcattttgaaggtgaccgtgattctgtaggaagagctgtaatcaatatttttcaaactctaagagtacagaggttagtaagatttctttttttttactttttgttacgtcaagtagcttattaagaaaaagattcatgacttaaactcttaattctcagttgatacaaaggcttataatcatgtgttttaaaattttgatttcattttcgttccttgaaggttaaagaatggaaactggggataaaaattaatacactgcagctttgccaaggtctgtgatatggttgtaaccttttaaagactactaaagtcataatttgaaatttttactaaaataaaacatatgtgtctatggttttcaaaaaaaaaaaaaaaaaaaaaaaaaaaaaa

SEQ ID NO: 496 - DNA, 1891 bp, Homo sapiens
ccgaggctataagagggcgcacaagtggcgcggcgcaggagccgccgccagtggagggccgggcgctgcggccgcggccggggcgggcgcagggccgagcggacgggggggcgcgggccccccgggaggccgcggccactcccccccgggccggcgcggcgggggaggcggaggatggaaacacccttctacggcgatgaggcgctgagcggcctgggcggcggcgccagtggcagcggcggcacgttcgcgtccccgggccgcttgttccccggggcgcccccgacggccgcggccggcagcatgatgaagaaggacgcgctgacgctgagcctgagtgagcaggtggcggcagcgctcaagcctgcgcccgcgcccgcctcctacccccctgccgccgacggcgcccccagcgcggcaccccccgacggcctgctcgcctctcccgacctggggctgctgaagctggcctcccccgagctcgagcgcctcatcatccagtccaacgggctggtcaccaccacgccgacgagctcacagttcctctaccccaaggtggcggccagcgaggagcaggagttcgccgagggcttcgtcaaggccctggaggatttacacaagcagaaccagctcggcgcgggccgggccgctgccgccgccgccgccgccgccggggggccctcgggcacggccacgggctccgcgccccccggcgagctggccccggcggcggccgcgcccgaagcgcctgtctacgcgaacctgagcagctacgcgggcggcgccgggggcgcggggggcgccgcgacggtcgccttcgctgccgaacctgtgcccttcccgccgccgccacccccaggcgcgttggggccgccgcgcctggctgcgctcaaggacgagccacagacggtgcccgacgtgccgagcttcggcgagagcccgccgttgtcgcccatcgacatggacacgcaggagcgcatcaaggcggagcgcaagcggctgcgcaaccgcatcgccgcctccaagtgccgcaagcgcaagctggagcgcatctcgcgcctggaagagaaagtgaagaccctcaagagtcagaacacggagctggcgtccacggcgagcctgctgcgcgagcaggtggcgcagctcaagcagaaagtcctcagccacgtcaacagcggctgccagctgctgccccagcaccaggtcccggcgtactgagtcgggcatggcggccacctccaaggggcgggctcgcgggggggtgtcgtgggcgccccggacttggagagggtgcggccctccacccccccctccccgagtgtgcccaggaactcagagaggcgcggccccggggattcccccccgaggtgcccaggactcggaaggggcgccccggactcgacaagctggaccccctgctcccgggggcgagcgcatgacccccccgccctcgcgctgcctctttcccccgcgcggccgccccgtgttgcacaaacccgcgcgtctcggctgcccctttgtacaccgcgccgcaagggggctccgagggggcgcacgtcaaaccctgcctttcctttacttttactttttttttttctttggaagagagaagaacagagtgttcgattctgccctatttatgtttctactcggggaacaaacgttggttgtgtgtgtgtgtgttttcttgtgttggttttttaaagaaatgggaagaagaaaaaaaaattctccgcccctttcctcgatctcgctcccccttcggtctttcgaccgtccccccctcccctttttttgttctgttttgttttgttttgctacgagtccacattcctgtttgtaatccttggttcgcccggttttctgttttcagtaaagtctcgttacgcca

SEQ ID NO: 497 - DNA, 1456 bp, Homo sapiens
cctgctcgggcgcgggcggcggcgcggccatgaagctgaagctgaagaacgtgtttctcgcctacttcctggtgtcgatcgccggcctcctctacgcgctggtacagctcggccagccatgtgactgccttcctcccctgcgggcagcagccgagcagctacggcagaaggatctgaggatttcccagctgcaagcggaactccgacggccaccccctgcccctgcccagccccctgaacccgaggccctgcctactatctatgttgttacccccacctatgccaggctggtacagaaggcagagctggtacgactgtcccagacactgagcctggtgccccggctgcattggctgctggtggaggatgctgagggtcccaccccgctggtctcagggctgctggctgcctctggcctcctcttcacacacctggtggtcctcacgcccaaagcccagcggcttcgggagggcgagcctggctgggttcatccccgtggtgtcgagcagcggaacaaggccctggactggctccggggcagagggggtgctgtgggtggggagaaggacccaccaccaccagggacccaaggagtcgtctactttgctgacgatgacaacacctacagccgggagctgtttgaggagatgcgctggacccgtggtgtctcagtgtggcctgtggggctggtgggcggcctgcgattcgagggccctcaggtacaggacggccgggtagtgggcttccacacagcatgggagcccagcaggcccttccctgtggatatggctggatttgccgtggccctgcccttgctgttagataagcccaatgcccaatttgattccaccgctccccggggccacctggagagcagtcttctgagccaccttgtggatcccaaggacctggagccacgggctgccaactgcactcgggtactggtgtggcatactcggacagagaagcccaagatgaagcaggaggagcagctgcagcggcagggccggggctcagacccagcaattgaggtgtgatggcggccccaccccaactaccacctcttttcaggcacagaccttgtgggactgggccccaggcctgcccaggatgtggttttccaagtcctgacccttggagccagaagtggcccctctgcccctccaggcccagggcatggtcctgctgcttcacccctcccctagcctgccgtgtggcactgcccacaggctggggacaagcagcccttgtgttgagtcaggttggccctgtctagggtggaacagaaggacagatggacccaggagggagggcagctgagtaactgggtaacttattggggctgggcatgcactggggggctggaggagctgggctggacccttcccacctgagcatgctgacccccttcctacctccagaataaagaatctcaacctggaaaaaaaaaaaaaaa

SEQ ID NO: 498 - DNA, 3747 bp, Homo sapiens
cagcagccgcagccgcctcgcgcccggtcccgcggtcgcagctccagccgcctcctccgcgcagccgccgcctcagctgctcgctctgtgggtcggtcctctccggcacttgggctccagtcgcgccctccaagcccttcaggccgccccagtgtcctcctccttctccggccagacccagccccgcgaagatggtggaccgcgagcaactggtgcagaaagcccggctggccgagcaggcggagcgctacgacgacatggccgcggccatgaagaacgtgacagagctgaatgagccactgtcgaatgaggaacgaaaccttctgtctgtggcctacaagaacgttgtgggggcacgccgctcttcctggagggtcatcagtagcattgagcagaagacatctgcagacggcaatgagaagaagattgagatggtccgtgcgtaccgggagaagatagagaaggagttggaggctgtgtgccaggatgtgctgagcctgctggataactacctgatcaagaattgcagcgagacccagtacgagagcaaagtgttctacctgaagatgaaaggggactactaccgctacctggctgaagtggccaccggagagaaaagggcgacggtggtggagtcctccgagaaggcctacagcgaagcccacgagatcagcaaagagcacatgcagcccacccaccccatccgattaggcctggctcttaactactccgtcttctactatgagatccagaacgccccagagcaagcgtgccacttggccaagaccgcgttcgacgacgccatcgccgagcttgacaccctcaacgaggactcctacaaggactccacgctcatcatgcagctcctccgcgacaacctcacgctctggacgagcgaccagcaggacgacgatggcggcgaaggcaacaattaaggccccaggggaactggcagcgcacgcggatgctactactgcagtctttatttttttcccatgagttgggggtcgggtgggggagggaaagggagggatgaccttcccagggagaaacccacgacctgtcctgtctttgatcgcctctttgacatttttgccaaaataccactagtggaaagtcaggctagctgtgctggtattggaatagcagcctcacactggcgtctggactgttctgtagattcatgcaagtggagctgtctgtctctaatttaacttattgctagataatagggttttcagatgaaaagaaaacttaaagaggaatggccctcattcagtaagttctgtggttccagtaaggatttttatgtacatacgctctcgtctctcgttttgggtactttctatctcatctgtctcggctctgcatgttttccagggtgtagcctacagacatggaacagtgtaaatcccagactgacagacttagaacctgaggtctcattcatccttatggtttaggccttgccagttttccgaagtctctgattagttgacagtattaacactaaattgcagtttacagtatttctacattacagccatatgtaacatcaagccatcgattgtgtacttttcctttgctagttgtttgggctttaacatccttattcagccttatccaggttggttttgctgttgatcggtctcctaggctaaatgagaatgaaagcgacttcaggtttttggttcataggtgctcggcaggtggctgtgggattttttttttttttggtccttctttcctcttaacgtaaatccaccaccaaaattattaatcctcttgagagaaacgtgaaacgccacaaaaatagagaaaattcaggtctgtatgtcatggatcgtgttggtattttcagagaacatcccgcttctgaagctgctgcagctccctcctcagggatcacactgccgtcacccactctgcactggggcgtttcctactgcgcctcgtgctggcggacgcagctgggtgcagaagctgtggggtcggagaggcgtttggagaaggtctgtggtgcagtgtgtgaaaattcaggtgctagaagcctactggtagaaaaacccaaaaggaagagctatatccttaaccattctgtccaatttcgggagccttgtcagtgtgtcagtttttcctccccgaagacactccttccccaagtaattgtaggaagataaaaaaactgttaccagataacaaacactgaactcctatttgaccagaactttttcctctcgagatagttttttctttttaatgaaaaaagcataggaattggagattggcttgtctcacgcagccagtgcacatttggaattgacggaaacaacgttgctatttccacccatttgttttcggcagccttaaggccctcattctcatttcgggtgaatctgtctatctgtgaacgtggcccgcatgtgcattcttttttttatatatataaagtcagtgacgaggaactcccgagacgtgtaatgacaccacacttgttttctttgtttctttgttttatttaggcaagaagaggtgtgagtaattgaggaaaaactgacagatgcttttgctaataccaaaattgagcttacaattaggaactgagtatgtgtaacaggatacaggtgacagtgaagatagaagaaccacgatgaccacagactcaatgtgctctgtaacatcgcacagtttacccagcatgactttccttaggaggccccctcctcacgctagagtaaaagtcccagttaagtgaagcctaccagaagaactagtagaagaagctttgccgcttttgtgcctctcacaggcgcctaaagtcattgccatgggaggaagacgatttggggggggagggggggggcagggtaggtggggctttccctaatttatcttcatgtccagtgagcagtgttgcgtttttccttgtagcatttggaaatgatttactggaattacaaaacctatttttcctttaaatttcagctttggctctggctgctttttagaataatgcaagataaaaatcacacctgagggctgaaaacggagagggaatgggagacttgatatttaagcagcttgaatggtttttcttttctttatttttaaagaaatgcacttgcctatgatactgtctctccagtgaaatgattactcctccattactctattgatacaatattgtgcatgctagtgttgtatttctatacagtagcttgaaattgattaacttatactgtaggtgttatgtattcctatgacaaaaaaaattaagtcttcaaattttttaaaggttttttttttttaatttaatttttccttttgggggtaaagtttgctctaccaaatagtgattgtaacaaattgatctgttttggatgttgctatagtgacatgcagttatatattttgtttttaaaagggggggagcaaaagaaacaccagtgttagcttaatcttaatgtctggtgtttgtcatggtgaaattataactattacagtgttggagaacaacaaatatgttctctgaatgagcctttgtgctttttgtcatgttatgcagtgaactatttttaaggtctaatcagtgattatttttccagctccgtgtttctctaaggaattatttcacacacggaccatctttagcagtttcctcagtgatggaatatcatgaatgtgagtcattatgtagctgtcgtacattgagcaaataaacttacagatctgaaaaaaaaaaaaaaa

SEQ ID NO: 499 - DNA, 953 bp, Homo sapiens
agtccctgcattgcgcgcgacccggcggcgggacaggcttgctgcttcctcctcctcggcctcaccattccagaccaaaattgaaaaaatggttgacctcacccaggtaatggatgatgaagtattcatggcttttgcatcctatgcaacaattattctttcaaaaatgatgcttatgagtactgcaactgcattctatagattgacaagaaaggtttttgccaatccagaagactgtgtagcatttggcaaaggagaaaatgccaagaagtatcttcgaacagatgacagagtagaacgtgtacgcagagcccacctgaatgaccttgaaaatattattccatttcttggaattggcctcctgtattccttgagtggtcccgacccctctacagccatcctgcacttcagactatttgtcggagcacggatctaccacaccattgcatatttgacaccccttccccagccaaatagagctttgagtttttttgttggatatggagttactctttccatggcttacaggttgctgaaaagtaaattgtacctgtaaagaaaatcatacaactcagcatccagttggctttttaagaattctgtacttccaatttataatgaatactttcttagattttaggtaggaggggagcagaggaattatgaactggggtaaacccattttgaatattagcattgccaatatcctgtattcttgttttacatttggattagaaatttaacatagtaattcttaagtcttttgtctgatttttaaagtactttcttataaatttggatcatgttatgatttgtaacattcacacaacacctcacttttgaatctataaaagaattgcacgtatgagaaacctatatttcaatactgctgaaacagacatgaaataaagaatttaaagaatcaaaaaaaaaaaaaaaaaaaaaaaaaaaaa

SEQ ID NO: 500 - DNA, 917 bp, Homo sapiens
gaattcaagtcctaaagcctacagttttgaatactactgaaatgacaagttattccagaccaaaattgaaaaaatggttgacctcacccaggtaatggatgatgaagtattcatggcttttgcatcctatgcaacaattattctttcaaaaatgatgcttatgagtactgcaactgcattctatagattgacaagaaaggtttttgccaatccagaagactgtgtagcatttggcaaaggagaaaatgccaagaagtatcttcgaacagatgacagagtagaacgtgtacgcagagcccacctgaatgaccttgaaaatattattccatttcttggaattggcctcctgtattccttgagtggtcccgacccctctacagccatcctgcacttcagactatttgtcggagcacggatctaccacaccattgcatatttgacaccccttccccagccaaatagagctttgagtttttttgttggatatggagttactctttccatggcttacaggttgctgaaaagtaaattgtacctgtaaagaaaatcatacaactcagcatccagttggctttttaagaattctgtacttccaatttataatgaatactttcttagattttaggtaggaggggagcagaggaattatgaactggggtaaacccattttgaatattagcattgccaatatcctgtattcttgttttacatttggattagaaatttaacatagtaattcttaagtcttttgtctgatttttaaagtactttcttataaatttggatcatgttatgatttgtaacattcacacaacacctcacttttgaatctataaaagaattgcacgtatgagaaacctatatttcaatactgctgaaacagacatgaaataaagaatttaaagaatgaaaaaaaa

SEQ ID NO: 501 - DNA, 987 bp, Homo sapiens
ggcagatggaagacttgggggggtctctgccagctggaagtgcttggctccacttagcagctaaacttagcttttcaatcgatcgcttttgaaagggaattgtatttctgtccccgtgcggattccagaccaaaattgaaaaaatggttgacctcacccaggtaatggatgatgaagtattcatggcttttgcatcctatgcaacaattattctttcaaaaatgatgcttatgagtactgcaactgcattctatagattgacaagaaaggtttttgccaatccagaagactgtgtagcatttggcaaaggagaaaatgccaagaagtatcttcgaacagatgacagagtagaacgtgtacgcagagcccacctgaatgaccttgaaaatattattccatttcttggaattggcctcctgtattccttgagtggtcccgacccctctacagccatcctgcacttcagactatttgtcggagcacggatctaccacaccattgcatatttgacaccccttccccagccaaatagagctttgagtttttttgttggatatggagttactctttccatggcttacaggttgctgaaaagtaaattgtacctgtaaagaaaatcatacaactcagcatccagttggctttttaagaattctgtacttccaatttataatgaatactttcttagattttaggtaggaggggagcagaggaattatgaactggggtaaacccattttgaatattagcattgccaatatcctgtattcttgttttacatttggattagaaatttaacatagtaattcttaagtcttttgtctgatttttaaagtactttcttataaatttggatcatgttatgatttgtaacattcacacaacacctcacttttgaatctataaaagaattgcacgtatgagaaacctatatttcaatactgctgaaacagacatgaaataaagaatttaaagaatgaaaaaaaa

SEQ ID NO: 502 - DNA, 909 bp, Homo sapiens
tcgtgacaaagcaaattgtctggtatcatgaatttggaacaccattccagaccaaaattgaaaaaatggttgacctcacccaggtaatggatgatgaagtattcatggcttttgcatcctatgcaacaattattctttcaaaaatgatgcttatgagtactgcaactgcattctatagattgacaagaaaggtttttgccaatccagaagactgtgtagcatttggcaaaggagaaaatgccaagaagtatcttcgaacagatgacagagtagaacgtgtacgcagagcccacctgaatgaccttgaaaatattattccatttcttggaattggcctcctgtattccttgagtggtcccgacccctctacagccatcctgcacttcagactatttgtcggagcacggatctaccacaccattgcatatttgacaccccttccccagccaaatagagctttgagtttttttgttggatatggagttactctttccatggcttacaggttgctgaaaagtaaattgtacctgtaaagaaaatcatacaactcagcatccagttggctttttaagaattctgtacttccaatttataatgaatactttcttagattttaggtaggaggggagcagaggaattatgaactggggtaaacccattttgaatattagcattgccaatatcctgtattcttgttttacatttggattagaaatttaacatagtaattcttaagtcttttgtctgatttttaaagtactttcttataaatttggatcatgttatgatttgtaacattcacacaacacctcacttttgaatctataaaagaattgcacgtatgagaaacctatatttcaatactgctgaaacagacatgaaataaagaatttaaagaatgaaaaaaaa

SEQ ID NO: 503 - DNA, 2841 bp, Homo sapiens
agagggcgtcttcacgcaggcaccgagaagctcccactagtgtatgccttaatggtgccgctcttgtccgcgtctacgcttgggaccttggcttctgacttggagagtgtacagctctgcccgacggcaacccagcttgggaagagaagccccagcgtgggctggggctcaaggcgcaggaaggccgagcccggcgcggacgcaggcggctccgggcgggctcagcacccccaggcaccgtctcctagtgaccgcggcgctcgcgggcctggcggccgttgtccgggcgactgcgcagcgcgggcacccccgcggcccctcccctgggcgcgcgcgcgacctgggtgccatggcggcagcggcggtgacaggccagcggcctgagaccgcggcggccgaggaggcctcgaggccgcagtgggcgccgccagaccactgccaggctcaggcggcggccgggctgggcgacggcgaggacgcaccggtgcgtccgctgtgcaagccccgcggcatctgctcgcgcgcctacttcctggtgctgatggtgttcgtgcacctgtacctgggtaacgtgctggcgctgctgctcttcgtgcactacagcaacggcgacgaaagcagcgatcccgggccccaacaccgtgcccagggccccgggcccgagcccaccttaggtcccctcacccggctggagggcatcaaggtggggcacgagcgtaaggtccagctggtcaccgacagggatcacttcatccgaaccctcagcctcaagccgctgctcttcgaaatccccggcttcctgactgatgaagagtgtcggctcatcatccatctggcgcagatgaaggggttacagcgcagccagatcctgcctactgaagagtatgaagaggcaatgagcactatgcaggtcagccagctggacctcttccggctgctggaccagaaccgtgatgggcaccttcagctccgtgaggttctggcccagactcgcctgggaaatggatggtggatgactccagagagcattcaggagatgtacgccgcgatcaaggctgaccctgatggtgacggagtgctgagtctgcaggagttctccaacatggaccttcgggacttccacaagtacatgaggagccacaaggcagagtccagtgagctggtgcggaacagccaccatacctggctctaccagggtgagggtgcccaccacatcatgcgtgccatccgccagagggtgctgcgcctcactcgcctgtcgcctgagatcgtggagctcagcgagccgctgcaggttgttcgatatggtgaggggggccactaccatgcccacgtggacagtgggcctgtgtacccagagaccatctgctcccataccaagctggtagccaacgagtctgtacccttcgagacctcctgccggcaagtatctcccaactgggggctgccttcaatcctcagaccaggaacacccatgacacaggcacagccctgcactgtgggcgtgccccttggcatggggccaggagatcactgggttatcccggttagtgatgccctcacctctccccacaagttgtttacccaatggctggaaaggggtggctactggtcatcgtgaccactggagtcaacacagactgatgtacccacagacaccaaaacttgccccctgagttctgaagcaaggggcaaggctgggcccctagcttgtcctgcccattcctccaggtgttgatcttgattccacttagagaagctgaagctgtgcctccctcccctgtcaagccagttctttcctcttcaggtggctgttctggcccagccccttcccatccccaaggagcccttcagcgcgccctgttgcttctgctagcctacctttccctgccaggcccttgctcagggccatggcatttaactaagtgcacctgtgatcttggccaaaaaaccattgcaactcacagtaagagactgggtttcggggaaggaggggctagggacattttggcactggcctgccctattgtctcccatcctagtctgtcctggtccctggcaacaggaacctgggcagcttatcctgcccacaggtaagcccctgggagcatccacaactggggacctgctcagtgccccccctgccttacagctacatgacagtgctgttttatttgaacaacgtcactggtgggggcgagactgttttccctgtagcagataacagaacctacgatgaaatgagtctgattcaggatgacgtggacctccgtgacacacggaggcactgtgacaagggaaacctgcgtgtcaagccccaacagggcacagcagtcttctggtacaactacctgcctgatgggcaaggttgggtgggtgacgtagacgactactcgctgcacgggggctgcctggtcacgcgcggcaccaagtggattgccaacaactggattaatgtggaccccagccgagcgcggcaagcgctgttccaacaggagatggcccgccttgcccgagaagggggcaccgactcacagcccgagtgggctctggaccgggcctaccgcgatgcgcgcgtggaactctgagggaagagttagccccggttcccagccgcgggtcgccagttgcccaagatcaggggtccggctgtccttctgtcctgctgcagactaaaggtctggccaatgtcttgccccaccccgccagccgcgatacggcgcagttcctatattcatgttatttattgtgtactgactccatctgccccgtcaaataaaaaaccacaaggttcgagccgccgggcccgacaaactccgggtcggcgaaaaaaaaaaaaaa

SEQ ID NO: 504 - DNA, 2294 bp, Homo sapiens
agagggcgtcttcacgcaggcaccgagaagctcccactagtgtatgccttaatggtgccgctcttgtccgcgtctacgcttgggaccttggcttctgacttggagagtgtacagctctgcccgacggcaacccagcttgggaagagaagccccagcgtgggctggggctcaaggcgcaggaaggccgagcccggcgcggacgcaggcggctccgggcgggctcagcacccccaggcaccgtctcctagtgaccgcggcgctcgcgggcctggcggccgttgtccgggcgactgcgcagcgcgggcacccccgcggcccctcccctgggcgcgcgcgcgacctgggtgccatggcggcagcggcggtgacaggccagcggcctgagaccgcggcggccgaggaggcctcgaggccgcagtgggcgccgccagaccactgccaggctcaggcggcggccgggctgggcgacggcgaggacgcaccggtgcgtccgctgtgcaagccccgcggcatctgctcgcgcgcctacttcctggtgctgatggtgttcgtgcacctgtacctgggtaacgtgctggcgctgctgctcttcgtgcactacagcaacggcgacgaaagcagcgatcccgggccccaacaccgtgcccagggccccgggcccgagcccaccttaggtcccctcacccggctggagggcatcaaggtggggcacgagcgtaaggtccagctggtcaccgacagggatcacttcatccgaaccctcagcctcaagccgctgctcttcgaaatccccggcttcctgactgatgaagagtgtcggctcatcatccatctggcgcagatgaaggggttacagcgcagccagatcctgcctactgaagagtatgaagaggcaatgagcactatgcaggtcagccagctggacctcttccggctgctggaccagaaccgtgatgggcaccttcagctccgtgaggttctggcccagactcgcctgggaaatggatggtggatgactccagagagcattcaggagatgtacgccgcgatcaaggctgaccctgatggtgacggagtgctgagtctgcaggagttctccaacatggaccttcgggacttccacaagtacatgaggagccacaaggcagagtccagtgagctggtgcggaacagccaccatacctggctctaccagggtgagggtgcccaccacatcatgcgtgccatccgccagagggtgctgcgcctcactcgcctgtcgcctgagatcgtggagctcagcgagccgctgcaggttgttcgatatggtgaggggggccactaccatgcccacgtggacagtgggcctgtgtacccagagaccatctgctcccataccaagctggtagccaacgagtctgtacccttcgagacctcctgccggcaagtatctcccaactgggggctgccttcaatcctcagaccaggaacacccatgacacaggcacagccctgcactgtgggcgtgccccttggcatggggccaggagatcactgggttatcccggtaagcccctgggagcatccacaactggggacctgctcagtgccccccctgccttacagctacatgacagtgctgttttatttgaacaacgtcactggtgggggcgagactgttttccctgtagcagataacagaacctacgatgaaatgagtctgattcaggatgacgtggacctccgtgacacacggaggcactgtgacaagggaaacctgcgtgtcaagccccaacagggcacagcagtcttctggtacaactacctgcctgatgggcaaggttgggtgggtgacgtagacgactactcgctgcacgggggctgcctggtcacgcgcggcaccaagtggattgccaacaactggattaatgtggaccccagccgagcgcggcaagcgctgttccaacaggagatggcccgccttgcccgagaagggggcaccgactcacagcccgagtgggctctggaccgggcctaccgcgatgcgcgcgtggaactctgagggaagagttagccccggttcccagccgcgggtcgccagttgcccaagatcaggggtccggctgtccttctgtcctgctgcagactaaaggtctggccaatgtcttgccccaccccgccagccgcgatacggcgcagttcctatattcatgttatttattgtgtactgactccatctgccccgtcaaataaaaaaccacaaggttcgagccgccgggcccgacaaactccgggtcggcgaaaaaaaaaaaaaa

SEQ ID NO: 505 - DNA, 2111 bp, Homo sapiens
agagggcgtcttcacgcaggcaccgagaagctcccactagtgtatgccttaatggtgccgctcttgtccgcgtctacgcttgggaccttggcttctgacttggagagtgtacagctctgcccgacggcaacccagcttgggaagagaagccccagcgtgggctggggctcaaggcgcaggaaggccgagcccggcgcggacgcaggcggctccgggcgggctcagcacccccaggcaccgtctcctagtgaccgcggcgctcgcgggcctggcggccgttgtccgggcgactgcgcagcgcgggcacccccgcggcccctcccctgggcgcgcgcgcgacctgggtgccatggcggcagcggcggtgacaggccagcggcctgagaccgcggcggccgaggaggcctcgaggccgcagtgggcgccgccagaccactgccaggctcaggcggcggccgggctgggcgacggcgaggacgcaccggtgcgtccgctgtgcaagccccgcggcatctgctcgcgcgcctacttcctggtgctgatggtgttcgtgcacctgtacctgggtaacgtgctggcgctgctgctcttcgtgcactacagcaacggcgacgaaagcagcgatcccgggccccaacaccgtgcccagggccccgggcccgagcccaccttaggtcccctcacccggctggagggcatcaaggtggggcacgagcgtaaggtccagctggtcaccgacagggatcacttcatccgaaccctcagcctcaagccgctgctcttcgaaatccccggcttcctgactgatgaagagtgtcggctcatcatccatctggcgcagatgaaggggttacagcgcagccagatcctgcctactgaagagtatgaagaggcaatgagcactatgcaggtcagccagctggacctcttccggctgctggaccagaaccgtgatgggcaccttcagctccgtgaggttctggcccagactcgcctgggaaatggatggtggatgactccagagagcattcaggagatgtacgccgcgatcaaggctgaccctgatggtgacggagtgctgagtctgcaggagttctccaacatggaccttcgggacttccacaagtacatgaggagccacaaggcagagtccagtgagctggtgcggaacagccaccatacctggctctaccagggtgagggtgcccaccacatcatgcgtgccatccgccagagggtgctgcgcctcactcgcctgtcgcctgagatcgtggagctcagcgagccgctgcaggttgttcgatatggtgaggggggccactaccatgcccacgtggacagtgggcctgtgtacccagagaccatctgctcccataccaagctggtagccaacgagtctgtacccttcgagacctcctgccgctacatgacagtgctgttttatttgaacaacgtcactggtgggggcgagactgttttccctgtagcagataacagaacctacgatgaaatgagtctgattcaggatgacgtggacctccgtgacacacggaggcactgtgacaagggaaacctgcgtgtcaagccccaacagggcacagcagtcttctggtacaactacctgcctgatgggcaaggttgggtgggtgacgtagacgactactcgctgcacgggggctgcctggtcacgcgcggcaccaagtggattgccaacaactggattaatgtggaccccagccgagcgcggcaagcgctgttccaacaggagatggcccgccttgcccgagaagggggcaccgactcacagcccgagtgggctctggaccgggcctaccgcgatgcgcgcgtggaactctgagggaagagttagccccggttcccagccgcgggtcgccagttgcccaagatcaggggtccggctgtccttctgtcctgctgcagactaaaggtctggccaatgtcttgccccaccccgccagccgcgatacggcgcagttcctatattcatgttatttattgtgtactgactccatctgccccgtcaaataaaaaaccacaaggttcgagccgccgggcccgacaaactccgggtcggcgaaaaaaaaaaaaaa

SEQ ID NO: 506 - DNA, 1399 bp, Homo sapiens
gaaggtggcagagcagcctccccaactaagcctgggtcgccgcctcggtgaagggccgcggggccgagcgcgggaagtggcgtccagtcggtttttggcaggcgagagccagagcgtgagaaccctcccacggcgaggccaagccctgagactggactagcaaggtcgtgagtctctctgtcagctctccgcagcgaaggggcgcggggggcggggaccgtgcccgaccgtgccagctcccgctccggaagcggaagtgcaagcactgcggggtcctgtccagtgtgagcccgacccgagctccagtagttccgcccgctggtcatcgcgccctttcccctgccggtgtcctgctcgccgtccccgccatgctgtctctagactttttggacgatgtgcggcggatgaacaagcggcagctctattatcaagtcctaaattttggaatgattgtctcatcggcactaatgatctggaaggggttaatggtaataactggaagtgaaagtccgattgtagtggtgctcagtggcagcatggaacctgcatttcatagaggagatcttctctttctaacaaatcgagttgaagatcccatacgagtgggagaaattgttgtttttaggatagaaggaagagagattcctatagttcaccgagtcttgaagattcatgaaaagcaaaatgggcatatcaagtttttgaccaaaggagataataatgcggttgatgaccgaggcctctataaacaaggacaacattggctagagaaaaaagatgttgtggggagagccaggggatttgttccttatattggaattgtgacgatcctcatgaatgactatcctaaatttaagtatgcagttctctttttgctgggtttattcgtgctggttcatcgtgagtaagaagcctgccttgctgttcctgggaagatgccatagttttcgttactggatgtttggagtagatactggtctgtgattggtggaatggagaacacacgtgttggtgcttctgggtagcactggtttgcattagtttatgtttccatgccagagtttgtgtgggcgggcgcatgtgcaccacagagtgcactcgaggggactttcagtcacaggatttcataattgtcattgtcacactttcaaatttttgtacatcagtgaatttttttatattaaaaggttgagccaaagcccccagtgtttgtattttgaagccaagcttcacttctaaagtgcctacagagacttgtaaatgaaaatgcagctctgcacgagtttgaaaccgtcatacctccttctattaggaatggcatatactgaggtggtcgtaagtcttaacttctaaaattttaaataaaagactttgcacattgaaaaaaaaaaaaaaaaaa

SEQ ID NO: 507 - DNA, 3236 bp, Homo sapiens
agagccaggaagcgggagccgggacccagggcccgggatcgccgagcccgacctcgggcgccccgccggtcacctccgcgcggacaccagccctgcagagcccagggagatggaagacttcgcccgaggggcggcctccccaggcccctcccggcctggcctggttcccgtcagcatcatcggggctgaggatgaggattttgagaacgagctggagacaaactcagaagagcaaaacagccagttccagagcctggagcaggtgaagcggcgcccagcccacctcatggccctcctgcagcacgtggccctgcagtttgagccaggacccctgctttgctgtctgcatgccgacatgctgggctcactgggccccaaggaggccaagaaggccttcctggacttctaccacagcttcctggagaagacagcggttctccgggtgccggtccctcccaacgtcgcctttgaacttgaccgcactagggctgacctcatctccgaggatgtccagcggcggttcgtgcaggaggtggtgcaaagccagcaggtagccgtgggccggcagctggaggacttccgttccaagcggctcatgggcatgacgccctgggagcaggagctggcccagctggaggcttgggttgggcgggaccgagccagctacgaggcccgggagcggcacgtggcggagcggctgctcatgcacctggaggagatgcaacataccatctctaccgacgaagaaaagagtgctgccgtggtcaacgccattggcctgtacatgcgccaccttggggtgcggaccaagagtggagacaagaagtcggggaggaacttcttccggaaaaaggtgatggggaaccggcggtcggacgagcctgccaagaccaagaaggggctgagcagcatcctggatgccgcccgctggaaccggggagagccccaggttccagattttcgacacctcaaagcagaggttgatgccgagaagccaggtgctacagaccggaagggaggcgtggggatgccctctcgggaccggaatatcggggctcctgggcaggacacccctggagtctctctgcaccctctgtccctggacagcccagaccgggaaccaggtgctgacgcccccctggagctgggggactcatccccgcagggcccaatgagcctggagtccttggcgcccccagagagtaccgacgagggggccgaaaccgagagccccgagcctggagatgagggggagccggggcggtcgggactggagcttgaaccagaagagcctcccggctggcgggaactcgtccccccagacaccctgcacagcctgcccaagagccaggtgaagcggcaggaggtcatcagcgagctgctggtgacagaggcggcccacgtgcgcatgctgcgggtgctgcacgacctcttcttccagcccatggcagaatgcctgttcttccccttggaggagctgcagaacatcttccccagcctggacgagctcatcgaggtgcattccctgttcctcgatcgcctgatgaagcggaggcaggagagtggctacctcatcgaggagatcggagacgtgctgctggcccggtttgatggtgctgagggctcctggttccagaaaatctcctcccgcttctgcagccgccagtcatttgccttagagcagctcaaagccaagcaacgcaaggaccctcggttctgtgccttcgtgcaggaagctgagagccgcccgcggtgccgccgcctgcagctgaaggacatgatccccacggagatgcagcggctgaccaagtaccccctgctcctgcagagcatcgggcagaacacagaagagcccacagaacgggagaaagtggagctggcagccgagtgctgccgggaaattctacaccacgtcaaccaagccgtgcgtgacatggaggacctgctgaggctcaaggactatcagcggcgcctggacttgtcccaccttcggcagagcagcgaccctatgctgagcgagttcaagaacctggacatcaccaagaagaaattggtccacgagggcccactgacgtggcgggtgactaaggacaaggcagtggaggtgcatgtgctgctgctggacgacctgctgctgctgctccagcgccaggacgagcggctgctgctcaagtcccatagccggacactgacgcccacgcccgatggcaagaccatgctgcggcccgtgctgcggctcacctccgccatgacccgcgaggtggccaccgatcacaaagccttctacgtcctttttacctgggaccaggaggcccagatatacgagctggtggcacagactgtgtcggagcggaaaaactggtgtgctctcatcactgagactgccggatccctgaaagtccctgcccctgcctctcgccctaagccccggcccagcccgagcagcacccgagaacccctcctcagcagctctgagaacggcaatggtggccgagagacgtctccagctgatgcccggaccgagagaatcctcagtgacctcctgcccttctgcagaccaggccccgagggccagctcgctgccacggcccttcggaaagtgctgtccctgaagcagcttctgtttccggcggaggaagacaatggggcggggcctcctcgagatggggatggggtcccagggggcggccccctgagcccagcacggacccaggaaatccaggagaacctgctcagcttggaggagaccatgaagcagctggaggagttggaggaggaattttgccgcctgagacccctcctgtctcagcttggggggaactctgtcccccagcctggctgcacttgaggttcccgcccaggaaggccttttgcaagaaggagaggaatgggggagaggacgtgagggaccacccccacccacacagctgccgcagcatctcacaccccgagggcctgaggagagggagctgtgggccacgcctgggaggggcccagctggggttactggccccgcatgagcctcggccatctctccctcctgccctctgcttgggggactcagggctccattctggagggcaccacggtgacccgggccatctcagtattgcctgtgggggccacccctccacccccacccccaagtgccttcgctctgtttttataccctgaattggaggtttattttttaatatatattatctaagaagaaaaaaaaaaaaaaaaaaaaaaaa

SEQ ID NO: 508 - DNA, 3137 bp, Homo sapiens
agagccaggaagcgggagccgggacccagggcccgggatcgccgagcccgacctcgggcgccccgccggtcacctccgcgcggacaccagccctgcagagcccagggagatggaagacttcgcccgaggggcggcctccccaggcccctcccggcctggcctggttcccgtcagcatcatcggggctgaggatgaggattttgagaacgagctggagacaaactcagaagagcaaaacagccagttccagagcctggagcaggtgaagcggcgcccagcccacctcatggccctcctgcagcacgtggccctgcagtttgagccaggacccctggttctccgggtgccggtccctcccaacgtcgcctttgaacttgaccgcactagggctgacctcatctccgaggatgtccagcggcggttcgtgcaggaggtggtgcaaagccagcaggtagccgtgggccggcagctggaggacttccgttccaagcggctcatgggcatgacgccctgggagcaggagctggcccagctggaggcttgggttgggcgggaccgagccagctacgaggcccgggagcggcacgtggcggagcggctgctcatgcacctggaggagatgcaacataccatctctaccgacgaagaaaagagtgctgccgtggtcaacgccattggcctgtacatgcgccaccttggggtgcggaccaagagtggagacaagaagtcggggaggaacttcttccggaaaaaggtgatggggaaccggcggtcggacgagcctgccaagaccaagaaggggctgagcagcatcctggatgccgcccgctggaaccggggagagccccaggttccagattttcgacacctcaaagcagaggttgatgccgagaagccaggtgctacagaccggaagggaggcgtggggatgccctctcgggaccggaatatcggggctcctgggcaggacacccctggagtctctctgcaccctctgtccctggacagcccagaccgggaaccaggtgctgacgcccccctggagctgggggactcatccccgcagggcccaatgagcctggagtccttggcgcccccagagagtaccgacgagggggccgaaaccgagagccccgagcctggagatgagggggagccggggcggtcgggactggagcttgaaccagaagagcctcccggctggcgggaactcgtccccccagacaccctgcacagcctgcccaagagccaggtgaagcggcaggaggtcatcagcgagctgctggtgacagaggcggcccacgtgcgcatgctgcgggtgctgcacgacctcttcttccagcccatggcagaatgcctgttcttccccttggaggagctgcagaacatcttccccagcctggacgagctcatcgaggtgcattccctgttcctcgatcgcctgatgaagcggaggcaggagagtggctacctcatcgaggagatcggagacgtgctgctggcccggtttgatggtgctgagggctcctggttccagaaaatctcctcccgcttctgcagccgccagtcatttgccttagagcagctcaaagccaagcaacgcaaggaccctcggttctgtgccttcgtgcaggaagctgagagccgcccgcggtgccgccgcctgcagctgaaggacatgatccccacggagatgcagcggctgaccaagtaccccctgctcctgcagagcatcgggcagaacacagaagagcccacagaacgggagaaagtggagctggcagccgagtgctgccgggaaattctacaccacgtcaaccaagccgtgcgtgacatggaggacctgctgaggctcaaggactatcagcggcgcctggacttgtcccaccttcggcagagcagcgaccctatgctgagcgagttcaagaacctggacatcaccaagaagaaattggtccacgagggcccactgacgtggcgggtgactaaggacaaggcagtggaggtgcatgtgctgctgctggacgacctgctgctgctgctccagcgccaggacgagcggctgctgctcaagtcccatagccggacactgacgcccacgcccgatggcaagaccatgctgcggcccgtgctgcggctcacctccgccatgacccgcgaggtggccaccgatcacaaagccttctacgtcctttttacctgggaccaggaggcccagatatacgagctggtggcacagactgtgtcggagcggaaaaactggtgtgctctcatcactgagactgccggatccctgaaagtccctgcccctgcctctcgccctaagccccggcccagcccgagcagcacccgagaacccctcctcagcagctctgagaacggcaatggtggccgagagacgtctccagctgatgcccggaccgagagaatcctcagtgacctcctgcccttctgcagaccaggccccgagggccagctcgctgccacggcccttcggaaagtgctgtccctgaagcagcttctgtttccggcggaggaagacaatggggcggggcctcctcgagatggggatggggtcccagggggcggccccctgagcccagcacggacccaggaaatccaggagaacctgctcagcttggaggagaccatgaagcagctggaggagttggaggaggaattttgccgcctgagacccctcctgtctcagcttggggggaactctgtcccccagcctggctgcacttgaggttcccgcccaggaaggccttttgcaagaaggagaggaatgggggagaggacgtgagggaccacccccacccacacagctgccgcagcatctcacaccccgagggcctgaggagagggagctgtgggccacgcctgggaggggcccagctggggttactggccccgcatgagcctcggccatctctccctcctgccctctgcttgggggactcagggctccattctggagggcaccacggtgacccgggccatctcagtattgcctgtgggggccacccctccacccccacccccaagtgccttcgctctgtttttataccctgaattggaggtttattttttaatatatattatctaagaagaaaaaaaaaaaaaaaaaaaaaaaa

SEQ ID NO: 509 - DNA, 3261 bp, Homo sapiens
ggtggactcagggcggctagagcgacgcggcggcaggggtggggagagtgcggagcccgagcgcggaggcttcggttccggtggcggcgatggcttctctttccacctggagcagccctgcagagcccagggagatggaagacttcgcccgaggggcggcctccccaggcccctcccggcctggcctggttcccgtcagcatcatcggggctgaggatgaggattttgagaacgagctggagacaaactcagaagagcaaaacagccagttccagagcctggagcaggtgaagcggcgcccagcccacctcatggccctcctgcagcacgtggccctgcagtttgagccaggacccctgctttgctgtctgcatgccgacatgctgggctcactgggccccaaggaggccaagaaggccttcctggacttctaccacagcttcctggagaagacagcggttctccgggtgccggtccctcccaacgtcgcctttgaacttgaccgcactagggctgacctcatctccgaggatgtccagcggcggttcgtgcaggaggtggtgcaaagccagcaggtagccgtgggccggcagctggaggacttccgttccaagcggctcatgggcatgacgccctgggagcaggagctggcccagctggaggcttgggttgggcgggaccgagccagctacgaggcccgggagcggcacgtggcggagcggctgctcatgcacctggaggagatgcaacataccatctctaccgacgaagaaaagagtgctgccgtggtcaacgccattggcctgtacatgcgccaccttggggtgcggaccaagagtggagacaagaagtcggggaggaacttcttccggaaaaaggtgatggggaaccggcggtcggacgagcctgccaagaccaagaaggggctgagcagcatcctggatgccgcccgctggaaccggggagagccccaggttccagattttcgacacctcaaagcagaggttgatgccgagaagccaggtgctacagaccggaagggaggcgtggggatgccctctcgggaccggaatatcggggctcctgggcaggacacccctggagtctctctgcaccctctgtccctggacagcccagaccgggaaccaggtgctgacgcccccctggagctgggggactcatccccgcagggcccaatgagcctggagtccttggcgcccccagagagtaccgacgagggggccgaaaccgagagccccgagcctggagatgagggggagccggggcggtcgggactggagcttgaaccagaagagcctcccggctggcgggaactcgtccccccagacaccctgcacagcctgcccaagagccaggtgaagcggcaggaggtcatcagcgagctgctggtgacagaggcggcccacgtgcgcatgctgcgggtgctgcacgacctcttcttccagcccatggcagaatgcctgttcttccccttggaggagctgcagaacatcttccccagcctggacgagctcatcgaggtgcattccctgttcctcgatcgcctgatgaagcggaggcaggagagtggctacctcatcgaggagatcggagacgtgctgctggcccggtttgatggtgctgagggctcctggttccagaaaatctcctcccgcttctgcagccgccagtcatttgccttagagcagctcaaagccaagcaacgcaaggaccctcggttctgtgccttcgtgcaggaagctgagagccgcccgcggtgccgccgcctgcagctgaaggacatgatccccacggagatgcagcggctgaccaagtaccccctgctcctgcagagcatcgggcagaacacagaagagcccacagaacgggagaaagtggagctggcagccgagtgctgccgggaaattctacaccacgtcaaccaagccgtgcgtgacatggaggacctgctgaggctcaaggactatcagcggcgcctggacttgtcccaccttcggcagagcagcgaccctatgctgagcgagttcaagaacctggacatcaccaagaagaaattggtccacgagggcccactgacgtggcgggtgactaaggacaaggcagtggaggtgcatgtgctgctgctggacgacctgctgctgctgctccagcgccaggacgagcggctgctgctcaagtcccatagccggacactgacgcccacgcccgatggcaagaccatgctgcggcccgtgctgcggctcacctccgccatgacccgcgaggtggccaccgatcacaaagccttctacgtcctttttacctgggaccaggaggcccagatatacgagctggtggcacagactgtgtcggagcggaaaaactggtgtgctctcatcactgagactgccggatccctgaaagtccctgcccctgcctctcgccctaagccccggcccagcccgagcagcacccgagaacccctcctcagcagctctgagaacggcaatggtggccgagagacgtctccagctgatgcccggaccgagagaatcctcagtgacctcctgcccttctgcagaccaggccccgagggccagctcgctgccacggcccttcggaaagtgctgtccctgaagcagcttctgtttccggcggaggaagacaatggggcggggcctcctcgagatggggatggggtcccagggggcggccccctgagcccagcacggacccaggaaatccaggagaacctgctcagcttggaggagaccatgaagcagctggaggagttggaggaggaattttgccgcctgagacccctcctgtctcagcttggggggaactctgtcccccagcctggctgcacttgaggttcccgcccaggaaggccttttgcaagaaggagaggaatgggggagaggacgtgagggaccacccccacccacacagctgccgcagcatctcacaccccgagggcctgaggagagggagctgtgggccacgcctgggaggggcccagctggggttactggccccgcatgagcctcggccatctctccctcctgccctctgcttgggggactcagggctccattctggagggcaccacggtgacccgggccatctcagtattgcctgtgggggccacccctccacccccacccccaagtgccttcgctctgtttttataccctgaattggaggtttattttttaatatatattatctaagaagaaaaaaaaaaaaaaaaaaaaaaaa

SEQ ID NO: 510 - DNA, 1968 bp, Homo sapiens
atttcctcatcgtcaagctttgttcctcgtgggggctagaaatctctttccagttccagattgtgaagggttcctgagtaagcagcgtgtctccatccccctctctaggggctcttggatggaccttgcactctagaagggacaatggacttctggctttggccactttacttcctgccagtatcgggggccctgaggatcctcccagaagtaaaggtagagggggagctgggcggatcagttaccatcaagtgcccacttcctgaaatgcatgtgaggatatatctgtgccgggagatggctggatctggaacatgtggtaccgtggtatccaccaccaacttcatcaaggcagaatacaagggccgagttactctgaagcaatacccacgcaagaatctgttcctagtggaggtaacacagctgacagaaagtgacagcggagtctatgcctgcggagcgggcatgaacacagaccggggaaagacccagaaagtcaccctgaatgtccacagtgaatacgagccatcatgggaagagcagccaatgcctgagactccaaaatggtttcatctgccctatttgttccagatgcctgcatatgccagttcttccaaattcgtaaccagagttaccacaccagctcaaaggggcaaggtccctccagttcaccactcctcccccaccacccaaatcacccaccgccctcgagtgtccagagcatcttcagtagcaggtgacaagccccgaaccttcctgccatccactacagcctcaaaaatctcagctctggaggggctgctcaagccccagacgcccagctacaaccaccacaccaggctgcacaggcagagagcactggactatggctcacagtctgggagggaaggccaaggatttcacatcctgatcccgaccatcctgggccttttcctgctggcacttctggggctggtggtgaaaagggccgttgaaaggaggaaagccctctccaggcgggcccgccgactggccgtgaggatgcgcgccctggagagctcccagaggccccgcgggtcgccgcgaccgcgctcccaaaacaacatctacagcgcctgcccgcggcgcgctcgtggagcggacgctgcaggcacaggggaggcccccgttcccggccccggagcgccgttgccccccgccccgctgcaggtgtctgaatctccctggctccatgccccatctctgaagaccagctgtgaatacgtgagcctctaccaccagcctgccgccatgatggaggacagtgattcagatgactacatcaatgttcctgcctgacaactccccagctatcccccaaccccaggctcggactgtggtgccaaggagtctcatctatctgctgatgtccaatacctgcttcatgtgttctcagagccctcatcacttcccatgccccatctcgactcccatccccatctatctgtgccctgagcatggctctgcccccaggtcgtcttgcacaccttggcagccccctgtagttgacaggtaagctgtaggcatgtagagcaattgtcccaatgccacttgcttcctttccaagccgtcgaacagactgtgggatttgcagagtgtttcttccatgtctttgaccacagggttgttgctgcccaggctctagatcacatggcatcaggctggggcagaggcatagctattgtctcgggcatccttcccagggttgggtcttacacaaatagaaggctcttgctctgagttatgtgacatgcctcagccccatggactaagcaggggtctggtataaaaacactcctggaaacgcctttgccctgatccaaatgttagcacttgctagtgaacgtctacttatctcaagttctatgctaaaggcaatttatcttgatgtgatgataaaccaaacttattagcaagatatgcatatatatcaaaaaaaaaaaaaaaaaa

SEQ ID NO: 511 - DNA, 4952 bp, Homo sapiens
gtgtggtgggggtgctccaccatagagctggtcggcatccacagccaccaggacgctgccagagcccaggcctgcgccacgccctgcccagaggcacacctgcctgctcaaggcaaccagggcaggctcaaggcagccagggccagctcactgtgtgcctgtcactgtgtgaagcctgcttcttctttatttcgcttagcaagtgaggcaggagcatgtaaagctgctggcagaggaatatctaatttacctcctaaatggctctactttgaacctgctgggcaaggaagagattttcaaggaaaccatctaccgtgtgcaagctcctgccggccaaccccagaccccagcacggagccaggcgcctgtgcccgccgaccctcagcatcctcctcagaaaggctggtggcatcaggaagcccctggccagcctccacctgagcccagtgagctcagctttaaggatggagtcaggcagggggtcctcaacccctccaggacccattgctgccctagggatgccagacactgggcctggcagttcctccctagggaagcttcaggcgctccctgttgggcccagagcccactgtggggaccctgtcagcctggctgcagcaggggacggctctccagacataggccccacgggagagctgagtggtagcttaaagatccccaaccgggacagcgggatcgacagtccctcctccagtgtggctggagagaactttccctgcgaggagggcttggaggctggcccaagccccactgtactgggggcgcacgcagagatggccctggacagccaggtcccgaaggtcaccccccaggaggaggcggacagcgacgtgggtgaggaacctgactctgagaacaccccccagaaggctgacaaggatgccggcctggcccagcactctggcccccagaagcttctccacattgcccaggagctcctgcacaccgaggagacctatgtgaagcggctgcacctgctggaccaggttttctgcaccaggctgacggatgcggggatccctccagaagtcatcatgggcatattctctaacatctcctccatccaccgcttccacgggcagttcctgctgccggagctgaagacgcggatcacggaggagtgggacacaaacccacggctcggggacatcctgcagaagctggccccattcctgaagatgtacggcgagtatgtcaagaactttgaccgagccgtagggctggtgagcacgtggacccagcgctccccactgtttaaagacgtcgtccacagcatccagaagcaggaggtatgcgggaacctgacgctgcagcaccacatgctggagcccgtgcagagggtcccccggtacgagctgctgctcaaggactatctgaagaggctcccgcaggacgccccagaccggaaggatgcggagaggtccttggagctcatctccacagccgccaaccactccaatgctgccattcggaaagtggagaaaatgcacaagctcttggaggtgtacgagcagctgggtggggaagaagacattgtcaacccggccaatgaactgatcaaggagggccaaatccagaaactgtcagccaagaacggcaccccccaggaccgccacctcttcctgttcaacagcatgatcctttactgtgtgcccaagctgcggctcatgggccagaagttcagcgtccgggagaagatggacatctcaggcctccaggtgcaggatatcgtcaagccaaacacagcacatacattcatcataacaggaagaaaaaggtccctggagctgcagacgcggacagaggaagagaagaaagaatggattcagatcatccaggccaccatcgagaagcacaaacagaacagcgaaaccttcaaggcttttggtggcgccttcagccaggatgaggaccccagcctctctccagacatgcctatcacgagcaccagccctgtggagcctgtggtgaccaccgaaggcagttcgggtgcagcagggctcgagcccagaaaactatcctctaagaccagacgtgacaaggagaagcagagctgtaagagctgtggtgagaccttcaactccatcaccaagaggaggcatcactgcaagctgtgtggggcggtcatctgtgggaagtgctccgagttcaaggccgagaacagccggcagagccgtgtctgcagagattgtttcctgacacagccagtggcccctgagagcacagaggtgggtgctcccagctcctgctcccctcctggtggcgcggcagagcctccagacacctgctcctgtgccccagcagctccagctgcctctgctttcggagtgtccctgggaccaggatagatgtgggtgtgtctcagtggggcccccaggctgggaacacactcggaagatcccgtgtgtgcacgctggcttctcgggaccagccagggccaaggcttgggaaccatttgcatccaggagttagatgggaacaagtgtcactcctggtcacctggttggagggcatggattgaagctgccctcaagtccaggccttgaggcccacctgaggggagatactgcccttctctctgcctgcctcacctccagctgtcagagggtgagcagggccctggaggcaggcaccccctcctcctcctccccgtccccttctcctcctcctccccgtccccttctcctcctcctccccgtccccttctcctcttcctctccctccttcctctccctccgcctcgctgtctttctccttctcctctccctcctcctcctgctccttctcctccccgtaccctttttctactcttccctctccttctcctcctcctttctctccctcctcctccccctccccttctcctcctctctttctcttcctcttttcctcctccactcctctttctgagagtagctgctgctttccctgacttccttcctcaagaatacagtctattctggggggttgcaggacagctgaaaaagaaaacgtgagtttccagaaaagcacatcgccctttctctccactcgacacagcctgcggtttgcagtgccagctgcacgttggagtctcctgggaagcttctagtgttgatctccctcctagaggctcagtgaggtgatcggggggtcagtgtgttttcagagtcccagctgctctgacttacagctgtggttggagccctgacctaggtccttggtctaagaagtcaaggatgtaagtctattaggactgagtgttgaatggtcttgatggtgaagaaggaccttgcactgcctaccgagctccctcatgcctgcaatttaaataccgaggtgtgttctgagagccccaggtccttggggcacgggcctccagggccctgtaaggtggactctggcctcgaaggggggcccaggtctgaggggtccagctctggcagggggtgtctaagccacgtccaaatggtggacagtagctccaacagtgacatgacagagggagggcctgtgtgtgtggtgtgtgtgtgtgtgctgtgtgtgcacgcacgtgcatgtatatggtgtgtgtagaactgacacgcttgaagtccctgtcccgtgacccaccctcaggtacttgctgttgggttttcctatgattttgatgtgtcctgacccagcatatggatgccctccccttggagggcccagcctgcaaaccccatctgataccacacatgcctatgtcctgcaggcttctagtgacccttgcaagccgggtgaggctggtcccagtctctgtgcagatcttggccatgtctccacagccagctccccccaagcagtggccctggccctaccccagcctcctcagaacaggggtgaccactgcaggggagactgcccctaacctgtgtctttgtgtccccagaagacacccactgcagacccccagcccagcctgctctgcggccccctgcggctgtcagagagcggtgagacctggagcgaggtgtgggccgccatccccatgtcagatccccaggtgctgcacctgcagggaggcagccaggacggccggctgccccgcaccatccctctccccagctgcaaactgagtgtgccggaccctgaggagaggctggactcggggcatgtgtggaagctgcagtgggccaagcagtcctggtacctgagcgcctcctccgcagagctgcagcagcagtggctggaaaccctaagcactgctgcccatggggacacggcccaggacagcccgggggccctgcagcttcaggtccctatgggcgcagctgctccgtgagctgagtctcccactgccctgcacaccaccacattggacctgtgctgtcctgggaggtggtgttggaggccccatgaagagcgccctggactgctgagggtgggccaacagcccagagctcaggacacttggctttggggggaaggaaactgaggcccagagaggggcaaccactggccaagggtcacccagcaagttttggctaagagcctggcctccagccccagcagtgtggcccagagcaggggccgactgccaaagtaaccatcatccatatgggccgtgtggtgatgctggcccggaaggcagaaagaggcagcatgggcactgccagggacagccacatcctgctggtctgcagcgtggtccaccccgcctctgcccagcctgtctacaccgtgtgagctgaatcgtgacttgcttcccacctcctttctctgtcctctcctgaggttctgcctgcagcccccaggaggtgggcctgccccatcctagctggactcatggttcctaaataaccacgctcagaagctctgctaggacttaccccagccactgagtggcaggcgcatgagatttgtggctgttcctgatgctagtggcacacagtgcttatctgcataaataaacactggccaccagc

SEQ ID NO: 512 - DNA, 3311 bp, Homo sapiens
gcgagcgggggcgcgggtggcgcggcgggacgcgagcggcgagccggagcgcgagcccgctcccgcaccatggaggaggacgacagctacgttcccagtgacctgacagcagaggagcgtcaagaactggagaacatccgacggagaaaacaggagctgctggctgacattcagaggctgaaggatgagatagcagaagtagctaatgaaattgaaaacctgggatccacagaggaaaggaaaaacatgcagaggaacaaacaggtagccatgggcaggaaaaaatttaatatggaccctaaaaaggggatccagttcttaatagagaacgacctcctgaagaacacttgtgaagacattgcccagttcttatataaaggcgaagggctcaacaagacagccatcggcgactacctaggggagagagatgagtttaatatccaggttcttcatgcatttgtggagctgcatgagttcactgatcttaatctcgtccaggcactacggcagttcctgtggagcttccggctacccggagaggcccagaagatcgaccggatgatggaggcgtttgcccagcgatattgtcagtgcaataatggcgtgttccagtccacggatacttgttacgtcctctcctttgccatcatcatgttgaacaccagtctgcacaaccccaatgtcaaagataagcccactgtggagaggttcattgccatgaaccgaggcatcaatgatgggggagacctgccggaggagctcctccggaatctctatgagagcataaaaaatgaaccctttaaaatcccagaagacgacgggaatgacctcactcacactttcttcaatccagaccgagaaggctggctattgaaactcggaggtggcagggtaaagacttggaagagacgctggttcattctgactgacaactgcctttactactttgagtataccacggataaggagccccgtggaatcatccctttagagaatctgagtatccgggaagtggaggactccaaaaaaccaaactgctttgagctttatatccccgacaataaagaccaagttatcaaggcctgcaagaccgaggctgacgggcgggtggtggaggggaaccacactgtttaccggatctcagctccgacgcccgaggagaaggaggagtggattaagtgcattaaagcagccatcagcagggaccctttctacgaaatgctcgcagcacggaaaaagaaggtctcctccacgaagcgacactgagcgtgcagccaagggcgttggtctgcgggggccttggagctcctgctcttctcccgcacctccatggatgcactgctgccgagcagagcgtcctctgccaggccccgccctggattcctagagactagcttcagcttttgctattttttttaagtgggagaagggtgggcagttatcactggggaagagaggaccggccacctgtccagcatgggctccagagccttcctctctcacagggcagagctcttgtcggcagggcagcctcctggccagtttctctgctcagtgttctggtagcagagctcagagccaactgtttacctcttggttgtccccgtgaagaagccttcaaaccctgcaccataaatacatgtgtccatatattattatatgttaagagaaaaaggtggaaaggaagagaagccacatactataaagatctattttttttttttaagagagaacgtagggctgttcaggtgcattctgccctggctgcgctggggagcttctccctggagaagagcacctggggctgcggccaaggggcatcagcctgggcccgcggcagggcctggcctgcctctcctgtgctgtgggagctcgctgcctggtgcttgtcttggcgagatggacaggtgaggtcgaggacgcagagggcagaggcccagtggagcctcagacggcacagtcagagtcgggggcctgcctggccggggtcgcagtcggcagcagcgtgcagtccggcatctcccgcggatgcttttccatcccaagtgcctgcggagcccgaggagaggagagagctgactggacgcttacgttattttcctccttcagaatccaagttcttgttgggctttaaagtagaaagtcagcattttccttgagctaaatacctaataaccaaaactgtgaggaaggttatcgggacagaggttccggataacctgtttcattttgggttttcttcctcttccccagactccagtcctcgttctagaggaaggagtaggacttccccgatccccgtagcttcagctttttctgcctcaaaaccagccctaactggactactctggatgcattttgtggtgggccccctagagggaagatgggcctttatctgctccgtggggtgcactggagtgaggggggtggccgggctgcctctcgcatctctgtcttcccctgcaggcgctgtgtgagctggccctgcccctcctcattacagtatgaagggagccgtgacacgcagcattttcctgccgttctctcagggactctcagggcagctcctgccactccgccagggccagcatgccagtccaggcagagcaggtggctggctgtctggccgtctcgccccgcccctccacaggaccctggaccagggcggtgcagggcgcagccccgaggaggcaggtggaggagctgcgggttttcacagggccgcgtcgccacggctcctctgatcctttagggttggcgagcatctctggaaatagcttttgcagaggagtggtgggaggaatagagggggacagtctgtcacctccctccccgccactttgtgtagatcctacctggagggaatggctttaggcacttttgtgccagagcttgtgagggtgacagaagagggtccaggctggaaacctgaactttctgggtgggagaaccaggtggtgcctgccgaggtctgggcgtgtttgggccggtgctggagcctgtccagctggcccgggccctggcctggttctcaagtgtttcctagacagagaggcacctgggtcagtattagtctatttatcagaggtgtaaataatctatgtatagtttttctccttttagattattttgtatttgtttaaaagaagttttgtcaaaatacaaaaatataaagaaatgactgaaagttgttgacagggtttttaagaaataattattctaattgtttttgtttgtttgtttttgccttgtaaactagcgccaaggaactgcagcaaataaactccaactctgcccaagcaaaaaaaaaa

SEQ ID NO: 513 - DNA, 3308 bp, Homo sapiens
gcgagcgggggcgcgggtggcgcggcgggacgcgagcggcgagccggagcgcgagcccgctcccgcaccatggaggaggacgacagctacgttcccagtgacctgacagcagaggagcgtcaagaactggagaacatccgacggagaaaacaggagctgctggctgacattcagaggctgaaggatgagatagcagaagtagctaatgaaattgaaaacctgggatccacagaggaaaggaaaaacatgcagaggaacaaacaggtagccatgggcaggaaaaaatttaatatggaccctaaaaaggggatccagttcttaatagagaacgacctcctgaagaacacttgtgaagacattgcccagttcttatataaaggcgaagggctcaacaagacagccatcggcgactacctaggggagagagatgagtttaatatccaggttcttcatgcatttgtggagctgcatgagttcactgatcttaatctcgtccaggcactacggcagttcctgtggagcttccggctacccggagaggcccagaagatcgaccggatgatggaggcgtttgcccagcgatattgtcagtgcaataatggcgtgttccagtccacggatacttgttacgtcctctcctttgccatcatcatgttgaacaccagtctgcacaaccccaatgtcaaagataagcccactgtggagaggttcattgccatgaaccgaggcatcaatgatgggggagacctgccggaggagctcctccggaatctctatgagagcataaaaaatgaaccctttaaaatcccagaagacgacgggaatgacctcactcacactttcttcaatccagaccgagaaggctggctattgaaactcggtggcagggtaaagacttggaagagacgctggttcattctgactgacaactgcctttactactttgagtataccacggataaggagccccgtggaatcatccctttagagaatctgagtatccgggaagtggaggactccaaaaaaccaaactgctttgagctttatatccccgacaataaagaccaagttatcaaggcctgcaagaccgaggctgacgggcgggtggtggaggggaaccacatgtttaccggatctcagctccgacgccccgaggagaaggaggagtggattaagtgcattaaagcagccatcagcagggaccctttctacgaaatgctcgcagcacggaaaaagaaggtctcctccacgaagcgacactgagcgtgcagccaagggcgttggtctgcgggggccttggagctcctgctcttctcccgcacctccatggatgcactgctgccgagcagagcgtcctctgccaggccccgccctggattcctagagactagcttcagcttttgctattttttttaagtgggagaagggtgggcagttatcactggggaagagaggaccggccacctgtccagcatgggctccagagccttcctctctcacagggcagagctcttgtcggcagggcagcctcctggccagtttctctgctcagtgttctggtagcagagctcagagccaactgtttacctcttggttgtccccgtgaagaagccttcaaaccctgcaccataaatacatgtgtccatatattattatatgttaagagaaaaaggtggaaaggaagagaagccacatactataaagatctattttttttttttaagagagaacgtagggctgttcaggtgcattctgccctggctgcgctggggagcttctccctggagaagagcacctggggctgcggccaaggggcatcagcctgggcccgcggcagggcctggcctgcctctcctgtgctgtgggagctcgctgcctggtgcttgtcttggcgagatggacaggtgaggtcgaggacgcagagggcagaggcccagtggagcctcagacggcacagtcagagtcgggggcctgcctggccggggtcgcagtcggcagcagcgtgcagtccggcatctcccgcggatgcttttccatcccaagtgcctgcggagcccgaggagaggagagagctgactggacgcttacgttattttcctccttcagaatccaagttcttgttgggctttaaagtagaaagtcagcattttccttgagctaaatacctaataaccaaaactgtgaggaaggttatcgggacagaggttccggataacctgtttcattttgggttttcttcctcttccccagactccagtcctcgttctagaggaaggagtaggacttccccgatccccgtagcttcagctttttctgcctcaaaaccagccctaactggactactctggatgcattttgtggtgggccccctagagggaagatgggcctttatctgctccgtggggtgcactggagtgaggggggtggccgggctgcctctcgcatctctgtcttcccctgcaggcgctgtgtgagctggccctgcccctcctcattacagtatgaagggagccgtgacacgcagcattttcctgccgttctctcagggactctcagggcagctcctgccactccgccagggccagcatgccagtccaggcagagcaggtggctggctgtctggccgtctcgccccgcccctccacaggaccctggaccagggcggtgcagggcgcagccccgaggaggcaggtggaggagctgcgggttttcacagggccgcgtcgccacggctcctctgatcctttagggttggcgagcatctctggaaatagcttttgcagaggagtggtgggaggaatagagggggacagtctgtcacctccctccccgccactttgtgtagatcctacctggagggaatggctttaggcacttttgtgccagagcttgtgagggtgacagaagagggtccaggctggaaacctgaactttctgggtgggagaaccaggtggtgcctgccgaggtctgggcgtgtttgggccggtgctggagcctgtccagctggcccgggccctggcctggttctcaagtgtttcctagacagagaggcacctgggtcagtattagtctatttatcagaggtgtaaataatctatgtatagtttttctccttttagattattttgtatttgtttaaaagaagttttgtcaaaatacaaaaatataaagaaatgactgaaagttgttgacagggtttttaagaaataattattctaattgtttttgtttgtttgtttttgccttgtaaactagcgccaaggaactgcagcaaataaactccaactctgcccaagcaaaaaaaaaa

SEQ ID NO: 514 - DNA, 2297 bp, Homo sapiens
ccacgcgtccgttcggcagctccagttcagctcgctcggcgcacccacgcctcgctgccccgcttcctgccctcaacctgggcatgcgccccccacccttccggccccccagaacccgcgccatcccccggagcctccccagagctggccgcgcaggatgggcgccctcaggcccacgctgctgccgccttcgctgccgctgctgctgctgctaatgctaggaatgggatgctgggcccgggaggtgctggtccccgaggggcccttgtaccgcgtggctggcacagctgtctccatctcctgcaatgtgaccggctatgagggccctgcccagcagaacttcgagtggttcctgtataggcccgaggccccagatactgcactgggcattgtcagtaccaaggatacccagttctcctatgctgtcttcaagtcccgagtggtggcgggtgaggtgcaggtgcagcgcctacaaggtgatgccgtggtgctcaagattgcccgcctgcaggcccaggatgccggcatttatgagtgccacaccccctccactgatacccgctacctgggcagctacagcggcaaggtggagctgagagttcttccagatgtcctccaggtgtctgctgcccccccagggccccgaggccgccaggccccaacctcacccccacgcatgacggtgcatgaagggcaggagctggcactgggctgcctggcgaggacaagcacacagaagcacacacacctggcagtgtcctttgggcgatctgtgcccgaggcaccagttgggcggtcaactctgcaggaagtggtgggaatccggtcagacttggccgtggaggctggagctccctatgctgagcgattggctgcaggggagcttcgtctgggcaaggaagggaccgatcggtaccgcatggtagtagggggtgcccaggcaggggacgcaggcacctaccactgcactgccgctgagtggattcaggatcctgatggcagctgggcccagattgcagagaaaagggccgtcctggcccacgtggatgtgcagacgctgtccagccagctggcagtgacagtggggcctggtgaacgtcggatcggcccaggggagcccttggaactgctgtgcaatgtgtcaggggcacttcccccagcaggccgtcatgctgcatactctgtaggttgggagatggcacctgcgggggcacctgggcccggccgcctggtagcccagctggacacagagggtgtgggcagcctgggccctggctatgagggccgacacattgccatggagaaggtggcatccagaacataccggctacggctagaggctgccaggcctggtgatgcgggcacctaccgctgcctcgccaaagcctatgttcgagggtctgggacccggcttcgtgaagcagccagtgcccgttcccggcctctccctgtacatgtgcgggaggaaggtgtggtgctggaggctgtggcatggctagcaggaggcacagtgtaccgcggggagactgcctccctgctgtgcaacatctctgtgcggggtggccccccaggactgcggctggccgccagctggtgggtggagcgaccagaggacggagagctcagctctgtccctgcccagctggtgggtggcgtaggccaggatggtgtggcagagctgggagtccggcctggaggaggccctgtcagcgtagagctggtggggccccgaagccatcggctgagactacacagcttggggcccgaggatgaaggcgtgtaccactgtgcccccagcgcctgggtgcagcatgccgactacagctggtaccaggcgggcagtgcccgctcagggcctgttacagtctacccctacatgcatgccctggacaccctatttgtgcctctgctggtgggtacaggggtggccctagtcactggtgccactgtccttggtaccatcacttgctgcttcatgaagaggcttcgaaaacggtgatcccttactcctcaggtcttgcaggtgtcgactgtcttccggcccagctccaagccctcctctggttgcctggacaccctctccctctgtccactcttcctttaatttatttgacctcccactacccagaatgggagacgtgcctccccttccccactccttccctcccaagcccctccctctggccttctgttcttgatctcttagggatcctatagggaggccatttcctgtcctggaattagtttttctaaaatgtgaataaacttgttttataaaaagcaaaaaaaaaaaaaaa

SEQ ID NO: 515 - DNA, 3395 bp, Homo sapiens
gtggatgcgatggcgccgattccaaagactgtggggcggatcaagctagactgctctctacggcccagctgcccactggaggtcgctgctgcacccaaactttgcaaggaattcggtccagaggattacggcgaagaggacatagtggattttcttcgacggcttgtggagagtgatcaccagggcctgcaccggatccatgtggatgggagcagcgggcggctgcagctgtggcaccatgattacctcctgggccacttggatgatgaagggaaatcaactggacagagtgacaggggcaagggggctgagggactgggcacctactgtggtctccgcaagtccttcctgtatcctccccaagagtctgagccctgccctcaaagcccctctgcctctgccaccttccccagtgtctcagacagcctgcttcaggtggccatgccccagaagctcctggtgacagaagaggaagccaatcgcctggctgaggagctggtggctgaggaggagcgcatgaaacagaaagcagagaaaaagcgactcaagaagaagcgtcaaaaggaacggaagcgacaggagcgtttggagcagtactgtggggagcccaaggccagcactacctcagatggagatgagagccccccatccagccctggaaacccagttcagggacagtgtggtgaagaagaggactcactggatctatctagcacttttgtgtctctggctttgcgcaaggttggggattggcccctcagtgcccgcagagagaagggactgaaccaggagccccaaggcaggggtctggccctccagaagatgggtcaagaggaagagagccctccaagagaggagaggccccagcagagtccaaaggtacaggcatctccgggactgctggcagctgccttacaacagagccaggaactggcaaagttgggtaccagctttgctcaaaatggtttctaccatgaggccgtggtcctcttcacccaggcctttgaagctcaacccccaggaccaccggtaggtgggggcttggccagggcagggcagagtgttgaggactcagacctttggccaccttctgtctttatcaggttatttggaaatcgttccttctgccatgagcggttgggtcagccagcgtgggccctggctgatgcccaggtggcccttaccctacggcctggctggccccggggcctcttccgcctgggcaaggccttgatgggactacaggtaataggtctggggctggaaacaggagagatttgagtgggatggagtggggagagggtctatgttgactttctagataagcttctagtaccaaagtgtcacaatggttgtggtactaggagcaggggccagttttagaaagggtacttttaagcaccttgacacctaatcttttctttctgatccctctgggaccaaagcgcttcagagaggcagctgctgtgtttcaggaaactctgagaggtgggtcccagcctgacgcagcccgagagctccgctcttgccttctccacctcacactggtaagggggccaggcacactgtcatgctgaggcgggtatcagggagaattggctgggactgcaataccaagcctcaggtggctaaggagggggcggggaaggatgggtggaatgagaggcatgggctgtcctgcttaaaagaaggatctggtgcccttctctctcccttctcagcagggtcagcgaggaggaatctgtgcaccacctctgtcacctggggccctccagccacttccccatgctgagctggcaccctcaggcctaccttccctcaggtgccctcgaagcactgctttgaggtcccctggcctgtctccactcttgcattatccttcatgtcaccgaagccaccccaaccagcccctctcccagactcagagtagaaggccccatcctctcaagccccaggacccttcaaagggctgggacatcctgggacttgggctccagcatctgtctcaggccagatgagggggcaccggtccctcatagggcagggccatgtatatatcccttggtgggggacatagtgtggtgacagttcactgcatattttgagaccttattctctagatccatagttaatgatgccctggcagtcattcctcttgccatggggaagcttctgatgagagaaaggagccccacatccactgaaacatcctttggttctcaagcttcttctggaggcagtaaggaaaaataaaacccaccaaggctcaagaagggaactatagaaaagttcaggtttttaggctatagcagagacagtgagaaagcatctgggcctttctcttcctcttggtccaggggacctcattcaccaactagagcttggtgtacaggaacggggtcacagtgctgagggggcttgagtcccacctttcagcttgatggatgctcacctcttctcagccccagctcgtgccctgtttttctagccatagcccccagattactcacagctcctcatgccatttcctgtccagattgctatgtatgactctgacctctcttgtccagtggtctggtgctcacctcctctcactgctagaatattcaccaagggtttgcatttgggaagtcccttaccagctcctgcttagagctggtagggccatacatgtccacactcccaactggtggctctcccgctgaatggggcctcagcaggtgcccaagctgctacaaccttggccactctgtttctctcccccagcactgggcatggtaattagcctttccccatgttaatttattcagttttttcaagggtcaactgaattccccacttcctgggtaagaagcatgatctccttttaatttcacgtctaagatcctggcagcttcccctagctggttcctctgtagtcctgctgggactgtcagctcatttaaatgtgggtctgcagaaggctttaggtctcccccaacccccttacctttcacagaggaacctttcatcaggataaatgattattgctgccctgtgggtcttgctcaatactgttcatacctggagagagaaggtattgaaacatctcctttatgtgtgactttcccaaatttttaaaaattgtttatggtttaggccccttaaatactgtgtagcaggatgaagtctaccattaccagctgggtcaccttggatgggtctgtcaacatctaagcctcagttccctcacctgtaaaaatgagggtagtccctacctcataagggatattgtgaggatggaaagcgaaagtgtgagaaaatacctcccaagtgcctggtacatagtgggtgctaaataaaccactttttgtctgcaaaaaaaaaaaaaaaaaaaagaaaaaaaaaaaaaaaaa

SEQ ID NO: 516 - DNA, 2797 bp, Homo sapiens
aagatggcggaccttgattcgcctccgaagctgtcaggggtgcagcagccgtctgagggggtgggaggtggccgctgctccgaaatctccgctgagctcattcgctccctgacagagctgcaggagctggaggctgtatacgaacggctctgcggcgaggagaaagtggtggagagagagctggatgctcttttggaacagcaaaacaccattgaaagtaagatggtcactctccaccgaatgggtcctaatctgcagctgattgagggagatgcaaagcagctggctggaatgatcacctttacctgcaacctggctgagaatgtgtccagcaaagttcgtcagcttgacctggccaagaaccgcctctatcaggccattcagagagctgatgacatcttggacctgaagttctgcatggatggagttcagactgctttgaggagtgaagattatgagcaggctgcagcacatattcatcgctacttgtgcctggacaagtcggtcattgagctcagccgacagggcaaaggggggagcatgattgatgccaacctgaaattgctgcaggaagctgagcaacgtctcaaagccattgtggcagagaagtttgccattgccaccaaggaaggtgatttgccccaggtggagcgcttcttcaagatcttcccactgctgggtttgcatgaggagggattaagaaggttctcggagtacctttgcaagcaggtggccagtaaagctgaggagaatctgctcatggtgctggggacagacatgagtgatcggagagctgcagtcatctttgcagatacacttactcttctgtttgaagggattgcccgcattgtggaggcccaccagccaatagtggagacctattatgggccagggagactctataccctgatcaaatatctgcaggtggaatgtgacagacaggtggagaaggtggtagacaagttcatcaagcaaagggactaccaccagcagttccggcatgttcagaacaacctgatgagaaattctacaacagaaaaaatcgaaccaagagaactggaccccatcctgactgaggtcaccctgatgaacgcccgcagtgagctatacttacgcttcctcaagaagaggattagctctgattttgaggtgggagactccatggcctcagaggaagtaaagcaagagcaccagaagtgtctggacaaactcctcaataactgccttttgagctgtaccatgcaggagctaattggcttatatgttaccatggaggagtacttcatgagggagactgtcaataaggctgtggctctggacacctatgagaagggccagctgacatccagcatggtggatgatgtcttctacattgttaagaagtgcattgggcgggctctgtccagctccagcattgactgtctctgtgccatgatcaacctcgccaccacagagctggagtctgacttcagggatgttctgtgtaataagctgcggatgggctttcctgccaccaccttccaggacatccagcgcggggtgacaagtgccgtgaacatcatgcacagcagcctccagcaaggcaaatttgacacaaaaggcatcgagagtactgacgaggcgaagatgtccttcctggtgactctgaacaacgtggaagtctgcagtgaaaacatctccactctgaagaagacactggagagtgactgcaccaagctcttcagccagggcattggaggggagcaggcccaggccaagtttgacggctgcctttctgacttggccgccgtgtccaacaaattccgagacctcttgcaggaagggctgacggagctcaacagcacagccatcaagccacaggtgcagccttggatcaacagctttttctccgtctcccacaacatcgaggaggaagaattcaatgactatgaggccaacgacccttgggtacaacagttcatccttaacctggagcagcaaatggcagagttcaaggccagcctgtccccggtcatctacgacagcctaaccggcctcatgactagccttgttgccgtcgagttggagaaagtggtgctgaaatccacctttaaccggctgggtggtctgcagtttgacaaggagctgaggtcgctcattgcctaccttaccacggtgaccacctggaccatccgagacaagtttgcccggctctcccagatggccaccatcctcaatctggagcgggtgaccgagatcctcgattactggggacccaattccggcccattgacgtggcgcctcacccctgctgaagtgcgccaggtgctggccctgcggatagacttccgcagtgaagatatcaagaggctgcgcctgtagctgcctggatgagcacacctggctcatcacacttgcaggcctgttccctaaggggccccagccaaggagctgagcgaggctgtctggcttgggggagatctgacagcccagacctttctacggctggcagcagagaaacaaagtctggacccactccatgctctgccctcagacctggccaggtgatgctctgggggcagcatctccccaccgagagaagcgggctcctaatgaggtgggaaagccacggcaggcagcgagcagcccaggccagctttctgcatggatggtcagtctcttgccctcaaacactacagcaaacaagctacccctgccagtcctagacaacttgggtacatctggggacctagcagttaggcttgactttgaggagaggctgtgatgtttatgatccctgaataaagctactccttgg

SEQ ID NO: 517 - DNA, 3916 bp, Homo sapiens
gagcaggaagtgtttgaggaagtcgcgccgcgctgcccgcgttaagattcccgcattttaatgttttcaggggggtgtcatagccccgggtttggccgccccagccccgccttccccgccccggggagcccgccccctgccccgcgtccctgccgacagagttagcacgacatcagtatgagctggtcaccttccctgacaacgcagacatgtggggcctgggaaatgaaagagcgccttgggacagggggatttggaaatgtcatccgatggcacaatcaggaaacaggtgagcagattgccatcaagcagtgccggcaggagctcagcccccggaaccgagagcggtggtgcctggagatccagatcatgagaaggctgacccaccccaatgtggtggctgcccgagatgtccctgaggggatgcagaacttggcgcccaatgacctgcccctgctggccatggagtactgccaaggaggagatctccggaagtacctgaaccagtttgagaactgctgtggtctgcgggaaggtgccatcctcaccttgctgagtgacattgcctctgcgcttagataccttcatgaaaacagaatcatccatcgggatctaaagccagaaaacatcgtcctgcagcaaggagaacagaggttaatacacaaaattattgacctaggatatgccaaggagctggatcagggcagtctttgcacatcattcgtggggaccctgcagtacctggccccagagctactggagcagcagaagtacacagtgaccgtcgactactggagcttcggcaccctggcctttgagtgcatcacgggcttccggcccttcctccccaactggcagcccgtgcagtggcattcaaaagtgcggcagaagagtgaggtggacattgttgttagcgaagacttgaatggaacggtgaagttttcaagctctttaccctaccccaataatcttaacagtgtcctggctgagcgactggagaagtggctgcaactgatgctgatgtggcacccccgacagaggggcacggatcccacgtatgggcccaatggctgcttcaaggccctggatgacatcttaaacttaaagctggttcatatcttgaacatggtcacgggcaccatccacacctaccctgtgacagaggatgagagtctgcagagcttgaaggccagaatccaacaggacacgggcatcccagaggaggaccaggagctgctgcaggaagcgggcctggcgttgatccccgataagcctgccactcagtgtatttcagacggcaagttaaatgagggccacacattggacatggatcttgtttttctctttgacaacagtaaaatcacctatgagactcagatctccccacggccccaacctgaaagtgtcagctgtatccttcaagagcccaagaggaatctcgccttcttccagctgaggaaggtgtggggccaggtctggcacagcatccagaccctgaaggaagattgcaaccggctgcagcagggacagcgagccgccatgatgaatctcctccgaaacaacagctgcctctccaaaatgaagaattccatggcttccatgtctcagcagctcaaggccaagttggatttcttcaaaaccagcatccagattgacctggagaagtacagcgagcaaaccgagtttgggatcacatcagataaactgctgctggcctggagggaaatggagcaggctgtggagctctgtgggcgggagaacgaagtgaaactcctggtagaacggatgatggctctgcagaccgacattgtggacttacagaggagccccatgggccggaagcaggggggaacgctggacgacctagaggagcaagcaagggagctgtacaggagactaagggaaaaacctcgagaccagcgaactgagggtgacagtcaggaaatggtacggctgctgcttcaggcaattcagagcttcgagaagaaagtgcgagtgatctatacgcagctcagtaaaactgtggtttgcaagcagaaggcgctggaactgttgcccaaggtggaagaggtggtgagcttaatgaatgaggatgagaagactgttgtccggctgcaggagaagcggcagaaggagctctggaatctcctgaagattgcttgtagcaaggtccgtggtcctgtcagtggaagcccggatagcatgaatgcctctcgacttagccagcctgggcagctgatgtctcagccctccacggcctccaacagcttacctgagccagccaagaagagtgaagaactggtggctgaagcacataacctctgcaccctgctagaaaatgccatacaggacactgtgagggaacaagaccagagtttcacggccctagactggagctggttacagacggaagaagaagagcacagctgcctggagcaggcctcatgatgtggggggactcgaccccctgacatggggcagcccatagcaggccttgtgcagtggggggactcgaccccctgacatggggctgcctggagcaggccgcgtgacgtggggctgcctggccgcggctctcacatggtggttcctgctgcactgatggcccaggggtctctggtatccagatggagctctcgcttcctcagcagctgtgactttcacccaggacccaggacgcagccctccgtgggcactgccggcgccttgtctgcacactggaggtcctccattacagaggcccagcgcacatcgctggccccacaaacgttcaggggtacagccatggcagctccttcctctgccgtgagaaaagtgcttggagtacggtttgccacacacgtgactggacagtgtccaattcaaatctttcagggcagagtccgagcagcgcttggtgacagcctgtcctctcctgctctccaaaggccctgctccctgtcctctctcactttacagcttgtgtttcttctggattcagcttctcctaaacagacagtttaattatagttgcggcctggccccatcctcacttcctctttttatttcactgctgctaaaattgtgtttttacctactactttggtggttgtcctcttttcggcaaagttggagcgagtgccaagctctccatctgtggtcctttctgccaagagcgactcatagtaaccaggatgggagagcagctgccttattctgaatcccaaaaattacttgggggtgattgtcacagaggagggacagaaagggtatctgctgaccaccagcctgcctacccatgcccatgtctccattcctgctcaagcgtgtgtgctgggccggggagtccctgtctctcacagcatctagcagtattattaaatggattcattttaaaaatagctcctatattttgtaacatgtctcaaacactcatactgggttccacaatccactgttagaatacctatggttagggcttctgaactaaaataatggaaaattttaacaatttgtatagtgcctggatcattactagtgccataaccctgcttcttcaacatttcacagaacttctcttttatataaaggcaagagcacaaaatgagttcagatgatcacaaacaggtgagttttgttggagaagaaagttggagtaggagactttcacaagtggtttccatggagatagaatgaagcattctgtggtcaagtaagtttagggagctattcatgtttcacttgctttgtggagattcacactatgcactgggaaagtatctgaaaagtcttataataaagaaacaggcttaactttgtgtaagaacactgtttatcaatgtcatttggctatagaaacattttctcctgctgattgtgtgtgtgaaacatgtattaacattccaatgaactagcatttaataaagcacaattttgg

SEQ ID NO: 518 - DNA, 2554 bp, Homo sapiens
gggaggccggaagttgcggcttcattactcgccatttcaaaatgctgccgaggccctaggatctgtgactgccacccctccccccacccgggctcggcgggggagcgactcatggagctgccgtaagttttaccaacagactgcagtttcttcactaccaaaatgacatcattttccacctctgctcagtgttcaacatctgacagtgcttgcaggatctctcctggacaaatcaatcaggtacgaccaaaactgccgcttttgaagattttgcatgcagcaggtgcgcaaggtgaaatgttcactgttaaagaggtcatgcactatttaggtcagtacataatggtgaagcaactttatgatcagcaggagcagcatatggtatattgtggtggagatcttttgggagaactactgggacgtcagagcttctccgtgaaagacccaagccctctctatgatatgctaagaaagaatcttgtcactttagccactgctactacagatgctgctcagactctcgctctcgcacaggatcacagtatggatattccaagtcaagaccaactgaagcaaagtgcagaggaaagttccacttccagaaaaagaactacagaagacgatatccccacactgcctacctcagagcataaatgcatacattctagagaagatgaagacttaattgaaaatttagcccaagatgaaacatctaggctggaccttggatttgaggagtgggatgtagctggcctgccttggtggtttttaggaaacttgagaagcaactatacacctagaagtaatggctcaactgatttacagacaaatcaggatgtgggtactgccattgtttcagatactacagatgacttgtggtttttgaatgagtcagtatcagagcagttaggtgttggaataaaagttgaagctgctgatactgaacaaacaagtgaagaagtagggaaagtaagtgacaaaaaggtgattgaagtgggaaaaaatgatgacctggaggactctaagtccttaagtgatgataccgatgtagaggttacctctgaggatgagtggcagtgtactgaatgcaagaaatttaactctccaagcaagaggtactgttttcgttgttgggccttgaggaaggattggtattcagattgttcaaagttaacccattctctctccacgtctgatatcactgccatacctgaaaaggaaaatgaaggaaatgatgtccctgattgtcgaagaaccatttcggctcctgtcgttagacctaaagatgcgtatataaagaaagaaaactccaaactttttgatccctgcaactcagtggaattcttggatttggctcacagttctgaaagccaagagaccatctcaagcatgggagaacagttagataacctttctgaacagagaacagatacagaaaacatggaggattgccagaatctcttgaagccatgtagcttatgtgagaaaagaccacgagacgggaacattattcatggaaggacgggccatcttgtcacttgttttcactgtgccagaagactaaagaaggctggggcttcatgccctatttgcaagaaagagattcagctggttattaaggtttttatagcataatggtagtacgaacataaaaatgcatttattccgttcacttaccacattatttgaaaatcaatcctttatttaattttatttccaacctgtcagagaatgttcttaggcatcaaaatccaaggtagctgtaagaaaaatactggagctaacaatgaagaacagaagtaatctgattagtcaaattattaagtgccatggattactttatgcagcagtcaggtacatagttaggtgaacccaaaagaaaaactcttgaaaacaagagatttcttccatgcacatttacaatattgaggtataattaacatgataaagtgtttccttctaacgagttgtagaaatctgagtaaccacccaaaaaagcaatagaatgtttctgtcaccccaaaacactcccttctgcccctcttcagacagtccttcagctatttcatggctctcaccctagttttttttttttttgcactttttttttttccgggggtataggggaggtgtggggcgacagggtctgtcttgttctgtctcccaggctgaagtgcagtgcagtggtatgatcatggctcactgcagccttggtttcctgggcataagtggtcttcccacttcagcctcctgagtagctgagactatagactagcataaccacactggctaattttttgtggagatgaagtctcactatgttgcccaggctggtctcgaactcctgggctcaaacaatcctcccgcctcagccttccaaattgctgggattatagtcatgaggcacctagtctggcccttttgcaagactttaatctgaaatctaaatttttaaaatttaagtacttacaaaggatatactatccaacatattgcatattatatatgtgcttttaaagttttttttttttttttgagagacggtctcactttg

SEQ ID NO: 519 - DNA, 1991 bp, Homo sapiens
tggccaacttctgaacaggaagcagttcgctcgcgcctaggttggcgcgggctgggaggtgttccagccctttaagatgttgcgcgtggtgagctggaacatcaatgggattcggagacccctgcaaggggtggcaaatcaggaacccagcaactgtgccgccgtggccgtggggcgcattttggacgagctggatgcggatatcgtctgtctccaggaaaccaaagtgaccagggatgcactgacagagcccctggctatcgttgagggttataactcctatttcagcttcagccgcaaccgtagcggctattctggtgtagccaccttctgtaaggacaatgctaccccagtggctgctgaagaaggcctgagtggcctgtttgccacccagaatggggatgttggttgctatggaaacatggatgagtttacccaagaggaactccgggctctggatagtgagggcagggccctcctcacacagcataagatccgcacatgggaaggtaaggagaagaccttgaccctaatcaacgtgtactgcccccatgcggaccctgggaggcctgagcggctagtctttaagatgcgcttctatcgtttgctgcaaatccgagcagaagccctcctggcggcaggcagccatgtgatcattctgggtgacctgaatacagcccaccgccccattgaccactgggatgcagtcaacctggaatgctttgaagaggacccagggcgcaagtggatggacagcttgctcagtaacttggggtgccagtctgcctctcatgtagggcccttcatcgatagctaccgctgcttccaaccaaagcaggagggggccttcacctgctggtcagcagtcactggcgcccgccatctcaactatggctcccggcttgactatgtgctgggggacaggaccctggtcatagacacctttcaggcctctttcctgctgcctgaggtgatgggctctgaccactgccctgtgggtgcagtcttgagtgtgtcctctgtgcctgcaaaacagtgcccacctctgtgcacccgcttcctccctgagtttgcaggcacccagctcaagatccttcgcttcctagttcctctcgaacaaagtcctgtgttggagcagtcgacgctgcagcacaacaatcaaacccgggtacagacatgccaaaacaaagcccaagtgcgctcaaccaggcctcagcccagtcaggttggctctagcagaggccagaaaaacctgaagagctactttcagccctcccctagctgtccccaagcctctcctgacatagagctgcctagcctaccactgatgagcgccctcatgaccccgaagactccagaagagaaggcagtggccaaagtggtgaaggggcaggccaagacttcagaagccaaagatgagaaggagttacggacctcattctggaagtctgtgctggcggggcccttgcgcacacccctctgtgggggccacagggagccatgtgtgatgcgtactgtgaagaagccaggacccaacttgggccgccgcttctacatgtgtgccaggccccggggtcctcccactgacccctcctcccggtgcaacttcttcctctggagcaggcccagctgaaccaatggaggcctggggacatctggcatggtcacccctgcacatgatctgaggccagctccccttccctgagctgcctcctgcttctccctcaaagtctcctacccttctcttcctcttttaagccctctcttcctcgctttccttcctacctagctccttgttggtgagcttcttgtgccttaatcctgtgacccagccccttacaccactttccaccttcctgtccgaagtacacggacactagctgccccaggaagttgtgtgattttaaatcacttctgtctttgctggaaagtgtatttgtgcataaataaagtctgtgtatttgtttcagggttgcaaaaaaaaaaaaaaa

SEQ ID NO: 520 - DNA, 2700 bp, Homo sapiens
gcggcgcctagtcccgggctggcgggagtgcagttctgagtcccgcccggcgtgcgcggagcggggcagccagcagcggaggcgcggcgcgcagcacacccggggaccatgggctccatgttccggagcgaggaggtggccctggtccagctctttctgcccacagcggctgcctacacctgcgtgagtcggctgggcgagctgggcctcgtggagttcagagacctcaacgcctcggtgagcgccttccagagacgctttgtggttgatgttcggcgctgtgaggagctggagaagaccttcaccttcctgcaggaggaggtgcggcgggctgggctggtcctgcccccgccaaaggggaggctgccggcacccccaccccgggacctgctgcgcatccaggaggagacggagcgcctggcccaggagctgcgggatgtgcggggcaaccagcaggccctgcgggcccagctgcaccagctgcagctccacgccgccgtgctacgccagggccatgaacctcagctggcagccgcccacacagatggggcctcagagaggacgcccctgctccaggcccccggggggccgcaccaggacctgagggtcaactttgtggcaggtgccgtggagccccacaaggcccctgccctagagcgcctgctctggagggcctgccgcggcttcctcattgccagcttcagggagctggagcagccgctggagcaccccgtgacgggcgagccagccacgtggatgaccttcctcatctcctactggggtgagcagatcggacagaagatccgcaagatcacggactgcttccactgccacgtcttcccgtttctgcagcaggaggaggcccgcctcggggccctgcagcagctgcaacagcagagccaggagctgcaggaggtcctcggggagacagagcggttcctgagccaggtgctaggccgggtgctgcagctgctgccgccagggcaggtgcaggtccacaagatgaaggccgtgtacctggccctgaaccagtgcagcgtgagcaccacgcacaagtgcctcattgccgaggcctggtgctctgtgcgagacctgcccgccctgcaggaggccctgcgggacagctcgatggaggagggagtgagtgccgtggctcaccgcatcccctgccgggacatgccccccacactcatccgcaccaaccgcttcacggccagcttccagggcatcgtggatgcctacggcgtgggccgctaccaggaggtcaaccccgctccctacaccatcatcaccttccccttcctgtttgctgtgatgttcggggatgtgggccacgggctgctcatgttcctcttcgccctggccatggtccttgcggagaaccgaccggctgtgaaggccgcgcagaacgagatctggcagactttcttcaggggccgctacctgctcctgcttatgggcctgttctccatctacaccggcttcatctacaacgagtgcttcagtcgcgccaccagcatcttcccctcgggctggagtgtggccgccatggccaaccagtctggctggagtgatgcattcctggcccagcacacgatgcttaccctggatcccaacgtcaccggtgtcttcctgggaccctacccctttggcatcgatcctatttggagcctggctgccaaccacttgagcttcctcaactccttcaagatgaagatgtccgtcatcctgggcgtcgtgcacatggcctttggggtggtcctcggagtcttcaaccacgtgcactttggccagaggcaccggctgctgctggagacgctgccggagctcaccttcctgctgggactcttcggttacctcgtgttcctagtcatctacaagtggctgtgtgtctgggctgccagggccgcctcggcccccagcatcctcatccacttcatcaacatgttcctcttctcccacagccccagcaacaggctgctctacccccggcaggaggtggtccaggccacgctggtggtcctggccttggccatggtgcccatcctgctgcttggcacacccctgcacctgctgcaccgccaccgccgccgcctgcggaggaggcccgctgaccgacaggaggaaaacaaggccgggttgctggacctgcctgacgcatctgtgaatggctggagctccgatgaggaaaaggcagggggcctggatgatgaagaggaggccgagctcgtcccctccgaggtgctcatgcaccaggccatccacaccatcgagttctgcctgggctgcgtctccaacaccgcctcctacctgcgcctgtgggccctgagcctggcccacgcccagctgtccgaggttctgtgggccatggtgatgcgcataggcctgggcctgggccgggaggtgggcgtggcggctgtggtgctggtccccatctttgccgcctttgccgtgatgaccgtggctatcctgctggtgatggagggactctcagccttcctgcacgccctgcggctgcactgggtggaattccagaacaagttctactcaggcacgggctacaagctgagtcccttcaccttcgctgccacagatgactagggcccactgcaggtcctgccagacctccttcctgacctctgaggcaggagaggaataaagacggtccgccctggcagtgaaaaaaaaaaaaaaaaaaaa

SEQ ID NO: 521 - DNA, 2480 bp, Homo sapiens
ggacgcccctgctccaggcccccggggggccgcaccaggacctgagggtcaagtgagtgagggatgacctcatgccctttctggccagcccagaacccctggccagtcgctgggctgggccaggctgagctccgactccttgtccagtgctctccccaggctggccccgcctcctccttcaggcccggaacttcccacagtcccaagccctagccctagggggttctcctcttctggtcctgcccgggaggcctcctgccttcccctgtgggcagggccagtgtgcccaattgcccgattgcccgtgctgggcagggtcctgcccggggggcctggtgggggaggcagggcaggaggttggagcagccctgcccagccccgtggccgccagctttgtggcaggtgccgtggagccccacaaggcccctgccctagagcgcctgctctggagggcctgccgcggcttcctcattgccagcttcagggagctggagcagccgctggagcaccccgtgacgggcgagccagccacgtggatgaccttcctcatctcctactggggtgagcagatcggacagaagatccgcaagatcacggactgcttccactgccacgtcttcccgtttctgcagcaggaggaggcccgcctcggggccctgcagcagctgcaacagcagagccaggagctgcaggaggtcctcggggagacagagcggttcctgagccaggtgctaggccgggtgctgcagctgctgccgccagggcaggtgcaggtccacaagatgaaggccgtgtacctggccctgaaccagtgcagcgtgagcaccacgcacaagtgcctcattgccgaggcctggtgctctgtgcgagacctgcccgccctgcaggaggccctgcgggacagctcgatggaggagggagtgagtgccgtggctcaccgcatcccctgccgggacatgccccccacactcatccgcaccaaccgcttcacggccagcttccagggcatcgtggatgcctacggcgtgggccgctaccaggaggtcaaccccgctccctacaccatcatcaccttccccttcctgtttgctgtgatgttcggggatgtgggccacgggctgctcatgttcctcttcgccctggccatggtccttgcggagaaccgaccggctgtgaaggccgcgcagaacgagatctggcagactttcttcaggggccgctacctgctcctgcttatgggcctgttctccatctacaccggcttcatctacaacgagtgcttcagtcgcgccaccagcatcttcccctcgggctggagtgtggccgccatggccaaccagtctggctggagtgatgcattcctggcccagcacacgatgcttaccctggatcccaacgtcaccggtgtcttcctgggaccctacccctttggcatcgatcctatttggagcctggctgccaaccacttgagcttcctcaactccttcaagatgaagatgtccgtcatcctgggcgtcgtgcacatggcctttggggtggtcctcggagtcttcaaccacgtgcactttggccagaggcaccggctgctgctggagacgctgccggagctcaccttcctgctgggactcttcggttacctcgtgttcctagtcatctacaagtggctgtgtgtctgggctgccagggccgcctcggcccccagcatcctcatccacttcatcaacatgttcctcttctcccacagccccagcaacaggctgctctacccccggcaggaggtggtccaggccacgctggtggtcctggccttggccatggtgcccatcctgctgcttggcacacccctgcacctgctgcaccgccaccgccgccgcctgcggaggaggcccgctgaccgacaggaggaaaacaaggccgggttgctggacctgcctgacgcatctgtgaatggctggagctccgatgaggaaaaggcagggggcctggatgatgaagaggaggccgagctcgtcccctccgaggtgctcatgcaccaggccatccacaccatcgagttctgcctgggctgcgtctccaacaccgcctcctacctgcgcctgtgggccctgagcctggcccacgcccagctgtccgaggttctgtgggccatggtgatgcgcataggcctgggcctgggccgggaggtgggcgtggcggctgtggtgctggtccccatctttgccgcctttgccgtgatgaccgtggctatcctgctggtgatggagggactctcagccttcctgcacgccctgcggctgcactgggtggaattccagaacaagttctactcaggcacgggctacaagctgagtcccttcaccttcgctgccacagatgactagggcccactgcaggtcctgccagacctccttcctgacctctgaggcaggagaggaataaagacggtccgccctggcagtgaaaaaaaaaaaaaaaaaaaa

SEQ ID NO: 522 - DNA, 1709 bp, Homo sapiens
aggccccgcttcgcgctaacgcttgcgatggttgaattcccctcctcacgccagcctaggagaagaagttcgtagtcccagaggtgaggcaggaggcggcagtttctggcgggtgagggcggagctgaagtgacagcggaggcggaagcaacggtcggtggggcggagaagggggctggccccaggaggaggaggaaacccttccgagaaaacagcaacaagctgagctgctgtgacagaggggaacaagatggcggcgccgaaggggagcctctgggtgaggacccaactggggctcccgccgctgctgctgctgaccatggccttggccggaggttcggggaccgcttcggctgaagcatttgactcggtcttgggtgatacggcgtcttgccaccgggcctgtcagttgacctaccccttgcacacctaccctaaggaagaggagttgtacgcatgtcagagaggttgcaggctgttttcaatttgtcagtttgtggatgatggaattgacttaaatcgaactaaattggaatgtgaatctgcatgtacagaagcatattcccaatctgatgagcaatatgcttgccatcttggttgccagaatcagctgccattcgctgaactgagacaagaacaacttatgtccctgatgccaaaaatgcacctactctttcctctaactctggtgaggtcattctggagtgacatgatggactccgcacagagcttcataacctcttcatggactttttatcttcaagccgatgacggaaaaatagttatattccagtctaagccagaaatccagtacgcaccacatttggagcaggagcctacaaatttgagagaatcatctctaagcaaaatgtcctatctgcaaatgagaaattcacaagcgcacaggaattttcttgaagatggagaaagtgatggctttttaagatgcctctctcttaactctgggtggattttaactacaactcttgtcctctcggtgatggtattgctttggatttgttgtgcaactgttgctacagctgtggagcagtatgttccctctgagaagctgagtatctatggtgacttggagtttatgaatgaacaaaagctaaacagatatccagcttcttctcttgtggttgttagatctaaaactgaagatcatgaagaagcagggcctctacctacaaaagtgaatcttgctcattctgaaatttaagcatttttcttttaaaagacaagtgtaatagacatctaaaattccactcctcatagagcttttaaaatggtttcattggatataggccttaagaaatcactataaaatgcaaataaagttactcaaatctgtgaagactgtatttgctataactttattggtattgtttttgtagtaatttaagaggtggatgtttgggattgtattattattttactaatatctgtagctattttgttttttgctttggttattgtttttttcccttttcttagctatgagctgatcattgctccttctcacctcctgccatgatactgtcagttaccttagttaacaagctgaatatttagtagaaatgatgcttctgctcaggaatggcccacaaatctgtaatttgaaatttagcaggaaatgacctttaatgacactacattttcaggaactgaaatcattaaaattttatttgaataaaaaaaaaaaaaaa

SEQ ID NO: 523 - DNA, 5970 bp, Homo sapiens
ggcgcggggagctgtgggcggcagctgcgtctcctgccaccgccctccctccgccacgatgccggggatcgacaagctgcccatcgaggagacgctggaggacagcccgcagacaaggtctttactaggtgtatttgaagaagatgccacagctatttccaactatatgaaccagttgtatcaagctatgcatcggatttatgatgcacagaatgaattaagtgcagcaacacacctgacctcaaaacttttaaaagaatatgaaaaacagcgttttccattgggaggtgatgatgaagttatgagctctacattgcaacagttttcaaaagttatagatgagcttagctcttgtcatgcagtgctttcaactcaacttgctgatgccatgatgttccccattacccagtttaaagaaagagatctgaaagaaatactaacattaaaggaagtatttcagattgcaagtaatgatcatgatgctgcgattaatagatatagccgtttatcaaaaaaaagagaaaatgacaaggtgaagtatgaagtaacagaagatgtgtacacatccagaaagaaacaacaccagaccatgatgcattatttttgtgcattaaatactcttcagtacaagaagaaaatagcattgttagaacctctacttgggtacatgcaagctcagataagtttctttaagatgggttctgaaaatcttaatgaacaactggaagaatttttagctaatattggaacaagcgttcagaatgttcgcagggaaatggacagtgatatagagaccatgcaacagacaatagaggatttggaagtagccagtgatcccttatatgtgcctgacccagaccccaccaaatttcctgttaatcgaaatttaacccgaaaggctggataccttaatgctaggaataaaacaggcttggtgtcatctacctgggacagacagttttacttcacgcagggtggaaatttaatgagtcaggcccgtggggatgtagcaggaggcctggccatggacatagacaactgttcagtgatggctgtggactgtgaagacagacgatattgttttcagatcacctctttcgatggaaaaaaatcttcaattttgcaagcagagagtaaaaaagatcatgaagagtggatctgtacaataaacaacatatctaaacaaatatacttaagtgaaaatccagaggaaactgctgcacgagtaaatcaatcagctctggaagctgtcactccttccccatctttccagcagaggcacgagagcctgcggccagcagcaggacaatctcggccaccgacagctcgaaccagcagttcaggatccttaggatctgagtctacaaatttggctgccctctctctagattctcttgttgccccagacaccccaatacagtttgacataatttctcctgtgtgtgaagatcagcctggccaggcaaaagcctttggccagggaggcaggcgtacaaatccatttggagaatctggaggaagtacaaaatctgaaactgaagattctattcttcatcagttatttattgtccgattccttggttcaatggaggtgaaatcagatgaccatccagatgttgtttatgaaactatgcgccaaatcttagctgcccgggccatccataacatctttcgtatgacagaatcgcatttattagtcacttgtgactgtttaaagttaattgatccacagacacaagttacaaggctcacgtttccattaccttgtgtagttttgtatgctacacaccaggaaaataagcgcctttttggatttgttcttcggacatcaagcgggagaagtgaaagtaatctgtcatcagtctgctatatatttgagtcaaacaatgagggggaaaagatatgtgattctgttggactggcaaaacagatagctttgcatgctgaactggatcgtagggcatcagaaaaacaaaaagaaatagagagagtaaaagagaagcaacagaaagaactcaataaacaaaaacagattgaaaaggacttggaagaacaaagtcggttgatagctgcttccagtagaccaaaccaagccagtagtgaggggcagtttgttgtccttagcagtagccagtcagaagagagtgatttgggagaaggaggaaagaagagagaatcagaagcataagcttatacttttggtagatattcccccttggaatttgacagtttctatggtgaaatggcagaaggtaacaactatgttgaaatatcaaggaggagattaagctttatatttgcttatttgttgtagctacattttaaaaaaaagattgaacttgatgacttaggtttgcattgatcttttttcccccttaaacataatgtactatgtattaacatctaaaggaaacctgctcatctccctgaagcagactgctgaggaattacatttgctcaagaattttttccgtcaaattgtgaacttttaattcttgcattgtaattggctgtgtccataagaaatcatttattcttcaggcttagacattcatggatatgcttttctttcattaggaacattttgctggtgatgaggaagcatttagctgaataagtttaaagccctttatacagagaattctacaagtttgcaaatattttaacaatattaaatgtgcaatagaacttttataaaataattagaacagagattttacagttaaggtttcaaattgtggcaggtggtactgttgatctcagggtactttctgggattgctcacatttctctaatgtactgcacttgatgccagtaggaaagaagcttaagtgtcttcagttcaagattgatagagcccttggcattttattatcacattcttagttctcaggttgggacttcaattactgctgcagagcagtagtggttaaaaataagatattggaatttattaaaagatttttgttcaatacattttagattaggattgacaagtaaagatactgctatggaatgatacattgtattttctgcattgtgtgaaatagtttttattgaaagtcaagtgacatttcaaaagaagttctataacaattatgtttcatgcttaaagtaaaaattcccagagtttagtttagaaaatgtaatcttttaaatttcagactgatatattcccagtattttcataatgccatgttttgataaagtactgaatcaccactttatatccacaaaggcaaataactaatgtatgataatagaataatttgcactaattattgtaaatatgtctactcttcaaatgagtaaaaggtccaattttgtgaaagattgaaaatgaattgaatgcctagtagagtataggagaagttgaccaaggaaggatttaacctggtgccaaggttaaaataacatttctctactgcctattgtttatgttaaaccttaattttttttctgtaatcacttttaacactgctaatagaaattatgttttcatgtgtttcacatgaaaaagtatatatatacaaagttaatatagtgggtaaaatactttacatagtcacacatttacaaatttttcaagaggttagccactaagactttaataattttacaagggaaaaagcctttttttttctttgatatacagttttttcttcttagttctgcattagaaatggcatctgttttaggtctcaaaatataactcggctgtttcacactgtatatgtacattgttttctgtaggaataggataatgatatataggatcatgatattccttctatccatgtgccaaatgggtgtaatgtttatttactgatgctttatgttaccaaaacatacagtaaaaaagtagaaatttatgaaatacttttgataaaaagtttattttgtgcttaccaaaaggaatgctttcacaatagtgtatcagttcttttgttttgttaaagttggaatttattctgttgccagcatttaagtagtcatggcaagtcctgtttttaagaccttttggagactggagctttctgttccattaagtcttttgtttatactacaaattgtcacctcacttagttcagatgaaatctgttactctacaaggaaggtgttcatcattaggaggcagctttactaagctggtgctttgcatggtagcaagtgctgccctttatcagcaccctgggtcatagtgtaggctagagttaaggcactggcagacttagggatgctggacagacctgtagttcgttttaagtcatgttcacaggaatttctacaataataaacccatcatctccataggtcagatcgaagtgcattccaatgctaaatagaagttatgagtgggtttaacaattttagatgattcagcttttgttccattactgttgaactatatgaactattccattactgcagagatttaagtatctgttttaataagctctttttgttatttaaaggctgcccatgggtttctgcctagtggtaaagctgattgttaccctcctttgaaatcccttctagttctgagatgctttgagggtaactggattcgattttgggatatcttttctcacattcagacttacacttaatggtgttagaaatcaacaaaactcctttttaaaaagaaaagatattaagcctgcctacttctacaatgcattctgttacctatttgaacagtatgtttgtaactatggcaatgaagtcagtagataggaaaccagttattccttctacctttaaaaattttgagaacttgccaaccagggattaaagctattatcttgaacagagtccctaaagctagtctagtttttgccacatctgcaatgattattgtttaatttcaaaagaatcctcaggctctacaatctaggggtggtaaatgtgtttccactatacttgggaaaaggtcagtaggatgtgcatcctagggaagataaaatcgtatatggtaaaggcatttgagttaattttgcattatatctaggaaccatattatttaaaatttgaatcctattaatgctgagagatcctaagagctagtatgttgtaaaacctgccacctgaataaaatgaaaaaaaaaagtgtttttttgagacagagtcttgctctgttgcccaggctggagtgcagtggtgtgatcttgggtcactgcaaactccgcctcccaggttcacgccattctcctgcctcagcctcccgagtagctgggaccacaggggcccaccaccgcgcccggctaattttttgtatttttagtagagacggggtttcaccgtgttagccaggatgttctcgatctcctgacctcatgatccgcccgcctcggcctcccaaagtgctgggattacaggcgtgagccaccgtgcccggccctaaaatgaaattattaatgttggttctgaaacagcctcttagcattcagattgtattttaaatacttaaacacaccaattgtagaaagcaaccctttatttttagcaagtttggtttactcttctcccatgagattttgtctttctacattaactagtaagacataaagatttgaaactggaactatattatactttttaaccaatctctgtggcttcactcatgaaatttacttcagttaatatgagactgggggttaagttgtaactaatatgcaaaattgctttgtatatttggtgattttgtaatgtaagtgaattgattcttatttcactgatactattaatcatgcagtgtacaattcaaaatcatgcaatgtttcactttagaattggatttgaagaactcgactttatgtgatcatggtattggtatacatgtggggtggagaacttattttttcattttgtcacaataggtatatactgacaaggcttcaggaaaaaagttgttagaagattttttaatgtataataaagtccatgatttttgtacagtgttttttaatg

SEQ ID NO: 524 - DNA, 2453 bp, Homo sapiens
aacggatgggcggggagggggcggggccgggcaacccggaaggtccggcgtcccagccgcctacctcgctgggaccctggtcttgctgtcccccgctggcctcctgcccaagcgactgcggccaggatgggccggaaggtgaccgtggccacctgcgcactcaaccagtgggccctggacttcgagggcaatttgcaaagaattttaaagagtattgaaattgccaaaaacagaggagcaagatacaggcttggaccagagctggaaatatgcggctacggatgttgggatcattattacgagtcggacaccctcttgcactcgtttcaagtcctagcggcccttgtggagtctcccgtcactcaggacatcatctgcgacgtggggatgcctgtaatgcaccgaaacgtccgctacaactgcagagtgatattcctcaacaggaagatcctgctcatcagacccaagatggccttggccaatgaaggcaactaccgcgagctgcgctggttcaccccgtggtcgaggagtcggcacacagaggagtactttctgcctcggatgatacaggacctgacaaagcaggaaaccgtacccttcggagatgcggtgctggtgacatgggacacctgcattggaagtgagatctgtgaggagctctggacaccccacagcccgcacatcgacatgggcctggatggcgtggagatcatcaccaacgcctcgggcagccaccaagtgctgcgcaaagccaacaccagggtggatctcgtgactatggtcaccagcaagaacggtgggatttacttgctggccaaccagaagggttgtgacggggaccgcctgtactacgacggctgtgccatgattgccatgaacggaagcgtctttgctcaaggatcccagttttctctggatgacgtggaagtcctgacggccacgctggatctggaggacgtccggagctacagggcggagatttcatctcgaaacctggcggccagcagggcgagcccctaccccagagtgaaggtggactttgccctctcgtgccacgaggacttgctggcacccatctctgagcccatcgagtggaaataccacagccctgaggaggagataagccttggacctgcctgctggctctgggattttttaagacgaagtcaacaggcagggtttttgctgcccttgagtggcggggtggacagcgcagccaccgcctgcctcatctactccatgtgctgccaggtctgcgaggccgtgaggagtggaaatgaggaagtgctggctgatgtccgcaccatcgtgaaccagatcagctacaccccccaggatccccgagacctctgtggacgcatactgaccacctgctacatggccagcaagaactcctcccaggagacgtgcacccgggccagagagttggcccagcagattggaagccaccacatcagtctcaacatcgatccagccgtgaaggccgtcatgggcatcttcagcctggtgacggggaagagccctctgtttgcagctcatggaggaagcagcagggaaaacctggcgctgcaaaatgtgcaggctcgaatacggatggtcctcgcctatctgtttgctcagttgagcctctggtctcggggtgtccacggtgggctcctcgtgctgggatccgccaacgtggatgagagtctcctgggctacctgaccaagtacgactgctccagtgcggacatcaaccccataggcgggatcagcaagacggacctcagggccttcgtccagttctgcatccagcgcttccagcttcctgccctgcagagcatcctgttggcgccggccaccgcagagctggagcccttggctgatggacaggtgtcccagaccgacgaggaagatatggggatgacatatgcggagctctcggtctatgggaaactcaggaaggtggccaagatggggccctacagcatgttctgcaaactcctcggcatgtggagacacatctgcaccccgagacaggtcgctgacaaagtgaagcggtttttctccaagtactccatgaacagacacaagatgaccacgctcacacccgcgtaccacgccgagaactacagccctgaggacaacaggtttgatctgcgaccatttctgtacaacacaagctggccttggcagtttcggtgcatagaaaatcaggtgctacagctcgagagggcagagccacagtccctggacggcgtggactgaggccggttccttcctggaggcctcctgtcctcggggaccccagcacctcatcatcagcattgctggagccaagggtaggagccctacactaggagcccaggatgggacggcgcatcagccgagagggagggaacttttcagtcaaattcctcaaaaagaggctggaataaagcctgggcttaaaaaaaaaaaaaaaaaaaaaaaaa

SEQ ID NO: 525 - DNA, 3018 bp, Homo sapiens
ataaaaccggcccggttctgtggaaagtgggcggcggagccagggtccctggaatggcggagactctgtcaggcctaggtgattctggagcggcgggcgcggcggctctgagctccgcctcgtcagagaccgggacgcggcgcctcagcgacctgcgagtgatcgatctgcgggcggagctgaggaaacggaatgtggactcgagcggcaacaagagcgttttgatggagcggctgaagaaggcaattgaagatgaaggtggtaatcctgacgaaattgaaattacctccgagggaaacaagaaaacatcaaagaggtctagcaaagggcgcaaaccagaagaagagggtgtggaagataacgggctggaggaaaactctggggatggacaggaggatgttgagaccagtctggagaacttgcaggacatcgacatcatggatatcagtgtgttggatgaagcagaaattgataatggaagcgttgcagattgtgtcgaagacgatgatgctgataacctccaggagtccctgtcggatagtagagagctagtcgagggggaaatgaaagagcttccggagcagcttcaggaacatgctatagaggacaaagaaactataaacaatttagatacttcatcatctgacttcactatattacaggaaattgaagagccatccctggagccagaaaatgagaaaatactcgacattttgggggaaacttgtaaatctgagccagtaaaagaagaaagttccgagctggagcagccatttgcacaggacacaagtagcgtggggccagacagaaagcttgcggaggaagaggacctatttgacagcgcccatccggaagagggtgatttagatttggccagcgagtcaacagcacacgctcagtcgagcaaggcagacagcctgttagcggtagtgaaaagggagcccgcggagcagccaggcgatggcgagaggacggactgtgagcctgtagggctagagccggcagttgagcagagtagtgcggcctccgagctcgcggaggcctctagcgaggagctcgcagaagcacccacggaagccccaagcccagaagccagagatagcaaagaagacgggaggaagtttgattttgacgcttgtaatgaagtccctccggctcctaaagagtcctcaaccagtgagggcgctgatcagaaaatgagttctcccgaagatgactcggatacaaaaaggctttccaaagaggaaaagggtcgcagcagttgtggtagaaatttctgggttagtggactctcttctacaaccagagctacagatttgaagaatcttttcagcaaatatgggaaggtggtgggcgccaaggttgtgacaaatgcccggagtcctggagctcgctgttacggttttgtcacgatgtccacagcagaagaggccacaaaatgcattaaccacctgcacaagacggagctccacggaaagatgatctccgtggagaaagccaaaaatgaacctgtgggaaagaaaacctctgacaaaagagacagtgacgggaaaaaggagaagtcgagcaacagtgacagatctacaaaccttaagagggatgataaatgtgacagaaaagatgatgctaagaagggtgacgacggaagtggagaaaagagtaaggaccaagatgatcagaaacctggcccctcagagcgatctcgagccacaaagtcaggaagtcgagggaccgaacggactgtagtaatggataaatccaaaggggtgcctgtgattagtgtaaaaacgtccgggtccaaagagagagcttccaaaagccaggatcgcaaatcagccagcagagagaagcggtccgtcgtgtcctttgataaggtcaaggagcctcggaagtcaagagactcagagtcccatagcagggtgcgtgaacgcagtgaacgcgaacaacgcatgcaggcgcagtgggagcgcgaggagcgtgagcggctggagattgcccgagagaggctggccttccagcgccagcggctggagcgggagcgcatggagcgggaacggctggagcgcgaacgcatgcacgtggagcacgagcgcaggcgcgagcaggagcgcatccaccgtgagcgcgaggagctgaggcgccagcaggaactgcgctatgagcaggagcggcggcccgcggtgcggcggccctacgacctggaccggcgagatgatgcctattggccggaagccaagcgggccgccctggatgagcgctaccattctgactttaaccgccaggaccgcttccacgactttgaccacagggaccgcggccgctaccccgaccactcggtggacaggagagaaggttcaaggtcaatgatgggagaacgagaaggacagcattacccagaacgccatggaggaccagagcgccacggccgggactcccgcgatggctgggggggctatggctctgacaagaggatgagcgagggccgggggctgcctcctccccccagacgtgactggggggaccatggccgaagagaggatgaccggtcatggcagggcacggccgacgggggcatgatggacagggatcacaagaggtggcaaggtggcgagagaagcatgtccggtcactccgggcctggccacatgatgaaccgaggaggaatgtcagggcgcggcagctttgccccaggcggggcctcccggggccaccccatcccacacggtggcatgcagggcgggtttggaggccagagccgggggagcaggcccagcgatgcccgcttcactcgccgctactgagtacttggaatcctgtgtcctgtctcgtggcaacaaggctatgttctgttaggagttaccttaaactgtgtaaaaatatttttttttaatctgctgccatattgtagctcaatacaatgtgaatttgtttttcgttttggggttttttttttttgtaataaatgtgtttccgttcacataccctttaaaaaaaaaaaaaaaaaaaaaaaaaaaaaaa

SEQ ID NO: 526 - DNA, 1419 bp, Homo sapiens
acacgccgcctgccaggcgtgagtcttcctcccgctctgcgccgtcgccccgtccacacgccgccaccctcgcgtcagttgtcgctccgcgcctgcgcccgttgtctccctgctcgctccgggtcccggcgccgcgccatgtgggctgcggcgggcgggctgtggcgctcccgcgcgggtctccgggccctgttccgtagccgcgatgctgcgctatttccaggctgcgagcggggacttcactgctctgctgtctcctgcaagaactggctcaagaaatttgcctcgaaaaccaaaaaaaaggtttggtatgaaagtccttccttgggttctcactcgacttacaaaccatccaagttggaattcctcatgaggagcacctcaaagaaaaccaggaaggaagaccatgcgcgcctgagggccctgaacggcctcctctataaggcactgacagacctgctgtgtacccctgaagtgagtcaggagctgtatgaccttaacgtggagctctccaaggtttccctgactccagacttctcagcctgccgagcgtactggaagacaacgctctctgctgagcagaacgcacacatggaggctgtcctgcagagaagtgccgcgcacatgaggcaccttttgatgtcccagcagaccctgaggaatgtgccaccgatagtgtttgttcaagacaagggaaatgcagctctagctgagcttgatcagttactggcagtcgcagactttggaccccgggatgaaagagacaactttgtacaaaatgatttcagggaccctgatgccccacaaccctgcggcaccacagagccgaccacaagctccagtctgtgtgggatcgatcatgaggcgctcaacaagcagattatggagtacaaaaggaggaaagataaagggctcgggggcctggtgtggcaggggcaggtggctgagctgacaacgcagatgcaaaagggaaggaagagggccaagccccgcctggagcaggacagctccctcaagagttacctgtcaggcgaggaggttgaagatgacctggacctggttggtgccccggagtacgaatgctatgccccggacacagaggagttggaggcagagagaggaggtggcagaacagaggatggccacagctgcggagcaagcagggagtagatggagaggctctgcccatcccacatttgcagggaaaagcattggcacgcaacgcagcatgtggcttcattgaggcagttgatggagttaaaccatctgctcttctgctacttcaacattttctagcttttccgtgtatctaaacacaatttgctacacaagtcactgtttttttttccatgcactgtgtgtaatttaaaaattaaatggccatcttatcacagattctcacaaaaaaaaaaaaaaaaa

SEQ ID NO: 527 - DNA, 1570 bp, Homo sapiens
tgaggtcagaaggcggaaccgctgctgggagacggcgggatctctttcgccatggctgccgggccgatctccgagcggaatcaggatgccactgtgtacgtggggggcctggatgagaaggttagtgaaccgctgctgtgggaactgtttctccaggctggaccagtagtcaacacccacatgccaaaggatagagtcactggccagcaccaaggctatggctttgtggaattcttgagtgaggaagatgctgactatgccattaagatcatgaacatgatcaaactctatgggaagccaatacgggtgaacaaagcatcagctcacaacaaaaacctggatgtaggggccaacattttcattgggaacctggaccctgagattgatgagaagttgctttatgatactttcagcgcctttggggtcatcttacaaacccccaaaattatgcgggaccctgacacaggcaactccaaaggttatgcctttattaattttgcttcatttgatgcttcggatgcagcaattgaagccatgaatgggcagtacctctgtaaccgtcctatcaccgtatcttatgccttcaagaaggactccaagggtgagcgccatggctcagcagccgaacgacttctggcagctcagaacccgctctcccaggctgatcgccctcatcagctgtttgcagatgcacctcctccaccctctgctcccaatcctgtggtatcatcattggggtctgggcttcctccaccaggcatgcctcctcctggctccttcccacccccagtgccacctcctggagccctcccacctgggatacccccagccatgcccccaccacctatgcctcctggggctgcaggacatggccccccatcggcaggaaccccaggggcaggacatcctggtcatggacactcacatcctcacccattcccaccgggtgggatgccccatccagggatgtctcagatgcagcttgcacaccatggccctcatggcttaggacatccccacgctggacccccaggctctgggggccagccaccgccccgaccaccacctggaatgcctcatcctggacctcctccaatgggcatgcccccccgagggcctccattcggatctcccatgggtcacccaggtcctatgcctccgcatggtatgcgtggacctcctccactgatgcccccccatggatacactggccctccacgacccccaccctatggctaccagcgggggcctctccctccacccagacccactccccggccaccagttccccctcgaggcccacttcgaggccctctccctcagtaaattcacattttccttcctcctgttacattttcccaatatcttttctattccttggaccaatcagagatgctgtagctccttggggcaaaggtactaatccctttcagcacccccactccattcccctttttaatgtaactttttccacaggaggtatttcttttttatgttggtcctgagtattttgcaaatgcacagagaaaataaaactaaactccttgttaaaaaaaaaaaaaaaaaaaaa

SEQ ID NO: 528 - DNA, 1973 bp, Homo sapiens
ctttgaaaaagacttcttttgagctaactttcttatactggtacctttctaatctcactacaatatgtaacattggtgttcgatctcaagtatttctgaatatattcccctatccacagaaatatactctgggggaaaaaaaatagaacaaattcttgccgtcctgaccattgaacaagagactaattagacaatggggctagaaaaacctcaaagtaaactggaaggaggcatgcatccccagctgataccttcggttattgctgtagttttcatcttacttctcagtgtctgttttattgcaagttgtttggtgactcatcacaacttttcacgctgtaagagaggcacaggagtgcacaagttagagcaccatgcaaagctcaaatgcatcaaagagaaatcagaactgaaaagtgctgaagggagcacctggaactgttgtcctattgactggagagccttccagtccaactgctattttcctcttactgacaacaagacgtgggctgagagtgaaaggaactgttcagggatgggggcccatctgatgaccatcagcacggaagctgagcagaactttattattcagtttctggatagacggctttcctatttccttggacttagagatgagaatgccaaaggtcagtggcgttgggtggaccagacgccatttaacccacgcagagtattctggcataagaatgaacccgacaactctcagggagaaaactgtgttgttcttgtttataaccaagataaatgggcctggaatgatgttccttgtaactttgaagcaagtaggatttgtaaaatacctggaacaacattgaactagaaactcagaaagtggtccttgtgatggaaagagaaaagaaaaaccaattagaataaggcagaatgtacgtgcgtcattggaacacagaaaacatgctggttcatacagcgtttttagtcataatggtcttttttattttgtttgattcattcgagacaacatgtgtgtatgtgtgtgtgtgtgtgtgtagataatgtggtttttgtatggtgtttgatggaaggaataatctttctttgctttcttagtagtatttcaaggtgtttacttttcaattggtgtgcactgaatgcatgtatggaagaatagcgtgaataatgcaatctctttgtcatttttccccttctcagactcttagctcttaaaattcaaagatgggatattctaactggtagtggtgcatcatttttaacccaaatattgcaagcactttaaagatttgaaaccacatttttattgtttgatgtttcattttcagactttttaatgtcagtcattacaattacattgcatgaggaaaatttttccagaacaacagtgtggaatagttctgaattatgctgttctacagatagaaaaaaagtccaaatgcctttaaaaatttacttcttactccacccaacacgtttttgcaaagcaagaagtctttgtaagacaccttaaacaaagtccttcaattctacagcagaggaaataaaatcccccagaagccaaagggctcaccttcacattgttagttcatgacagacccaggtgtgcttcattagagataacatacattccctttggtatcacaggaagttactggggattactcgacctcattacttagctaacgactggataaaatttcttaattgtttgaagtaacattgtattcgtgtttgcattattaatttgaatagaaaataatcacattttcaacccatttatacaaattgttaatgtttctttagagctgtataactatagtttgaactagcaaggaagttattgttttgacaaccagaaattatgcttttctggtgcatgaaacattaattgcaaagggcagtcacatccaactttaataaaatatggtggtctttcttaaaaaaaaaaaaaaaaaaaaaaaaaaaaaaaaaaaaaaaaa

SEQ ID NO: 529 - DNA, 2563 bp, Homo sapiens
ggcgctgccgggtctcggttcgggttcgttgccccggtgccgggaccgggccggtctctccggccgccccagccgggcgcagcagccggaggtgtcgggaccctctggacccaccctagcgggccccgccggcggtcggcctccggtccgggctcccagtcgcgccgtcctcgccgccccatggagtcccagtgcgactactcgatgtacttcccggccgtgccgctgccgccgcgcgcggagctggcaggggatccgggccggtaccgggcgctgccccggcgcaaccatctgtacttgggggagactgtccgttttctgctggtgttgcgctgccggggcggtgcggggtccggcaccgggggcggcccgggcttgggctccagaggagcctgggcagaactggcaaccgccctggccgccctggcctcggtcagcgccggaggcgggatgccggggggcggcggcgccggcgaccaggattcggagcccccagggggaggggatcctgggggtgggggtttgttccgaggctgcagcccccttctcacccacggcccgggccctgctacctcagggggagcgaccacgctgcctgtggaggaaccgattgtgtccacagatgaggtcatcttcccactcaccgtttcactggatagactgcccccagggacacctaaggccaagattgtagtgactgtgtggaagcgggagattgaggcaccagaggtcagagatcaaggctacctgcgattgctgcagacccgatctcctggggagacattccggggcgagcagagcgctttcaaggcccaagtgagcacgctgctgactctgctgccccctccggttctgagatgccggcagttcactgtggctggaaaacacttgaccgtgctcaaggtgctgaacagctcctctcaggaggaaatctccatctgggatatccgaatcctccccaacttcaacgccagttatctacctgtcatgcccgatggctctgtgctgctggtggacaatgtctgtcaccagtctggggaagtctccatgggctccttctgccgcctacccgggacctctggctgcttcccctgcccgctgaatgccctggaggaacacaacttcctgtttcagctgagagggggtgagcagccccctccaggggccaaggagggcctggaagttcccctgattgctgtggttcagtggtctaccccaaagctgcccttcactcagagcatctacacccactaccgcctgcccagtgtccgcttggaccgcccgtgttttgtgatgaccgcttcttgtaagtcccctgttcggacctacgagcgtttcactgtcacctacacgctgcttaacaatctccaagacttccttgctgtgaggctcgtgtggaccccagagcatgcacaggctggaaagcagctgtgtgaggaggagcgccgggccatgcaggctgccctggactccgtcgtctgccacacgcccctcaacaaccttggcttttcccggaagggcagcgcgctcaccttcagtgtggccttccaggctctgaggacggggctcttcgagctaagccagcacatgaaactgaagctgcagttcaccgccagcgtgtcccaccctccacccgaggcccggcccctctcccgcaagagcagccccagcagccctgctgtccgggacttggtggagaggcatcaggctagcctgggccgctcccagtccttctcccaccagcagccttcccgaagccacctcatgaggtcgggcagtgtgatggagcgcagagccatcacgccccctgtggcctctcctgttggccgccccctctacctgcccccggacaaggctgtgttgtctctggacaagattgccaagcgcgagtgcaaggtcctggtggtggaacccgtcaagtagcaccgtgccagctctgttccctcttacactccagagacccaacgcccccagaggggatccctgctcctgggctgtgcctcccctgggatgcctcccagacgggggtgaagaggcctggcagagctgcctgtcttgtgtctgctgatgagggatgggggaagaagctgtgaagtgggcgggcatggctgggactaagccaccagtattccccgagttcctgtggggggggctggccccacccctaggccagggcaagggttcccagagctcccttgtccccggccctttaccctggttctgagtttacaaagtctcttcctcattcccgttgagttctttcccacctctgacattccctccctccctcccgcagggctgagattagagggtggtgatggctaagggcccctgacagtgaccttcctgtctcaggggttggggacagggccaggtagcctcctgccccttatgtttacgtttgcagcctgaagcactttaatttttttttttttggtctgttcctgtaacttattttccaactattgcttccaactgaaataagactattaaatgcctgttcaggagggagaaaaaaaaaaaaaaaaaaaaaaaaaaaaaaaaaaaaaaaaaaaaaaaaaaa

SEQ ID NO: 530 - DNA, 1689 bp, Homo sapiens
cgggagcgtggggtatctcgaggtgccgggttgcaggcgctcaggggcgctagggtttgaggcctgctttctgctcgcgccagcagagcactacctgaggcagcgaggcgcagcgagcctagcctccccgcgccctgggcagtgtggccatggagaatcaggtgttgacgccgcatgtctactgggctcagcgacaccgcgagctatatctgcgcgtggagctgagtgacgtacagaaccctgccatcagcatcactgaaaacgtgctgcatttcaaagctcaaggacatggtgccaaaggagacaatgtctatgaatttcacctggagttcttagaccttgtgaaaccagagcctgtttacaaactgacccagaggcaggtaaacattacagtacagaagaaagtgagtcagtggtgggagagactcacaaagcaggaaaagcgaccactgtttttggctcctgactttgatcgttggctggatgaatctgatgcggaaatggagctcagagctaaggaagaagagcgcctaaataaactccgactggaaagcgaaggctctcctgaaactcttacaaacttaaggaaaggatacctgtttatgtataatcttgtgcaattcttgggattctcctggatctttgtcaacctgactgtgcgattctgtatcttgggaaaagagtccttttatgacacattccatactgtggctgacatgatgtatttctgccagatgctggcagttgtggaaactatcaatgcagcaattggagtcactacgtcaccggtgctgccttctctgatccagcttcttggaagaaattttattttgtttatcatctttggcaccatggaagaaatgcagaacaaagctgtggttttctttgtgttttatttgtggagtgcaattgaaattttcaggtactctttctacatgctgacgtgcattgacatggattggaaggtgctcacatggcttcgttacactctgtggattcccttatatccactgggatgtttggtggaagctgtctcagtgattcagtccattccaatattcaatgagaccggacgattcagtttcacattgccatatccagtgaaaatcaaagttagattttccttttttcttcagatttatcttataatgatatttttaggtttatacataaattttcgtcacctttataaacagcgcagacggcgctatggaaaaaaaagaaaaagatccactaaaaagaaagatttagatggcttcttgccagtttgagcctaatctgattcttacagttttaccttcttgaaccaatgtaaaagtttttttaatgttaaatgattaaattctcagtgaggctatcttccttttccccagtaacattcctgaatttactgttatcttattgtagtacttgcatgacatggattcctgatatctgatgagaggttcattcttgtgtattcagttaatgacaccaaaaggctcagcccaccccaaccctatctcatgttcagtctgtctaatacatgccagagatttttttttcaaaaagtgctttatccctacaatgtactgacagttcttacagttgaggatttggttcttttcagctaattgcttggtggattaaaaaaagcaagactaatgtcaactctaatggaaggctggttaaaagtggactcaggcaagg

SEQ ID NO: 531 - DNA, 2274 bp, Homo sapiens
ggcggtcggtctcgccttgtcgccagctccattttcctctctttctcttcccctttccttcgcgcccaagagcgcctcccagcctcgtagggtggtcacggagcccctgcgccttttccttgctcgggtcctgcgtccgcgcctgccccgccatgaatgaggagtacgacgtgatcgtgctgggcaccggcctgacggaatgtatcctgtcaggtataatgtcagtgaatggcaagaaagttcttcatatggatcgaaacccttactacggaggagaaagtgcatctataacaccattggaagatttatacaaaagatttaaaataccaggatcaccacccgagtcaatggggagaggaagagactggaatgttgacttgattcccaagttccttatggctaatggtcagctggttaagatgctgctttatacagaggtaactcgctatctggattttaaagtgactgaagggagctttgtctataagggtggaaaaatctacaaggttccttccactgaagcagaagccctggcatctagcctaatgggattgtttgaaaaacgtcgcttcaggaaattcctagtgtatgttgccaacttcgatgaaaaagatccaagaacttttgaaggcattgatcctaagaagaccacaatgcgagatgtgtataagaaatttgatttgggtcaagacgttatagattttactggtcatgctcttgcactttacagaactgatgattacttagatcaaccgtgttatgaaaccattaatagaattaaactttacagtgaatctttggcaagatatggcaaaagcccatacctttatccactctatggccttggagaactgccccaaggatttgcaaggctaagtgctatttatggaggtacctatatgctgaataaacccattgaagaaatcattgtacagaatggaaaagtaattggtgtaaaatctgaaggagaaattgctcgctgtaagcagctcatctgtgaccccagctacgtaaaagatcgggtagaaaaagtgggccaggtgatcagagttatttgcatcctcagccaccccatcaagaacaccaatgatgccaactcctgccagatcattattccacagaaccaagtcaatcgaaagtcagatatctacgtctgcatgatctcctttgcgcacaatgtagcagcacaagggaagtacattgctatagttagtacaactgtggaaaccaaggagcctgagaaggaaatcagaccagctttggagctcttggaaccaattgaacagaaatttgttagcatcagtgacctcctggtaccaaaagacttgggaacagaaagccagatctttatttcccgcacatatgatgccaccactcattttgagacaacgtgtgatgacattaaaaacatctataagaggatgacaggatcagagtttgactttgaggaaatgaagcgcaagaagaatgacatctatggggaagactaacagcagtacatgttattatgtaattaggacacatttaaaatttggcaaataatgcatataatgaaatcaatattgtaaggcctgcttttgtaatgaaaatggagagaatgaagagcgctgtgccagtaaatactccccttcacctttctaattattaacttgttttcatggagtggctattcagcattggcagttaccacattctgttcaatttaaccaaactggcttttttttttttctagtgaagttaaacaaacattgggataccgacacagacaacttgagacagtttttttaatcttttaatcagtgtagctatgtgctgctgctgctcaagagctggatccatacaggttgtgtgtcatctgtcctcttgaggttcaggagattctaaattgaatattccacggtttgggacagcatccggaagttttccctatgactttatattttgtattatgtcaaatgttatggcagggcccaaatagcatagccacaagtttggtttatgtgggcataaaattctaaccaaaccccagacatagggagtcatttggagaaagcctgtatgtggtgttttaacctaataaagttgatgagagagaaggggagaggaagcgaacataaagcgggtcaagtgtagtgcatcttttgtatctcaggcgtggcttcttcagtggaccaagctgcaatgcagtattgacttgacagagcctctacttctgtctcaaaatggctccaaatgatttctgtactgcaaaataaagccaaattctggaaacta

SEQ ID NO: 532 - DNA, 2824 bp, Homo sapiens
gttttgaaagttgatggagcgaactgcttttccaaagactcttttgaaaaactttttaagtaggccattctgactttaacatttctctttgtcttaacattagacaaaaagtaaccttcctgaagaggacatgtgattggaagttgtcaattgttgaagcattggtaactccagtctctaacgttttagaaaatcataacaagcggttctctaccctgtaaaggtgaactactgagttcttcattatgtctgatggagattatgattacctcatcaagtttttagctttgggagactctggtgtagggaagaccagtgtactttaccaatatacagatggtaaatttaactccaaatttatcacaacagtgggcattgatttcagggaaaaaagagtggtgtacagagccagtgggccggatggagccactggcagaggccagagaatccacctgcagttatgggacacagcagggcaggagaggtttcgtagcttaacgacagcgttcttcagagatgctatgggttttcttctactttttgatctgacaaatgagcaaagtttcctcaatgtcagaaactggataagccagctacagatgcatgcatattgtgaaaacccagatatagtgctgtgtggaaacaagagtgatctggaggaccagagagtagtgaaagaggaggaagccatagcactcgcagagaaatatggaatcccctactttgaaactagtgctgccaatgggacaaacataagccaagcaattgagatgcttctggacctgataatgaagcgaatggaacggtgtgtggacaagtcctggattcctgaaggagtggtgcgatcaaatggtcatgcctctacggatcagttaagtgaagaaaaggagaaaggggcatgtggctgttgagaagtcaagtaagcgacatagtagttcaggtggcccatgcctgggatcttctctatgattgatacatggcacagtgagagattaatgggcattgtgtacaaattgcttctcaccatccccattagacctacgaataaagcatccggttctaaaattaatttgttgcagctttgtaaatatttctttaagattcagcctgagagttaggagaaatatttcagagccaaaagtgccttatacaaccttagcctattatagtaaatcattcaaggattcagaattttgcagtcacagaagagtgtatttattatgtagaatgaatgagggtactgtcacctgccttaatgtaggtaggcccagagtcttacatttaagatcttacatgcagttataaaaccgccacagtcttcaatccagatttgaagactcatgccataggtgacattctaaaataccattaaagccacttaaatgttaaataagaatatacatgcacatcagctcaatgtctttgagtattaattttatgtaagcattctatttaacatgaatataggacaaatcatggctatatctatagaccttggataaactggattgaccaattatacactcacggtgacttttttattggtgggaaggggattggggtggggcaggctggcttaatgtaatatgagcaaccaaagtgggacttctgtctccccgctatattcccattgctctgaatggttgattgaagggtcagggaactagattttatggctttagttcactgtgattgtacatttatacttggcctatgtgctggccgcacctgaacatagctggtgcttatgccgagttatttgcgatgagtaaatatttagtttctttttcttcatatttataatgttgatctggcatcctcaggctgcagctttattagcttataacttactcatctctatctttaccagcaggctctgtattgttgatatttgcaacttgttttgcttttccattggtggaattgaaataattagtttttaattacataagatgcctgtttgctatttggtggaagatagatgttcatattgaagcagtcacatttgtactgtagttcaataaaagaaaaatgaagtattctgtagcctatatttttcatagagctcatgagcatttactgtacttgctgggtcttgccaagatcatttattccgctgcattgccaaagtgtcttcataccaaattaaaggtggttttaatatatgtttcatggaagttgtttataaaattcaaaggtatttcatttaggtgaaaagtcttatttattaaagtggtttgaataaagtagatcaaaacttccagagatcttaatggctatataggaagaaatatcactcaccataatttaaataaagaataaaaatacttgtattttgtggtggcaaatgtttggtagaactgtaattagaaaaatacaagtatatttgcgtgatggttacactagaagcccagactttacgactacacaatatattcatgtatctaaactgtacttgtaccccctaaatttatttttaaaaaaggaaaaataaaagtatcatgaaaaaacctatttttttttccactgtccttccactactcccataacaaacttatccatggttggtaaaattttacatatttctatccttgaaatgaaggcttcttttaaattccaaagaagtcatggaggcctgtgcatttgaattgtatatgctagtgaggaaaagatttagacatttcaagagcagggttggccaggcgcggtggctcacacctgtaatcccagcactttgggaggccgaggagggcggatcacgaggtcaggagatcgagaccatcctggctaacacagtgaaaccccatctctactaaaaaaaaaa

SEQ ID NO: 533 - DNA, 2812 bp, Homo sapiens
agacaaaaagtaaccttcctgaagaggacatgtgattggaagttgtcaattgttgaagcattggtaactccagtctctaacgttttagaaaatcataacaagcggttctctaccctgtaaagaacagaaacctggaaatctaaggctcaaagacatccaagtaattggtatctgggagatttgggattcaaacccagctctgcttgacttggtgaactactgagttcttcattatgtctgatggagattatgattacctcatcaagtttttagctttgggagactctggtgtagggaagaccagtgtactttaccaatatacagatggtaaatttaactccaaatttatcacaacagtgggcattgatttcagggaaaaaagagtggtgtacagagccagtgggccggatggagccactggcagaggccagagaatccacctgcagttatgggacacagcagggcaggagaggtttcgtagcttaacgacagcgttcttcagagatgctatgggttttcttctactttttgatctgacaaatgagcaaagtttcctcaatgtcagaaactggataagccagctacagatgcatgcatattgtgaaaacccagatatagtgctgtgtggaaacaagagtgatctggaggaccagagagtagtgaaagaggaggaagccatagcactcgcagagaaatatggaatcccctactttgaaactagtgctgccaatgggacaaacataagccaagcaattgagatgcttctggacctgataatgaagcgaatggaacggtgtgtggacaagtcctggattcctgaaggagtggtgcgatcaaatggtcatgcctctacggatcagttaagtgaagaaaaggagaaaggggcatgtggctgttgagaagtcaagtaagcgacatagtagttcaggtggcccatgcctgggatcttctctatgattgatacatggcacagtgagagattaatgggcattgtgtacaaattgcttctcaccatccccattagacctacgaataaagcatccggttctaaaattaatttgttgcagctttgtaaatatttctttaagattcagcctgagagttaggagaaatatttcagagccaaaagtgccttatacaaccttagcctattatagtaaatcattcaaggattcagaattttgcagtcacagaagagtgtatttattatgtagaatgaatgagggtactgtcacctgccttaatgtaggtaggcccagagtcttacatttaagatcttacatgcagttataaaaccgccacagtcttcaatccagatttgaagactcatgccataggtgacattctaaaataccattaaagccacttaaatgttaaataagaatatacatgcacatcagctcaatgtctttgagtattaattttatgtaagcattctatttaacatgaatataggacaaatcatggctatatctatagaccttggataaactggattgaccaattatacactcacggtgacttttttattggtgggaaggggattggggtggggcaggctggcttaatgtaatatgagcaaccaaagtgggacttctgtctccccgctatattcccattgctctgaatggttgattgaagggtcagggaactagattttatggctttagttcactgtgattgtacatttatacttggcctatgtgctggccgcacctgaacatagctggtgcttatgccgagttatttgcgatgagtaaatatttagtttctttttcttcatatttataatgttgatctggcatcctcaggctgcagctttattagcttataacttactcatctctatctttaccagcaggctctgtattgttgatatttgcaacttgttttgcttttccattggtggaattgaaataattagtttttaattacataagatgcctgtttgctatttggtggaagatagatgttcatattgaagcagtcacatttgtactgtagttcaataaaagaaaaatgaagtattctgtagcctatatttttcatagagctcatgagcatttactgtacttgctgggtcttgccaagatcatttattccgctgcattgccaaagtgtcttcataccaaattaaaggtggttttaatatatgtttcatggaagttgtttataaaattcaaaggtatttcatttaggtgaaaagtcttatttattaaagtggtttgaataaagtagatcaaaacttccagagatcttaatggctatataggaagaaatatcactcaccataatttaaataaagaataaaaatacttgtattttgtggtggcaaatgtttggtagaactgtaattagaaaaatacaagtatatttgcgtgatggttacactagaagcccagactttacgactacacaatatattcatgtatctaaactgtacttgtaccccctaaatttatttttaaaaaaggaaaaataaaagtatcatgaaaaaacctatttttttttccactgtccttccactactcccataacaaacttatccatggttggtaaaattttacatatttctatccttgaaatgaaggcttcttttaaattccaaagaagtcatggaggcctgtgcatttgaattgtatatgctagtgaggaaaagatttagacatttcaagagcagggttggccaggcgcggtggctcacacctgtaatcccagcactttgggaggccgaggagggcggatcacgaggtcaggagatcgagaccatcctggctaacacagtgaaaccccatctctactaaaaaaaaaa

SEQ ID NO: 534 - DNA, 2809 bp, Homo sapiens
cgccaacgacccaaaaaaggccggcggcgggtggacgcggcgcgcgaggacccgagccaggcggggacaggacggcggggcgagccagacaaaaagtaaccttcctgaagaggacatgtgattggaagttgtcaattgttgaagcattggtaactccagtctctaacgttttagaaaatcataacaagcggttctctaccctgtaaaggtgaactactgagttcttcattatgtctgatggagattatgattacctcatcaagtttttagctttgggagactctggtgtagggaagaccagtgtactttaccaatatacagatggtaaatttaactccaaatttatcacaacagtgggcattgatttcagggaaaaaagagtggtgtacagagccagtgggccggatggagccactggcagaggccagagaatccacctgcagttatgggacacagcagggcaggagaggtttcgtagcttaacgacagcgttcttcagagatgctatgggttttcttctactttttgatctgacaaatgagcaaagtttcctcaatgtcagaaactggataagccagctacagatgcatgcatattgtgaaaacccagatatagtgctgtgtggaaacaagagtgatctggaggaccagagagtagtgaaagaggaggaagccatagcactcgcagagaaatatggaatcccctactttgaaactagtgctgccaatgggacaaacataagccaagcaattgagatgcttctggacctgataatgaagcgaatggaacggtgtgtggacaagtcctggattcctgaaggagtggtgcgatcaaatggtcatgcctctacggatcagttaagtgaagaaaaggagaaaggggcatgtggctgttgagaagtcaagtaagcgacatagtagttcaggtggcccatgcctgggatcttctctatgattgatacatggcacagtgagagattaatgggcattgtgtacaaattgcttctcaccatccccattagacctacgaataaagcatccggttctaaaattaatttgttgcagctttgtaaatatttctttaagattcagcctgagagttaggagaaatatttcagagccaaaagtgccttatacaaccttagcctattatagtaaatcattcaaggattcagaattttgcagtcacagaagagtgtatttattatgtagaatgaatgagggtactgtcacctgccttaatgtaggtaggcccagagtcttacatttaagatcttacatgcagttataaaaccgccacagtcttcaatccagatttgaagactcatgccataggtgacattctaaaataccattaaagccacttaaatgttaaataagaatatacatgcacatcagctcaatgtctttgagtattaattttatgtaagcattctatttaacatgaatataggacaaatcatggctatatctatagaccttggataaactggattgaccaattatacactcacggtgacttttttattggtgggaaggggattggggtggggcaggctggcttaatgtaatatgagcaaccaaagtgggacttctgtctccccgctatattcccattgctctgaatggttgattgaagggtcagggaactagattttatggctttagttcactgtgattgtacatttatacttggcctatgtgctggccgcacctgaacatagctggtgcttatgccgagttatttgcgatgagtaaatatttagtttctttttcttcatatttataatgttgatctggcatcctcaggctgcagctttattagcttataacttactcatctctatctttaccagcaggctctgtattgttgatatttgcaacttgttttgcttttccattggtggaattgaaataattagtttttaattacataagatgcctgtttgctatttggtggaagatagatgttcatattgaagcagtcacatttgtactgtagttcaataaaagaaaaatgaagtattctgtagcctatatttttcatagagctcatgagcatttactgtacttgctgggtcttgccaagatcatttattccgctgcattgccaaagtgtcttcataccaaattaaaggtggttttaatatatgtttcatggaagttgtttataaaattcaaaggtatttcatttaggtgaaaagtcttatttattaaagtggtttgaataaagtagatcaaaacttccagagatcttaatggctatataggaagaaatatcactcaccataatttaaataaagaataaaaatacttgtattttgtggtggcaaatgtttggtagaactgtaattagaaaaatacaagtatatttgcgtgatggttacactagaagcccagactttacgactacacaatatattcatgtatctaaactgtacttgtaccccctaaatttatttttaaaaaaggaaaaataaaagtatcatgaaaaaacctatttttttttccactgtccttccactactcccataacaaacttatccatggttggtaaaattttacatatttctatccttgaaatgaaggcttcttttaaattccaaagaagtcatggaggcctgtgcatttgaattgtatatgctagtgaggaaaagatttagacatttcaagagcagggttggccaggcgcggtggctcacacctgtaatcccagcactttgggaggccgaggagggcggatcacgaggtcaggagatcgagaccatcctggctaacacagtgaaaccccatctctactaaaaaaaaaa

SEQ ID NO: 535 - DNA, 2772 bp, Homo sapiens
cacaggaagagaagtgggtttgaagcaaggttgtggagaaaagcaaaggagacaaaaagtaaccttcctgaagaggacatgtgattggaagttgtcaattgttgaagcattggtaactccagtctctaacgttttagaaaatcataacaagcggttctctaccctgtaaaggtgaactactgagttcttcattatgtctgatggagattatgattacctcatcaagtttttagctttgggagactctggtgtagggaagaccagtgtactttaccaatatacagatggtaaatttaactccaaatttatcacaacagtgggcattgatttcagggaaaaaagagtggtgtacagagccagtgggccggatggagccactggcagaggccagagaatccacctgcagttatgggacacagcagggcaggagaggtttcgtagcttaacgacagcgttcttcagagatgctatgggttttcttctactttttgatctgacaaatgagcaaagtttcctcaatgtcagaaactggataagccagctacagatgcatgcatattgtgaaaacccagatatagtgctgtgtggaaacaagagtgatctggaggaccagagagtagtgaaagaggaggaagccatagcactcgcagagaaatatggaatcccctactttgaaactagtgctgccaatgggacaaacataagccaagcaattgagatgcttctggacctgataatgaagcgaatggaacggtgtgtggacaagtcctggattcctgaaggagtggtgcgatcaaatggtcatgcctctacggatcagttaagtgaagaaaaggagaaaggggcatgtggctgttgagaagtcaagtaagcgacatagtagttcaggtggcccatgcctgggatcttctctatgattgatacatggcacagtgagagattaatgggcattgtgtacaaattgcttctcaccatccccattagacctacgaataaagcatccggttctaaaattaatttgttgcagctttgtaaatatttctttaagattcagcctgagagttaggagaaatatttcagagccaaaagtgccttatacaaccttagcctattatagtaaatcattcaaggattcagaattttgcagtcacagaagagtgtatttattatgtagaatgaatgagggtactgtcacctgccttaatgtaggtaggcccagagtcttacatttaagatcttacatgcagttataaaaccgccacagtcttcaatccagatttgaagactcatgccataggtgacattctaaaataccattaaagccacttaaatgttaaataagaatatacatgcacatcagctcaatgtctttgagtattaattttatgtaagcattctatttaacatgaatataggacaaatcatggctatatctatagaccttggataaactggattgaccaattatacactcacggtgacttttttattggtgggaaggggattggggtggggcaggctggcttaatgtaatatgagcaaccaaagtgggacttctgtctccccgctatattcccattgctctgaatggttgattgaagggtcagggaactagattttatggctttagttcactgtgattgtacatttatacttggcctatgtgctggccgcacctgaacatagctggtgcttatgccgagttatttgcgatgagtaaatatttagtttctttttcttcatatttataatgttgatctggcatcctcaggctgcagctttattagcttataacttactcatctctatctttaccagcaggctctgtattgttgatatttgcaacttgttttgcttttccattggtggaattgaaataattagtttttaattacataagatgcctgtttgctatttggtggaagatagatgttcatattgaagcagtcacatttgtactgtagttcaataaaagaaaaatgaagtattctgtagcctatatttttcatagagctcatgagcatttactgtacttgctgggtcttgccaagatcatttattccgctgcattgccaaagtgtcttcataccaaattaaaggtggttttaatatatgtttcatggaagttgtttataaaattcaaaggtatttcatttaggtgaaaagtcttatttattaaagtggtttgaataaagtagatcaaaacttccagagatcttaatggctatataggaagaaatatcactcaccataatttaaataaagaataaaaatacttgtattttgtggtggcaaatgtttggtagaactgtaattagaaaaatacaagtatatttgcgtgatggttacactagaagcccagactttacgactacacaatatattcatgtatctaaactgtacttgtaccccctaaatttatttttaaaaaaggaaaaataaaagtatcatgaaaaaacctatttttttttccactgtccttccactactcccataacaaacttatccatggttggtaaaattttacatatttctatccttgaaatgaaggcttcttttaaattccaaagaagtcatggaggcctgtgcatttgaattgtatatgctagtgaggaaaagatttagacatttcaagagcagggttggccaggcgcggtggctcacacctgtaatcccagcactttgggaggccgaggagggcggatcacgaggtcaggagatcgagaccatcctggctaacacagtgaaaccccatctctactaaaaaaaaaa

SEQ ID NO: 536 - DNA, 2113 bp, Homo sapiens
ctcctcgcccccacccagacccagaaggcgccaccatggcggcgcccccgcagcccgtcacccacctcatctttgacatggacggacttcttctggatactgaacggctgtattcagtggtgtttcaagaaatatgtaatcgctatgacaagaaatacagctgggatgtaaagtccctggttatgggtaagaaggcattagaggcggcacagattataatagacgtcttgcagctcccgatgtccaaagaggagctggtggaagaaagccaaacgaagttaaaggaagtgttccccacggctgcgctcatgccaggggcggagaaactcatcatccacctgcggaaacatggcatcccctttgcactggccaccagctcggggtccgcgtcgttcgatatgaagacaagccgccacaaggagttcttcagcttgttttcccacattgtgctgggagatgaccccgaagtgcagcatggcaagccagacccggacatcttcctagcttgtgccaagaggttctctccccctcctgctatggagaagtgccttgtctttgaagatgctcccaatggggtggaggcggccctggcagctgggatgcaggtggtcatggttcctgacggaaacttgagccgagatctgacaacaaaggccaccctggtgctgaattccctgcaggacttccagcccgagctgtttggtttgccctcctatgagtgagagggagggcctcagtcttccgcccccagcccactctcatggtccacactgctgggggaaagggaaaggaaatcagcaactcttcaatcccaacctgcgctgtgattttagcctcctgagattggagtttccatcccatgttggtttgtcccagtctaacgtgttgataaaatgtgacttgacggttgagacaaaaaatacagtagagacagaaacgaagcccagaacaaagatgaaacttgaattaccatctcagaagtcaagctgatggagtatgtgataaagtgaatgtacatgtatatacacacacacctccatatatacatgtgtgtatcagtttggtaatatgcaggtaggcattacatgcatatgtatgtagacatatgcatgcatgtatatgtaaaatatatacttttccaagacaaaatggaacatcacttctctcttctagtttttctgaacactggctgggaaatgtaaactgtgtatgcatataagtatatgctttatgtatgcatatgtatgtagatatgtttatatctatcgtctgcatcactctcctcagtgttgatgtcaacatgcaatgacaactgataaagcgagatggtagttctgcctggtttgcagtctgagtgggaaagtcctgtttttgatgagcactccttgttagctaacatttaaattctttttgtgacctcagaatgtctctggatctttcctcattgactgactctgtgccacgtcatccatagtttattgttagtatgaacacaactgtaacatttacctggtatctacatccttacctgcattggaaaatgtttgctacctcacaacaaccatttgcctcctttaagaacactgatgggctgcactttttggatagaaatagaatttgatttcagaatgtatgcttggtgagtctcagtgcccaggaacacttttggaataatttatcagacattgaacttctgtgattaatcgcttttatagatttactcagtctttaaaattcgtctctgatttgccagagaaaaacggtggtagccatggaaatcgggagtgaaggagcactgcttcattgtggctcagcccttcctaggggcctctgccctttgatgtccttgagctactcttcagctctggaagttgtggacaaaccgtaggaatgtatgtgtgcgtgtggtggagtgattgtctgtgaatgacaggccctggctattgattgatgttgcatcaatttagcaaattcatttcctcattcttgatggcctgaatatatgtctgcacttttaatgctcctcttaaccagttgtaacatcttaccatttccctaacaaattgaattagtttaataaaatcttttgacacatgttaaaaaaaaaaaaaaa

SEQ ID NO: 537 - DNA, 4192 bp, Homo sapiens
tgaagattgatgtctatttccttgagctctttaattttgttgccaatttggataaacatggcacaaatccagcagggaggtccagatgaaaaagaaaagactaccgcactgaaagatttattatctaggatagatttggatgaactaatgaaaaaagatgaaccgcctcttgattttcctgataccctggaaggatttgaatatgcttttaatgaaaagggacagttaagacacataaaaactggggaaccatttgtttttaactaccgggaagatttacacagatggaaccagaaaagatacgaggctctaggagagatcatcacgaagtatgtatatgagctcctggaaaaggattgtaatttgaaaaaagtatctattccagtagatgccactgagagtgaaccaaagagttttatctttatgagtgaggatgctttgacaaatccacagaaactgatggttttaattcatggtagtggtgttgtcagggcagggcagtgggctagaagacttattataaatgaagatctggacagtggcacacagataccgtttattaaaagagctgtggctgaaggatatggagtaatagtactaaatcccaatgaaaactatattgaagtagaaaagccgaagatacacgtacagtcatcatctgatagttcagatgaaccagcagaaaaacgggaaagaaaagataaagtttctaaagaaacaaagaagcgacgtgatttctatgagaagtatcgtaacccccaaagagaaaaagaaatgatgcaattgtatatcagagaaaatggttctcctgaagaacatgcaatctatgtttgggatcatttcatagctcaggctgctgctgagaatgtgtttttcgttgctcacagctatggaggacttgcttttgttgaactgatgattcaacgagaagccgatgtaaaaaataaggtaactgctgtggcattgacagactctgttcacaatgtgtggcatcaagaagctggcaaaacgattcgagaatggatgagagagaactgttgtaattgggtctctagctcagaaccattagacacatcagtggagtccatgctacctgattgcccccgggtctcagcaggcaccgaccgtcacgagctaacttcctggaagagctttccgtctattttcaaattctttaccgaagcctcagaggccaagaccagctccctgaagccggctgtgacgcgccgctcccaccgcatcaagcacgaagagctgtaagaggagcgagcgcgacgggggaggccgccctggcgcacccacccgcacgcctcctcactgcttgtgtcgagcggactcccagcccctcattagattgttttcttcccagagcccagggtcgtgatatatacatctaaatagcgttttgcattatttctagatgagtgcaactgtcaaagcaatatgggttcactggtcgtgcttcctgcgggctgagcgcgggctgagcgctgccagtcagcgctcacattaaggctgacagcgccctgcctggctcggccggcgaagctctaattgccctgaaggagaccgcgcgggcgctgcgggtccggcggcgtcggcgcggtcctagcgcccgccgtagcggagccgctgctgcttccccctccttaatcatgtccatctttccccgctctcaactggagcaaacttctattccagacttcagatttccattttcactaggtttttccctgagggcatcttattacccacctcttttttttttttttttaaggaagttccacacacactccaaagccgatttcaaattcagaacctgaatgccatgatgtaccatgtagtttggggaatgcaaattgttctctccctgttttcatttcgggaccagaaaaaaaaacaactctgcataaaaatctataaagtactgaatccgcattactgctgaaaatccttttgccagctaattgtgagagtttacacaagtctctgatttcagaagagactgttaaaaccaaaacaatgatgggcagctcttttaagtgtaggtgtgaaggtcccattttcaatggaatttccaactgttatcactgggattgactttactttttaaacacataatgtgtactgtgtggcattgtaatttagatataacacacttaagttttgctttttaaatctctctgtggagaaaggttgttgttaatcctttccagaatgatctattctgagctttcctggagttaggcccttctagggagagaatttttttattgtcatcaggaaacgaaacctttgtgctctgcagcctttttcttctgaaaggctaagtggggctaaaattatccttttagttttctgctttaacaagaagagaaggacttggtgtgaaagaatttcttctctcagtccaatggtataatttttagcactccgcttcctctgtagggtttagccctacagtttgaacaattattttaatccagctaagatgtggccaacactgtgaaatacaggagatgttaaggttttgctgacttttacattaaaatcttaaaatttcacattatattttaattacttgaaaagtttaattacctagtaaagattgtttctaatagatgagaacataaatttaatagttttcatccttttttaaagtgtgtgcaacaattaatatgcctgccttatttgaggacatgataaaatgtacccaaaatgacttcgaactgtctaatgcctcagaaaagtaacttaaaatcaaccacttcgtgcttaaatgtttttatattatgaaccgatttcaacaagttttaaagctgttaatatctcattgctgtgtttgacatacaagtacattcattggttctatagtcttaatgatgacaaattaaagatgttttttcagtgctcaggtatgcatatattttcgtgttacttaagcaaaatcaactatataggaggaaaaatcaaaatggcattttattcagctaccagatggcttaaaatgagtaaaccccaacaacatcaagcacatttgtctgtgatattgaccctttttatccaatcattactattttagaagtagtggtgaactgtgtaaaataatggtatcttcagcagtgttccggaatcttagttgagggacaaacattccttccagtgagagattcaagaattgatgtgaattgaatatatttttcaaggtattataaattgtgttgtgttttcagtataagaaaatgttgacaggaaacaattttatagcatttataaaaaaccaacacttgtgcaatgctaaattggcgaagcttctgcacctgaattagagcacaataaatatgctgtttataaaccaaatcactgctattccttctctgaaatcatctctcctctttttaaacctttacttatagctagaataaatcactatttaattgcctctaatactttaaaactactggatggttaggcctggtttaactatttatggagagctatttgcaaacttaagttgtgtaaatgtaatttctacttgtgaatctgagctgtagcagcccagagggagctaggcaaactattccagaccaccaactgataagtgatcagattctttgtaatgtaggattttttaacctgttgattatgggtttgttgatataaatgtaataatgttcacctcgattttcctggagtaacaaccagcgttggtagtagcccacctgcatgaggacggccagtgttaacaatatttttgttctgatcttcttccccatttttgtttcctcaaacaggtttttaggagagtggagatttaaagtcaggatgtggcctttttattttaattatatacttaattcttagaacaagtagaatgggaaaggagtgactgataaatctaagattcaaaatagtcccgtcgaaacttaaaggccagattattgctttggagctttctataggtactagccatcccgtcgttaaatgttttcatggatatttgaaaagaagaccatgtacctttaataactgttcttttctcgagtttctgcctcgtgctttgacctggattgcattattattgtttatgcgaagtaaaaaaaaaaaaggaaagcacaagcttttcctgtatattatatttccatttccattttaaaataaaaacaattttcccaacaaaaaaaaaaaaaaa

SEQ ID NO: 538 - DNA, 3162 bp, Homo sapiens
agaggaagtgacgtacgtccggtgtaatggcggcgcggtggagctctagtaggtgatgtttgcagacagaaaaagtaaactgtcaaggaattcagagcattgggtacttgttatttggaccagtttgaagcatctttgatttattggaccaactggcaacagaaaatgaaaagtagtgtggcacagataaaaccttcttctggtcatgacagaagggaaaaccttaattcatatcagaggaactcctctccagaagacagatatgaagaacaagaacgatccccccgggatagagattactttgattacagcagatcagactatgagcattcaagaagaggacgttcttatgatagtagcatggagtcacgaaacagggaccgagaaaaacgcagagaaagagaaagagatacggatcggaaaaggtctcggaaatccccatctcctgggaggagaaacccagaaacatcagtaactcagagttcctctgctcaggatgaacctgctacaaagaaaaagaaagatgagctggatcctcttcttactcgcactggtggagcatatattccccctgcaaagctcaggatgatgcaggaacagattacagataaaaacagcttagcataccagaggatgagttgggaggccctgaagaagtcaattaatggccttatcaacaaagtcaacatttccaacataagtattattattcaagagcttcttcaagaaaatatagttagaggaagaggactgctgtccaggtctgttttgcaagcacagagtgcttctccaatcttcacccatgtttatgcagcattagtggcaattatcaactcaaaatttccacaaattggagaattaatcctcaaaaggttaattcttaattttcgaaaaggctatcgaagaaatgacaagcaactttgcctgactgcttcaaaatttgtggcgcatcttattaaccaaaatgtggcacacgaagtattatgcttagagatgctcactttgctcctggaaagaccaacagatgatagcgttgaagtagctattggttttcttaaggaatgtggcctcaaattaacacaagtgtcaccaagaggaatcaatgctatatttgaacgccttcgaaacattctgcatgagtctgaaattgacaaaagagttcaatatatgattgaagtgatgtttgctgtacggaaagatggattcaaggaccaccccattatcctagaaggtcttgatttggtggaagaagatgatcaattcactcatatgctccctctggaggatgactataatccagaagatgttcttaatgttttcaagatggatcctaattttatggagaatgaagagaagtacaaagctattaagaaagaaattcttgatgagggagatactgactcgaacacagaccaggatgctgggagtagtgaagaggacgaggaagaagaagaggaagagggagaagaagatgaagaaggacaaaaagtaactattcatgacaaaacagaaattaacctggtctcatttcgtcgtacaatttatcttgctattcagtcaagtttagattttgaagaatgtgctcacaaattgctgaaaatggagtttcctgaaagccaaacaaaagaactctgcaacatgatacttgattgctgtgcccaacagaggacatacgaaaaattttttggcttattagctgggcgattttgcatgctaaagaaagagtacatggaatcctttgaaggtatattcaaagaacagtatgataccatccatcgcttggaaacaaacaagttgcgaaatgttgctaagatgtttgctcaccttttatacactgattcacttccatggagtgttcttgaatgtataaaactgagtgaagaaaccactacatcatccagtagaatttttgtcaaaatatttttccaggaactgtgtgaatacatgggtcttcctaaacttaatgcaagattaaaggatgaaactctgcagccattctttgaaggattattaccccgagataatccaagaaacactcggtttgccatcaacttctttacttctataggtcttggaggtttaacggatgaactgcgggagcatctcaaaaatacaccaaaggtcattgtggcgcagaaaccagatgttgagcaaaataaatcctccccatcctcttcctcttcagcgtcctcctcttcagagtctgactcatccgactctgattctgacagcagtgatagcagttcagagtcttccagtgaagagagcgactcttcatccatcagtagtcatagctctgcctcagctaatgatgtaagaaagaagggacatgggaagaccagaagtaaagaggtagataaattgatcagaaaccagcaaacaaatgataggaaacaaaaagaaagaagacaagaacacgggcaccaggaaacaaggactgagagagaaagaaggtcagaaaaacacagagatcaaaattcaagtggttcaaattggagagatcctataacaaagtacacatcagacaaagatgttccttctgaacgaaataactacagtagagttgcgaatgacagagaccaagaaatgcatatagatttggaaaataagcatggtgatcccaaaaagaagagaggagagagaagaaattctttttctgaaaatgagaagcatacacaccgaattaaagacagtgaaaatttcagaagaaaagatagatcaaagtcaaaggaaatgaatagaaagcactcaggctcaagaagtgatgaagatagatatcaaaatggtgccgagagacgatgggaaaaatctagcagatactctgaacaatccagagaatcaaagaaaaatcaggaccggcgaagagaaaagtctccagcaaaacaaaaataattctacaaaatgacataaactggacatgccttatattcagttgaaacaaattattttttactttgacgaactttatagagaattcttgtataaagtattggtttgtatttgtaaatttaaaaaatgttttcattttaacatgttttataattgatacatctcaaggccctacccataaaattatttgaaaactttcaccagaaagggatgtaagtctcgcttatattttgtgaataaaatgatcaaaagctcaaaaaaaaaaaaaaaaaa

SEQ ID NO: 539 - DNA, 1301 bp, Homo sapiens
gggaggagagaaaagccatggccgacaaggtcctgaaggagaagagaaagctgtttatccgttccatgggtgaaggtacaataaatggcttactggatgaattattacagacaagggtgctgaacaaggaagagatggagaaagtaaaacgtgaaaatgctacagttatggataagacccgagctttgattgactccgttattccgaaaggggcacaggcatgccaaatttgcatcacatacatttgtgaagaagacagttacctggcagggacgctgggactctcagcagctcctcaggcagtgcaggacaacccagctatgcccacatcctcaggctcagaagggaatgtcaagctttgctccctagaagaagctcaaaggatatggaaacaaaagtcggcagagatttatccaataatggacaagtcaagccgcacacgtcttgctctcattatctgcaatgaagaatttgacagtattcctagaagaactggagctgaggttgacatcacaggcatgacaatgctgctacaaaatctggggtacagcgtagatgtgaaaaaaaatctcactgcttcggacatgactacagagctggaggcatttgcacaccgcccagagcacaagacctctgacagcacgttcctggtgttcatgtctcatggtattcgggaaggcatttgtgggaagaaacactctgagcaagtcccagatatactacaactcaatgcaatctttaacatgttgaataccaagaactgcccaagtttgaaggacaaaccgaaggtgatcatcatccaggcctgccgtggtgacagccctggtgtggtgtggtttaaagattcagtaggagtttctggaaacctatctttaccaactacagaagagtttgaggatgatgctattaagaaagcccacatagagaaggattttatcgctttctgctcttccacaccagataatgtttcttggagacatcccacaatgggctctgtttttattggaagactcattgaacatatgcaagaatatgcctgttcctgtgatgtggaggaaattttccgcaaggttcgattttcatttgagcagccagatggtagagcgcagatgcccaccactgaaagagtgactttgacaagatgtttctacctcttcccaggacattaaaataaggaaactgtatgaatgtctgtgggcaggaagtgaagagatccttctgtaaaggtttttggaattatgtctgctgaataataaacttttttgaaataataaatctggtagaaaaatgaaaaaaaaaaa

SEQ ID NO: 540 - DNA, 1364 bp, Homo sapiens
gggaggagagaaaagccatggccgacaaggtcctgaaggagaagagaaagctgtttatccgttccatgggtgaaggtacaataaatggcttactggatgaattattacagacaagggtgctgaacaaggaagagatggagaaagtaaaacgtgaaaatgctacagttatggataagacccgagctttgattgactccgttattccgaaaggggcacaggcatgccaaatttgcatcacatacatttgtgaagaagacagttacctggcagggacgctgggactctcagcagatcaaacatctggaaattaccttaatatgcaagactctcaaggagtactttcttcctttccagctcctcaggcagtgcaggacaacccagctatgcccacatcctcaggctcagaagggaatgtcaagctttgctccctagaagaagctcaaaggatatggaaacaaaagtcggcagagatttatccaataatggacaagtcaagccgcacacgtcttgctctcattatctgcaatgaagaatttgacagtattcctagaagaactggagctgaggttgacatcacaggcatgacaatgctgctacaaaatctggggtacagcgtagatgtgaaaaaaaatctcactgcttcggacatgactacagagctggaggcatttgcacaccgcccagagcacaagacctctgacagcacgttcctggtgttcatgtctcatggtattcgggaaggcatttgtgggaagaaacactctgagcaagtcccagatatactacaactcaatgcaatctttaacatgttgaataccaagaactgcccaagtttgaaggacaaaccgaaggtgatcatcatccaggcctgccgtggtgacagccctggtgtggtgtggtttaaagattcagtaggagtttctggaaacctatctttaccaactacagaagagtttgaggatgatgctattaagaaagcccacatagagaaggattttatcgctttctgctcttccacaccagataatgtttcttggagacatcccacaatgggctctgtttttattggaagactcattgaacatatgcaagaatatgcctgttcctgtgatgtggaggaaattttccgcaaggttcgattttcatttgagcagccagatggtagagcgcagatgcccaccactgaaagagtgactttgacaagatgtttctacctcttcccaggacattaaaataaggaaactgtatgaatgtctgtgggcaggaagtgaagagatccttctgtaaaggtttttggaattatgtctgctgaataataaacttttttgaaataataaatctggtagaaaaatgaaaaaaaaaaa

SEQ ID NO: 541 - DNA, 1085 bp, Homo sapiens
gggaggagagaaaagccatggccgacaaggtcctgaaggagaagagaaagctgtttatccgttccatgggtgaagctcctcaggcagtgcaggacaacccagctatgcccacatcctcaggctcagaagggaatgtcaagctttgctccctagaagaagctcaaaggatatggaaacaaaagtcggcagagatttatccaataatggacaagtcaagccgcacacgtcttgctctcattatctgcaatgaagaatttgacagtattcctagaagaactggagctgaggttgacatcacaggcatgacaatgctgctacaaaatctggggtacagcgtagatgtgaaaaaaaatctcactgcttcggacatgactacagagctggaggcatttgcacaccgcccagagcacaagacctctgacagcacgttcctggtgttcatgtctcatggtattcgggaaggcatttgtgggaagaaacactctgagcaagtcccagatatactacaactcaatgcaatctttaacatgttgaataccaagaactgcccaagtttgaaggacaaaccgaaggtgatcatcatccaggcctgccgtggtgacagccctggtgtggtgtggtttaaagattcagtaggagtttctggaaacctatctttaccaactacagaagagtttgaggatgatgctattaagaaagcccacatagagaaggattttatcgctttctgctcttccacaccagataatgtttcttggagacatcccacaatgggctctgtttttattggaagactcattgaacatatgcaagaatatgcctgttcctgtgatgtggaggaaattttccgcaaggttcgattttcatttgagcagccagatggtagagcgcagatgcccaccactgaaagagtgactttgacaagatgtttctacctcttcccaggacattaaaataaggaaactgtatgaatgtctgtgggcaggaagtgaagagatccttctgtaaaggtttttggaattatgtctgctgaataataaacttttttgaaataataaatctggtagaaaaatgaaaaaaaaaaa

SEQ ID NO: 542 - DNA, 941 bp, Homo sapiens
gggaggagagaaaagccatggccgacaaggtcctgaaggagaagagaaagctgtttatccgttccatgggtgaagctcctcaggcagtgcaggacaacccagctatgcccacatcctcaggctcagaagggaatgtcaagctttgctccctagaagaagctcaaaggatatggaaacaaaagtcggcagagatttatccaataatggacaagtcaagccgcacacgtcttgctctcattatctgcaatgaagaatttgacagtattcctagaagaactggagctgaggttgacatcacaggcatgacaatgctgctacaaaatctggggtacagcgtagatgtgaaaaaaaatctcactgcttcggacatgactacagagctggaggcatttgcacaccgcccagagcacaagacctctgacagcacgttcctggtgttcatgtctcatggtattcgggaaggcatttgtgggaagaaacactctgagcaagtcccagatatactacaactcaatgcaatctttaacatgttgaataccaagaactgcccaagtttgaaggacaaaccgaaggtgatcatcatccaggcctgccgtggtgataatgtttcttggagacatcccacaatgggctctgtttttattggaagactcattgaacatatgcaagaatatgcctgttcctgtgatgtggaggaaattttccgcaaggttcgattttcatttgagcagccagatggtagagcgcagatgcccaccactgaaagagtgactttgacaagatgtttctacctcttcccaggacattaaaataaggaaactgtatgaatgtctgtgggcaggaagtgaagagatccttctgtaaaggtttttggaattatgtctgctgaataataaacttttttgaaataataaatctggtagaaaaatgaaaaaaaaaaa

SEQ ID NO: 543 - DNA, 416 bp, Homo sapiens
gggaggagagaaaagccatggccgacaaggtcctgaaggagaagagaaagctgtttatccgttccatgggtgaagataatgtttcttggagacatcccacaatgggctctgtttttattggaagactcattgaacatatgcaagaatatgcctgttcctgtgatgtggaggaaattttccgcaaggttcgattttcatttgagcagccagatggtagagcgcagatgcccaccactgaaagagtgactttgacaagatgtttctacctcttcccaggacattaaaataaggaaactgtatgaatgtctgtgggcaggaagtgaagagatccttctgtaaaggtttttggaattatgtctgctgaataataaacttttttgaaataataaatctggtagaaaaatgaaaaaaaaaaa

SEQ ID NO: 544 - DNA, 5348 bp, Homo sapiens
acaccgccaccgccaggatggatagaatgacagaagatgctcttcgcttgaatctgttgaagcggagcttggacccagcagatgagcgagatgatgtcctggcaaagcgactcaaaatggaggggcatgaggccatggaacgtctgaaaatgttggcattgctcaaaaggaaggatttggcaaatcttgaggtgccacatgagttacccaccaaacaggatggcagtggtgtcaagggctatgaagaaaaacttaacgggaatctcaggcctcatggagacaacaggactgctggaaggccaggcaaagaaaacatcaatgatgagcctgtggatatgagtgctagacggagtgagccagagcgaggaaggctaactccctcaccagacatcattgttttgtctgacaatgaggcttccagtccccgttccagttccagaatggaagaaagactcaaagcagccaacttagagatgtttaaggggaaaggcattgaggagcggcagcagcttatcaagcagctgagggatgagctacgattggaagaagcccgactggtcctgttaaagaaactgagacagagtcagctacagaaagagaatgtggtccagaagactccagttgtacagaatgcagcatctattgttcagccatctcctgcccatgtgggacagcagggcctatctaagcttccctctcggcctggggcccaaggggttgaacctcaaaatttgagaacattacagggtcacagtgtcatccgttcagctaccaataccacccttccacacatgttgatgtctcaacgtgttattgcaccaaacccagcccagctacagggtcagcggggcccgcctaagcctggccttgtacgcaccacaacacccaacatgaatcccgccatcaattatcaaccgcagtcaagttcttctgttccatgtcagcgtacaacatcctctgccatctatatgaaccttgcttctcatatccagccagggacggtgaacagagtgtcctcgccacttcctagccccagcgccatgactgatgctgccaactcacaggctgcagccaaattggctcttcgcaaacagctggaaaagacactcctggagatcccaccccctaaacctcctgctcccttacttcatttcttgcctagtgcagccaatagcgagttcatctacatggtaggcttggaagaagtcgtacagagtgtcattgacagccaaggcaaaagctgtgcctcacttctgcgggttgaaccctttgtatgtgcccagtgccgcacagatttcacccctcactggaagcaagaaaagaatggtaagattctatgtgagcagtgtatgacctccaaccagaaaaaggctctaaaagctgaacacaccaaccggctgaaaaatgcatttgtgaaagccctacagcaggaacaggaaattgaacagcgattacagcagcaggcagccctctcccccactacggctccagctgtgtccagtgtcagtaaacaagagaccatcatgagacatcatacgcttcggcaggctccacagccccagagcagcctccagcgtggcatacccacatctgcccgctccatgctttcaaactttgcacaggcaccccagttgtctgtgccaggtggcctccttggtatgccaggtgtcaacattgcatacttgaatactggcatcggaggacacaaaggccccagtttggcagaccgacagcgtgaataccttttagacatgatccctccccggtctatatcgcagtccatcagtggacagaaataacgcctgttccacttgtactgccccatccttgaatcctttatccctttcctctttcattcccccaacttctgtcgcatgcagtgcctgtactggtgcctaccatacacggaaagcaaaacagaaaaacagaagacaaaaaatagagatcagcaagaaaacacacgccctgccctgccacctcccctttatttcacactgctgcgatctgttcttctgccgctctgtcttctctcttcagttttctttaacagtgaggtggatctttacctctgatagaggtcagaatgaggtcctggggagaatctaagccctccgatgtgtgtttctaaagttgttttatgctataattattaccatttttaatgatgttgtgtgtcctccctttgttcagtggacggttaaaccttcccccactcaaccaatctttttctttttccttttcttccttttttttttttttttttgtaaacacaaatgacattcagttcaatgatacgagcattgcagattgcagtaggggtcccagctgccaagtaggacatgactaggagtgttaggggcagaagttttgaatgcacttaaccggaggagggcgcagggtggggggtatcaaagaaggacgaatagcaccctacctgtgggtgtttgggggctggacaatttgggtggcagtgtttggtactgaagttgggctctaagaatgaggggaaagagcctggggaggagcttaaaactcaaccactctggaatttacccatagaagacgggaagaaagaggtatgaagatgggctcaattatgagccagggaggattgaaactaggtcctgcctttctgtatcttggggaaataagaccgatctcctgaccccattgggaacacggaagtctattccaggccaaccagcccaaaattatttcatcttgtattctttgtaaaattctccctcaccccaccctgcttttaaaaattctaatctatcccctctaaccatagccccatctataatacagaggaacggctgttccaaggctgtttgctgggtgtcccacaagttgggtggacataaatgagtcaagtgacaacaggaggaaatagacttagacgaaagaaaggatttctcttccaacagttgagattcgcatatttgcctattctttcaccctctgagtgccaggagatgagaggctgggggtacacaatcaggttggagtcctgtccttactctgctgcaccagctgcagaaccaactgctcaaagccaaacagctcatggcaaaaccagcttaggacctctgctgtacaaatagttgcttcccactgccccccgcccgcccccagaatgatattaattttgcctttttttttttttttttttttaagcgctactaatgtagagaatgaattgaattgtgcaatgttgctgttctggggactggggagattagcatcccatttgcccacactgtgggaagacggagtggaccaggctgtttttgaagtaagggaagccccttaaaggtacgggtttctgctcttctcatagtgtacacccacctgcctctctggctccagaagctgccagagtgcactggggggaatgttctcagcagagaagaatgaggagaagtttaatattttgcccttgaaagtcacctgaggaagtttccccacttttattttttaaaattaagtaattttttaaagaaggcacttttaaaattaacacacacatgaactgcacaccttccccataaaatttggaggtggggtgggagaaagagctaaaatcaggctcagttcccctactctggcctctactccccacaccccagtgccactgtgggtgactatactggccctacgggccttcctggcttttttctttcctcccttaccccaaattcattgagcacttaaaggagcagagatgcagccagtgtctgggctcccccagtggtgaaatgatctggaagctagatgctagtaacaggtagtgattgggttttttgagtatttttccggggaatgtggtacccctgactgtaagtggtgggagagggaggggggttaatggaactgggtctgggattattttaaaattatatatatatatataaagatatattcttacatcttttctttgccctctgtgctttgaaagcactggataaattgtttggttttgcttttctctcttccacaaaattggaagctttttttaaaaatgttttccccacaagtcatcttgccttgtggcatgtctgtctagcctcttcctccctccctcatgatgaagtgccatttctgttacgtctccctctccccaagctcagaggtgctcagaggtacgagatgcccaagtttgtcagttgagattaaaagtaaggaacagagaatgtgcaataccgtctggctgggggctgtccctgccctgccctgagctgagtcctttccctgggagccaggccaccttagaatggggtttggaagtaagatgtatagagttggggaatcatggagaaggaaagcctatagtcgagtgcctgcttaggtgctgaggtcacaggggagatggtggaatcttccctgtttttatcccctcagggtcagttacatagaagctgcttcttgactagtatagctcggtgaccctttgttcaaccgctgaggtttgatttcttaccctttcttctccccattttcatactcttcccagggattagtgatggaggtgaggtctccctaatcatggtaaagtgttaaccttccacctcctcccttccctcctccttcctcatccttctgtcttcctcaattctccgtctcttttttttcatcactgattgccttgtgtccctccaagtctacttgttactatccatctccaggctctgggccgtgtagacactaaacctcatgccctaaggacaggaggaaagaccctctgtttggagcattattagtagagtgaggatcccaccagttctgcctggcttcctccatccccagaggcactaaaagcagtattttaaggttggtgtcttactccctggaagcctgaaatgggtggaatagcggtaaggcttgagtaaaactaggggacagaggttcttatttgtcgattttattttataatttgaccacagcatctgaactccctctctccctggaataagtatttttcccacatttttggatatatgtatggtagacaatttttttttaagacacagagataaatgttttcctgctttggttacctttcctttcccctttaaaaggaattagctatagaactgctttgtaaagatgcttcttgatattttacttttgttccttttccctaatcattcccttttctccccactcctccagaaggcataacccttctctccacaccccctacccccacccccgtcctaggctcccatcctttccatcaagaccttcattagcttatgatatttgctgccgagatgttataacaaggactcgttcatgtatataagctatttcttgatccatttaaaaggaattgtacattgtgt

SEQ ID NO: 545 - DNA, 1499 bp, Homo sapiens
tatttacttcctgcgggtgcacaggctgtggtcgtctatctccctgttgttcttcccatcggcgaagatggccctggagacggtgccgaaggacctgcggcatctgcgggcctgtttgctgtgttcgctggtcaagactatagaccagtttgaatatgatggttgtgacaattgtgatgcatatctacaaatgaagggtaaccgagagatggtatatgactgcactagctcttcctttgatggaatcattgcgatgatgagtccagaggacagctgggtctccaagtggcagcgagtcagtaactttaagccaggtgtatatgcggtgtcagtcactggtcgcctgccccaaggaatcgtgcgggagctgaaaagtcgaggagtggcctacaaatccagagacacagctataaagacctagcaagatgcaaggctgccagcatctttgctctccacctcctgcctctgcttatttcttgttctggaactaaatgaacagaacttcaaatacttcctaccctccaattcagactcagctgactgttgagagagcagcacatcattttatcattttatcttctttggactacaggtggggtgggagggatttgggttggtggattaacagatggaattgaggagagagtaggatgctgattttcctacccgtggcccaggtctgtgccttccccatgccaaggactctaggtcaaatgtcaataaatatgaacctcgagaaagttctgaaggccatgacacctgccttgcctccctcttccattctcttaggcacagtaatagcttatttgccctataagaaccttcccagagcagcagaggcccttctactccctcttgactgtctcagcctctgggattgcagcctttgtagtgtgcttccttgcttcctatcagagggtgctgatccagaggctcagtaaccccatcaacttggtggccctggtgtctcacacttgtatccttctgccctcgagacctggcacagcagtatcccttgaagaaatcctgaggctttgtagagtgctccttgaccatgtttaataattcttccctcccctgcttgtctattttcttctcttcacggctcttcctataccttaggccagtctcaagcactcactggagacccttgggccttgggcgaccattgagtcctagtctcccttgtttgtgcccctgtaggaggtaggtccttttctcctccggcctagtaggggaccttgggtaacatcccatttttcggccaaggtgagttgttttaggataaaaaaatttaccacaaattctcatttaaatttccacagaaatcctgttcgtatccccattttgatttccctaagttccttgttctccctctaaaaagagaatgattgcaccctgcctgtttacctcaggattgttgtgattgtagaaacgaagctatgtgaaaattatataagtattataaaggtgaaatacttttgctctcaaaaaaaaaa

SEQ ID NO: 546 - DNA, 921 bp, Homo sapiens
gctggatccagcgtagcggggcggccgggcggatccagcgcagccgggagacagatgcgaggcggcggtcagcaggtgccgaacccacggccaggcttccgtggccagcagccctagaggaatggccatcctgtccctgcgagcccctgggccctggcaggcgatgcaggtgggatgctatggaatatgatgagaagctggcccgtttccggcaggcccacctcaaccccttcaacaagcagtctgggccgagacagcatgagcagggccctggggaggaggtcccggacgtcactcctgaagaggccctgcctgagctgccccctggggagccggaattccgctgccctgaacgcgtgatggatctcggcctgtctgaggaccacttctcccgccctgtgggtctgttcctggcctctgacgtccagcagctgcggcaggcgatcgaggagtgcaagcaggtgattctggagctgcccgagcagtcggagaagcagaaggatgccgtggtgcgactcatccacctccggctgaagctccaggagctgaaggaccccaatgaggatgagccaaacatccgagtgctccttgagcaccgcttttacaaggagaagagcaagagcgtcaagcagacctgtgacaagtgtaacaccatcatctgggggctcattcagacctggtacacctgcacaggtgggccgagacccagacgaggagtgaggaatgagagagaccaaagttcctgcctccgctgggctcacattcagatgtgagctatccagtgtggtggccactagccaaacatggccagtcaaagttaaattaactaaatatgcatttcctcgttgtactgtctacattggacagggctgttctggatgagaaattaaactagtgaattacaaaaaaaaaaaaaaaaaa

SEQ ID NO: 547 - DNA, 3724 bp, Homo sapiens
atccagcgcagccgggagacagatgcgaggcggcggtcagcaggtgccgaacccacggccaggcttccgtggccagcagccctagaggaatggccatcctgtccctgcgagcccctgggccctggcaggcgatgcaggtatgggcagacaggacgctgttgactccgcacaccggcgtgacttctcaggttctcggggtggcagctgcagtgatgacaccgcttcctggtggtcacgccgcgggcaggacgcgggaggccaggtgggatgctatggaatatgatgagaagctggcccgtttccggcaggcccacctcaaccccttcaacaagcagtctgggccgagacagcatgagcagggccctggggaggaggtcccggacgtcactcctgaagaggccctgcctgagctgccccctggggagccggaattccgctgccctgaacgcgtgatggatctcggcctgtctgaggaccacttctcccgccctgtgggtctgttcctggcctctgacgtccagcagctgcggcaggcgatcgaggagtgcaagcaggtgattctggagctgcccgagcagtcggagaagcagaaggatgccgtggtgcgactcatccacctccggctgaagctccaggagctgaaggaccccaatgaggatgagccaaacatccgagtgctccttgagcaccgcttttacaaggagaagagcaagagcgtcaagcagacctgtgacaagtgtaacaccatcatctgggggctcattcagacctggtacacctgcacagggtgttattaccgctgtcacagtaagtgcttgaacctcatctccaagccctgtgtgagctccaaagtcagccaccaagctgaatacgaactgaacatctgccctgagacagggctggacagccaggattaccgctgtgccgagtgccgggcgcccatctctctgcggggtgtgcccagtgaggccaggcagtgcgactacaccggccagtactactgcagccactgccactggaacgacctggctgtgatccctgcacgcgttgtacacaactgggactttgagcctcgaaaggtttctcgctgcagcatgcgctacctggcgctgatggtgtctcggcccgtactcaggctccgggagatcaaccctctgctgttcagctacgtggaggagctggtggagattcgcaagctgcgccaggacatcctgctcatgaagccgtacttcatcacctgcagggaggccatggaggctcgtctgctgctgcagctccaggatcggcagcattttgtggagaacgacgagatgtactctgtccaggacctcctggacgtgcatgccggccgcctgggctgctcgctcaccgagatccacacgctcttcgccaagcacatcaagctggactgcgagcggtgccaggccaagggcttcgtgtgtgagctctgcagagagggcgacgtgctgttcccgttcgacagccacacgtctgtgtgcgccgactgctccgcggtcttccacagggactgctactacgacaactccaccacttgtcccaagtgtgcccggctcagcctgaggaagcagtcgctcttccaggagccaggtcccgatgtggaggcctagcgccgaggaacagtgctgggcaccccgcctggcccgccaggacccaccctgccaacatcaagttgttccttctgctccggagacccctggggtgcggccctggccccctccacccctgctgggccagagcgggtgggcagtgtcaaggcccgctgtctcccaggtgcttgctgggactcggggcggctgcacctggctgtcacctgggtgtgctgctgtgaggggtccttgcgtggcccccatccttcccccaatgcagaactccatgggcagggagctggggggacatctcacctcccccatggcacagagccctccacacccctggaccagggcatccgggccctagaaattccacagctcccgtcctggccaccctggaagctcatcaggccaagacccggacagagcttcagaggagtgttgagtgacacctgaggatgcggctgcacacactcagccaagggccgagtctcacctgcggtggggtgtcggctctgcctgggggctccatccctttcagccactcgtggccttggggatttctggttgtccccagctgggactgttcacagttgtcacctgcagacctgcctctccctggcctgaggttcaaaggcctcatcggatggtcagtacagtggggtcacctgttgtttctatacaacagcagggaaggggccatggagcttttccctgctgggtgctcctgctttggcccagcccacctttcctggtgctccaagctaggaggctgtggccccagcctgaggagggtgtcctggcctccaggtgtgcagcaggggctgtgtgctgggggaggttccagttaggcgatgggatcctgcagtggtctggtggcatttcttggaaccagatttacctgaggagctctgtcctgctccctgtggagggctccagatagctcagaaatgaccagccaatggccttttgtttgggggcctgaggtcaagagagctgagagtattcgctcgactgagcacattcaggaagatcagggcaggcgtgtgggaggtccctcactccacgggacagaggcccctgggcagcagaggaaacctacagctctgggtgaggggacacttggctttggtgtttgcactttacagatcctgcggtccacgaggggcctcaggagaggacgtgtcaggacgtggcttcccagccttctgccttgggcagtgggggtgctcctgtctgtccttttcccccacaccctggactgtgcttggctgttggtgcacatggttggcacacggtgggcagagggcagagaatgccactgcttggttattggtcccctttgaccaggaaacccaagaggagacacctcagtcagcagaaaggccacctggctcactggctcattccaggagtgggagagacggcagggtctcctctttgtcctccggcatcaggaaggggatggtgtccactccccactgtggtggctttaggcaaggttcttattgtctgctctgcctcggtttccccatctggaaaatgggggcaggggtcctgacctacctcaggtggaacggtgagcagggaacatgtcggagtccttcagagaatgtgatgtgaggttggatcaacagtgtgggttcctgtcctgtttccccttcctctttggggctgaggaggaggttaaaggccaaatgctgtttcccaacaccccaaagtctgcacacgtctcatgaatgcatcacatttctgtcatatggatattagccattccgaaatctgtgtaatcaacttcacattattcaagttacaaatcactgtgtccatagaaaaactgtgctggtatttgctggacaaagggttgggccccttttatttttacctgccacccagcatctcccccacctgccccttctgggtgacacagccggtaaacggaatcacgtatggttctttctgtgggtctgtggcacagcaggaagagcccggtgccgccagcaccttgtggaagaccacacatgggtggtcccacagcatgggaccaggctggcctgagggatgcccagttgtaacaatgctgctgtcactgtctcattaaatatacatccttt

SEQ ID NO: 548 - DNA, 2911 bp, Homo sapiens
ctccagcctccgccggcggagcccactatgccagacagtttcgacactttgcaaagacaaagagccctagaccggagggaggaggaggaggaagaagagcggagagagaaggaagaggcgatgtgagctgggaagggggcaagtgtccgggacacccacacccctgtattctcctccgaaccccttcatgcccaaatcccggaaactccagcgtgtctccagccgtgttggtaccattttcagatttcatcttcctaaactggaaatgtcaatgagaggaaattaacacccccaagagctgcagtgagcaaatgcattgagcttgggtcaggacaattccatttggggaccagagatggacggtcactcagcctatggagatgaagaaactgaggttcagagaggttaagagactccactgaggtcacacagccgatgacagacaaccttctgtgccttcatcaagctggttgtgtacccaccatgtccctggcgacaggatgggaaagaaaaagccctaattaaggatcgtcagaaaccacagttggaggaggacggcagagacagtttccctccccgctataccaacacccttccttcgaggtcctcgctcctgagggaccctggactgtcacagagattaatgaccccttatcttctttggatgtgaaaggaaatcactggttaaagcttgatcgagagacattatcagctctttaaggattgcagaagaataggctactttattttctgaaaaggtaaatatatgcaagcaaagccaacatgccacgaatggcgttggtctaccacacagccgtgtctgggacacagttgggggtcatcccccagcaggagtgaagtcgagcttagcggcccttgtgtcctcccttggaattcctgccatcccttttgattgagcctccacctctgggatttttcttccatttttctcctctcttaggagggagttcctgctacccatcgtgggaggccaccatcaggactgcgaagatggtgaccctgcggaagaggaccctgaaagtgctcaccttcctcgtgctcttcatcttcctcacctccttcttcctgaactactcccacaccatggtggccaccacctggttccccaagcagatggtcctggagctctccgagaacctgaagagactgatcaagcacaggccttgcacctgcacccactgcatcgggcagcgcaagctctcggcctggttcgatgagaggttcaaccagaccatgcagccgctgctgaccgcccagaacgcgctcttggaggacgacacctaccgatggtggctgaggctccagcgggagaagaagcccaataacttgaatgacaccatcaaggagctgttcagagtggtgcctgggaatgtggaccctatgctggagaagaggtcggtgggctgccggcgctgcgccgttgtgggcaactcgggcaacctgagggagtcttcttatgggcctgagatagacagtcacgactttgtcctcaggatgaacaaggcgcccacggcagggtttgaagctgatgttgggaccaagaccacccaccatctggtgtaccctgagagcttccgggagctgggagataatgtcagcatgatcctggtgcccttcaagaccatcgacttggagtgggtggtgagcgccatcaccacgggcaccatttcccacacctacatcccggttcctgcaaagatcagagtgaaacaggataagatcctgatctaccacccagccttcatcaagtatgtctttgacaactggctgcaagggcacgggcgatacccatctaccggcatcctctcggtcatcttctcaatgcatgtctgcgatgaggtggacttgtacggcttcggggcagacagcaaagggaactggcaccactactgggagaacaacccatccgcgggggcttttcgcaagacgggggtgcacgatgcagactttgagtctaacgtgacggccaccttggcctccatcaataaaatccggatcttcaaggggagatgacgcagtgaagggctgaggatggacgcactgtcacacctctgcatttccagccccagcatcttgctggagccgttccatcccggagcttggaggggcagcctcaggtgtgtgcctgggcaccgctcacagcctcttgcacccagccgttggcagcatctactcagcaaggtcactaagctctgccagcgtggcagagcatgtcttggaacctgtcttgagtggggacaacgtccccccactgctgccctagagctggggagacgctgggaaaggttcaacctccacacactaaaatcattttggctcctggggcaagcttggggaatgaatgtggaagatgcctatattctgagagacaggacagtttcccaggaagatgggcagagacttgagtggcgattacctccagcacagagacgtgccaggcggtgttggcgctcggggcgagatgctgcccttctttgcacgaagcctggcctcttgcttggcgtgataaccctgtcatcttcccaaagctcatttatgagccaccagaggctcctaccccaaagattttcacagaaacttgaggccaggtgccgtggctcacacctgtaatctgaacactttgggaggccgaggcgggaggatcacttgagcccaggagttcaagaccagcctgggcaacatagtgagactcctgtctctacaaaaataaaagatttaaaaaaattagccaggcacggtggcacacacttgtagccccagctactagggaggctgaggagggaggatctcttgtgcctaggagttcgaggctgcagtgggctgtgatcacaccactgcactccagcctgggcaacagagtgagaccctgtctctgaaaaaaaaaaaaaaa

SEQ ID NO: 549 - DNA, 2708 bp, Homo sapiens
ctccagcctccgccggcggagcccactatgccagacagtttcgacactttgcaaagacaaagagccctagaccggagggaggaggaggaggaagaagagcggagagagaaggaagaggcgatgtgagctgggaagggggcaagtgtccgggacacccacacccctgtattctcctccgaaccccttcatgcccaaatcccggaaactccagcgtgtctccagccgtgttggtaccattttcagatttcatcttcctaaactggaaatgtcaatgagaggaaattaacacccccaagagctgcagtgagcaaatgcattgagcttgggtcaggacaattccatttggggaccagagatggacggtcactcagcctatggagatgaagaaactgaggttcagagaggttaagagactccactgaggtcacacagccgatgacagacaaccttctgtgccttcatcaagctggttgtgtacccaccatgtccctggcgacaggatgggaaagaaaaagccctaattaaggatcgtcagaaaccacagttggaggaggacggcagagacagtttccctccccgctataccaacacccttccttcgaggtcctcgctcctgagggaccctggactgtcacagagattaatgaccccttatcttctttggatgtgaaaggaaatcactggttaaagcttgatcgagagacattatcagctctttaaggattgcagaagaataggctactttattttctgaaaaggagggagttcctgctacccatcgtgggaggccaccatcaggactgcgaagatggtgaccctgcggaagaggaccctgaaagtgctcaccttcctcgtgctcttcatcttcctcacctccttcttcctgaactactcccacaccatggtggccaccacctggttccccaagcagatggtcctggagctctccgagaacctgaagagactgatcaagcacaggccttgcacctgcacccactgcatcgggcagcgcaagctctcggcctggttcgatgagaggttcaaccagaccatgcagccgctgctgaccgcccagaacgcgctcttggaggacgacacctaccgatggtggctgaggctccagcgggagaagaagcccaataacttgaatgacaccatcaaggagctgttcagagtggtgcctgggaatgtggaccctatgctggagaagaggtcggtgggctgccggcgctgcgccgttgtgggcaactcgggcaacctgagggagtcttcttatgggcctgagatagacagtcacgactttgtcctcaggatgaacaaggcgcccacggcagggtttgaagctgatgttgggaccaagaccacccaccatctggtgtaccctgagagcttccgggagctgggagataatgtcagcatgatcctggtgcccttcaagaccatcgacttggagtgggtggtgagcgccatcaccacgggcaccatttcccacacctacatcccggttcctgcaaagatcagagtgaaacaggataagatcctgatctaccacccagccttcatcaagtatgtctttgacaactggctgcaagggcacgggcgatacccatctaccggcatcctctcggtcatcttctcaatgcatgtctgcgatgaggtggacttgtacggcttcggggcagacagcaaagggaactggcaccactactgggagaacaacccatccgcgggggcttttcgcaagacgggggtgcacgatgcagactttgagtctaacgtgacggccaccttggcctccatcaataaaatccggatcttcaaggggagatgacgcagtgaagggctgaggatggacgcactgtcacacctctgcatttccagccccagcatcttgctggagccgttccatcccggagcttggaggggcagcctcaggtgtgtgcctgggcaccgctcacagcctcttgcacccagccgttggcagcatctactcagcaaggtcactaagctctgccagcgtggcagagcatgtcttggaacctgtcttgagtggggacaacgtccccccactgctgccctagagctggggagacgctgggaaaggttcaacctccacacactaaaatcattttggctcctggggcaagcttggggaatgaatgtggaagatgcctatattctgagagacaggacagtttcccaggaagatgggcagagacttgagtggcgattacctccagcacagagacgtgccaggcggtgttggcgctcggggcgagatgctgcccttctttgcacgaagcctggcctcttgcttggcgtgataaccctgtcatcttcccaaagctcatttatgagccaccagaggctcctaccccaaagattttcacagaaacttgaggccaggtgccgtggctcacacctgtaatctgaacactttgggaggccgaggcgggaggatcacttgagcccaggagttcaagaccagcctgggcaacatagtgagactcctgtctctacaaaaataaaagatttaaaaaaattagccaggcacggtggcacacacttgtagccccagctactagggaggctgaggagggaggatctcttgtgcctaggagttcgaggctgcagtgggctgtgatcacaccactgcactccagcctgggcaacagagtgagaccctgtctctgaaaaaaaaaaaaaaa

SEQ ID NO: 550 - DNA, 1716 bp, Homo sapiens
cgggaacagacggatcggcagggcggggcggaacggtgaggccatctactgaaacacagaagcaattttaaaagaaaatggaggaagtataactgatctttgcagaaagtggggaagtgagttgaccagagaaggatgagagaattgccaagttgtactgaacgccaagctgagaatggtgattctgaagatagaatgcgtttgcaatggctgctactgtgaacttggaacttgatcccatttttttgaaagcactaggtttcttgcattcaaagagtaaagattctgctgaaaagctaaaagcactgcttgatgaatctttggctcggggcattgattccagttaccgtccatctcaaaaggatgtggagccacccaaaatttcaagcacaaaaaacatttccattaagcaagagcccaaaatatcatccagtcttccttctggtaataataatggcaaggtcctcacaactgaaaaggtaaagaaggaagctgaaaagagacctgctgataaaatgaaatcagacatcactgaaggagttgatattccaaagaaacctagattggagaaaccagaaacacagtcatctcccattactgtccaaagtagcaaggatttacctatggctgacctttccagttttgaggagaccagtgctgatgattttgccatggagatgggattggcctgcgttgtttgtaggcaaatgatggtggcatctggcaatcaattagtagaatgtcaggagtgccataatctctaccaccgagattgtcataaaccccaggtgacagacaaggaagcgaatgaccctcgcctggtgtggtattgtgcccgatgtaccagacaaatgaaaagaatggctcaaaaaactcagaaaccaccgcagaaaccagcccctgcagttgtttctgtaactccagctgtcaaagatccattggttaagaaaccagaaactaaactgaaacaagagacaacttttctagcgtttaagagaacagaagtcaagacatccacagttatttcaggaaattcttctagtgccagcgtttcctcgtcagtaactagtggcttaactggatgggcagcttttgcagccaaaacttcctctgctggtccttcaacagcaaaattgagttcaacaacacaaaacaatactgggaaacctgctacttcgtcagctaaccagaaacctgtgggtttgactggtctggcaacatcatccaaaggtggaataggttccaaaataggttccaataacagcactacgcccactgtacctttaaaaccacctccacctctaaccttgggtaaaactggccttagtcgctcagttagttgtgacaatgtcagcaaagtaggtcttcctagtccaagtagtttagttccaggaagcagcagccaactaagtgggaatggaaatagtggaacatcaggacctagtggaagtactaccagcaaaactacttcagaatccagcagctctccctcagcatcccttaaaggcccaacttcacaagaatcacagctcaatgctatgaagcgattacagatggtcaagaagaaagctgcccaaaagaaactcaagaagtaatgtggccaagtaggtttttgtatcatattagcctaaagatgaaaggcttattattatgatataatctgtaatacactgtaatttaataaaagtcttcataatcaaaaaaaaaaaaaaaaaa

SEQ ID NO: 551 - DNA, 2383 bp, Homo sapiens
agaggcgtacaggcccttcccgaccgtagcgagggtgctgctgcgctgggggaaggaaaacgccgctttgactgtgccttgttctcacagctggcgggaagcaagcgccttttcgaaagccagaggctcgagttacccctcttaccaccgtcatggcagtcccaggttgcaacaaggacagtgtcagagcaggctgtaaaaaatgtggctaccctggtcacctgacttttgaatgccgcaattttctccgagtagaccctaaaagggacatagttttggatgtcagcagtacaagtagtgaagatagcgatgaagagaatgaagaactgaataaattgcaggcattacaggaaaaaagaataaatgaagaagaggaaaagaagaaagaaaaaagcaaagaaaaaatcaaattgaaaaaaaaaaggaaaaggtcttactcatccagttccactgaagaggacacttcaaaacaaaagaaacaaaaatatcagaagaaagaaaagaaaaaagaaaaaaagagtaaatcaaaaaaagggaaacatcacaaaaaggaaaaaaagaagagaaaaaaggaaaagcattcttctacacctaatagttctgaattctccagaaagtaactgagactttggcttaagccgttaaatttaaaaatttgtttttaaaacgtgtttgcccttccttggaatttgctatatattatgctttgcaataaatcacagccttttccatatagacatttttcgtatttgggaccattatccctctggcaatatatttttaatgtgctgtaactgtaaagtattaaatcagtcttgttacttgatagccatgccccaagtatagctatttgtgtatactaaacacatcatttttggtatttgtgtctctgtgtgtttggctagtgttactacttcataagttcattgtaaaatggctttactgccatcaacatgggtcatctacctagcagttaatgagtattgctggatcaggtgtccaccttccaatgatgaagcaaggtaaggggtaatgttttgctcttgacacagagaaatttaatagctttatgtactaaaatataatatcttttaaagatagtgaaattcttcagttttttaaatctctagggattttttttcaatgttgtagaagatgcagctgcttaatggtcttgactaggactttttaaatgaatggtgtctgcaggtagatgatcatgaaaatatctctaacaaagttttactcttctatgaaatgcagaatttctagtacctgcctcctttgtttttgtaataattaaaatacttcttgtataaagagattagttcagcctgttagtaagtctgcagagatgatgctgagttggttgtgatttttagaatagactcctgggttgttttacaaatgtgccatattggcatgtcttacagtgatacctcaaacacagaaatttttatttaggaagatagctaaatctttattagaactgatttttattgtattcagtataaattttatgaagcttgtttctatgagtactgtggaaaattttataaatgtgagcatatatatttattttgtctgacataatttgtagttttaaagcaagtttcacactgaacttaacgttttcataaatgaccagtttgggatgtttctctcttttactttagtggcaaactcaagagtaaaaagtgtcaaaaaaagaattgagaattttattctgtactttttaaaatttaagagccagggagttgcatcatgaaagcctttgtataataatggaaattttatatgggtaagcattttcaaacacatattagtagatacgttttttaaatttctattttcacattgatcagtgttactttgcttaatacttaggtagcccttatgtccactaaagtaaatgcttatgttgtagaagcatcgaacatcaaccaatgtcatggcacagcaccaaagattgcaaatacctcactatggtgcgcttagaaattttcaaattgataacctatagatacggctgcaggtgaattcatgatagtgaaatcagctaagtatacttaacctcacaggctagaaaggtttactgattcttgtttcacctggcacccaatgtggataccctcagtaagactcagggagccttataactcctcttaacatatgcttacccatgcttaaattctagggaagctgtatccacagccctctgcattgcagccatgagagctctcacgctttcaacccttccataacctaatttagtcatttgggcctctcaaaaggaaatgcttttgtttaaataggtcttactcatccagttccactgaagaggacacttcaaaacaaaagaaacaaaaatatctgaagaaag

SEQ ID NO: 552 - DNA, 1183 bp, Homo sapiens
gttctgcccggatggaagctccggccgcggagtgatggtggcctcagcgaagatgggccgggcagggaccatggcggtggcagcagaggtggcaggggcggggcggctggcggtagaggaggctgtggtcctcagggggctgtaggtggaggtatggctcgggccagcagcgggaacggcagcgaggaggcctggggggcacttcgggcgccgcaacagcagcttcgagagctgtgcccaggagtgaacaaccagccctacctctgtgagagtggtcactgctgcggggagactggctgctgcacctactactatgagctctggtggttctggctgctctggactgtcctcatcctctttagctgctgttgcgccttccgccaccgacgagctaaactcaggctgcaacaacagcagcggcagcgtgaaatcaacttgttggcctatcatggggcatgccatggggctggtcctttccctaccggttcactgcttgaccttcgcttcctcagcaccttcaagcccccagcctacgaggatgtggttcaccgcccaggcacaccaccccccccttatactgtggccccaggccgccccttgactgcttccagtgaacaaacctgctgttcctcctcatccagctgccctgcccactttgaaggaacaaatgtggaaggtgtttcctcccaccagagtgccccccctcatcaggagggtgagcccggggcaggggtgacccctgcctccacacccccctcctgccgctatcgccgtttaactggcgactccggtattgagctctgcccttgtcctgcctccggtgagggtgagccagtcaaggaggtgagggttagtgccaccctgccagatctggaggactactccccgtgtgcactacccccagagtctgtaccgcagatctttcccatggggctgtcttccagtgaaggggacatcccataagtagttttgagagggtggatgggttacttgcccaccagaaacagccctagtcccaactccttgcgttcctttggcccctccctgcctacctagaatctgcctgaaagggctggagaggggcagtattgggggactgtgctagctttacccccgcaggacatacacaggagcctttgatctcattaaagagatgtgaaccagcaaaaaaaaaaaaaaaaaa

SEQ ID NO: 553 - DNA, 7094 bp, Homo sapiens
tgcgccactgcaggctggcggttcgcggctccttcttccggcctcctccttaggccggcaccagcagaagccgggcgagcgcggagccccaagcaagtgacctgcgaccccgaaagtggaccccagatcctggggttctccctggtccggagactagggagctgtcgcctgcaccccgggagcacccaccccacgaccacctctggatgccgccgacgggtacccggcccgtgccccgcgcctgcctgccggctcggcccctcggagcaattctgggccaggagtggggacccggaccccgcccctgatgcagccccacccccgcgtccgggccttgcaccactgactgtcccggccggccccgccccctgctcgcaccctcgcgcggccgagcccccctcccccgctgggggaggccatggcgtgagcgtgaggccgggccccggggccctcaggcgccagacggggcatgggccgggggccgcccccatgagggtcccgggagggggggcgcgggcagcagcggcggggccatggggtcgcaggtgttgcagatcctgcgccagggggtgtgggcctcgctcaccggcggttggttcttcgacccgcaccagagcaccttctccaactgcttccacctctatgtgtggatcttcctgctcatctttcccttcttactgtacatggtcctgcctcccagcttgatggtggccggcgtgtactgcctcgtggtggctgtcatctttgctactatcaagactgtcaattatcggcttcatgccatgtttgaccagggcgagatcgtggagaagcgcagctctaccatgggggagctggaggaagagcctgcccagggggacagcaatccacccagggaccccggagtggagatgacagtgttccggaaagtcagttccacacccccggtgcgctgcagctcccagcactctgtgtttggcttcaaccaggtctcggagctgctgccccgaatggaggactctgggccccttagagacatcaaggagctggtgcgggagcagggcagcaacaatgtgatcgtgacttctgccgaccgagagatgctgaagctcagctcgcaggagaaactgattggagaccttccccagacgcctccaggggctgtcccagacccctctcttgccagtacagactcttcagagccttctcccctggctggagatggagcgccctggagtgggagcagcatggctgacactcccatgagccccctgctgaaggggagcctcagccaggagctgagcaagagcttcctgaccctgacccagcctgaccgggccctggtgaggaccagcagtcgacgggaacaacgcaggggggcaggtggctatcagccccttgaccggcggggctcaggggagcccacgccccagaaagccggctcctcagactcctgcttcagcggcactgacagggagacattgagcagcttcaagagtgagaagaccaactccacccatctggacagccccccaggggggccagcccctgagggcagcgacacagacccaccctctgaggctgagctgcctgcctcaccagacgccggggtcccctcagatgacacgctgcgttcctttgacacggtcattggagcagggacgccaccgggcctggctgagccgctcctggtcgtgcggcccaaggacttggccctgctacggcctagcaaacggcagccacccctgcgaagacactctccacctggccgtgcccctcgacggcccctgcttgaaggtgggggcttctttgaggatgaagacactagtgagggcagtgaactgagcccggcctccagtctccgatcgcagcgccgctacagtactgacagctcctcttctacttcctgctactcccctgagagctcccggggtgcagcagggggaccccggaagcggagggccccccatggggctgaggagggaactgctgtgccccccaagcggccatatgggacccagcggacgcctagtaccgccagcgctaaaacacatgcccgtgtgctgagcatggatggggctgggggtgatgttctgaggcccccactggctggctgcaaggcagagctggaggcccaggttggggtggagcaggctgctagtgagcctgttgtgctgcctgctgaggcgcgaaggggacccgctgccaaccagcccggctggcggggggagctgcaggaggaaggtgctgtggggggagcggccgaggagactggcaggcgggaccgctcaagcagtgtgaggcggacccaggccattcggagacgccacaatgcaggcagcaaccccacccctccagcctctgtcatgggctcgccgcccagcagcctgcaggaagctcagcggggccgggctgcctcccactcccgggcgctgacgctgccctctgcgctgcatttcgcctcttcactgttgctcacccgggccggtgccaatgtgcatgaggcctgcacctttgatgacacttctgagggtgctgtgcactatttctacgatgagagcggtgtgcggcgttcctacacctttggcctggctggaggcggctacgagaaccctgtagggcagcaaggggagcagacagctaatggagcctgggaccgacactcgcattcctccagcttccactcggctgatgtccctgaggctacaggcggcctgaacctgctgcagccgaggcctgtggttctgcagggcatgcaggtgcgccgggtgcccctggagatcccggaggagcagacactgatggaagaagcgccaccccgggcccagcatagttacaagtactggcttctccctggccgctggacctctgtgcgctatgagcggcttgccctgctggctctgctggaccggacgcggggagtgctggagaacatcttcggcgtgggcctgagcagccttgtggccttcctgggctacctgctgctgctcaagggcttcttcactgacatctgggtcttccagttctgcctggtcatcgcctcctgccagtactccttgctgaagagcgtgcagcctgatgcggcgtcccccatgcacggccacaactgggtgatcgcgtacagccgtcctgtctacttctgcatctgctgtctgctcatctggctgctggacgccctgggctcagctcagcccttcccacctgtctccctctacggcctcacgctcttctctgcctccttcttcttctgtgcccgagacgtggccactgtgttcaccctgtgcttccccttcgtcttcctcctgggcctcctgccccaggtcaacacctgcctcatgtacctgctggagcaaatagatatgcacggcttcgggggcacagctgccaccagcccgctcacggcagtcttcagcctctcccgcagcctgctggctgctgccctgctctacggtttctgccttggggccatcaagactccgtggccagagcagcacgtccctgtcctcttctcagtcttctgtggcctcctggtggcactgtcctaccacctgagccggcagagcagcgaccccaccgtgctctggtctctgatccggagcaagctgttccctgagctggaggagcgcagcttggagacagcccgggccgagcccccggaccccttgccggacaagatgcgccagtcggtgcgtgaggtcttgcactccgacctggtgatgtgtgtggtgatcgccgtgctcaccttcgccatcagcgccagcaccgtctttattgccctgaagtcggtgctgggtttcgtgttgtacgcactggctggggccgtgggcttcttcacacattacctgctgccacaactccgcaaacagctgccctggttctgcctgtcacagcccgtgctgaagccgctggagtacagccagtatgaagtgcgcggtgccgcccaggtgatgtggtttgagaagctgtatgctggcctgcagtgcgtagagaagtacctcatctaccccgccgtggtgctcaacgccctcacggtggacgcccacacagtcgtcagccacccggacaagtactgcttctactgccgggcgctgctgatgaccgtggctgggctgaagctgctgcgctcagccttctgctgccccccacagcagtacctgacgttggccttcaccgtcctgctcttccactttgactacccgcgcctctcccagggctttctgcttgactacttcctcatgtccctgctttgcagcaagctgtgggacttgctgtacaagctgcgtttcgtgctgacctacatcgcgccctggcagatcacctggggctcggctttccacgcttttgcccagccgtttgccgtgccacactcggccatgctgttcgtccaggccctgctctcggggctcttctccacgcctctcaacccactgctaggcagtgccgtcttcatcatgtcctacgctcggcccctcaagttctgggagcgcgactacaacactaaacgtgtggatcattccaacacccgcctggtcacacagctggacaggaaccctggcgctgatgacaacaacctcaactccatcttctatgagcacttgacacgttcgctgcagcacacactgtgtggggacctggtgctgggccgctggggcaactatggccctggtgactgcttcgtcctggcctctgactacctcaacgccctggtgcacctcatcgaggttggcaatggcctcgtcaccttccagctgcgtggccttgagttccggggcacttactgccagcagcgcgaggtggaggctatcaccgagggtgtggaggaggacgagggctgttgctgctgtgaacctggccacctgccacgggtcctgtccttcaatgctgcctttgggcagcgctggctggcttgggaggtaacagccagcaagtacgtgctggagggctatagcattagtgacaataatgctgcctccatgctgcaggttttcgacctccgcaagatcctcatcacctactatgtcaagagcatcatctactacgtgagccgctcaccaaagctggaggtgtggctcagccatgagggcatcacggcagccctgaggcctgtgcgggtgcccggctatgccgactcggatcccaccttctcgctgagtgtggatgaggactatgacctccgcctgtctggcctctcgctgccctccttttgtgctgtgcacctcgagtggatccagtactgcgcctcccggcgcagccagcccgtggaccaggattggaactccccgctggtcacgctgtgttttggcctgtgtgtgctgggccgccgggccctggggacagcctctcacagcatgtctgcaagcctggagcccttcctctacggcctgcacgccctgttcaagggggattttcgcatcacctccccacgtgacgagtgggtctttgccgacatggacctgcttcaccgcgttgtggcgcctggggttcgcatggccctcaagcttcaccaggaccacttcacgtccccagatgaatatgaggagccagcagccctatacgatgccattgcggccaacgaggagcggctggtcatctcacatgagggtgacccagcatggcgcagcgccatcctcagcaacacgccctccctgctggcgctgcgccatgtcctggatgatgcctccgacgagtacaagatcatcatgctcaaccggcgccacctcagcttccgagtcatcaaggtgaaccgggagtgcgtgcgcggcctgtgggccgggcagcagcaggagctggtgttcctgcgcaaccgcaaccccgagcgtggcagcatccagaacgccaagcaggcgcttcgcaacatgatcaactcctcctgtgaccagccgctgggctaccccatctacgtgtcgcctctcaccacctcgctggctggcagccacccccagctacgggcactgtggggtggccccatcagcctgggtgccattgcccactggctcctgcgcacctgggagaggcttcacaagggctgtggcgccggctgcaatagtggcgggaacgtggatgattcagactgtagtgggggcggtggcctgacctccctcagcaataacccccccgtggcacaccccacacctgagaacacggcaggcaatggtgaccaacccctcccaccaggccctggctgggggccgcggtcctccctgagtggctctggtgatgggcggcccccacctctgctgcagtggcctccccctcggctccctggaccaccccctgcatcgcctatccccacagagggtccccggacctcacggccccctggcccgggtctcctcagttctgagggccccagtggaaagtggagcctggggggccggaaggggctgggaggatctgacggggagccagcctcagggagccccaaaggaggtacccccaaatctcaggcgcctctagacctcagcctcagcctcagcctcagcctcagccccgatgtcagcactgaggcctcaccccccagagcttcccaggacattccttgcttggacagcagtgcccctgagagtggcacacctatgggtgccctgggcgactggcctgcccctattgaggagcgtgagagcccggcagcccagcccctgctggaacaccagtactgagctacctggcgcccactggaccacctcctaggattcagtaacggacctgctctgctgcctctctgctggaccacagaactgagtggctttggcctacatgtctgaaccctgacctttggctgccttggccagagtaccaaaactgagtgacccagacctctgaccttgacccctgatctctctcatccccagtccagggcctgggctccccagatggaggcagtcagcctcccagccaggccctaagagccaaaccatgggctggtcccacttggagcctgtggccaggaccacctcagcccctgggcctgcactgcctgcaggtgtggcccccttggcctggacctggggcctgaattgtgggaagggtggtttctttctttccttttttttcttttcttttttttttttttttttgtgcttcggagacatcagaattaataacactatttttga

SEQ ID NO: 554 - DNA, 3606 bp, Homo sapiens
atgtttcttgagtttttcttaaacgacagaagattttgcttcccagactagcatccctctgtggctacaaccagcctgaaccgaggggtctgccctttagaagggcccagctcacgggctcactgtgcactcaggccctagccagcctgctgtacgtaggtgtttgcgatttcatcattggccttgttttaacagacagcagagcagagcacctgccataaagcaagcctcgatgtgctaagtgccatgtggagcccttgccctgctggggctcgctgctcccatttgagctgccacagatcagcccctccccccagggtctccgaggagtcaggaccgcacagcctgccctcctagggaaggacttcctcagggaaggcaggcatgtggaagccaggtgcagagtcctggcctctccacacaggtgccgcccaggtgatgtggtttgagaagctgtatgctggcctgcagtgcgtagagaagtacctcatctaccccgccgtggtgctcaacgccctcacggtggacgcccacacagtcgtcagccacccggacaagtactgcttctactgccgggcgctgctgatgaccgtggctgggctgaagctgctgcgctcagccttctgctgccccccacagcagtacctgacgttggccttcaccgtcctgctcttccactttgactacccgcgcctctcccagggctttctgcttgactacttcctcatgtccctgctttgcagcaagctgtgggacttgctgtacaagctgcgtttcgtgctgacctacatcgcgccctggcagatcacctggggctcggctttccacgcttttgcccagccgtttgccgtgccacactcggccatgctgttcgtccaggccctgctctcggggctcttctccacgcctctcaacccactgctaggcagtgccgtcttcatcatgtcctacgctcggcccctcaagttctgggagcgcgactacaacactaaacgtgtggatcattccaacacccgcctggtcacacagctggacaggaaccctggcgctgatgacaacaacctcaactccatcttctatgagcacttgacacgttcgctgcagcacacactgtgtggggacctggtgctgggccgctggggcaactatggccctggtgactgcttcgtcctggcctctgactacctcaacgccctggtgcacctcatcgaggttggcaatggcctcgtcaccttccagctgcgtggccttgagttccggggcacttactgccagcagcgcgaggtggaggctatcaccgagggtgtggaggaggacgagggctgttgctgctgtgaacctggccacctgccacgggtcctgtccttcaatgctgcctttgggcagcgctggctggcttgggaggtaacagccagcaagtacgtgctggagggctatagcattagtgacaataatgctgcctccatgctgcaggttttcgacctccgcaagatcctcatcacctactatgtcaagagcatcatctactacgtgagccgctcaccaaagctggaggtgtggctcagccatgagggcatcacggcagccctgaggcctgtgcgggtgcccggctatgccgactcggatcccaccttctcgctgagtgtggatgaggactatgacctccgcctgtctggcctctcgctgccctccttttgtgctgtgcacctcgagtggatccagtactgcgcctcccggcgcagccagcccgtggaccaggattggaactccccgctggtcacgctgtgttttggcctgtgtgtgctgggccgccgggccctggggacagcctctcacagcatgtctgcaagcctggagcccttcctctacggcctgcacgccctgttcaagggggattttcgcatcacctccccacgtgacgagtgggtctttgccgacatggacctgcttcaccgcgttgtggcgcctggggttcgcatggccctcaagcttcaccaggaccacttcacgtccccagatgaatatgaggagccagcagccctatacgatgccattgcggccaacgaggagcggctggtcatctcacatgagggtgacccagcatggcgcagcgccatcctcagcaacacgccctccctgctggcgctgcgccatgtcctggatgatgcctccgacgagtacaagatcatcatgctcaaccggcgccacctcagcttccgagtcatcaaggtgaaccgggagtgcgtgcgcggcctgtgggccgggcagcagcaggagctggtgttcctgcgcaaccgcaaccccgagcgtggcagcatccagaacgccaagcaggcgcttcgcaacatgatcaactcctcctgtgaccagccgctgggctaccccatctacgtgtcgcctctcaccacctcgctggctggcagccacccccagctacgggcactgtggggtggccccatcagcctgggtgccattgcccactggctcctgcgcacctgggagaggcttcacaagggctgtggcgccggctgcaatagtggcgggaacgtggatgattcagactgtagtgggggcggtggcctgacctccctcagcaataacccccccgtggcacaccccacacctgagaacacggcaggcaatggtgaccaacccctcccaccaggccctggctgggggccgcggtcctccctgagtggctctggtgatgggcggcccccacctctgctgcagtggcctccccctcggctccctggaccaccccctgcatcgcctatccccacagagggtccccggacctcacggccccctggcccgggtctcctcagttctgagggccccagtggaaagtggagcctggggggccggaaggggctgggaggatctgacggggagccagcctcagggagccccaaaggaggtacccccaaatctcaggcgcctctagacctcagcctcagcctcagcctcagcctcagccccgatgtcagcactgaggcctcaccccccagagcttcccaggacattccttgcttggacagcagtgcccctgagagtggcacacctatgggtgccctgggcgactggcctgcccctattgaggagcgtgagagcccggcagcccagcccctgctggaacaccagtactgagctacctggcgcccactggaccacctcctaggattcagtaacggacctgctctgctgcctctctgctggaccacagaactgagtggctttggcctacatgtctgaaccctgacctttggctgccttggccagagtaccaaaactgagtgacccagacctctgaccttgacccctgatctctctcatccccagtccagggcctgggctccccagatggaggcagtcagcctcccagccaggccctaagagccaaaccatgggctggtcccacttggagcctgtggccaggaccacctcagcccctgggcctgcactgcctgcaggtgtggcccccttggcctggacctggggcctgaattgtgggaagggtggtttctttctttccttttttttcttttcttttttttttttttttttgtgcttcggagacatcagaattaataacactatttttga

SEQ ID NO: 555 - DNA, 4531 bp, Homo sapiens
atgtgcatgaggcctgcacctttgatgacacttctgagggtgctgtgcactatttctacgatgagagcgggaccgacactcgcattcctccagcttccactcggctgatgtccctgaggctacaggcggcctgaacctgctgcagccgaggcctgtggttctgcagggcatgcaggtgcgccgggtgcccctggagatcccggaggagcagacactgatggaagaagcgccaccccgggcccagcatagttacaagtactggcttctccctggccgctggacctctgtgcgctatgagcggcttgccctgctggctctgctggaccggacgcggggagtgctggagaacatcttcggcgtgggcctgagcagccttgtggccttcctgggctacctgctgctgctcaagggcttcttcactgacatctgggtcttccagttctgcctggtcatcgcctcctgccagtactccttgctgaagagcgtgcagcctgatgcggcgtcccccatgcacggccacaactgggtgatcgcgtacagccgtcctgtctacttctgcatctgctgtctgctcatctggctgctggacgccctgggctcagctcagcccttcccacctgtctccctctacggcctcacgctcttctctgcctccttcttcttctgtgcccgagacgtggccactgtgttcaccctgtgcttccccttcgtcttcctcctgggcctcctgccccaggtcaacacctgcctcatgtacctgctggagcaaatagatatgcacggcttcgggggcacagctgccaccagcccgctcacggcagtcttcagcctctcccgcagcctgctggctgctgccctgctctacggtttctgccttggggccatcaagactccgtggccagagcagcacgtccctgtcctcttctcagtcttctgtggcctcctggtggcactgtcctaccacctgagccggcagagcagcgaccccaccgtgctctggtctctgatccggagcaagctgttccctgagctggaggagcgcagcttggagacagcccgggccgagcccccggaccccttgccggacaagatgcgccagtcggtgcgtgaggtcttgcactccgacctggtgatgtgtgtggtgatcgccgtgctcaccttcgccatcagcgccagcaccgtctttattgccctgaagtcggtgctgggtttcgtgttgtacgcactggctggggccgtgggcttcttcacacattacctgctgccacaactccgcaaacagctgccctggttctgcctgtcacagcccgtgctgaagccgctggagtacagccagtatgaagtgcgcggtgccgcccaggtgatgtggtttgagaagctgtatgctggcctgcagtgcgtagagaagtacctcatctaccccgccgtggtgctcaacgccctcacggtggacgcccacacagtcgtcagccacccggacaagtactgcttctactgccgggcgctgctgatgaccgtggctgggctgaagctgctgcgctcagccttctgctgccccccacagcagtacctgacgttggccttcaccgtcctgctcttccactttgactacccgcgcctctcccagggctttctgcttgactacttcctcatgtccctgctttgcagcaagctgtgggacttgctgtacaagctgcgtttcgtgctgacctacatcgcgccctggcagatcacctggggctcggctttccacgcttttgcccagccgtttgccgtgccacactcggccatgctgttcgtccaggccctgctctcggggctcttctccacgcctctcaacccactgctaggcagtgccgtcttcatcatgtcctacgctcggcccctcaagttctgggagcgcgactacaacactaaacgtgtggatcattccaacacccgcctggtcacacagctggacaggaaccctggcgctgatgacaacaacctcaactccatcttctatgagcacttgacacgttcgctgcagcacacactgtgtggggacctggtgctgggccgctggggcaactatggccctggtgactgcttcgtcctggcctctgactacctcaacgccctggtgcacctcatcgaggttggcaatggcctcgtcaccttccagctgcgtggccttgagttccggggcacttactgccagcagcgcgaggtggaggctatcaccgagggtgtggaggaggacgagggctgttgctgctgtgaacctggccacctgccacgggtcctgtccttcaatgctgcctttgggcagcgctggctggcttgggaggtaacagccagcaagtacgtgctggagggctatagcattagtgacaataatgctgcctccatgctgcaggttttcgacctccgcaagatcctcatcacctactatgtcaagagcatcatctactacgtgagccgctcaccaaagctggaggtgtggctcagccatgagggcatcacggcagccctgaggcctgtgcgggtgcccggctatgccgactcggatcccaccttctcgctgagtgtggatgaggactatgacctccgcctgtctggcctctcgctgccctccttttgtgctgtgcacctcgagtggatccagtactgcgcctcccggcgcagccagcccgtggaccaggattggaactccccgctggtcacgctgtgttttggcctgtgtgtgctgggccgccgggccctggggacagcctctcacagcatgtctgcaagcctggagcccttcctctacggcctgcacgccctgttcaagggggattttcgcatcacctccccacgtgacgagtgggtctttgccgacatggacctgcttcaccgcgttgtggcgcctggggttcgcatggccctcaagcttcaccaggaccacttcacgtccccagatgaatatgaggagccagcagccctatacgatgccattgcggccaacgaggagcggctggtcatctcacatgagggtgacccagcatggcgcagcgccatcctcagcaacacgccctccctgctggcgctgcgccatgtcctggatgatgcctccgacgagtacaagatcatcatgctcaaccggcgccacctcagcttccgagtcatcaaggtgaaccgggagtgcgtgcgcggcctgtgggccgggcagcagcaggagctggtgttcctgcgcaaccgcaaccccgagcgtggcagcatccagaacgccaagcaggcgcttcgcaacatgatcaactcctcctgtgaccagccgctgggctaccccatctacgtgtcgcctctcaccacctcgctggctggcagccacccccagctacgggcactgtggggtggccccatcagcctgggtgccattgcccactggctcctgcgcacctgggagaggcttcacaagggctgtggcgccggctgcaatagtggcgggaacgtggatgattcagactgtagtgggggcggtggcctgacctccctcagcaataacccccccgtggcacaccccacacctgagaacacggcaggcaatggtgaccaacccctcccaccaggccctggctgggggccgcggtcctccctgagtggctctggtgatgggcggcccccacctctgctgcagtggcctccccctcggctccctggaccaccccctgcatcgcctatccccacagagggtccccggacctcacggccccctggcccgggtctcctcagttctgagggccccagtggaaagtggagcctggggggccggaaggggctgggaggatctgacggggagccagcctcagggagccccaaaggaggtacccccaaatctcaggcgcctctagacctcagcctcagcctcagcctcagcctcagccccgatgtcagcactgaggcctcaccccccagagcttcccaggacattccttgcttggacagcagtgcccctgagagtggcacacctatgggtgccctgggcgactggcctgcccctattgaggagcgtgagagcccggcagcccagcccctgctggaacaccagtactgagctacctggcgcccactggaccacctcctaggattcagtaacggacctgctctgctgcctctctgctggaccacagaactgagtggctttggcctacatgtctgaaccctgacctttggctgccttggccagagtaccaaaactgagtgacccagacctctgaccttgacccctgatctctctcatccccagtccagggcctgggctccccagatggaggcagtcagcctcccagccaggccctaagagccaaaccatgggctggtcccacttggagcctgtggccaggaccacctcagcccctgggcctgcactgcctgcaggtgtggcccccttggcctggacctggggcctgaattgtgggaagggtggtttctttctttccttttttttcttttcttttttttttttttttttgtgcttcggagacatcagaattaataacactatttttga

SEQ ID NO: 556 - DNA, 7094 bp, Homo sapiens
tgcgccactgcaggctggcggttcgcggctccttcttccggcctcctccttaggccggcaccagcagaagccgggcgagcgcggagccccaagcaagtgacctgcgaccccgaaagtggaccccagatcctggggttctccctggtccggagactagggagctgtcgcctgcaccccgggagcacccaccccacgaccacctctggatgccgccgacgggtacccggcccgtgccccgcgcctgcctgccggctcggcccctcggagcaattctgggccaggagtggggacccggaccccgcccctgatgcagccccacccccgcgtccgggccttgcaccactgactgtcccggccggccccgccccctgctcgcaccctcgcgcggccgagcccccctcccccgctgggggaggccatggcgtgagcgtgaggccgggccccggggccctcaggcgccagacggggcatgggccgggggccgcccccatgagggtcccgggagggggggcgcgggcagcagcggcggggccatggggtcgcaggtgttgcagatcctgcgccagggggtgtgggcctcgctcaccggcggttggttcttcgacccgcaccagagcaccttctccaactgcttccacctctatgtctggatcttcctgctcatctttcccttcttactgtacatggtcctgcctcccagcttgatggtggccggcgtgtactgcctcgtggtggctgtcatctttgctactatcaagactgtcaattatcggcttcatgccatgtttgaccagggcgagatcgtggagaagcgcagctctaccatgggggagctggaggaagagcctgcccagggggacagcaatccacccagggaccccggagtggagatgacagtgttccggaaagtcagttccacacccccggtgcgctgcagctcccagcactctgtgtttggcttcaaccaggtctcggagctgctgccccgaatggaggactctgggccccttagagacatcaaggagctggtgcgggagcagggcagcaacaatgtgatcgtgacttctgccgaccgagagatgctgaagctcagctcgcaggagaaactgattggagaccttccccagacgcctccaggggctgtcccagacccctctcttgccagtacagactcttcagagccttctcccctggctggagatggagcgccctggagtgggagcagcatggctgacactcccatgagccccctgctgaaggggagcctcagccaggagctgagcaagagcttcctgaccctgacccggcctgaccgggccctggtgaggaccagcagtcgacgggaacaacgcaggggggcaggtggctatcagccccttgaccggcggggctcaggggagcccacgccccagaaagccggctcctcagactcctgcttcagcggcactgacagggagacattgagcagcttcaagagtgagaagaccaactccacccatctggacagccccccaggggggccagcccctgagggcagcgacacagacccaccctctgaggctgagctgcctgcctcaccagacgccggggtcccctcagatgacacgctgcgttcctttgacacggtcattggagcagggacgccaccgggcctggctgagccgctcctggtcgtgcggcccaaggacttggccctgctacggcctagcaaacggcagccacccctgcgaagacactctccacctggccgtgcccctcgacggcccctgcttgaaggtgggggcttctttgaggatgaagacactagtgagggcagtgaactgagcccggcctccagtctccgatcgcagcgccgctacagtactgacagctcctcttctacttcctgctactcccctgagagctcccggggtgcagcagggggaccccggaagcggagggccccccatggggctgaggagggaactgctgtgccccccaagcggccatatgggacccagcggacgcctagtaccgccagcgctaaaacacatgcccgtgtgctgagcatggatggggctgggggtgatgttctgaggcccccactggctggctgcaaggcagagctggaggcccaggttggggtggagcaggctgctagtgagcctgttgtgctgcctgctgaggcgcgaaggggacccgctgccaaccagcccggctggcggggggagctgcaggaggaaggtgctgtggggggagcggccgaggagactggcaggcgggaccgctcaagcagtgtgaggcggacccaggccattcggagacgccacaatgcaggcagcaaccccacccctccagcctctgtcatgggctcgccgcccagcagcctgcaggaagctcagcggggccgggctgcctcccactcccgggcgctgacgctgccctctgcgctgcatttcgcctcttcactgttgctcacccgggccggtgccaatgtgcatgaggcctgcacctttgatgacacttctgagggtgctgtgcactatttctacgatgagagcggtgtgcggcgttcctacacctttggcctggctggaggcggctacgagaaccctgtagggcagcaaggggagcagacagctaatggagcctgggaccgacactcgcattcctccagcttccactcggctgatgtccctgaggctacaggcggcctgaacctgctgcagccgaggcctgtggttctgcagggcatgcaggtgcgccgggtgcccctggagatcccggaggagcagacactgatggaagaagcgccaccccgggcccagcatagttacaagtactggcttctccctggccgctggacctctgtgcgctatgagcggcttgccctgctggctctgctggaccggacgcggggagtgctggagaacatcttcggcgtgggcctgagcagccttgtggccttcctgggctacctgctgctgctcaagggcttcttcactgacatctgggtcttccagttctgcctggtcatcgcctcctgccagtactccttgctgaagagcgtgcagcctgatgcggcgtcccccatgcacggccacaactgggtgatcgcgtacagccgtcctgtctacttctgcatctgctgtctgctcatctggctgctggacgccctgggctcagctcagcccttcccacctgtctccctctacggcctcacgctcttctctgcctccttcttcttctgtgcccgagacgtggccactgtgttcaccctgtgcttccccttcgtcttcctcctgggcctcctgccccaggtcaacacctgcctcatgtacctgctggagcaaatagatatgcacggcttcgggggcacagctgccaccagcccgctcacggcagtcttcagcctctcccgcagcctgctggctgctgccctgctctacggtttctgccttggggccatcaagactccgtggccagagcagcacgtccctgtcctcttctcagtcttctgtggcctcctggtggcactgtcctaccacctgagccggcagagcagcgaccccaccgtgctctggtctctgatccggagcaagctgttccctgagctggaggagcgcagcttggagacagcccgggccgagcccccggaccccttgccggacaagatgcgccagtcggtgcgtgaggtcttgcactccgacctggtgatgtgtgtggtgatcgccgtgctcaccttcgccatcagcgccagcaccgtctttattgccctgaagtcggtgctgggtttcgtgttgtacgcactggctggggccgtgggcttcttcacacattacctgctgccacaactccgcaaacagctgccctggttctgcctgtcacagcccgtgctgaagccgctggagtacagccagtatgaagtgcgcggtgccgcccaggtgatgtggtttgagaagctgtatgctggcctgcagtgcgtagagaagtacctcatctaccccgccgtggtgctcaacgccctcacggtggacgcccacacagtcgtcagccacccggacaagtactgcttctactgccgggcgctgctgatgaccgtggctgggctgaagctgctgcgctcagccttctgctgccccccacagcagtacctgacgttggccttcaccgtcctgctcttccactttgactacccgcgcctctcccagggctttctgcttgactacttcctcatgtccctgctttgcagcaagctgtgggacttgctgtacaagctgcgtttcgtgctgacctacatcgcgccctggcagatcacctggggctcggctttccacgcttttgcccagccgtttgccgtgccacactcggccatgctgttcgtccaggccctgctctcggggctcttctccacgcctctcaacccactgctaggcagtgccgtcttcatcatgtcctacgctcggcccctcaagttctgggagcgcgactacaacactaaacgtgtggatcattccaacacccgcctggtcacacagctggacaggaaccctggcgctgatgacaacaacctcaactccatcttctatgagcacttgacacgttcgctgcagcacacactgtgtggggacctggtgctgggccgctggggcaactatggccctggtgactgcttcgtcctggcctctgactacctcaacgccctggtgcacctcatcgaggttggcaatggcctcgtcaccttccagctgcgtggccttgagttccggggcacttactgccagcagcgcgaggtggaggctatcaccgagggtgtggaggaggacgagggctgttgctgctgtgaacctggccacctgccacgggtcctgtccttcaatgctgcctttgggcagcgctggctggcttgggaggtaacagccagcaagtacgtgctggagggctatagcattagtgacaataatgctgcctccatgctgcaggttttcgacctccgcaagatcctcatcacctactatgtcaagagcatcatctactacgtgagccgctcaccaaagctggaggtgtggctcagccatgagggcatcacggcagccctgaggcctgtgcgggtgcccggctatgccgactcggatcccaccttctcgctgagtgtggatgaggactatgacctccgcctgtctggcctctcgctgccctccttttgtgctgtgcacctcgagtggatccagtactgcgcctcccggcgcagccagcccgtggaccaggattggaactccccgctggtcacgctgtgttttggcctgtgtgtgctgggccgccgggccctggggacagcctctcacagcatgtctgcaagcctggagcccttcctctacggcctgcacgccctgttcaagggggattttcgcatcacctccccacgtgacgagtgggtctttgccgacatggacctgcttcaccgcgttgtggcgcctggggttcgcatggccctcaagcttcaccaggaccacttcacgtccccagatgaatatgaggagccagcagccctatacgatgccattgcggccaacgaggagcggctggtcatctcacatgagggtgacccagcatggcgcagcgccatcctcagcaacacgccctccctgctggcgctgcgccatgtcctggatgatgcctccgacgagtacaagatcatcatgctcaaccggcgccacctcagcttccgagtcatcaaggtgaaccgggagtgcgtgcgcggcctgtgggccgggcagcagcaggagctggtgttcctgcgcaaccgcaaccccgagcgtggcagcatccagaacgccaagcaggcgcttcgcaacatgatcaactcctcctgtgaccagccgctgggctaccccatctacgtgtcgcctctcaccacctcgctggctggcagccacccccagctacgggcactgtggggtggccccatcagcctgggtgccattgcccactggctcctgcgcacctgggagaggcttcacaagggctgtggcgccggctgcaatagtggcgggaacgtggatgattcagactgtagtgggggcggtggcctgacctccctcagcaataacccccccgtggcacaccccacacctgagaacacggcaggcaatggtgaccaacccctcccaccaggccctggctgggggccgcggtcctccctgagtggctctggtgatgggcggcccccacctctgctgcagtggcctccccctcggctccctggaccaccccctgcatcgcctatccccacagagggtccccggacctcacggccccctggcccgggtctcctcagttctgagggccccagtggaaagtggagcctggggggccggaaggggctgggaggatctgacggggagccagcctcagggagccccaaaggaggtacccccaaatctcaggcgcctctagacctcagcctcagcctcagcctcagcctcagccccgatgtcagcactgaggcctcaccccccagagcttcccaggacattccttgcttggacagcagtgcccctgagagtggcacacctatgggtgccctgggcgactggcctgcccctattgaggagcgtgagagcccggcagcccagcccctgctggaacaccagtactgagctacctggcgcccactggaccacctcctaggattcagtaacggacctgctctgctgcctctctgctggaccacagaactgagtggctttggcctacatgtctgaaccctgacctttggctgccttggccagagtaccaaaactgagtgacccagacctctgaccttgacccctgatctctctcatccccagtccagggcctgggctccccagatggaggcagtcagcctcccagccaggccctaagagccaaaccatgggctggtcccacttggagcctgtggccaggaccacctcagcccctgggcctgcactgcctgcaggtgtggcccccttggcctggacctggggcctgaattgtgggaagggtggtttctttctttccttttttttcttttcttttttttttttttttttgtgcttcggagacatcagaattaataacactatttttga

SEQ ID NO: 557 - DNA, 3606 bp, Homo sapiens; identical to SEQ ID NO: 554

SEQ ID NO: 558 - DNA, 4531 bp, Homo sapiens; identical to SEQ ID NO: 555

SEQ ID NO: 559 - DNA, 3178 bp, Homo sapiens
gaccactggtagcggcagcagctcgcgcccgcgccctcctcgtacccgtgcgcccccggagaccgatcccgccccgcggcccaggccgggcctgaacccagcgggtgccgcttctccacccgaggcttccacctccaacgagccatgttccaggctgcaggagccgcccaggccaccccctctcatgacgccaaaggcggcggcagcagcacggtgcagcgctccaagtccttcagcctgcgggcccaggtgaaggagacctgcgccgcctgccagaagaccgtgtaccccatggagcggctggtggccgacaagctcattttccacaactcttgcttctgctgcaagcactgtcacaccaagctcagcctgggcagctacgccgcgctgcacggggagttctactgcaaaccccacttccagcagctgtttaagagcaaaggcaactacgacgaggggtttggccgcaagcagcacaaggagctctgggcccacaaggaggtggaccccggcaccaagacggcctgaggcctctgtaaccttccaccccctctgcggaaggcctggagccggcagggggaaggtgggaaggaggtcgagctgggcttgcgtgggggccaggtgggaaggggatgaggcttgctcaggcgtaggggaccagggcagggctctgctccaggactccttccttcttccttctcccgcagccggtgagggtttggaaaccaggattggggtctgcccaccaccctgcttcctgcttcgttcagcctccctccccacctcaccccaggaccccctgggaggcccccaagcccagctcccctatctaggtgccttttctccagcaaggagtcagcatgcccccctcagggtcccaagctccctcactgccaccggagactgtgtggcccccacgtctccccatctacctctacccttaacctgtttctgagccacggagacagggaggaaggagcgcgacagtgccacctgttgggcatcataaatgcccctgcagcccatgggggaggagatggggaagtggagccaccctgcctctgcagggcaaggcagggcctgccccagtggggcttgggaccatctcgaaccaccagcgtggagaagcagaagcaaaagcactcgccaggctgcagcctcaggcactggcaggggctggtgcggccccactcccctcccccgctcccatttgtgcccatcctgttgtgaccaaccccgttttaaacatgtttcaatagatccagattctctattgtgtggcctgctgggggatctgtcacaggaagggtgcagactcaccatggggcgggcatggggggacagggccagccccgactacctcggccctgatgggggcagggagctagaagtgggtgtcagttccctgacacaccattgagaaatgggagggctcctcttcacagcgagggcttcatgctgtcacacccacagtggttttggaactgaaactccacctcacccctcagttctgggttggttcagacccaccaacttaccatatgcaccccattgtgaagaggcctgagagcgggagggccaggctgccagtgggtgatggcgcctgtcctcgctgcacttcagtgcctggggtgcaagctgccgcgttccctggctggttccagctgtctagctccctcccttcttcccagccctttgacctggaagtaagttagcgaagaatggcggtaaccagcagacccagcaagtgctgcccaaggttttagtgacccctggattgtcccccctcatcattacccctcgctgctgtcatcatccccttgccttttcaagctctgcggaggtgcagtcacagctactgtctcaggaaatccaaagagaaactacctctgcttctctgaaaacccagggacaatgagggatgagttcacagcagagcaaaccaggcaagttgggaggacctgagggcgccccggtgggacacaggcagaagtctgggttgtcctgctccagattcaacttcctgatgtctccagacatgggatcgatgagaacagagactcctggagggtttgctgccaccacaccatacaactgcctgagttcctaagtggcctccccgtggaacagggcagggagctgggccacaggctccagtgtcacataagtcactatgctgaggcaggcactgctcctcgagggagcagagcgaatactcagcagagatggtgccccggcctggatcctcccaagtgtgaagtgagcgcctcagagcctctcagggcaggccaacttcctgcaccagaggtctcagatggcaaggatcatcttggttcggttaagcaacagtagcagatgaccacaagggggtactggagaggtggctcttggagacacctgacccctgccctgcaaagatggggctgaaggaagtcctctgggccaggaagaccctaccaaatatcatgaaagctccgggaactcagccactggtgacgttcaggttgtgagggccagcagtgccaccctggtaaatcagccctgttgggaccaccccagtggagctcctggaggggcaactggaggaaaggggcagacacctctggactgacaatggtatcagccagatcaccccaggacccctctacttggagtcaagttctcttctgcttgaaaggcccaggctcgttgccaggcaccatacctggcccctgctaagcaaaaacctacctccaccccccacaactgaaagcactgccacaggacccctctgatataaatgatcccttttattgtaagtaatgcgcaacactggcctggctttgcactgcaagccctcggtcaagatatagtcaaataactatggctgcaggttccacagttccacaataaccatggctgcacgatccacaattcagacacagacatagagctggggtgggtggaaggggcaggagggtggcagagtgcggactgtccccagccctggcctctccatgcagagttggcccaggcagacacaccccatggaatgatgagaaagtgacggcacggccccttcccacagcaagcctggggctgccaggaactgcccttcagaacctttgggcccaggtcaccctgaagccccacaactttttatctggattagttattaaaaaacaataaattaagcaac

SEQ ID NO: 560 - DNA, 693 bp, Homo sapiens
tccccgcccttctcttttctacagtatctgttacctcagtcagattgaggatgcacatatactgggaaaataatcgacttccagcgtccctcatgtagtctctacctgattcaggaatctctaacccagtatcggaacgttaagcggcttctccgctttcctgccgtgagaaactcgaggtgaccaacctccgtttccggttggctccggttgcagagttgagtgtcctgagaggtcagattgctgtcagacatggcccatgaacatggacatgagcatggacatcataaaatggaacttccagattatagacaatggaagatagaagggacaccattagaaactatccagaagaagctggctgcaaaagggctaagggatccatggggccgcaatgaagcttggagatacatgggtggctttgcaaagagtgtttccttttctgatgtattctttaaaggattcaaatggggatttgctgcatttgtggtagctgtaggagctgaatattacctggagtccctgaataaagataagaagcatcactgaagataatacctggaagcatcatagtggtttcttaactctccaaaataagatttcttctctgtagcctacttgtctggtttatcccttacagaatattagtaaagatttaatcaattaaaatatatataaaaaaaaaaaaaaaaa

SEQ ID NO: 561 - DNA, 4509 bp, Homo sapiens
gagaactggggaaactggaatttcccgcggagctgacagcgcttgcgctccccctactcgttctaattccacgcgctccaaaatatccgccatggagaaatcttggccaggatgtccattctaggcccatcggtgctgtcttgctgaaggttgggtcaggcatctaaagggactgtggtaagggagggtgtgacacaggtgtaagctgccatcgtcatcatgaactttgagggtctggaccctggactggcagaatatgccccagccatgcattctgccctggaccctgtcttggatgcccacctgaacccaaatctgctacagaatgtggagctggacccagagggagtggccttggaggctcttcccgtccaggaatcagtgcacataatggaaggtgtctactctgaattgcacagcgtggtggctgaagtgggtgtacctgtttccgtctcccactttgacttgcacgaggagatgctgtgggtggggagccacgggggccatgccacttcattttttggcccagccttggagcgctactcatcctttcaagtcaatggcagtgatgatattcggcagatccagagcctggagaatggtatcctttttctcaccaagaacaacctcaagtatatggcccgtgggggcctcattatatttgattacctgctggatgagaatgaggatatgcacagtctcctactgactgacagcagcactctactcgttggtgggctgcagaatcacatactagagattgatcttaacactgtccaggagactcagaagtatgcagtagagacgcctggagtcaccatcatgagacagacaaatcgcttcttcttctgcggccacacgtctggcaaggtttccctgagagacctccgtacttttaaggtggaacatgagtttgatgccttctcaggaagtctgtcagactttgatgtgcatggcaacctgctagctgcctgtggcttctccagccgcctcactggcctggcctgcgaccgtttcctcaaggtgtatgatttgcgcatgatgcgtgccatcacaccacttcaagtacatgtggatcctgccttcttgcgcttcattcctacatatacttctcgtcttgctatcatctctcagtcagggcagtgccaattctgtgaacccacaggcctggccaacccagccgatatctttcatgtgaatcctgtggggcctctgctaatgacatttgatgtgtcagccagcaagcaggctctggcctttggggattctgagggctgtgtgcacctctggactgattccccggagccttccttcaacccctactcccgtgagactgagtttgctttgccgtgtctcgtggactcactgcctcctctggactggagccaggacctgctgcctctttccctcatccctgtcccactcaccactgacacacttctctctgattggcctgctgccaactctgctccagctcccaggcgagcaccacccgtggatgcagagattctgcgcaccatgaagaaggtgggcttcattggctatgcgcccaatccccgcaccaggctgcgcaatcagataccctacagactcaaggagtcagacagtgaatttgacagcttcagccaggtcactgagtcaccagtaggacgagaagaggaaccacatctccacatggtttctaagaaataccgcaaggtgaccatcaaatattccaagctagggctggaggactttgacttcaaacactacaataagaccttgtttgctggattagagccccacattcccaacgcctactgtaactgcatgatccaggtgctctatttcctggagcctgtacgctgtctaattcaaaaccacctttgccagaaggagttctgtctggcatgtgagctgggcttcctgtttcacatgttggacctctctcgtggtgacccttgccagggcaataattttcttcgggcattccgtactattcctgaggcctcagccctcggtctaatcctggctgactcagatgaggcctcaggcaagggcaatctggccaggctcattcagaggtggaatcgcttcattctcactcaactgcatcaagatatgcaggagctggaaataccacaggcttatcgaggtgctggaggcagcagcttttgctcatcgggggactctgttattgggcagctcttcagctgtgagatggagaactgcagcctctgccgctgtggcagtgagaccgtgcgagcctcatccactctgcttttcacactctcctaccctgatgataaaactgggaagaactatgactttgctcaggtgctgaagcgaagcatctgcctggaccagaatacacaggcctggtgtgacacctgtgaaaagtaccagcccacgattcagacccgcaacatccgccatctgccagatattcttgtcatcaattgtgaggtgaacagctcaaaagaggctgatttctggagaatgcaggctgaggttgccttcaagatggcagtaaagaaacacggtggggaaatctccaagaacaaggaatttgctttggctgattggaaggaactagggagtccagagggtgtgctggtgtgtccctccattgaggagttgaagaacgtctggcttcctttctccattcgcatgaagatgaccaaaaacaaagggctggatgtttgcaattggactgatggggatgagatgcagtggggcccagccagggcagaggaggagcatggtgtctatgtgtatgacctgatggctactgtggtacacatcctggactcacgcacagggggcagcctggtggctcacatcaaagttggagagacctaccaccagcgcaaggagggcgttactcaccagcagtggtatctgttcaatgactttcttattgaacctattgataagcatgaagctgtgcagtttgacatgaattggaaagtacctgcaatcctttattatgtcaaacggaatctcaattccagatacaacctgaacatcaagaaccctattgaggcaagtgtcttgctggctgaagcctcgctggcacggaagcagcggaaaacacatactacctttattccactgatgctgaatgagatgccacagattggggacctggtgggtctggatgctgagtttgtcacccttaatgaggaggaagcagagttacgcagtgatggtaccaagtctaccattaaaccaagccagatgtcagtagccaggattacctgtgttcggggccagggacccaatgagggtatccccttcattgatgactacatctctacccaggagcaggtggtggattacttgactcaatactcgggtataaagcctggtgacctcgatgccaaaatttcctccaagcacctaacaactctcaagtctacctacttaaagcttcgttttctcattgacattggagtcaagtttgtgggtcatggcctgcagaaggacttccgggtcatcaacctgatggtgcccaaggaccaagtccttgacactgtctacctgttccatatgccccgaaaacgaatgatttccctgcgattccttgcttggtactttctggacctgaagattcaaggggaaacccatgacagtattgaggatgcccgcacagcccttcagctgtaccgaaagtatctggagctaagcaaaaatggcactgagcctgagtctttccacaaggtgctcaagggtctttatgagaagggcagaaagatggactggaaggtgcctgagcctgagggccaaacaagtcccaagaatgcagctgtcttctcctcagtgctggcgctctgactacccttcccaaagaaccacggccctctccctttactgttctatagccccagaactgggagatggcttcctaagttggctataccttgtccacttccagtactggacgtgctcagggtctagggtcacagatggtgctattaattgaactggaacacagcagaattgttgcaaaggttctaggagccagattcattccttcttcattctttgcaaaacagtggtacagacatggagtctagaattgacccagatggaaagtaattggtattcttaatatcctgggtgactaatatccaggcagagaagctcctggaaccataactgtaagttcctagctggctagggattgaagtcctggacagtgacagaggataccacagtagttcaagacttagcacaagtcaccaactgcttcagggatacctggaggggccagcaagtagagtgttggtggcccaagcaaaccagtgttgccaataccattgccaaaagggcctttggatcctggacaaagcttggctgccggcttcatttattcctgctgatggctgagaagcatctgtcttccatcccacttgcctgtcccaagttttgttccattttttaaaaatttgttgtaaactgcatgttttataaaataaaaataaaatatcgtttgttatttatctcaaaaaaaaaaaaaaaaaaaaa

SEQ ID NO: 562 - DNA, 7222 bp, Homo sapiens
agccggacggcgcggtggtcgggacagactggccgttgctgtggagacgcctggagagttgtggactggggcaacctttgccagtgatgagaagtgatgctcgtggcagtgctgaatctctctgaatatgattcgaattgcagccttaaatgccagctccaccattgaggatgatcatgaaggaagctttaaaagtcacaaaacccagacaaaggaggctcaggaagcagaggcttttgcattgtaccacaaggcccttgatctgcagaaacatgaccggtttgaggagtctgccaaagcctaccatgagctcttggaggcgagcctgctgcgggaggcagtttcatccggtgatgagaaagaggggttgaaacaccctgggctgatactgaaatattccacttataagaacttggcccagctggcagcccagcgggaggatctggagacagccatggagttctacttagaggcagtgatgctggactccacagatgtcaacctctggtataagattggacatgtggccctgaggctcatccggatccccctggctcgccatgcttttgaggaagggctgcggtgcaatcctgaccactggccctgtttggataacctaatcactgtcctgtacaccctcagtgattacacaacatgtctgtacttcatctgcaaagctttggagaaggattgccggtacagcaaagggctggtcctcaaggagaagatttttgaggagcagccttgtctccggaaggactctctcagaatgttcctcaaatgtgacatgtcgattcacgatgtttcggtgagtgcagctgagacacaggcgattgtagatgaggccttggggctgcgaaaaaagaggcaagcgctgattgtgcgggagaaggagccggacctgaaacttgtgcagcccattcctttcttcacctggaagtgcctcggagagagcttgctggccatgtacaatcatctcaccacctgtgagcccccacgtcccagccttggcaaaaggattgatttgtcggactaccaggaccccagccagcctcttgagtcctccatggtggtgacgccagttaacgtgatccagccaagcactgtcagcaccaacccagctgtggctgtcgccgagcctgtggtctcctacacctctgtggctacaaccagcttcccactgcacagtcctggtctgttggagacaggcgctcctgtgggtgatatttctgggggagataaatccaagaaaggggtaaaacggaagaagatttcagaagagagtggagaaacagcaaagcggcggtctgcccgtgtccgaaacaccaagtgcaaaaaagaagagaaagtagacttccaggagcttctgatgaagttcttgccgtccaggttaagaaagctggaccctgaggaggaagatgattcctttaataactatgaagtccagtcagaagccaaactggaaagcttcccaagcattgggcctcaaaggctgtcatttgactcagccacattcatggaatctgaaaagcaggacgtgcatgagttcctgctggagaacctaaccaacgggggcatcctggagctgatgatgcgctacctgaaagccatgggccacaagttcttggtaaggtggcctccaggcttggcggaggtcgtgctcagcgtctaccacagctggaggaggcacagcaccagcctgcccaacccgctgctgagggactgcagcaacaagcacatcaaggacatgatgctgatgtctctctcctgcatggaactccagctggaccagtggctgctgaccaaaggcagaagctctgcagtgtctcctcggaactgtcctgctggtatggtgaatggcagatttggacctgacttcccagggacccactgcctgggtgacctcctacagctgtcatttgcctcgtcccagcgcgacctgttcgaggatggttggctggagtttgtggtccgtgtttactggctgaaggctcgcttcctggcgctgcagggagacatggagcaggccctggagaactatgacatctgcacagaaatgctccagagttccaccgccatccaggtggaggcaggggctgaacgaagagacattgtcatccggctgcccaacctccataatgactctgtggtttccctggaggagattgataagaacctgaagtcgctggagcggtgccagtccctggaggagattcagcggctgtatgaagcaggcgactacaaggctgttgtgcatctgctccgccccactttgtgcaccagtgggtttgaccgggccaaacacctggagtttatgacttccattcctgagaggccagcccagctgcttcttctgcaggactccttgctccggctgaaggactatcggcagtgttttgagtgttccgatgtggctctgaacgaggctgtccagcagatggtgaactcaggtgaggctgccgccaaggaggagtgggtggccacagtgacccaactgctgatgggcatcgagcaggccctctctgcggacagcagtggtagcatcctgaaggtatcatcctccaccactggccttgtgcggctcaccaacaacctcatccaggtcattgactgcagcatggctgtgcaggaggaggccaaggagccccacgtctcttcagtgctaccctggatcattctacaccggatcatctggcaggaggaagacaccttccattctctgtgccaccagcagcagctccaaaacccagcggaggaagggatgtcagagacgcccatgctcccatcctccctcatgctgctgaacacagcccacgagtatttgggcagaaggtcctggtgctgcaattcagatggggctctgctgcgattctatgtgcgagtactccagaaggaactggctgcatccacctctgaagacacgcacccttacaaggaggagctggagacagccttggagcagtgcttctactgcctgtacagcttccccagcaagaagagtaaggccaggtacctggaggaacactcggcccagcaggtggatcttatatgggaggatgcactgttcatgtttgagtattttaagcccaagacccttcctgaatttgacagctataagaccagcaccgtgtctgctgacttggccaacctactgaagagaattgccaccattgtgcctcgcacagagaggccagcccttagcctggacaaagtctctgcctacattgagggaacttcaactgaggtaccctgcctcccagagggggctgacccctcccctccagtggtgaacgagctttactacctcctggctgattatcatttcaaaaacaaggagcagtccaaggccatcaagttctacatgcatgacatctgcatctgccccaataggtttgattcctgggcaggcatggctctggcccgggccagccgcattcaggacaagctgaactccaatgagctgaagagtgatgggcccatttggaagcatgccacgcccgtcttgaactgcttccgtcgggccctggagattgacagctccaacttgtccctatggattgagtatggcaccatgtcctatgccttgcactcattcgcctcacgtcaattgaagcagtggagaggcgagctgccccctgagctcgtgcagcagatggagggccggcgcgacagcatgctagagacagccaagcactgtttcacatcagcagcccgctgcgagggtgatggtgacgaggaggagtggctcatccactacatgctgggcaaggtggctgagaagcagcagcagccacccaccgtttacttgctgcactacaggcaggctggccactacctgcacgaggaggctgcccgctaccccaagaagatccactaccacaacccacctgagctggccatggaggccctggaggtgtactttcggctccatgcttccatcctgaagctcctggggaagcccgattctggggttggtgcagaggtcctggtcaactttatgaaggaggctgcagaaggaccctttgccaggggcgaggagaagaacacacccaaagcttcagaaaaggagaaggcctgcctggtggacgaggactcccactcttcagctgggacactgccgggccccggagcctccctcccctcctcctctggcccaggtctgacatccccaccttacacagccactccgattgaccacgattacgtcaaatgtaaaaaaccccaccagcaggcaacgccggacgaccgaagccaggacagcacagccgtagcactctcagactctagctcaacgcaggacttctttaatgagcccaccagcttactggaaggctccaggaaatcctacacagagaagaggctgcccattctcagttcccaagcaggagcgacgggtaaagatcttcagggggccacagaagaaagaggaaaaaacgaggagtcattggagagtacagaaggcttccgggctgcagagcaaggtgtccagaagcctgctgcagaaaccccagcctctgcttgcatccctggcaagccctcagcatccacacccaccctgtgggatgggaagaagagaggggacctcccaggggagccagtggccttcccccaggggctgccggctggtgctgaggagcagcggcagtttctcacagagcagtgcatcgcctccttccgcctgtgcctgagccgcttcccccagcactataagagtctctaccgtctggccttcctctacacctacagcaagacccaccggaacctccagtgggcccgcgacgtgttgctaggcagcagtatcccgtggcaacaactgcagcacatgccggcacaggggctcttctgcgagaggaacaagaccaatttcttcaacggcatctggcggatccccgtggacgagattgaccggccgggcagctttgcctggcacatgaaccgctccatcgtgctgctgctcaaggtgctggcccagctgcgggaccacagcaccctgctgaaggtgtcctccatgcttcagcggaccccagaccagggcaagaagtatctgcgagatgctgaccgccaggtcctggcgcagcgggccttcatcctcactgtgaaggtgctcgaagacacgctgagcgagctcgcagaggggtcagaacgcccagggcccaaggtctgtggcctccccggagccaggatgaccaccgatgtctcacacaaggccagtcctgaggatggccaggagggcctcccccagccgaagaagccccctctggctgatggctcagggccagggcccgagccaggaggcaaagtgggcctcctcaaccaccggcctgtggccatggatgcaggagacagtgcagaccaaagcggggagcggaaggataaagagagcccacgggcagggcccactgagcccatggacacgagtgaggccactgtttgccactcagacttggagcggacaccacccctgctgccaggtcgccccgcaagggaccggggccccgagagccggcccactgagctgtccctggaggagctgagcatcagtgcccggcagcagcccaccccgctcaccccagcccagccagcccccgcccccgcccccgccaccaccacagggaccagggcagggggccacccggaggagccgctctcccggctcagccgcaagaggaagctcctggaggacacagagtcaggcaagacacttctgttggatgcctaccgtgtgtggcagcagggccagaagggtgtggcctatgacctgggccgtgtggagaggatcatgtcggagacctacatgctcatcaagcaggtggatgaggaggctgcgctggagcaggctgtgaagttctgccaggtccatcttggggctgccgcccagagacaggcctcgggggacacccccaccactccaaagcaccccaaagacagccgagagaacttctttcctgtgacagtggtgcccacagcccctgaccctgtgccagctgactctgtccagcggcccagtgatgctcacaccaagcctcgccctgcactagctgccgccacaactattatcacctgccctccgtcagcatcagcttccaccctggaccagtccaaggaccctgggcctccccggccacacaggcctgaagctacccccagcatggcctctctgggcccagagggagaagagctggcgagagtggcagagggcaccagcttcccgcctcaggagccacggcacagtccgcaggtgaagatggcccccacaagttccccggcagagccacactgctggccggcagaggctgccctgggcacaggcgctgagcccacctgcagccaggaggggaaactgaggcctgagccgagaagggatggggaggctcaggaggctgcgagtgagactcagcccctgagctctcccccaacagctgccagctccaaggcccccagcagtgggagtgcccagccaccagagggtcacccaggcaagcctgagcccagccgggctaagtcccgccccctgcccaacatgccaaagctggtcatcccctccgccgccaccaagttcccccctgagatcaccgtcacgccacccaccccaaccctgctctcccccaaaggcagcatctcggaggagaccaagcagaagctgaagtcagccatcctttctgcccagtctgctgccaacgtgaggaaggagagcctatgccagccagccctggaggtcctggagacatccagccaggagtcctcgctggagagcgagacagacgaggacgacgactacatggacatttgaggggccactgcagccccaccgccacgccccaggggaccagccaggcctggaatgccccctgggcaggaccctgggcaggaccagaggcccacatggatgccactccccacacagcccccaggcctgcccagcccacctcctcatggcatcctccctgtacccaggtcaggctgtccacaccacatgggagcccagaggaggaggggcccgccttagccatgtgaaggtggattggtcgccatctgcacgccaggcggcatccttttctatgaagtgttgactttgtaaatctgcccacacccagctggccatatccacccctcgacgccgggatgagccggctctgcctgtgtcacagtggaggggtcctttagggccaggctcacccctcaccctttttttggttgcttttctaataaagatggaacagtt

SEQ ID NO: 563 - DNA, 2594 bp, Homo sapiens
cggaggctcggccacaacgccactggattggtggtagggcggggcgggccacagtctccagcctgaagcggaagtggaggaaagatggaggaccatcagcacgtgcccatcgacatccagaccagcaagctgctcgattggctggtggacagaaggcactgcagcctgaaatggcagagtctggtgctgacgatccgcgagaagatcaatgctgccatccaggacatgccagagagcgaagagatcgcccagctgctgtctgggtcctacattcactactttcactgcctaagaatcctggaccttctcaaaggcacagaggcctccacgaagaatatttttggccgatactcttcacagcggatgaaggattggcaggagattatagctctgtatgagaaggacaacacctacttaggtaaagtggcccggcctgggagccctggtatccatggggaagcccactctcagagttctgagataccaggcttataggaggcacagtctgtgagtgggaagagactggagtgtagatgttgcccatttgtaggtggtaaaatcaattgtttttgatggaattgattttccctgagtggagtgctgggggaaggaggaggtccaggccggtagtggccattcgccgtgcctcagcgagcaggtgtgtgtgggtcctccaccactcacctcttggttagcgggagtgtgctgcccccacccccacccccgcacccccattctacacaaggcagaagaggcacgggttttcctgggagcgaatatcaagtgcctgagagcaactacaggactaactgtgtttgggttgggtgtagtataaataataataatggctaatatttcctgagcatctactaaatgcaaggaattgtgcttggtgtgtcatgtggattctctcttgcatcttcatgataaatgttattgtcgctgttttaccgatgagggttggattagaggggttaaacaacttgtcttaggctccacagctgggaacaagtggggctgggaagctgacttcgtgctcttcaccaccacaaaggatgtgtgtgcatcctggggcatgcctgcctcatgtgggggtgtcctgggctgaatttcctgggcacttctcagtggaactctctagcctcctggttcggaatgtcaactatgagatcccctcactgaagaagcagattgccaagtgccagcagctgcagcaagaatacagccgcaaggaggaggagtgccaggcaggggctgccgagatgcgggagcagttctaccactcctgcaagcagtatggcatcacgggcgaaaatgtccgaggagaactgctggccctggtgaaggacctgccgagtcagctggctgagattggggcagcggctcagcagtccctgggggaagccattgacgtgtaccaggcgtctgtggggtttgtgtgtgagagccccacagagcaggtgttgccaatgctgcggttcgtgcagaagcggggaaactcaacggtgtacgagtggaggacagggacagagccctctgtggtggaacgaccccacctcgaggagcttcctgagcaggtggcagaagatgcgattgactggggcgactttggggtagaggcagtgtctgaggggactgactctggcatctctgccgaggctgctggaatcgactggggcatcttcccggaatcagattcaaaggatcctggaggtgatgggatagactggggagacgatgctgttgctttgcagatcacagtgctggaagcaggaacccaggctccagaaggtgttgccaggggcccagatgccctgacactgcttgaatacactgagacccggaatcagttccttgatgagctcatggagcttgagatcttcttagcccagagagcagtggagttgagtgaggaggcagatgtcctgtctgtgagccagttccagctggctccagccatcctgcagggccagaccaaagagaagatggttaccatggtgtcagtgctggaggatctgattggcaagcttaccagtcttcagctgcaacacctgtttatgatcctggcctcaccaaggtatgtggaccgagtgactgaattcctccagcaaaagctgaagcagtcccagctgctggctttgaagaaagagctgatggtgcagaagcagcaggaggcacttgaggagcaggcggctctggagcctaagctggacctgctactggagaagaccaaggagctgcagaagctgattgaagctgacatctccaagaggtacagcgggcgccctgtgaacctgatgggaacctctctgtgacaccctccgtgttcttgcctgcccatcttctccgcttttgggatgaagatgatagccagggctgttgttttggggcccttcaaggcaaaagaccaggctgactggaagatggaaagccacaggaaggaagcggcacctgatggtgatcttggcactctccatgttctctacaagaagctgtggtgattggccctgtggtctaccaggcgaaaaccacagattctccttctagttagtatagcggacttaataaaagaggaaaaaactcttgcttcagta

SEQ ID NO: 564 - DNA, 2809 bp, Homo sapiens
cggaggctcggccacaacgccactggattggtggtagggcggggcgggccacagtctccagcctgaagcggaagtggaggaaagatggaggaccatcagcacgtgcccatcgacatccagaccagcaagctgctcgattggctggtggacagaaggcactgcagcctgaaatggcagagtctggtgctgacgatccgcgagaagatcaatgctgccatccaggacatgccagagagcgaagagatcgcccagctgctgtctgggtcctacattcactactttcactgcctaagaatcctggaccttctcaaaggcacagaggcctccacgaagaatatttttggccgatactcttcacagcggatgaaggattggcaggagattatagctctgtatgagaaggacaacacctacttaggtaaagtggcccggcctgggagccctggtatccatggggaagcccactctcagagttctgagataccaggcttataggaggcacagtctgtgagtgggaagagactggagtgtagatgttgcccatttgtaggtggtaaaatcaattgtttttgatggaattgattttccctgagtggagtgctgggggaaggaggaggtccaggccggtagtggccattcgccgtgcctcagcgagcaggtgtgtgtgggtcctccaccactcacctcttggttagcgggagtgtgctgcccccacccccacccccgcacccccattctacacaaggcagaagaggcacgggttttcctgggagcgaatatcaagtgcctgagagcaactacaggactaactgtgtttgggttgggtgtagtataaataataataatggctaatatttcctgagcatctactaaatgcaaggaattgtgcttggtgtgtcatgtggattctctcttgcatcttcatgataaatgttattgtcgctgttttaccgatgagggttggattagaggggttaaacaacttgtcttaggctccacagctgggaacaagtggggctgggaagctgacttcgtgctcttcaccaccacaaaggatgtgtgtgcatcctggggcatgcctgcctcatgtgggggtgtcctgggctgaatttcctgggcacttctcagtggaactctctagcctcctggttcggaatgtcaactatgagatcccctcactgaagaagcagattgccaagtgccagcagctgcagcaagaatacagccgcaaggaggaggagtgccaggcaggggctgccgagatgcgggagcagttctaccactcctgcaagcagtatggcatcacgggcgaaaatgtccgaggagaactgctggccctggtgaaggacctgccgagtcagctggctgagattggggcagcggctcagcagtccctgggggaagccattgacgtgtaccaggcgtctgtggggtttgtgtgtgagaggtagagaggcctcagcttctcctggtgggggtgctttgcctgtgttccccagctcatgacccttctccagttgtcttgttcccatataacatttgaactctttacacacctgaacctgtgggggccttgcccatttgaccatgtggcccaggccaaagcccagtgttggccttacgcatggtcggcaggagagtcagttgtgtgctctgttgaagccccacagagcaggtgttgccaatgctgcggttcgtgcagaagcggggaaactcaacggtgtacgagtggaggacagggacagagccctctgtggtggaacgaccccacctcgaggagcttcctgagcaggtggcagaagatgcgattgactggggcgactttggggtagaggcagtgtctgaggggactgactctggcatctctgccgaggctgctggaatcgactggggcatcttcccggaatcagattcaaaggatcctggaggtgatgggatagactggggagacgatgctgttgctttgcagatcacagtgctggaagcaggaacccaggctccagaaggtgttgccaggggcccagatgccctgacactgcttgaatacactgagacccggaatcagttccttgatgagctcatggagcttgagatcttcttagcccagagagcagtggagttgagtgaggaggcagatgtcctgtctgtgagccagttccagctggctccagccatcctgcagggccagaccaaagagaagatggttaccatggtgtcagtgctggaggatctgattggcaagcttaccagtcttcagctgcaacacctgtttatgatcctggcctcaccaaggtatgtggaccgagtgactgaattcctccagcaaaagctgaagcagtcccagctgctggctttgaagaaagagctgatggtgcagaagcagcaggaggcacttgaggagcaggcggctctggagcctaagctggacctgctactggagaagaccaaggagctgcagaagctgattgaagctgacatctccaagaggtacagcgggcgccctgtgaacctgatgggaacctctctgtgacaccctccgtgttcttgcctgcccatcttctccgcttttgggatgaagatgatagccagggctgttgttttggggcccttcaaggcaaaagaccaggctgactggaagatggaaagccacaggaaggaagcggcacctgatggtgatcttggcactctccatgttctctacaagaagctgtggtgattggccctgtggtctaccaggcgaaaaccacagattctccttctagttagtatagcggacttaataaaagaggaaaaaactcttgcttcagta

SEQ ID NO: 565 - DNA, 1884 bp, Homo sapiens
cggaggctcggccacaacgccactggattggtggtagggcggggcgggccacagtctccagcctgaagcggaagtggaggaaagatggaggaccatcagcacgtgcccatcgacatccagaccagcaagctgctcgattggctggtggacagaaggcactgcagcctgaaatggcagagtctggtgctgacgatccgcgagaagatcaatgctgccatccaggacatgccagagagcgaagagatcgcccagctgctgtctgggtcctacattcactactttcactgcctaagaatcctggaccttctcaaaggcacagaggcctccacgaagaatatttttggccgatactcttcacagcggatgaaggattggcaggagattatagctctgtatgagaaggacaacacctacttagtggaactctctagcctcctggttcggaatgtcaactatgagatcccctcactgaagaagcagattgccaagtgccagcagctgcagcaagaatacagccgcaaggaggaggagtgccaggcaggggctgccgagatgcgggagcagttctaccactcctgcaagcagtatggcatcacgggcgaaaatgtccgaggagaactgctggccctggtgaaggacctgccgagtcagctggctgagattggggcagcggctcagcagtccctgggggaagccattgacgtgtaccaggcgtctgtggggtttgtgtgtgagagccccacagagcaggtgttgccaatgctgcggttcgtgcagaagcggggaaactcaacggtgtacgagtggaggacagggacagagccctctgtggtggaacgaccccacctcgaggagcttcctgagcaggtggcagaagatgcgattgactggggcgactttggggtagaggcagtgtctgaggggactgactctggcatctctgccgaggctgctggaatcgactggggcatcttcccggaatcagattcaaaggatcctggaggtgatgggatagactggggagacgatgctgttgctttgcagatcacagtgctggaagcaggaacccaggctccagaaggtgttgccaggggcccagatgccctgacactgcttgaatacactgagacccggaatcagttccttgatgagctcatggagcttgagatcttcttagcccagagagcagtggagttgagtgaggaggcagatgtcctgtctgtgagccagttccagctggctccagccatcctgcagggccagaccaaagagaagatggttaccatggtgtcagtgctggaggatctgattggcaagcttaccagtcttcagctgcaacacctgtttatgatcctggcctcaccaaggtatgtggaccgagtgactgaattcctccagcaaaagctgaagcagtcccagctgctggctttgaagaaagagctgatggtgcagaagcagcaggaggcacttgaggagcaggcggctctggagcctaagctggacctgctactggagaagaccaaggagctgcagaagctgattgaagctgacatctccaagaggtacagcgggcgccctgtgaacctgatgggaacctctctgtgacaccctccgtgttcttgcctgcccatcttctccgcttttgggatgaagatgatagccagggctgttgttttggggcccttcaaggcaaaagaccaggctgactggaagatggaaagccacaggaaggaagcggcacctgatggtgatcttggcactctccatgttctctacaagaagctgtggtgattggccctgtggtctaccaggcgaaaaccacagattctccttctagttagtatagcggacttaataaaagaggaaaaaactcttgcttcagta

SEQ ID NO: 566 - DNA, 3744 bp, Homo sapiens
atgtcactttttttaagggtagtatttagtttcacaatgtttggggacctgtttgaagaggagtattccactgtgtctaataatcagtatggaaaagggaagaaattaaagactaaagctttggagccacctgctcctagagaattcaccaatttaagcggaatcagaaatcagggtggaacctgttacctcaattcccttcttcagactcttcatttcacacctgaattcagagaagctctattttctcttggcccagaagagcttggtttgtttgaagataaggataaacccgatgcaaaggttcgaatcatccctttacagttacagcgcttgtttgctcagcttctgctcttagaccaggaagctgcatccacagcagacctcactgacagctttgggtggaccagtaatgaggaaatgaggcaacatgatgtgcaggaactgaatcgaatcctcttcagcgctttggaaacttctttagttgggacctccggtcatgacctcatctatcgtctgtaccatggaaccattgttaaccagattgtttgtaaagaatgtaagaacgttagcgagaggcaggaagacttcttagatctaacagtagcagtcaaaaatgtatccggtttggaagatgctctctggaacatgtatgtagaagaggaagtttttgattgtgacaacttgtaccactgtggaacttgtgacaggctggttaaagcagcaaagtcggccaaattacgtaagctgcctccttttcttactgtttcattactaagatttaattttgattttgtgaaatgcgaacgctacaaggaaactagctgttatacattccctctccggattaatctcaagcccttttgtgaacagagtgaattggatgacttagaatatatatatgacctcttctcagttattatacacaaaggtggctgctacggaggccattaccatgtatatattaaagatgttgatcatttgggaaactggcagtttcaagaggaaaaaagtaaaccagatgtgaatctgaaagatctccagagtgaagaagagattgatcatccactgatgattctaaaagcaatcttattagaggagaataatctaattcctgttgatcagctgggccagaaacttttgaaaaagataggaatatcttggaacaagaagtacagaaaacagcatggaccattgcggaagttcttacagctccattctcagatatttctactcagttcagatgaaagtacagttcgtctcttgaagaatagttctctccaggctgagtctgatttccaaaggaatgaccagcaaattttcaagatgcttcctccagaatccccaggtttaaacaatagcatctcctgtccccactggtttgatataaatgattctaaagtccagccaatcagggaaaaggatattgaacagcaatttcagggtaaagaaagtgcctacatgttgttttatcggaaatcccagttgcagagaccccctgaagctcgagctaatccaagatatggggttccatgtcatttactgaatgaaatggatgcagctaacattgaactgcaaaccaaaagggcagaatgtgattctgcaaacaatacttttgaattgcatcttcacctgggccctcagtatcatttcttcaatggggctctgcacccagtagtctctcaaacagaaagcgtgtgggatttgacctttgataaaagaaaaactttaggagatctccggcagtcaatatttcagctgttagaattttgggaaggagacatggttcttagtgttgcaaagcttgtaccagcaggacttcacatttaccagtcacttggcggggatgaactgacactgtgtgaaactgaaattgctgatggggaagacatctttgtgtggaatggggtggaggttggtggagtccacattcaaactggtattgactgcgaacctctacttttaaatgttcttcatctagacacaagcagtgatggagaaaagtgttgtcaggtgatagaatctccacatgtctttccagctaatgcagaagtgggcactgtcctcacagccttagcaatcccagcaggtgtcatcttcatcaacagtgctggatgtccaggtggggagggttggacggccatccccaaggaagacatgaggaagacgttcagggagcaagggctcagaaatggaagctcaattttaattcaggattctcatgatgataacagcttgttgaccaaggaagagaaatgggtcactagtatgaatgagattgactggctccacgttaaaaatttatgccagttagaatctgaagagaagcaagttaaaatatcagcaactgttaacacaatggtgtttgatattcgaattaaagccataaaggaattaaaattaatgaaggaactagctgacaacagctgtttgagacctattgatagaaatgggaagcttctttgtccagtgccggacagctatactttgaaggaagcagaattgaagatgggaagttcattgggactgtgtcttggaaaagcaccaagttcgtctcagttgttcctgttttttgcaatggggagtgacgttcaacctgggacagaaatggaaatcgtagtagaagaaacaatatctgtgagagattgtttaaagttaatgctgaagaaatctggcctacaaggagatgcctggcatttacgaaaaatggattggtgctatgaagctggagagcctttatgtgaagaagatgcaacactgaaagaacttctgatatgttctggagatactttgcttttaattgaaggacaacttcctcctctgggtttcctgaaggtgcccatctggtggtaccagcttcagggtccctcaggacactgggagagtcatcaggaccagaccaactgtacttcgtcttggggcagagtttggagagccacttccagccaaggtgcttctgggaacgagcctgcgcaagtttctctcctctacttgggagacatagagatctcagaagatgccacgctggcggagctgaagtctcaggccatgaccttgcctcctttcctggagttcggtgtcccgtccccagcccacctcagagcctggacggtggagaggaagcgcccaggcaggcttttacgaactgaccggcagccactcagggaatataaactaggacggagaattgagatctgcttagagccccttcagaaaggcgaaaacttgggcccccaggacgtgctgctgaggacacaggtgcgcatccctggtgagaggacctatgcccctgccctggacctggtgtggaacgcggcccagggtgggactgccggctccctgaggcagagagttgccgatttctatcgtcttcccgtggagaagattgaaattgccaaatactttcccgaaaagttcgagtggcttccgatatctagctggaaccaacaaataaccaagaggaaaaagaaaaaaaaacaagattatttgcaaggggcaccgtattacttgaaagacggagatactattggtgttaagaatctcctgattgacgacgatgatgatttcagtacaatcagagatgacactggaaaagaaaagcagaaacaacgggccctggggagaaggaaaagccaagaagccctccatgagcagagcagctacatcctctccagtgcagagacgcctgcccggccccgagccccggaaacttctctctccatccacgtggggagcttcagataa

SEQ ID NO: 567 - DNA, 3524 bp, Homo sapiens
gagtcgcgggccttttgagggaggaggcagagcgcgccgggccggtggcatcttccttactttgtccatcctccggactcgcgatcttccttccggagccatgtcagaaggagtggacttgattgatatatatgctgacgaggagttcaaccaggacccagagttcaacaatacagatcagattgacctgtatgatgatgtgctgacagccacctcacagccctcagatgacagaagcagcagcactgaaccacctcctcctgttcgccaggagccatctcccaagcccaacaacaagacccctgcaattctgtatacctacagtggcctgcgtaatagacgagctgccgtttatgtgggcagcttctcctggtggaccacagaccagcagctgatccaggttattcgctctataggagtctatgatgtggtggagttgaaatttgcagagaatcgagcaaatggccagtccaaagggtatgctgaggtggtggtagcctctgaaaactctgtccacaaattgttggaactcctaccagggaaagttcttaatggagaaaaagtggacgtgaggccggccacccggcagaacctgtcacagtttgaggcacaggctcggaaacgtgagtgtgtccgagtcccaagagggggaatacctccacgggcccattcccgagattctagtgattctgctgatggacgggccacaccctctgagaaccttgtaccctcatctgctcgtgtggataagccccccagtgtgctgccctacttcaatcgtcctccttcggcccttcccctgatgggtctgcccccaccaccaattccacccccaccacctctctcctcaagctttggggtccctcctcctcctcctggtatccactaccagcatctcatgcccccacctcctcgattacctcctcatcttgctgtacctccccctggggccatcccacctgcccttcacctcaatccagccttcttccccccaccaaacgctacagtggggcctccaccagatacttacatgaaggcctctgccccctataaccaccatggcagccgagattcgggccctccaccctctacagtgagtgaagccgaatttgaagatatcatgaagcgaaacagagcaatttccagcagtgccatttccaaagcagtatctggagccagtgcaggggattacagtgacgcaattgagacgctgctcacagccattgcggttatcaaacagtcccgggttgccaatgatgagcgttgccgtgtcctcatctcctctcttaaggactgtcttcatggcattgaagccaagtcctacagtgtgggtgccagtgggagctcttccaggaaaagacatcgctcccgggaaaggtcacctagccggtcccgggagagcagcaggaggcaccgggatctgcttcataatgaagatcggcatgatgattatttccaagaaaggaaccgggagcatgagagacaccgggatagagaacgggaccggcaccactgagaaaggagtctggttggaagcaaatgtttttttaatggacttgcatctcctcaccttgatcaggactaaaggacggaggccgccccacccccttccctttcctccaaacccctaactccctccagacacccagggaataccctctgccccacaggattgaagactgcttggcagtcctcccaatcccacacctcctgtttgccaggggaaagaacctaaagacttcgtgtgattgggaggggtggcagacaggaagaaaacatgtccaggcccctggtctccatagagaatggtgctttgtccaagaaaacgtatgagtttctgattctccgggagccgttcaatggtgaggttgatgggaagacttccttcccaaagaaaatagatcctccatgcaggatctaggagagtgactgggtgtgccaaaatatgcccagggtcctgccctcagcactagatttaatggggccaagagggtccaaaccccttgctaacataccacttctttgtttaactcctttacctttccagccctttgaggagggaccatgagaacagaaattaccttatgaaaagctacttctgttcctgctttccctctcacgtattgacggtttatttctttgacctcccagagggctgaactctttcaactctgcgctgcccagccttctcagtggacttgcccctcctaagcagagaaggcctatgaggttgcttgctgctgggaagcctggcagagccaattaccaccctctgctgcttagtgcttgggtacctcttgcaataaccagctcttagttgttccctttccctggggcttttccatttaacacatggagcccttcccccagaaggctactttcttgttttagaggaaggtactgcccattgggagatggggacattgggacctcagcaatgaagaacccttgtgaagtaaccaggaggaatggggaaagaagcaagttgggcaggatatggcctacttccataggcttttcttttttcaggtttgatgtaagcatgggcttacatcccccaggtacatacttttacttattgtgggataacctggcactagtaggcaggtaaagtcacaaatttggtgtcttttcaccttttgactgttgacttaatagctcctctcactctgcctggagatacttcctgcctcagatgaggagccagaagaaacagagcccgacttgaatgaactcagctcagagttctaaggaccagcattctgggggccattttctctacaggcaaatggaattgcttttccataacatccaaattgtaatgtggttgctgctgaaggaggaggcagcagcgaggtcctgcggtacccatggggtgatgctacttctgcatgcatctacagggcatctgacacctaacatgagacgtggcatgtgagatgagacttggcatgtgagacatagggtcactagagacccttctgggtcagaggagagagactgaattggactaaacccgtcctctgttcccagcacgtttctcatatagccctcagtcactgagggagtcccccgcaggattggagaggcacattcccttgggacagaggctacaggttggagctttttttcccctgtcccccaaccccatccccacctccacttcagaacatggcaccccacccaactggccaagtgttaagtgatgtgcttattgagagcaactccgggtgtcttttaaaatgtagagaaaaggtgacagtttaaggaaaaatatatatagaataccagaaatgccgtttacccggagaatttttttctccccatttgttttgtttttactcaatgacaccatttttagttttatttcctgatagcaaaaggaaaaaaaacacccatccctcaaaaaggccaaggtcccgtccccctgttgtcggtgatttgtttgtctttctgataggttgaaaattgtgtaataaacttgatgacgctgtcaaaaaaaaaaaaaaaaaaaaaaaaaaaaa

SEQ ID NO: 568 - DNA, 6275 bp, Homo sapiens
actttccacgggtgaggcctggagaacgggtggacgtgcaggccagaacccgggacccacccggctgagcccccagactctccgctgcccacgaccctcggagtggcaccctctcctggccgtctcctctcgtgggtcccgaagaacgggtgcaaagccgagttcgtccgctgtactgcgcgggcgcgcgtttcgttcttcggttttgccacggttctgtgactccctaaaggttgagggctactgaattagaagaaacgccgagctggcttctggtgggctgccgggcgccgggcagcgtgcttggactggggagggcagggcgtgtttactctgagtagagcaaccgcaagacctcctttaaaaaataccagttctgagcttcggcattggagaggccgcctgtcattcagcctcttcggaccctctctcactccctgtcttccggagcgtgagtgaagcccgggtgaggtgttttcccacacgccgggggcccggagctgagaaggggcatggccagcatcacgcagctgttcgacgacctgtgtgaggccctcctgccggctgccaagactcacctgggccagcgcagtgtgaaccggaagagggcaaagcggagcctcaagaaggtggcctacaatgctcttttcacaaatctttttcaagatgagactcaacagctgcagcctgacatgtcaaaactaccagcgagaaacaagatcctcatgttgtcctttgacttgagagtgggtggcctgggccccaaggccgaccgtttggaggagcttgtggaggagctggaagcagccccttgctgtccgcttttggaggtggggtctgttttggacctcctggttcagctggcagggagtggtccccctcaagttctgccgagaaaacgagactacttccttaacaacaagcatgtggggagaaacgttccgtacagcggctatgattgcgacgacctgagtgtgtttgagatggacgttcagtctctgatctccagagaagagtgtttgtgtcacagcatgatccaggaaacacttcaggttatggaggctgctccaggcactggcctgcccaccgtcgggctcttctcatttggtgacccttgtggtgacaggttcgagagagacacccgggtctcgctcttcggggcccttgtgcacagccgcacttatgacatggacgtccgactgggcctgccccccgtgccagacaatgcggacctctctgggctggctattaaggtcccaccgagtgtggatcagtgggaagacgaaggattccagtcagcgtccaacttgactcctgattcccagtctgagcccagcgtgaccccagacgtggacctgtgggaagccgcacttacctatgaggccagcaagcggaggtgctgggagcgagttggctgcccccctggccacagagaggagccttacctgacggaggcgggaagggacgctttcgacaagttctgcaggctccaccaaggggagctccagctgcttgctgggggcgtcctacaggccccgcagcccgtgctggtgaaggagtgcgagctggtgaaagacgtgctgaacgtcttgattggggtcgtgtctgccacgttttcgctctgccagccggcccaggcctttgtggtgaagcggggcgtccacgtgtcaggagcgtctcccgagagcatcagcagcctgctctcggaagtggccgagtatgggacctgctacacgcgcctgagtcatttctctctgcagcccgtcctggactctttgtacagcaagggcctcgtgttccaggccttcaccagtggcctgaggaggtacctgcagtattaccgggcctgcgtcctttccactccgcccaccctgagcctcctcaccattggttttctcttcaagaaacttggccggcagctcaggtacctggccgagctctgtggcgttggcgctgtgctcccgggcacctgtggaggaggccccagggccgcgtttcccaccggcgtgaagctgctgtcctacctctaccaggaggctctgcacaactgcagcaacgagcactaccctgtactgctgtccctgctgaagaccagctgcgagccctacacccggttcatccacgactgggtgtacagcggggtgttcagagacgcttatggcgagttcatgattcaggtgaaccacgagtacctcagcttccgagataagttgtactggacacatggctacgtgctcatctccaaagaggtggaggactgtgttcccgtgtttctgaagcacattgcccacgacatatacgtctgcggaaagaccattaacctgctgaagctctgctgcccccggcattacctctgttggtccgacgtccctgtcccccggatctcggtgattttctcccttgaggagttgaaggagattgagaaggactgtgccgtctacgttgggcgcatggagagggtggcccgccacagctctgtcagcaaggaggagaaggaattacgtatggaaattgcaaaacaagaattaatcgctcatgcccgggaagcagcatccagggtcctgagtgcactgagtgaccggcagatgtcagaacggatggccttggatgcccggaagcgtgagcagtttcagaggctgaaagaacaatttgtgaaggaccaggagcgacgccaggcggccaggcaggaggagctggatgatgacttcagctacgcccgtgaactccgagacagggagagaaggctgaagtccctggaggaggagctggagaggaaggcgaggcaggcactggtcgaccactacagcaagctctctgcagaggcagctcgtcgggagcagaaggcactgtggagaatccagaggcaccgactggagagtgcacggcttcgttttctcttagaagatgagaaacacattcaggagatgctgaaagcagtgtctgaggctcaccagccccaggagccgccagacgtcctcttgagcgtgcacccccaggtcacgtctccgggccctgagcacccagagggaggccaaggctgtgattctgggtctgcagagcaacactcgcctgcctgggatggctggaacaggccaggcctgctgaccccacagccccttaagcctctagcagtgggggctggtggcagggggctgcagcaggcggagggggccagacccttctctgacagcctcagcattggagacttcctacctgtgggcccaggggctgagccgtccgtgcagactggcatggtccctctcctggaggtggcgctgcagaccattaacttggacctgcccccctcagctcctggggaggcacccgcagcagccagcactcagccctccaggccacaggagtacgactttagtactgtcctgaggccagctgtggccacctcacctgcaccagggcccctgcaggctgcagagtgcagcttgggcagctcagggctacagctgtgggaggacagttgtgggaagatggatgcctgtggctccgcctcgcgggagactctgctcccctcacacccacccaggcgtgctgctctggaggaggggagcagccagcccacagagcggctctttgggcaggtgtcagggggtggtcttcccacaggggactacgcttctgaaatagctcccacccggccacggtggaacacccacgggcacgtgtctgacgccagcatcagggtcggggagaatgtgtcagatgtggctcccacccagccacggtggaacacccacggacacgtatccaatgccagcatcagcttaggggagtctgtgtcagatgtggctcccactcggccacggtggaacatccatggacatgtgtccaacgccagcatcagggtcggggagaatgtgtcagatgtggctcccaccaggccacggtggaatacccacgggcacgtgtccaacgccagcatcagggttggggagaacgtgtcggacgtggctcccacccggccacggtggaacacccatggacacgtgtccgatgccagcatcagcttgggggagtctgtgtcagacatggctcccgcccggccacggtggaacacccatggacacgtgtctgatgccagcatcagcttgggggagtctgtgtcagacatggctcccacccggccacggtggaacacccacggacatgtgtctgacaccagcatcagggttggggagaacgtatcggacgtggctcccatccggtcacggtgcaacacccatggacacgtgtccgacgccagcatcagcttgggggagcctgtgtcggatgtggtttccacccggccacggtggaacacccatgtacccatccctccgccccacatggtgctgggggctctctcaccagaagctgagcccaacacacccaggccccaacagagcccccctggccacacgtcccagtcagcgctcagcctgggagcacagagcactgtgctggactgtgggccacggctgcctgtagaagtggggccatctctgtcctcccccagctcgggctgcggggaggggagcatcagcgtgggggagaacgtgtcagacgtggctcccacccaaccatggtggcccaacaccccgggagacagtgtctctgaagaactaggtcagagtagggtggctggtggtcaggagtgggactgtgggacgcacagagcctgggaggtaggcgggcagtggggttggtggcatgtgaagttcccctcaggcctccttgtcagccaggacctgggctgctgtgggggacatgggaggggctgcttgagccagggccggctcggctctgtacccgccacaggcactcggccctgatgccctcgtgtccacttgtgtccacacaggccctgggaggagcggggacactgaggacctctctccaaattggcctctcaactcacaggaagacacagctgcccagagcagcccaggccgtggtgaggaggcggaggcatcggcggcggaggctcagggtggggagcaggcctacctggcaggcctggcagggcagtaccacttggagcggtacccggacagttacgagtccatgtccgagccgcccattgctcatcttttgcgccccgtgcttccccgggccttcgccttccccgtggacccccaggtccagtctgccgctgatgagactgctgtgcagctgagcgagttgctgacgctgcccgtgctcatgaagcgctccatcacggcaccgctggccgcccacatctccttggtgaacaaggccgctgtcgactacttcttcgtggagctgcacctggaggcgcactatgaggcactgcggcacttcctgctgatggaggacggcgagttcgcccagtccctcagcgacctgctctttgagaagcttggagctgggcaaacgcccggagagctgctcaacccgctggtgctgaactctgtgctgagcaaggccctgcagtgcagcctgcatggggacaccccgcacgcctccaacctctccctcgctctcaagtacctgcccgaggtgtttgcccccaacgccccggatgtgctgagctgcctggagctcaggtacaaggtggactggcctctcaacattgtcatcaccgagggctgcctgagcaagtacagcggcgtcttctccttcctgctgcagctgaagctcatgatgtgggcgctcaaggacgtctgcttccacctcaagcgcacagccctgctgagccacatggccggctctgtgcagttccgtcagctgcagctgttcaagcacgagatgcagcatttcgtgaaggtcatccagggctacatcgccaaccagatcctgcacgtcacctggtgcgagttcagggccaggttggccaccgtgggcgacctggaggagatccagcgtgcgcacgcagagtacctgcacaaggccgtcttcaggggcctgctcacggagaaggcggcgcccgtcatgaacgtcatccacagcatcttcagcctcgtgctcaagttccgcagccagctcatctcccaggcctgggggccccctgggggcccgcggggtgcagagcaccccaactttgcactcatgcagcagtcctacaacaccttcaagtactactcccactttctcttcaaagtggtgaccaagctggtgaaccgcggctaccagccccacctggaggactttctgctgcgcatcaacttcaacaactactaccaggacgcctgaggctgctctgcgggggacgtgcacaataaaggtgttctcggaccctgaaaaaaaaaaaaaaaaaaaaa

SEQ ID NO: 569 - DNA, 6040 bp, Homo sapiens
actttccacgggtgaggcctggagaacgggtggacgtgcaggccagaacccgggacccacccggctgagcccccagactctccgctgcccacgaccctcggagtggcaccctctcctggccgtctcctctcgtgggtcccgaagaacgggtgcaaagccgagttcgtccgctgtactgcgcgggcgcgcgtttcgttcttcggttttgccacggttctgtgactccctaaaggttgagggctactgaattagaagaaacgccgagctggcttctggtgggctgccgggcgccgggcagcgtgcttggactggggagggcagggcgtgtttactctgagtagagcaaccgcaagacctcctttaaaaaataccagttctgagcttcggcattggagaggccgcctgtcattcagcctcttcggaccctctctcactccctgtcttccggagcgtgagtgaagcccgggtgaggtgttttcccacacgccgggggcccggagctgagaaggggcatggccagcatcacgcagctgttcgacgacctgtgtgaggccctcctgccggctgccaagactcacctgggccagcgcagtgtgaaccggaagagggcaaagcggagcctcaagaaggtggcctacaatgctcttttcacaaatctttttcaagatgagactcaacagctgcagcctgacatgtcaaaactaccagcgagaaacaagatcctcatgttgtcctttgacttgagagtgggtggcctgggccccaaggccgaccgtttggaggagcttgtggaggagctggaagcagccccttgctgtccgcttttggaggtggggtctgttttggacctcctggttcagctggcagggagtggtccccctcaagttctgccgagaaaacgagactacttccttaacaacaagcatgtggggagaaacgttccgtacagcggctatgattgcgacgacctgagtgtgtttgagatggacgttcagtctctgatctccagagaagagtgtttgtgtcacagcatgatccaggaaacacttcaggttatggaggctgctccaggcactggcctgcccaccgtcgggctcttctcatttggtgacccttgtggtgacaggttcgagagagacacccgggtctcgctcttcggggcccttgtgcacagccgcacttatgacatggacgtccgactgggcctgccccccgtgccagacaatgcggacctctctgggctggctattaaggtcccaccgagtgtggatcagtgggaagacgaaggattccagtcagcgtccaacttgactcctgattcccagtctgagcccagcgtgaccccagacgtggacctgtgggaagccgcacttacctatgaggccagcaagcggaggtgctgggagcgagttggctgcccccctggccacagagaggagccttacctgacggaggcgggaagggacgctttcgacaagttctgcaggctccaccaaggggagctccagctgcttgctgggggcgtcctacaggccccgcagcccgtgctggtgaaggagtgcgagctggtgaaagacgtgctgaacgtcttgattggggtcgtgtctgccacgttttcgctctgccagccggcccaggcctttgtggtgaagcggggcgtccacgtgtcaggagcgtctcccgagagcatcagcagcctgctctcggaagtggccgagtatgggacctgctacacgcgcctgagtcatttctctctgcagcccgtcctggactctttgtacagcaagggcctcgtgttccaggccttcaccagtggcctgaggaggtacctgcagtattaccgggcctgcgtcctttccactccgcccaccctgagcctcctcaccattggttttctcttcaagaaacttggccggcagctcaggtacctggccgagctctgtggcgttggcgctgtgctcccgggcacctgtggaggaggccccagggccgcgtttcccaccggcgtgaagctgctgtcctacctctaccaggaggctctgcacaactgcagcaacgagcactaccctgtactgctgtccctgctgaagaccagctgcgagccctacacccggttcatccacgactgggtgtacagcggggtgttcagagacgcttatggcgagttcatgattcaggtgaaccacgagtacctcagcttccgagataagttgtactggacacatggctacgtgctcatctccaaagaggtggaggactgtgttcccgtgtttctgaagcacattgcccacgacatatacgtctgcggaaagaccattaacctgctgaagctctgctgcccccggcattacctctgttggtccgacgtccctgtcccccggatctcggtgattttctcccttgaggagttgaaggagattgagaaggactgtgccgtctacgttgggcgcatggagagggtggcccgccacagctctgtcagcaaggaggagaaggaattacgtatggaaattgcaaaacaagaattaatcgctcatgcccgggaagcagcatccagggtcctgagtgcactgagtgaccggcagatgtcagaacggatggccttggatgcccggaagcgtgagcagtttcagaggctgaaagaacaatttgtgaaggaccaggagcgacgccaggcggccaggcaggaggagctggatgatgacttcagctacgcccgtgaactccgagacagggagagaaggctgaagtccctggaggaggagctggagaggaaggcgaggcaggcactggtcgaccactacagcaagctctctgcagaggcagctcgtcgggagcagaaggcactgtggagaatccagaggcaccgactggagagtgcacggcttcgttttctcttagaagatgagaaacacattcaggagatgctgaaagcagtgtctgaggctcaccagccccaggagccgccagacgtcctcttgagcgtgcacccccaggtcacgtctccgggccctgagcacccagagggaggccaaggctgtgattctgggtctgcagagcaacactcgcctgcctgggatggctggaacaggccaggcctgctgaccccacagccccttaagcctctagcagtgggggctggtggcagggggctgcagcaggcggagggggccagacccttctctgacagcctcagcattggagacttcctacctgtgggcccaggggctgagccgtccgtgcagactggcatggtccctctcctggaggtggcgctgcagaccattaacttggacctgcccccctcagctcctggggaggcacccgcagcagccagcactcagccctccaggccacaggagtacgactttagtactgtcctgaggccagctgtggccacctcacctgcaccagggcccctgcaggctgcagagtgcagcttgggcagctcagggctacagctgtgggaggacagttgtgggaagatggatgcctgtggctccgcctcgcgggagactctgctcccctcacacccacccaggcgtgctgctctggaggaggggagcagccagcccacagagcggctctttgggcaggtgtcagggggtggtcttcccacaggggactacgcttctgaaatagctcccacccggccacggtggaacacccacgggcacgtgtctgacgccagcatcagggtcggggagaatgtgtcagatgtggctcccacccagccacggtggaacacccacggacacgtatccaatgccagcatcagcttaggggagtctgtgtcagatgtggctcccactcggccacggtggaacatccatggacatgtgtccaacgccagcatcagggtcggggagaatgtgtcagatgtggctcccaccaggccacggtggaatacccacgggcacgtgtccaacgccagcatcagggttggggagaacgtgtcggacgtggctcccacccggccacggtggaacacccatggacacgtgtccgatgccagcatcagcttgggggagtctgtgtcagacatggctcccgcccggccacggtggaacacccatggacacgtgtctgatgccagcatcagcttgggggagtctgtgtcagacatggctcccacccggccacggtggaacacccacggacatgtgtctgacaccagcatcagggttggggagaacgtatcggacgtggctcccatccggtcacggtgcaacacccatggacacgtgtccgacgccagcatcagcttgggggagcctgtgtcggatgtggtttccacccggccacggtggaacacccatgtacccatccctccgccccacatggtgctgggggctctctcaccagaagctgagcccaacacacccaggccccaacagagcccccctggccacacgtcccagtcagcgctcagcctgggagcacagagcactgtgctggactgtgggccacggctgcctgtagaagtggggccatctctgtcctcccccagctcgggctgcggggaggggagcatcagcgtgggggagaacgtgtcagacgtggctcccacccaaccatggtggcccaacaccccgggagacagtgtctctgaagaactaggccctgggaggagcggggacactgaggacctctctccaaattggcctctcaactcacaggaagacacagctgcccagagcagcccaggccgtggtgaggaggcggaggcatcggcggcggaggctcagggtggggagcaggcctacctggcaggcctggcagggcagtaccacttggagcggtacccggacagttacgagtccatgtccgagccgcccattgctcatcttttgcgccccgtgcttccccgggccttcgccttccccgtggacccccaggtccagtctgccgctgatgagactgctgtgcagctgagcgagttgctgacgctgcccgtgctcatgaagcgctccatcacggcaccgctggccgcccacatctccttggtgaacaaggccgctgtcgactacttcttcgtggagctgcacctggaggcgcactatgaggcactgcggcacttcctgctgatggaggacggcgagttcgcccagtccctcagcgacctgctctttgagaagcttggagctgggcaaacgcccggagagctgctcaacccgctggtgctgaactctgtgctgagcaaggccctgcagtgcagcctgcatggggacaccccgcacgcctccaacctctccctcgctctcaagtacctgcccgaggtgtttgcccccaacgccccggatgtgctgagctgcctggagctcaggtacaaggtggactggcctctcaacattgtcatcaccgagggctgcctgagcaagtacagcggcgtcttctccttcctgctgcagctgaagctcatgatgtgggcgctcaaggacgtctgcttccacctcaagcgcacagccctgctgagccacatggccggctctgtgcagttccgtcagctgcagctgttcaagcacgagatgcagcatttcgtgaaggtcatccagggctacatcgccaaccagatcctgcacgtcacctggtgcgagttcagggccaggttggccaccgtgggcgacctggaggagatccagcgtgcgcacgcagagtacctgcacaaggccgtcttcaggggcctgctcacggagaaggcggcgcccgtcatgaacgtcatccacagcatcttcagcctcgtgctcaagttccgcagccagctcatctcccaggcctgggggccccctgggggcccgcggggtgcagagcaccccaactttgcactcatgcagcagtcctacaacaccttcaagtactactcccactttctcttcaaagtggtgaccaagctggtgaaccgcggctaccagccccacctggaggactttctgctgcgcatcaacttcaacaactactaccaggacgcctgaggctgctctgcgggggacgtgcacaataaaggtgttctcggaccctgaaaaaaaaaaaaaaaaaaaaa

SEQ ID NO: 570 - DNA, 1568 bp, Homo sapiens
agttgttgttgaggtggcgcggcgctaagatggcggcggcggcggcggcggccgtggcgggggtggggcgcggtggcggtggcgcggagccacggcaggagcggagccgggcccggggctgggccggcgtcgaacgcagcgaaggccggaggatggaaccaggtgaggagctggaagaggagggctctccaggtggccgtgaggatggcttcaccgccgagcacctggctgcagaggccatggcagctgacatggacccctggctagtgtttgatgcccgcacaacgcctgccactgagctggatgcctggctggccaagtacccaccatcccaagttacccgctatggggaccccggttcacccaactcagagcctgtgggctggattgcagtgtatgggcagggctacagccccaactccggggacgtgcagggcctgcaggcagcctgggaagctctgcagaccagtgggcggcccatcacaccgggtaccctgcgccagctcgccatcacccaccacgtgctctcgggcaagtggcttatgcatctggcaccgggcttcaagctggaccacgcctgggctggcattgcccgggccgtggttgaaggccggcttcaggtggccaaggtgagcccacgtgccaaggagggtgggcgccaggtcatctgtgtttacacggacgacttcacggaccgcttgggtgtactggaggcggattcagccatccgtgcagcgggcattaagtgcctgctcacctacaagcctgatgtctacacctacctgggcatctaccgggccaatcgctggcacctctgccccactctctatgagagccgtttccagcttgggggtagtgcccgtggctcccgagtgcttgaccgtgccaacaacgtggaactgacctagaggggccaaattggggagactgcccactcccccctccatgctggggttggatcctcctgtcttcctccttgtcccatgaaggccacaccccccagctctggggactcctaggtcacttgggaactacctgcatcttcagtccccttgaacttctgccctctgttcagggctgacacaagccccacaggctggggggctccggttccctgagggatgagccttcagcctccctttgtaatgctgctcctctccactgcccagcaccatgagttgggtgcagacacctagaaggagagacttcttggaacgctcatcccccgctatacctccccttcctcctgcatctccccttctttccttccccctcaggagagagaaaacttagtgcttccagcccttcttggagccttcatggtccaggggtaggggccccactggcctgagcatgccattttgaggggagggtagttgtgcctacttatcccctggcagaggggatgccaggaccatggacatgaggcttgcccatccctgccaacttacacagcctgtaccactgtccccccttccttggctactttgacatgtgcctgctcctggcatttcaataaaacccggcttgggtctgtgtcttgagtgttttttaaaaaaaaaaaaaaa

SEQ ID NO: 571 - DNA, 3639 bp, Homo sapiens
agaccggaaagggctcgggtcatcccggcgcccagggtcaccttcccacgggctggcacctgggcgcgggcgctgccccggagccggccggcgggacctggcgcccaatcctgggggacccggtgccgtggcccaggggccgggccgaggtcccgggggcggtgccttgcgggcccgtcccggggcggtgcctggtgggctggccccgcggctcctcccctctctgcgggcccagtcgccctttggccgggcgagctaatcgtcggctcaatgacgacgaggcccgacccttcccgtccaggacctacagagacaaccgaaggagagcccaaggcggcttctttgctgtcgccgcccccactgaagcaagagctccccggctccactgaaacaccagctcatttaagctttccccaacgcccggccctccgggacgatacctaacaacgaccggcgcccgcatctggaataggctggcgagatacttagtatccgagggctcgggacttggcgccatcgaggtcatggggacccaggatccagggaacatgggaaccggcgtcccagcctcggagcagataagctgtgccaaagaggatccacaagtttattgccctgaagagactggcggcaccaaggatgtgcaggttacagactgtaagagtcccgaagacagccgacccccaaaagagacggactgctgcaatccggaggactctgggcagctgatggtttcctatgagggtaaagctatgggctaccaggtgcctccctttggctggcgcatctgtctggctcatgagtttacagagaagaggaaaccctttcaagctaacaacgtctccctaagcaacatgataaagcatataggcatgggcttgaggtacctgcagtggtggtaccggaagacccatgtggaaaagaagacacctttcatcgacatgatcaattctgtacccctaagacagatttatggttgtcccttgggtggcatcgggggaggcactattacccgtggctggagaggccagttctgtcgttggcagcttaaccctggaatgtatcagcaccggacagtcatcgctgaccaattcacagtgtgcctgcgtcgggaagggcagactgtgtaccagcaagtcctgtccctggagcgcccaagtgtcctccgcagctggaactggggcctgtgtgggtactttgctttctaccatgccctctatccccgagcctggactgtctatcagcttcctggccagaatgtcaccctcacctgccgtcagatcacacccatcttgccccatgactaccaggacagcagcctgcctgtaggagtctttgtgtgggatgtggaaaatgaaggggacgaagctctagatgtgtccatcatgttctccatgcggaatggactgggtggtggagacgatgccccagggggtttgtggaatgagcccttctgtctggagcgtagcggggaaactgtccgggggctgctcctgcatcatccaacccttccaaacccctacacgatggctgtggctgcacgagtcacggcagctaccacggtaacccacatcacagcctttgaccctgacagcacggggcagcaggtgtggcaggatctacttcaggatggacagctggactctcccactggccaaagcacccctacgcagaaaggagtaggcattgctggagctgtgtgtgtttccagcaagttgcgacctcgaggccagtgccgcctggagttttcactggcttgggacatgcccaggatcatgtttggagctaaaggccaagtccactacaggcggtatacaaggttctttggccaggatggagatgcagcacctgccctcagccactatgcactgtgccgatacgcagagtgggaagagaggatctcagcttggcagagcccggtattggatgacagatcactgcctgcctggtacaaatctgcgctgttcaatgaactatacttcctggctgatggaggcacagtgtggctggaagttcttgaggactccctaccagaggagctgggcagaaacatgtgtcacctccgccccaccctacgggactacggtcgatttggctaccttgagggccaggagtaccgcatgtacaacacatatgatgtccacttttatgcttcctttgccctcatcatgctctggcccaaacttgagctcagcctacagtatgacatggctctggccactctcagggaggacctgacacggcgacggtacctgatgagtggggtgatggcacctgtgaaaaggaggaacgtcatcccccatgatattggggacccagatgatgaaccatggctccgcgtcaatgcatatttaatccatgatactgctgattggaaggacctgaacctgaagtttgtgctgcaggtttatcgggactattacctcacgggtgatcaaaacttcctgaaggacatgtggcctgtgtgtctagctgtgatggaatctgaaatgaagtttgacaaggaccatgatggactcattgaaaatggaggctatgcagaccagacctatgatggatgggtgaccacaggccccagtgcttactgtggagggctgtggctggcagctgtggctgtgatggtccagatggctgctctgtgtggggcacaggacatccaggataagttttcttctatcctcagccggggccaagaagcctatgagagactgctgtggaatggccgctattacaactatgacagcagctctcggcctcagtctcgtagtgttatgtctgaccagtgtgctggacagtggttcctgaaggcctgtggcctaggagaaggagacactgaggtgtttcctacccaacatgtggtccgtgctctccaaactatctttgagctgaacgtccaggcctttgcaggaggggccatgggggctgtgaatgggatgcagccccatggtgtccctgataaatccagtgtgcagtctgatgaagtctgggtgggtgtggtctacgggctggcagctaccatgatccaagagggcctgacttgggagggcttccagacagctgaaggctgctaccgtaccgtgtgggagcgcctgggtctggccttccagaccccagaggcatactgccagcagcgagtgttccgctcactggcctacatgcggccactgagcatatgggccatgcagctagccctgcaacagcagcagcacaaaaaggcctcctggccaaaagtcaaacagggcacaggactaaggacagggcctatgtttggaccaaaggaagccatggcaaacctgagcccagagtgagccgtctgaactgtgggagggaagtgctaacagcccagcctccagcctggcctttcctccttcccctctgaacctcctgcaaccctgagccatcaggacaatcataccccttcccttctctccacccaattgtgccagtaaatgggggttgagggtgacctaggcagcattagaatcacttatttatttctttcctcacctgttccctgactgcgtgaaatgttcagggaggtcagttgatttccccaggtacattcatggtgtgacagacacatgggtacaaataaaagacccagaaagccaaaaaaaaaaaaaaaaaaaaaaaaaaaaa

SEQ ID NO: 572 - DNA, 2397 bp, Homo sapiens
accctcacccctgagcagcccggggggccacagcaagaggtacacatgctgtggacaccagcacccccagacctgacccttggggaaggtgaggaggctaggacgtgggacttcctgacagcggtgggcggcagccaggctgaggctcaggcctgcctcactgaggccctgcagctgcaggccaggggagctctgtatacggctcacgcacaggcctgggcccagctctgggtagaatgtggcttggacgtggtggggcccctgcagctgcgccaggccctgcgtggctccctctactacctgctcagtgccctgccccagcccaaggccccaggatacatctgccatggcctcagtcctgggggcctctccaatgggagccgtgaggaatgctactggggccacgtcttctgggaccaggacctctggatgttcccgagtatcctgatgttccacccagaagccgccagggccatcctggagtaccgcatccgcacgctggacggggccctggagaacgcccagaacctgggctaccagggagccaagtttgcctgggagagtgcagactccggcctagaggtttgccctgaggacatttacggagtccaggaggtccacgtcaacggggccgtggtgttggccttcgagctgtactaccataccacccaggacctgcagctatttcgagaggctggtggctgggacgtggtcagggctgtggccgagttttggtgcagtcgtgttgagtggagccccagggaggaaaagtaccacctgaggggagtcatgtcccccgacgagtaccattcaggggtcaacaactctgtgtacaccaacgtcctggtccagaacagcctgcgctttgctgctgccctggcccaggacctgggtcttcccatccccagccagtggctggcggtggctgacaagatcaaggtaccctttgacgtggagcagaacttccacccggagttcgatgggtatgagcctggagaggtggtgaagcaggcagacgtcgtgctcctgggatacccagtccccttctccctgagtcctgatgttcgcaggaaaaatctggagatttacgaggctgtgacgtccccccagggccccgccatgacctggagcatgtttgctgtgggctggatggagctgaaggacgcagtgcgggcccggggcctcctggacaggagctttgccaacatggctgaacccttcaaggtgtggacggagaatgcagacgggtcaggcgctgtgaacttcctgacaggcatggggggcttcctgcaggcggtggtcttcgggtgcacggggttcagggtcacccgagcgggtgtgacctttgaccctgtgtgtctgtcggggatctccagagtgagcgtctccggcatcttctaccaggggaacaagctcaacttctctttttccgaggactccgtgaccgtggaggtcacagctcgagcagggccctgggctcctcacctggaggctgagctgtggccatcccagtcccggctctccctgttgccaggacacaaggtctcctttccccgctcggctggccggatacaaatgtcacccccgaagctgcctggaagttccagctccgagttccctgggaggactttttcagatgttagggacccgctccagagccccctctgggtcaccctgggttcctccagccccaccgagtcactcactgtggaccctgcctctgaataatcaggaacggtggcttcagagacgtctcttgggccttccctctggccacgtctgcacccacccctcctgggcaccctcctagcctgccatccctcacctgcagccaggctctcagggaaggtccatgctgcttggcctgagttcaaggctttctgcctgtagcctggactcccgtggacccccgtgggcaggtggcttccccgtggcatctccacaccgcctctgcctgcccctgtggactgatgctatcgcgcacggtcccacgaccccaccccgagctcctgaagccggggtctgagcctgcatcacctctggcctctcatcccccactctcctgagagcagtggtcacagcggccggccgctctgctgagaaggcagagaggcaggctcaggcctcagcgtggacagcagggataaggggcacgaaggacggggactcggccccttcagaattcctcaggactctcaggtgcagctttgccaaaaaggaacttttcatgtcatgcagttgaggggacttagtctcaatcccaggctcctcttgactctgggcagctttaatcaggttgggcagcctctgctacagcgtggagtgggatggctctcttccctcagccacgccgcttgtgaggacagaggtgggggagtgggaagtgggaagtacatg

SEQ ID NO: 573 - DNA, 1048 bp, Homo sapiens
ggcgcttaggggctgaggcgcgatggcaggtgtcggggctgggcctctgcgggcgatggggcggcaggccctgctgcttctcgcgctgtgcgccacaggcgcccaggggctctacttccacatcggcgagaccgagaagcgctgtttcatcgaggaaatccccgacgagaccatggtcatcggcaactatcgtacccagatgtgggataagcagaaggaggtcttcctgccctcgacccctggcctgggcatgcacgtggaagtgaaggaccccgacggcaaggtggtgctgtcccggcagtacggctcggagggccgcttcacgttcacctcccacacgcccggtgaccatcaaatctgtctgcactccaattctaccaggatggctctcttcgctggtggcaaactgcgtgtgcatctcgacatccaggttggggagcatgccaacaactaccctgagattgctgcaaaagataagctgacggagctacagctccgcgcccgccagttgcttgatcaggtggaacagattcagaaggagcaggattaccaaaggtatcgtgaagagcgcttccgactgacgagcgagagcaccaaccagagggtcctatggtggtccattgctcagactgtcatcctcatcctcactggcatctggcagatgcgtcacctcaagagcttctttgaggccaagaagctggtgtagtgccctctttgtatgacccttcctttttacctcatttatttggtactttccccacacagtcctttatccgcctggatttttagggaaaaaaatgaaaaagaataagtcacattggttccatggccacaaaccattcagatcagccacttgctgaccctggttcttaaggacacatgacattagtccaatctttcaaaatcttgtcttagggcttgtgaggaatcagaactaacccaggactcagtcctgcttcttttgcctcgagtgattttcctctgtttttcactaaataagcaaatgaaaactctctccattaaaaaaaaaaaaaaaaaaaaaaaaaaa

SEQ ID NO: 574 - DNA, 5618 bp, Homo sapiens
ggcgagtccagaagcagccccaggaggtgctgggggcatcgtttctctaatctggcctcccgagtgccaaggaggcgtcccggcagcggtcatcatggtgaaggagcagttccgggagacggatgtggccaagaaaataagccacatctgttttggaatgaagtcacctgaggagatgcgccagcaggcgcacatccaagttgtgagtaagaacctgtacagccaggacaaccaacatgcccccttgctatatggggtgctcgaccataggatgggtacgagtgagaaggatcgtccatgtgaaacctgtgggaaaaacttggctgactgtctaggccactatgggtatatcgacctggagttgccgtgttttcatgtagggtacttcagagcagtcataggcatcttacagatgatctgcaaaacctgctgccacatcatgctgtcccaagaggagaagaagcagtttctggactatctaaagaggcccggcctgacctaccttcagaagcgaggactgaaaaagaaaatctctgacaagtgccggaagaaaaacatctgccatcactgtggcgcttttaatggtaccgtaaagaagtgtggactgctgaaaataattcatgagaaatacaagaccaacaaaaaagtggtggatcccattgtatcaaatttccttcagtcttttgaaacagccattgaacataataaagaagtggagcctctgctgggaagggcacaggaaaacttgaatcccttagtagttctgaatttatttaaacgaatcccagctgaagatgttcctctacttctgatgaacccagaagccggaaagccgtctgatttgattctcacacgacttttggtgcctcctttgtgtatcagaccctccgttgtgagtgatttgaagtctggcaccaatgaagatgatctgacaatgaaactgacagaaatcattttcctaaacgatgttattaaaaagcatcggatctcaggagccaagacccagatgatcatggaggactgggatttcctgcagctgcagtgtgccctctacattaacagtgagctctcgggcattcccctcaacatggcacccaagaagtggaccagaggcttcgtccaacgcctgaagggaaaacagggtcgatttagaggaaatctctcaggaaagagagtggatttttctggcagaacagtcatctcgcccgaccccaacctccggattgatgaggtagctgtgccagttcatgtggccaaaattctaacttttcctgagaaggtaaacaaagcaaacatcaatttcttgaggaaactggttcaaaacggccctgaggttcacccaggagcaaacttcattcagcagagacatacgcagatgaaaaggtttttgaaatacggaaatcgagaaaagatggctcaagagctcaagtatggtgacatcgtagagagacacctcatcgatggagatgtggtgctgttcaatcggcagccctcgctgcacaaattgagcattatggctcatctggccagggtcaagccccaccggaccttcagatttaatgagtgtgtctgtacaccctataatgctgactttgatggtgatgaaatgaaccttcatcttcctcaaacagaagaagctaaagcagaggcccttgttctgatggggactaaagcaaatcttgtaaccccgaggaatggggaaccgctgattgctgctattcaggattttctaacaggtgcctatctcctcactctcaaggacactttctttgatcgagccaaggcttgccaaatcattgcttcaatactggttggcaaggatgagaaaattaaagttcgcctcccaccgcctacaatcctaaagcctgtcaccctgtggacgggaaagcagatcttcagtgtcatcctcaggcctagcgatgacaatccagtgagggccaacctgcgaaccaagggcaagcagtactgtggcaaaggggaagatctctgtgccaatgattcctatgttacaatccagaacagtgagttgatgagtggcagcatggacaaaggaaccctagggtcaggatccaagaacaatattttttacattttgctgcgagactggggacagaatgaagctgcagatgccatgtcacggctcgccaggctggctcctgtctacctgtctaaccgtggtttctcaattgggatcggtgatgtcacacctggccaaggactgctgaaggccaagtatgagttgctgaatgccggctacaagaaatgtgatgagtacatcgaagccctgaacacgggcaagctgcagcagcagcctggctgcactgctgaggagaccctggaggcactgatcctgaaggagctgtctgtgatccgtgaccacgctggcagtgcctgcctccgggagctggacaagagcaacagccccctcaccatggctctgtgcggctccaaaggttccttcattaacatatcacagatgattgcctgtgtgggacagcaggccatcagtggctctcgagtgccagacggctttgaaaacaggtccttgcctcattttgaaaaacactcaaagctcccagctgccaaaggctttgtggctaatagcttttattccggtttgacaccaactgagtttttcttccacacaatggccggccgggaaggtctagtcgacacggctgtaaagacagctgaaacgggatacatgcagcgaaggcttgtcaaatctcttgaagatctttgctcccagtatgatctgacagtccgaagctctactggcgatattatccagttcatttatggaggagatggcttagatcctgcagctatggagggaaaagatgaacctttggagtttaaaagggttctggacaacatcaaagcagtcttcccgtgtcccagtgagcctgctctcagcaaaaacgagctgatcctgaccacagagtccatcatgaagaagagtgagttcctctgctgccaggacagcttcctgcaggaaataaaaaaattcattaagggggtctctgagaagatcaagaaaaccagagataaatatggcatcaatgataacggcacaacagagccccgtgtgctgtaccagctggaccgcatcacccccacccaagtagaaaagtttctggagacctgtagggacaagtacatgagggcacagatggagccaggttctgcagtgggtgctctgtgtgcccagagcattggtgagccaggcacccagatgaccctgaagactttccactttgcaggtgtggcctccatgaacatcaccctgggcgtgccccggattaaagagatcatcaacgcttccaaggccatcagcactccaattatcacagcacagctagacaaggatgacgacgcggattatgctcgcctcgtgaaagggagaattgagaaaaccctcttgggagagatttccgagtatattgaagaagtgtttcttcctgatgactgctttattctcgtcaagctctccctggaacggattaggcttctgagactggaagtgaacgctgagacagtgagatattccatctgcacatccaagctccgtgtgaagcccggtgatgtggctgttcatggtgaggctgtggtgtgtgtcacccccagagagaacagcaagagctccatgtactacgtgctgcagttcctgaaagaggatctccccaaggtggtggtgcagggcattccagaggtgtccagagctgtcatccacattgacgagcagagtggaaaggagaagtacaagcttctggtggaaggtgataacctgcgggcagtcatggccacacacggtgtgaagggcacccgaaccacctccaataacacctatgaggtggagaaaactctgggcatcgaggccgcccggacaacgatcatcaatgaaatccagtacaccatggtgaaccacggcatgagcatcgacaggaggcacgtgatgctgctctccgacctcatgacctacaagggtgaagtcctgggcatcactaggtttggcctggccaagatgaaggagagtgtgctgatgctggcctcctttgagaagacggctgaccatctctttgacgctgcctacttcgggcagaaggactctgtgtgtggggtgtctgagtgcatcatcatgggaatcccaatgaacattggaaccgggctcttcaagctgcttcacaaggctgacagggacccgaaccctcccaagaggcccctgatcttcgacacaaatgaattccacatcccccttgtcacatagtccaaagaaagaggggaccatgcctgaccttgactccttgtcctgtctccagctgatgtataaagagttttgtgctccctgggacgggggtcctgaggtccccacctatgccagcaatcagagaagccctcttggcatccccaggagcagcttctcctctgatagggtgcagctcacaccagtgaccctgactgtgccacgctgctcgggagagctgagggttttattgtttgcttgcttgaaacctaatctatagacggccccacagctcgtgcacacactgcttccctggacttaaagcccagccaggtgtcatggtccatcccagctcactgcatacatccatcggctccccatggtgtcttcacacctgacgatgagccaggcctgagccccacacaggccagggcacattcttggattttccattccttggtcatgctggaatctctcaatgtgacatacttatgtaaatattgttactattatttatttgttccatttgagggatttggaatttttgttattttagttttatttttgaaaccaagcatctatagaaaccaagaaagtcagcatgtaagcgtcactggaaaaactggtttaagcaaatagagccgtctgggatttgtaactgaggtgcaactgtcatgaggcccaggcagctctgtaacatcttctatagatgcccctggctaccctgttgttttcatctacctcagacccctatcatggggctctaccctgtgacaagagccaaacccattctccatggcctatggaagcctcactggagtttggggcctgctgcaatggggatgagatggttttttgtagaattatacttacgttccttggatgatctctagttgattttttaagttctgagttgatgctgttaaggtacccggggtagccattggttcttggatctgtgttagaatgagtgctttcccttcctactgatgtgattgtggattaggaattcgtgaccgagtgatttttggccagtggttgggtttaaaattctattaaaatttgtagtttgggctgggtgctgtggctcatacctataatcccagcactttgggaggccgaggggggcagatcacttgagcccaggagttcgagagcagcctgggcaacatgacgaaaccccgtctctacagagaatacaaaaattagccaggcatggtggcccatgcctgtagtacctgctattggtaaggctgaggtggaaggttcacttgagcctgggaggtggaggttgtagtgagccaagatcgtgccactacactccagcctgggcaacaaagcaagaccttgtctcaaaaaaaaaaaaaaaaaaaaa

SEQ ID NO: 575 - DNA, 1809 bp, Homo sapiens
gtcttcctccctccctcccttcctcttactctcattcatttcatacacactggctcacacatctactctctctctctatctctctcagaatgacaattctaggtacaacttttggcatggttttttctttacttcaagtcgtttctggagaaagtggctatgctcaaaatggagacttggaagatgcagaactggatgactactcattctcatgctatagccagttggaagtgaatggatcgcagcactcactgacctgtgcttttgaggacccagatgtcaacatcaccaatctggaatttgaaatatgtggggccctcgtggaggtaaagtgcctgaatttcaggaaactacaagagatatatttcatcgagacaaagaaattcttactgattggaaagagcaatatatgtgtgaaggttggagaaaagagtctaacctgcaaaaaaatagacctaaccactatagttaaacctgaggctccttttgacctgagtgtcgtctatcgggaaggagccaatgactttgtggtgacatttaatacatcacacttgcaaaagaagtatgtaaaagttttaatgcacgatgtagcttaccgccaggaaaaggatgaaaacaaatggacgcatgtgaatttatccagcacaaagctgacactcctgcagagaaagctccaaccggcagcaatgtatgagattaaagttcgatccatccctgatcactattttaaaggcttctggagtgaatggagtccaagttattacttcagaactccagagatcaataatagctcaggggagatggatcctatcttactaaccatcagcattttgagttttttctctgtcgctctgttggtcatcttggcctgtgtgttatggaaaaaaaggattaagcctatcgtatggcccagtctccccgatcataagaagactctggaacatctttgtaagaaaccaagaaaaaatttaaatgtgagtttcaatcctgaaagtttcctggactgccagattcatagggtggatgacattcaagctagagatgaagtggaaggttttctgcaagatacgtttcctcagcaactagaagaatctgagaagcagaggcttggaggggatgtgcagagccccaactgcccatctgaggatgtagtcatcactccagaaagctttggaagagattcatccctcacatgcctggctgggaatgtcagtgcatgtgacgcccctattctctcctcttccaggtccctagactgcagggagagtggcaagaatgggcctcatgtgtaccaggacctcctgcttagccttgggactacaaacagcacgctgccccctccattttctctccaatctggaatcctgacattgaacccagttgctcagggtcagcccattcttacttccctgggatcaaatcaagaagaagcatatgtcaccatgtccagcttctaccaaaaccagtgaagtgtaagaaacccagactgaacttaccgtgagcgacaaagatgatttaaaagggaagtctagagttcctagtctccctcacagcacagagaagacaaaattagcaaaaccccactacacagtctgcaagattctgaaacattgctttgaccactcttcctgagttcagtggcactcaacatgagtcaagagcatcctgcttctaccatgtggatttggtcacaaggtttaaggtgacccaatgattcagctatttaaaaaaaaaagaggaaagaatgaaagagtaaaggaaatgattgaggagtgaggaaggcaggaagagagcatgagaggaaaaaaa

SEQ ID NO: 576 - DNA, 6368 bp, Homo sapiens
ccatggacctgcgccctgagctgcccaccaccctgggccccgtcagcctgcgccagctggggctggagcacacccgctacccctgtctggaccttggtgccatgttgctctacaccctgaccttctggctcctgctgcgccagtttgtgaaagagaagctgctgaagtgggcagagtctccagctgcgctgacggaggtcaccgtggcagacacagagcctacgcggacgcagacgctgttgcagagcctgggggagctggtgaagggcgtgtacgccaagtactggatctatgtgtgtgctggcatgttcatcgtggtcagcttcgccggccgcctcgtggtctacaagattgtctacatgttcctcttcctgctctgcctcaccctcttccaggtctactacagcctgtggcggaagctgctcaaggccttctggtggctcgtggtggcctacaccatgctggtcctcatcgccgtctacaccttccagttccaggacttccctgcctactggcgcaacctcactggcttcaccgacgagcagctgggggacctgggcctggagcagttcagcgtatccgagctcttctccagcatcctggtgcccggcttcttcctcctggcctgcatcctgcagctgcactacttccacaggcccttcatgcagctcaccgacatggagcacgtgtccctgcctggcacgcgcctcccgcgctgggctcacaggcaggatgcagtgagtgggaccccactgctgcgggaggagcagcaggagcatcagcagcagcagcaggaggaggaggaggaggaggactccagggacgaggggctgggcgtggccactccccaccaggccacgcaggtgcctgaaggggcagccaagtggggcctggtggctgagcgcctgctggagctggcagccggcttctcggacgtcctctcacgcgtgcaggtgttcctgcggcggctgctggagcttcacgttttcaagctggtggccctgtacaccgtctgggtggccctgaaggaggtgtcggtgatgaacctgctgctggtggtgctgtgggccttcgccctgccctacccacgcttccggcccatggcctcctgcctgtccaccgtgtggacctgcgtcatcatcgtgtgtaagatgctgtaccagctcaaggttgtcaacccccaggagtattccagcaactgcaccgagcccttccccaacagcaccaacttgctgcccacggagatcagccagtccctgctgtaccgggggcccgtggaccctgccaactggtttggggtgcggaaagggttccccaacctgggctacatccagaaccacctgcaagtgctgctgctgctggtattcgaggccatcgtgtaccggcgccaggagcactaccgccggcagcaccagctggccccgctgcctgcccaggccgtgtttgccagcggcacccgccagcagctggaccaggatctgctcggctgcctcaagtacttcatcaacttcttcttctacaaattcgggctggagatctgcttcctgatggccgtgaacgtgatcgggcagcgcatgaactttctggtgaccctgcacggttgctggctggtggccatcctcacccgcaggcaccgccaggccattgcccgcctctggcccaactactgcctcttcctggcgctgttcctgctgtaccagtacctgctgtgcctggggatgcccccggccctgtgcattgattatccctggcgctggagccgggccgtccccatgaactccgcactcatcaagtggctgtacctgcctgatttcttccgggcccccaactccaccaacctcatcagcgactttctcctgctgctgtgcgcctcccagcagtggcaggtgttctcagctgagcgcacagaggagtggcagcgcatggctggcgtcaacaccgaccgcctggagccgctgcggggggagcccaaccccgtgcccaactttatccactgcaggtcctaccttgacatgctgaaggtggccgtcttccgatacctgttctggctggtgctggtggtggtgtttgtcacgggggccacccgcatcagcatcttcgggctgggctacctgctggcctgcttctacctgctgctcttcggcacggccctgctgcagagggacacacgggcccgcctcgtgctgtgggactgcctcattctgtacaacgtcaccgtcatcatctccaagaacatgctgtcgctcctggcctgcgtcttcgtggagcagatgcagaccggcttctgctgggtcatccagctcttcagccttgtatgcaccgtcaagggctactatgaccccaaggagatgatggacagagaccaggactgcctgctgcctgtggaggaggctggcatcatctgggacagcgtctgcttcttcttcctgctgctgcagcgccgcgtcttccttagccattactacctgcacgtcagggccgacctccaggccaccgccctgctagcctccaggggcttcgccctctacaacgctgccaacctcaagagcattgacttccaccgcaggatagaggagaagtccctggcccagctgaaaagacagatggagcgtatccgtgccaagcaggagaagcacaggcagggccgggtggaccgcagtcgcccccaggacaccctgggccccaaggaccccggcctggagccagggcccgacagtccagggggctcctccccgccacggaggcagtggtggcggccctggctggaccacgccacagtcatccactccggggactacttcctgtttgagtccgacagtgaggaagaggaggaggctgttcctgaagacccgaggccgtcggcacagagtgccttccagctggcgtaccaggcatgggtgaccaacgcccaggcggtgctgaggcggcggcagcaggagcaggagcaggcaaggcaggaacaggcaggacagctacccacaggaggtggtcccagccaggaggtggagccagcagagggccccgaggaggcagcggcaggccggagccatgtggtgcagagggtgctgagcacggcgcagttcctgtggatgctggggcaggcgctagtggatgagctgacacgctggctgcaggagttcacccggcaccacggcaccatgagcgacgtgctgcgggcagagcgctacctcctcacacaggagctcctgcagggcggcgaagtgcacaggggcgtgctggatcagctgtacacaagccaggccgaggccacgctgccaggccccaccgaggcccccaatgccccaagcaccgtgtccagtgggctgggcgcggaggagccactcagcagcatgacagacgacatgggcagccccctgagcaccggctaccacacgcgcagtggcagtgaggaggcagtcaccgaccccggggagcgtgaggctggtgcctctctgtaccagggactgatgcggacggccagcgagctgctcctggacaggcgcctgcgcatcccagagctggaggaggcagagctgtttgcggaggggcagggccgggcgctgcggctgctgcgggccgtgtaccagtgtgtggccgcccactcggagctgctctgctacttcatcatcatcctcaaccacatggtcacggcctccgccggctccctggtgctgcccgtgctcgtcttcctgtgggccatgctgtcgatcccgaggcccagcaagcgcttctggatgacggccatcgtcttcaccgagatcgcggtggtcgtcaagtacctgttccagtttgggttcttcccctggaacagccacgtggtgctgcggcgctacgagaacaagccctacttcccgccccgcatcctgggcctggagaagactgacggctacatcaagtacgacctggtgcagctcatggcccttttcttccaccgctcccagctgctgtgctatggcctctgggaccatgaggaggactcaccatccaaggagcatgacaagagcggcgaggaggagcagggagccgaggaggggccaggggtgcctgcggccaccaccgaagaccacattcaggtggaagcgagggtcggacccacggacgggaccccagaaccccaagtggagctcaggccccgtgatacgaggcgcatcagtctacgttttagaagaaggaagaaggagggcccagcacggaaaggagcggcagccatcgaagctgaggacagggaggaagaagagggggaggaagagaaagaggcccccacggggagagagaagaggccaagccgctctggaggaagagtaagggcggccgggcggcggctgcagggcttctgcctgtccctggcccagggcacatatcggccgctacggcgcttcttccacgacatcctgcacaccaagtaccgcgcagccaccgacgtctatgccctcatgttcctggctgatgttgtcgacttcatcatcatcatttttggcttctgggcctttgggaagcactcggcggccacagacatcacgtcctccctatcagacgaccaggtacccgaggctttcctggtcatgctgctgatccagttcagtaccatggtggttgaccgcgccctctacctgcgcaagaccgtgctgggcaagctggccttccaggtggcgctggtgctggccatccacctatggatgttcttcatcctgcccgccgtcactgagaggatgttcaaccagaatgtggtggcccagctctggtacttcgtgaagtgcatctacttcgccctgtccgcctaccagatccgctgcggctaccccacccgcatcctcggcaacttcctcaccaagaagtacaatcatctcaacctcttcctcttccaggggttccggctggtgccgttcctggtggagctgcgggcagtgatggactgggtgtggacggacaccacgctgtccctgtccagctggatgtgtgtggaggacatctatgccaacatcttcatcatcaaatgcagccgagagacagagaagaaatacccgcagcccaaagggcagaagaagaagaagatcgtcaagtacggcatgggtggcctcatcatcctcttcctcatcgccatcatctggttcccgctgctcttcatgtcgctggtgcgctccgtggttggggttgtcaaccagcccatcgatgtcaccgtcaccctcaagctgggcggctatgagccgctgttcaccatgagcgcccagcagccgtccatcatccccttcacggcccaggcctatgaggagctgtcccggcagtttgacccccagccgctggccatgcagttcatcagccagtacagccctgaggacatcgtcacggcgcagattgagggcagctccggggcgctgtggcgcatcagtccccccagccgtgcccagatgaagcgggagctctacaacggcacggccgacatcaccctgcgcttcacctggaacttccagagggacctggcgaagggaggcactgtggagtatgccaacgagaagcacatgctggccctggcccccaacagcactgcacggcggcagctggccagcctgctcgagggcacctcggaccagtctgtggtcatccccaatctcttccccaagtacatccgtgcccccaacgggcccgaagccaaccctgtgaagcagctgcagcccaatgaggaggccgactacctcggcgtgcgtatccagctgcggagggagcagggtgcgggggccaccggcttcctcgaatggtgggtcatcgagctgcaggagtgccggaccgactgcaacctgctgcccatggtcattttcagtgacaaggtcagcccaccgagcctcggcttcctggctggctacggcatcatggggctgtacgtgtccatcgtgctggtcatcggcaagttcgtgcgcggattcttcagcgagatctcgcactccattatgttcgaggagctgccgtgcgtggaccgcatcctcaagctctgccaggacatcttcctggtgcgggagactcgggagctggagctggaggaggagttgtacgccaagctcatcttcctctaccgctcaccggagaccatgatcaagtggactcgtgagaaggagtaggagctgctgctggcgcccgagagggaaggagccggcctgctgggcagcgtggccacaaggggcggcactcctcaggccgggggagccactgccccgtccaaggccgccagctgtgatgcatcctcccggcctgcctgagccctgatgctgctgtcagagaaggacactgcgtccccacggcctgcgtggcgctgccgtcccccacgtgtactgtagagttttttttttaattaaaaaatgttttatttatacaaatgg

SEQ ID NO: 577 - DNA, 2160 bp, Homo sapiens
tgggcgggaggaacgcgccgctaggcgggagagcgcggccatggcggggccgggcgtccccggtgcccccgcagcgcgctggaaacgccacatcgtgcggcagctgcggcttcgggaccgtacgcaaaaggcgcttttcctggagctggtgccggcctataaccatctcttagagaaggctgagctgctggacaagttctcaaagaagctgcagccggagccaaacagtgtcactcccaccacccaccagggcccctgggaggagtcagagcttgactcagaccaagtcccatcactggtcgcactgagggtgaagtggcaggaggaggaggaggggctccggctggtctgtggtgagatggcctaccaggtggtggagaagggcgcggccctgggcacgctggagtcggagctgcagcagaggcaaagcaggctggcagccctggaggcccgcgtggcgcagctgcgagaggcgcgggcgcagcaggcccagcaggtggaggagtggcgggcgcagaatgcggtgcagcgggcagcctacgaggcgctgcgcgcgcacgtcgggctccgggaggcggcactgcgcaggctccaggaagaggcgcgcgacctgctggagaggctcgtgcagcgcaaggcgcgcgccgcggccgagcgcaacctgcgcaacgagcgccgggagcgggccaagcaggcgcgggtgtcccaggagctgaagaaggctgccaagcggaccgtgagcatcagcgagggcccggacaccctaggcgatgggatgagggagagaagggagactctggctctggcccctgagccagagcccctggagaaggaagcttgtgagaagtggaagaggcccttcaggtctgcctcagccacctccctgacgctgtcccactgtgtggatgtggtgaaggggcttctggattttaagaagaggagaggtcactcaattgggggagcccctgagcagcgataccagatcatccctgtgtgtgtggctgcccgacttcctacccgggctcaggatgtgctggatgcccacctctctgaggtcaatgctgttcgttttggccccaacagcagcctcctggccactggaggggctgaccgcctgatccacctctggaatgttgtgggaagtcgcctggaggccaaccagaccctggagggagctggtggcagcatcaccagtgtggactttgacccctcgggctaccaggttttagcagcaacttacaaccaggctgcccagctctggaaggtgggggaggcacagtccaaggagacactgtctggacacaaggataaggtgacagctgccaaattcaagctaacgaggcaccaggcagtgactgggagccgcgaccggacagtgaaggagtgggacctcggccgtgcctattgctccaggaccatcaatgtcctttcctactgtaatgacgtggtgtgtggggaccatatcatcattagtggccacaatgaccagaagatccggttctgggacagcagggggccccactgcacccaggtcatccctgtgcagggccgggtcacctccctgagcctcagccacgaccaactgcacctgctcagctgttcccgagacaacacactcaaggtcatcgacctgcgtgtcagcaacatccgccaggtgttcagggccgatggcttcaagtgtggttctgactggaccaaagctgtgttcagcccggacagaagctatgcactggcaggctcctgtgatggggccctttacatctgggatgtggacaccgggaaactggagagcagactacagggaccccattgcgctgccgtcaacgccgtggcctggtgctactccgggagccacatggtgagcgtggaccagggcaggaaggttgtgctctggcagtagggccacgacctgcctgcctgggctggagctcttgcccgaagcctgaagcttccttcggcgccatgcaggggttggggttgggactggagctggccttgggatttaatggggaagaaggcctggcaggacctggcctgtttgtttaaaaatgaagtatgggttgggggattacgctagtttttctttgtatttttatctctatctcctcactttttctcccaaagtagaaaaaaatgatatctgaaaaaaaaaaaaaaaaa

SEQ ID NO: 578 - DNA, 10220 bp, Homo sapiens
ggaaactctgaaagaacttagaatcagcattttgagagcagaagcttgggcatgctgtgattttccaataaactgctatcacaatgtcaaaatgcagttcagacaagagcaacacagagatctcaaacattaaaacgtaagctgtgctagaacaaaaatgcaatgaaagaaacactggatgaatgaaaagccctgctttgcaacccctcagcatggcaggcctgcagctcatgacccctgcttcctcaccaatgggtcctttctttggactgccatggcaacaagaagcaattcatgataacatttatacgccaagaaaatatcaggttgaactgcttgaagcagctctggatcataataccatcgtctgtttaaacactggctcagggaagacatttattgcagtactactcactaaagagctgtcctatcagatcaggggagacttcagcagaaatggaaaaaggacggtgttcttggtcaactctgcaaaccaggttgctcaacaagtgtcagctgtcagaactcattcagatctcaaggttggggaatactcaaacctagaagtaaatgcatcttggacaaaagagagatggaaccaagagtttactaagcaccaggttctcattatgacttgctatgtcgccttgaatgttttgaaaaatggttacttatcactgtcagacattaaccttttggtgtttgatgagtgtcatcttgcaatcctagaccacccctatcgagaaattatgaagctctgtgaaaattgtccatcatgtcctcgcattttgggactaactgcttccattttaaatgggaaatgtgatccagaggaattggaagaaaagattcagaaactagagaaaattcttaagagtaatgctgaaactgcaactgacctggtggtcttagacaggtatacttctcagccatgtgagattgtggtggattgtggaccatttactgacagaagtgggctttatgaaagactgctgatggaattagaagaagcacttaattttatcaatgattgtaatatatctgtacattcaaaagaaagagattctactttaatttcgaaacagatactatcagactgtcgtgccgtattggtagttctgggaccctggtgtgcagataaagtagctggaatgatggtaagagaactacagaaatacatcaaacatgagcaagaggagctgcacaggaaatttttattgtttacagacactttcctaaggaaaatacatgcactatgtgaagagcacttctcacctgcctcacttgacctgaaatttgtaactcctaaagtaatcaaactgctcgaaatcttacgcaaatataaaccatatgagcgacagcagtttgaaagcgttgagtggtataataatagaaatcaggataattatgtgtcatggagtgattctgaggatgatgatgaggatgaagaaattgaagaaaaagagaagccagagacaaattttccttctccttttaccaacattttgtgcggaattatttttgtggaaagaagatacacagcagttgtcttaaacagattgataaaggaagctggcaaacaagatccagagctggcttatatcagtagcaatttcataactggacatggcattgggaagaatcagcctcgcaacaaacagatggaagcagaattcagaaaacaggaagaggtacttaggaaatttcgagcacatgagaccaacctgcttattgcaacaagtattgtagaagagggtgttgatataccaaaatgcaacttggtggttcgttttgatttgcccacagaatatcgatcctatgttcaatctaaaggaagagcaagggcacccatctctaattatataatgttagcggatacagacaaaataaaaagttttgaagaagaccttaaaacctacaaagctattgaaaagatcttgagaaacaagtgttccaagtcggttgatactggtgagactgacattgatcctgtcatggatgatgatgacgttttcccaccatatgtgttgaggcctgacgatggtggtccacgagtcacaatcaacacggccattggacacatcaatagatactgtgctagattaccaagtgatccgtttactcatctagctcctaaatgcagaacccgagagttgcctgatggtacattttattcaactctttatctgccaattaactcacctcttcgagcctccattgttggtccaccaatgagctgtgtacgattggctgaaagagttgtagctctcatttgctgtgagaaactgcacaaaattggcgaactggatgaccatttgatgccagttgggaaagagactgttaaatatgaagaggagcttgatttgcatgatgaagaagagaccagtgttccaggaagaccaggttccacgaaacgaaggcagtgctacccaaaagcaattccagagtgtttgagggatagttatcccagacctgatcagccctgttacctgtatgtgataggaatggttttaactacacctttacctgatgaactcaactttagaaggcggaagctctatcctcctgaagataccacaagatgctttggaatactgacggccaaacccatacctcagattccacactttcctgtgtacacacgctctggagaggttaccatatccattgagttgaagaagtctggtttcatgttgtctctacaaatgcttgagttgattacaagacttcaccagtatatattctcacatattcttcggcttgaaaaacctgcactagaatttaaacctacagacgctgattcagcatactgtgttctacctcttaatgttgttaatgactccagcactttggatattgactttaaattcatggaagatattgagaagtctgaagctcgcataggcattcccagtacaaagtatacaaaagaaacaccctttgtttttaaattagaagattaccaagatgccgttatcattccaagatatcgcaattttgatcagcctcatcgattttatgtagctgatgtgtacactgatcttaccccactcagtaaatttccttcccctgagtatgaaacttttgcagaatattataaaacaaagtacaaccttgacctaaccaatctcaaccagccactgctggatgtggaccacacatcttcaagacttaatcttttgacacctcgacatttgaatcagaaggggaaagcgcttcctttaagcagtgctgagaagaggaaagccaaatgggaaagtctgcagaataaacagatactggttccagaactctgtgctatacatccaattccagcatcactgtggagaaaagctgtttgtctccccagcatactttatcgccttcactgccttttgactgcagaggagctaagagcccagactgccagcgatgctggcgtgggagtcagatcacttcctgcggattttagataccctaacttagacttcgggtggaaaaaatctattgacagcaaatctttcatctcaatttctaactcctcttcagctgaaaatgataattactgtaagcacagcacaattgtccctgaaaatgctgcacatcaaggtgctaatagaacctcctctctagaaaatcatgaccaaatgtctgtgaactgcagaacgttgctcagcgagtcccctggtaagctccacgttgaagtttcagcagatcttacagcaattaatggtctttcttacaatcaaaatctcgccaatggcagttatgatttagctaacagagacttttgccaaggaaatcagctaaattactacaagcaggaaatacccgtgcaaccaactacctcatattccattcagaatttatacagttacgagaaccagccccagcccagcgatgaatgtactctcctgagtaataaataccttgatggaaatgctaacaaatctacctcagatggaagtcctgtgatggccgtaatgcctggtacgacagacactattcaagtgctcaagggcaggatggattctgagcagagcccttctattgggtactcctcaaggactcttggccccaatcctggacttattcttcaggctttgactctgtcaaacgctagtgatggatttaacctggagcggcttgaaatgcttggcgactcctttttaaagcatgccatcaccacatatctattttgcacttaccctgatgcgcatgagggccgcctttcatatatgagaagcaaaaaggtcagcaactgtaatctgtatcgccttggaaaaaagaagggactacccagccgcatggtggtgtcaatatttgatccccctgtgaattggcttcctcctggttatgtagtaaatcaagacaaaagcaacacagataaatgggaaaaagatgaaatgacaaaagactgcatgctggcgaatggcaaactggatgaggattacgaggaggaggatgaggaggaggagagcctgatgtggagggctccgaaggaagaggctgactatgaagatgatttcctggagtatgatcaggaacatatcagatttatagataatatgttaatggggtcaggagcttttgtaaagaaaatctctctttctcctttttcaaccactgattctgcatatgaatggaaaatgcccaaaaaatcctccttaggtagtatgccattttcatcagattttgaggattttgactacagctcttgggatgcaatgtgctatctggatcctagcaaagctgttgaagaagatgactttgtggtggggttctggaatccatcagaagaaaactgtggtgttgacacgggaaagcagtccatttcttacgacttgcacactgagcagtgtattgctgacaaaagcatagcggactgtgtggaagccctgctgggctgctatttaaccagctgtggggagagggctgctcagcttttcctctgttcactggggctgaaggtgctcccggtaattaaaaggactgatcgggaaaaggccctgtgccctactcgggagaatttcaacagccaacaaaagaacctttcagtgagctgtgctgctgcttctgtggccagttcacgctcttctgtattgaaagactcggaatatggttgtttgaagattccaccaagatgtatgtttgatcatccagatgcagataaaacactgaatcaccttatatcggggtttgaaaattttgaaaagaaaatcaactacagattcaagaataaggcttaccttctccaggcttttacacatgcctcctaccactacaatactatcactgattgttaccagcgcttagaattcctgggagatgcgattttggactacctcataaccaagcacctttatgaagacccgcggcagcactccccgggggtcctgacagacctgcggtctgccctggtcaacaacaccatctttgcatcgctggctgtaaagtacgactaccacaagtacttcaaagctgtctctcctgagctcttccatgtcattgatgactttgtgcagtttcagcttgagaagaatgaaatgcaaggaatggattctgagcttaggagatctgaggaggatgaagagaaagaagaggatattgaagttccaaaggccatgggggatatttttgagtcgcttgctggtgccatttacatggatagtgggatgtcactggagacagtctggcaggtgtactatcccatgatgcggccactaatagaaaagttttctgcaaatgtaccccgttcccctgtgcgagaattgcttgaaatggaaccagaaactgccaaatttagcccggctgagagaacttacgacgggaaggtcagagtcactgtggaagtagtaggaaaggggaaatttaaaggtgttggtcgaagttacaggattgccaaatctgcagcagcaagaagagccctccgaagcctcaaagctaatcaacctcaggttcccaatagctgaaaccgctttttaaaattcaaaacaagaaacaaaacaaaaaaaattaaggggaaaattatttaaatcggaaaggaagacttaaagttgttagtgagtggaatgaattgaaggcagaatttaaagtttggttgataacaggatagataacagaataaaacatttaacatatgtataaaattttggaactaattgtagttttagttttttgcgcaaacacaatcttatcttctttcctcacttctgctttgtttaaatcacaagagtgctttaatgatgacatttagcaagtgctcaaaataattgacaggttttgtttttttttttttgagtttatgtcagctttgcttagtgttagaaggccatggagcttaaacctccagcagtccctaggatgatgtagattcttctccatctctccgtgtgtgcagtagtgccagtcctgcagtagttgataagctgaatagaaagataaggttttcgagaggagaagtgcgccaatgttgtcttttctttccacgttatactgtgtaaggtgatgttcccggtcgctgttgcacctgatagtaagggacagatttttaatgaacattggctggcatgttggtgaatcacattttagttttctgatgccacatagtcttgcataaaaaagggttcttgccttaaaagtgaaaccttcatggatagtctttaatctctgatctttttggaacaaactgttttacattcctttcattttattatgcattagacgttgagacagcgtgatacttacaactcactagtatagttgtaacttattacaggatcatactaaaatttctgtcatatgtatactgaagacattttaaaaaccagaatatgtagtctacggatattttttatcataaaaatgatctttggctaaacaccccattttactaaagtcctcctgccaggtagttcccactgatggaaatgtttatggcaaataattttgccttctaggctgttgctctaacaaaataaaccttagacatatcacacctaaaatatgctgcagattttataattgattggttacttatttaagaagcaaaacacagcacctttacccttagtctcctcacataaatttcttactatacttttcataatgttgcatgcatatttcacctaccaaagctgtgctgttaatgccgtgaaagtttaacgtttgcgataaactgccgtaattttgatacatctgtgatttaggtcattaatttagataaactagctcattatttccatctttggaaaaggaaaaaaaaaaaaacttctttaggcatttgcctaagtttctttaattagacttgtaggcactcttcacttaaatacctcagttcttcttttcttttgcatgcatttttcccctgtttggtgctatgtttatgtattatgcttgaaattttaatttttttttttttgcactgtaactataatacctcttaatttacctttttaaaagctgtgggtcagtcttgcactcccatcaacataccagtagaggtttgctgcaatttgccccgttaattatgcttgaagtttaagaaagctgagcagaggtgtctcatatttcccagcacatgattctgaacttgatgcttcgtggaatgctgcatttatatgtaagtgacatttgaatactgtccttcctgctttatctgcatcatccacccacagagaaatgcctctgtgcgagtgcaccgacagaaaactgtcagctctgctttctaaggaaccctgagtgaggggggtattaagcttctccagtgttttttgttgtctccaatcttaaacttaaattgagatctaaattattaaacgagtttttgagcaaattaggtgacttgttttaaaaatatttaattccgatttggaaccttagatgtctatttgattttttaaaaaaccttaatgtaagatatgaccagttaaaacaaagcaattcttgaattatataactgtaaaagtgtgcagttaacaaggctggatgtgaattttattctgagggtgatttgtgatcaagtttaatcacaaatctcttaatatttataaactacctgatgccaggagcttagggctttgcattgtgtctaatacattgatcccagtgttacgggattctcttgattcctggcaccaaaatcagattgttttcacagttatgattcccagtgggagaaaaatgcctcaatatatttgtaaccttaagaagagtatttttttgttaatactaagatgttcaaacttagacatgattaggtcatacattctcaggggttcaaatttccttctaccattcaaatgttttatcaacagcaaacttcagccgtttcactttttgttggagaaaaatagtagattttaatttgactcacagtttgaagcattctgtgatcccctggttactgagttaaaaaataaaaaagtacgagttagacatatgaaatggttatgaacgcttttgtgctgctgatttttaatgctgtaaagttttcctgtgtttagcttgttgaaatgttttgcatctgtcaattaaggaaaaaaaaaatcactctatgttgccccactttagagccctgtgtgccaccctgtgttcctgtgattgcaatgtgagaccgaatgtaatatggaaaacctaccagtggggtgtggttgtgccctgagcacgtgtgtaaaggactggggaggcgtgtcttgaaaaagcaactgcagaaattccttatgatgattgtgtgcaagttagttaacatgaaccttcatttgtaaattttttaaaatttcttttataatatgctttccgcagtcctaactatgctgcgttttataatagctttttcccttctgttctgttcatgtagcacagataagcattgcacttggtaccatgctttacctcatttcaagaaaatatgcttaacagagaggaaaaaaatgtggtttggccttgctgctgttttgatttatggaatttgaaaaagataattataatgcctgcaatgtgtcatatactcgcacaacttaaataggtcatttttgtctgtggcatttttactgtttgtgaaagtatgaaacagatttgttaactgaactcttaattatgtttttaaaatgtttgttatatttcttttcttttttcttttatattacgtgaagtgatgaaatttagaatgacctctaacactcctgtaattgtcttttaaaatactgatatttttatttgttaataatactttgccctcagaaagattctgataccctgccttgacaacatgaaacttgaggctgctttggttcatgaatccaggtgttcccccggcagtcggcttcttcagtcgctccctggaggcaggtgggcactgcagaggatcactggaatccagatcgagcgcagttcatgcacaaggccccgttgatttaaaatattggatcttgctccgttagggtgcctaatccctttacacaagattgaagccaccaaactgagaccttgatacctttttttaactgcatctgaaattatgttaagagtctttaacccatttgcattatctgcagaagagaaactcatgtcatgtttattacctatatggttgttttaattacatttgaataattatatttttccaaccactgattacttttcaggaatttaattatttccagataaatttctttattttatattgtacatgaaaagttttaaagatatgtttaagaccaagactattaaaatgatttttaaagttgttggagacgccaatagcaatatctaggaaatttgcattgagaccattgtattttccactagcagtgaaaatgatttttcacaactaacttgtaaatatattttaatcattacttctttttttctagtccatttttatttggacatcaaccacagacaatttaaattttatagatgcactaagaattcactgcagcagcaggttacatagcaaaaatgcaaaggtgaacaggaagtaaatttctggcttttctgctgtaaatagtgaaggaaaattactaaaatcaagtaaaactaatgcatattatttgattgacaataaaatatttaccatcacatgctgcagctgttttttaaggaacatgatgtcattcattcatacagtaatcatgctgcagaaatttgcagtctgcaccttatggatcacaattacctttagttgttttttttgtaataattgtagccaagtaaatctccaataaagttatcgtctgttc

SEQ ID NO: 579 - DNA, 10276 bp, Homo sapiens
cggaggcgcggcgcaggctgctgcaggcccaggtgaatggagtaacctgacagcggggacgaggcgacggcgagcgcgaggaaatggcggcgggggcggcggcgccgggcggctccgggaggcctgggctgtgacgcgcgcgccggagcggggtccgatggttctcgaaggcccgcggcgccccgtgctgcagtaagctgtgctagaacaaaaatgcaatgaaagaaacactggatgaatgaaaagccctgctttgcaacccctcagcatggcaggcctgcagctcatgacccctgcttcctcaccaatgggtcctttctttggactgccatggcaacaagaagcaattcatgataacatttatacgccaagaaaatatcaggttgaactgcttgaagcagctctggatcataataccatcgtctgtttaaacactggctcagggaagacatttattgcagtactactcactaaagagctgtcctatcagatcaggggagacttcagcagaaatggaaaaaggacggtgttcttggtcaactctgcaaaccaggttgctcaacaagtgtcagctgtcagaactcattcagatctcaaggttggggaatactcaaacctagaagtaaatgcatcttggacaaaagagagatggaaccaagagtttactaagcaccaggttctcattatgacttgctatgtcgccttgaatgttttgaaaaatggttacttatcactgtcagacattaaccttttggtgtttgatgagtgtcatcttgcaatcctagaccacccctatcgagaaattatgaagctctgtgaaaattgtccatcatgtcctcgcattttgggactaactgcttccattttaaatgggaaatgtgatccagaggaattggaagaaaagattcagaaactagagaaaattcttaagagtaatgctgaaactgcaactgacctggtggtcttagacaggtatacttctcagccatgtgagattgtggtggattgtggaccatttactgacagaagtgggctttatgaaagactgctgatggaattagaagaagcacttaattttatcaatgattgtaatatatctgtacattcaaaagaaagagattctactttaatttcgaaacagatactatcagactgtcgtgccgtattggtagttctgggaccctggtgtgcagataaagtagctggaatgatggtaagagaactacagaaatacatcaaacatgagcaagaggagctgcacaggaaatttttattgtttacagacactttcctaaggaaaatacatgcactatgtgaagagcacttctcacctgcctcacttgacctgaaatttgtaactcctaaagtaatcaaactgctcgaaatcttacgcaaatataaaccatatgagcgacagcagtttgaaagcgttgagtggtataataatagaaatcaggataattatgtgtcatggagtgattctgaggatgatgatgaggatgaagaaattgaagaaaaagagaagccagagacaaattttccttctccttttaccaacattttgtgcggaattatttttgtggaaagaagatacacagcagttgtcttaaacagattgataaaggaagctggcaaacaagatccagagctggcttatatcagtagcaatttcataactggacatggcattgggaagaatcagcctcgcaacaaacagatggaagcagaattcagaaaacaggaagaggtacttaggaaatttcgagcacatgagaccaacctgcttattgcaacaagtattgtagaagagggtgttgatataccaaaatgcaacttggtggttcgttttgatttgcccacagaatatcgatcctatgttcaatctaaaggaagagcaagggcacccatctctaattatataatgttagcggatacagacaaaataaaaagttttgaagaagaccttaaaacctacaaagctattgaaaagatcttgagaaacaagtgttccaagtcggttgatactggtgagactgacattgatcctgtcatggatgatgatgacgttttcccaccatatgtgttgaggcctgacgatggtggtccacgagtcacaatcaacacggccattggacacatcaatagatactgtgctagattaccaagtgatccgtttactcatctagctcctaaatgcagaacccgagagttgcctgatggtacattttattcaactctttatctgccaattaactcacctcttcgagcctccattgttggtccaccaatgagctgtgtacgattggctgaaagagttgtagctctcatttgctgtgagaaactgcacaaaattggcgaactggatgaccatttgatgccagttgggaaagagactgttaaatatgaagaggagcttgatttgcatgatgaagaagagaccagtgttccaggaagaccaggttccacgaaacgaaggcagtgctacccaaaagcaattccagagtgtttgagggatagttatcccagacctgatcagccctgttacctgtatgtgataggaatggttttaactacacctttacctgatgaactcaactttagaaggcggaagctctatcctcctgaagataccacaagatgctttggaatactgacggccaaacccatacctcagattccacactttcctgtgtacacacgctctggagaggttaccatatccattgagttgaagaagtctggtttcatgttgtctctacaaatgcttgagttgattacaagacttcaccagtatatattctcacatattcttcggcttgaaaaacctgcactagaatttaaacctacagacgctgattcagcatactgtgttctacctcttaatgttgttaatgactccagcactttggatattgactttaaattcatggaagatattgagaagtctgaagctcgcataggcattcccagtacaaagtatacaaaagaaacaccctttgtttttaaattagaagattaccaagatgccgttatcattccaagatatcgcaattttgatcagcctcatcgattttatgtagctgatgtgtacactgatcttaccccactcagtaaatttccttcccctgagtatgaaacttttgcagaatattataaaacaaagtacaaccttgacctaaccaatctcaaccagccactgctggatgtggaccacacatcttcaagacttaatcttttgacacctcgacatttgaatcagaaggggaaagcgcttcctttaagcagtgctgagaagaggaaagccaaatgggaaagtctgcagaataaacagatactggttccagaactctgtgctatacatccaattccagcatcactgtggagaaaagctgtttgtctccccagcatactttatcgccttcactgccttttgactgcagaggagctaagagcccagactgccagcgatgctggcgtgggagtcagatcacttcctgcggattttagataccctaacttagacttcgggtggaaaaaatctattgacagcaaatctttcatctcaatttctaactcctcttcagctgaaaatgataattactgtaagcacagcacaattgtccctgaaaatgctgcacatcaaggtgctaatagaacctcctctctagaaaatcatgaccaaatgtctgtgaactgcagaacgttgctcagcgagtcccctggtaagctccacgttgaagtttcagcagatcttacagcaattaatggtctttcttacaatcaaaatctcgccaatggcagttatgatttagctaacagagacttttgccaaggaaatcagctaaattactacaagcaggaaatacccgtgcaaccaactacctcatattccattcagaatttatacagttacgagaaccagccccagcccagcgatgaatgtactctcctgagtaataaataccttgatggaaatgctaacaaatctacctcagatggaagtcctgtgatggccgtaatgcctggtacgacagacactattcaagtgctcaagggcaggatggattctgagcagagcccttctattgggtactcctcaaggactcttggccccaatcctggacttattcttcaggctttgactctgtcaaacgctagtgatggatttaacctggagcggcttgaaatgcttggcgactcctttttaaagcatgccatcaccacatatctattttgcacttaccctgatgcgcatgagggccgcctttcatatatgagaagcaaaaaggtcagcaactgtaatctgtatcgccttggaaaaaagaagggactacccagccgcatggtggtgtcaatatttgatccccctgtgaattggcttcctcctggttatgtagtaaatcaagacaaaagcaacacagataaatgggaaaaagatgaaatgacaaaagactgcatgctggcgaatggcaaactggatgaggattacgaggaggaggatgaggaggaggagagcctgatgtggagggctccgaaggaagaggctgactatgaagatgatttcctggagtatgatcaggaacatatcagatttatagataatatgttaatggggtcaggagcttttgtaaagaaaatctctctttctcctttttcaaccactgattctgcatatgaatggaaaatgcccaaaaaatcctccttaggtagtatgccattttcatcagattttgaggattttgactacagctcttgggatgcaatgtgctatctggatcctagcaaagctgttgaagaagatgactttgtggtggggttctggaatccatcagaagaaaactgtggtgttgacacgggaaagcagtccatttcttacgacttgcacactgagcagtgtattgctgacaaaagcatagcggactgtgtggaagccctgctgggctgctatttaaccagctgtggggagagggctgctcagcttttcctctgttcactggggctgaaggtgctcccggtaattaaaaggactgatcgggaaaaggccctgtgccctactcgggagaatttcaacagccaacaaaagaacctttcagtgagctgtgctgctgcttctgtggccagttcacgctcttctgtattgaaagactcggaatatggttgtttgaagattccaccaagatgtatgtttgatcatccagatgcagataaaacactgaatcaccttatatcggggtttgaaaattttgaaaagaaaatcaactacagattcaagaataaggcttaccttctccaggcttttacacatgcctcctaccactacaatactatcactgattgttaccagcgcttagaattcctgggagatgcgattttggactacctcataaccaagcacctttatgaagacccgcggcagcactccccgggggtcctgacagacctgcggtctgccctggtcaacaacaccatctttgcatcgctggctgtaaagtacgactaccacaagtacttcaaagctgtctctcctgagctcttccatgtcattgatgactttgtgcagtttcagcttgagaagaatgaaatgcaaggaatggattctgagcttaggagatctgaggaggatgaagagaaagaagaggatattgaagttccaaaggccatgggggatatttttgagtcgcttgctggtgccatttacatggatagtgggatgtcactggagacagtctggcaggtgtactatcccatgatgcggccactaatagaaaagttttctgcaaatgtaccccgttcccctgtgcgagaattgcttgaaatggaaccagaaactgccaaatttagcccggctgagagaacttacgacgggaaggtcagagtcactgtggaagtagtaggaaaggggaaatttaaaggtgttggtcgaagttacaggattgccaaatctgcagcagcaagaagagccctccgaagcctcaaagctaatcaacctcaggttcccaatagctgaaaccgctttttaaaattcaaaacaagaaacaaaacaaaaaaaattaaggggaaaattatttaaatcggaaaggaagacttaaagttgttagtgagtggaatgaattgaaggcagaatttaaagtttggttgataacaggatagataacagaataaaacatttaacatatgtataaaattttggaactaattgtagttttagttttttgcgcaaacacaatcttatcttctttcctcacttctgctttgtttaaatcacaagagtgctttaatgatgacatttagcaagtgctcaaaataattgacaggttttgtttttttttttttgagtttatgtcagctttgcttagtgttagaaggccatggagcttaaacctccagcagtccctaggatgatgtagattcttctccatctctccgtgtgtgcagtagtgccagtcctgcagtagttgataagctgaatagaaagataaggttttcgagaggagaagtgcgccaatgttgtcttttctttccacgttatactgtgtaaggtgatgttcccggtcgctgttgcacctgatagtaagggacagatttttaatgaacattggctggcatgttggtgaatcacattttagttttctgatgccacatagtcttgcataaaaaagggttcttgccttaaaagtgaaaccttcatggatagtctttaatctctgatctttttggaacaaactgttttacattcctttcattttattatgcattagacgttgagacagcgtgatacttacaactcactagtatagttgtaacttattacaggatcatactaaaatttctgtcatatgtatactgaagacattttaaaaaccagaatatgtagtctacggatattttttatcataaaaatgatctttggctaaacaccccattttactaaagtcctcctgccaggtagttcccactgatggaaatgtttatggcaaataattttgccttctaggctgttgctctaacaaaataaaccttagacatatcacacctaaaatatgctgcagattttataattgattggttacttatttaagaagcaaaacacagcacctttacccttagtctcctcacataaatttcttactatacttttcataatgttgcatgcatatttcacctaccaaagctgtgctgttaatgccgtgaaagtttaacgtttgcgataaactgccgtaattttgatacatctgtgatttaggtcattaatttagataaactagctcattatttccatctttggaaaaggaaaaaaaaaaaaacttctttaggcatttgcctaagtttctttaattagacttgtaggcactcttcacttaaatacctcagttcttcttttcttttgcatgcatttttcccctgtttggtgctatgtttatgtattatgcttgaaattttaatttttttttttttgcactgtaactataatacctcttaatttacctttttaaaagctgtgggtcagtcttgcactcccatcaacataccagtagaggtttgctgcaatttgccccgttaattatgcttgaagtttaagaaagctgagcagaggtgtctcatatttcccagcacatgattctgaacttgatgcttcgtggaatgctgcatttatatgtaagtgacatttgaatactgtccttcctgctttatctgcatcatccacccacagagaaatgcctctgtgcgagtgcaccgacagaaaactgtcagctctgctttctaaggaaccctgagtgaggggggtattaagcttctccagtgttttttgttgtctccaatcttaaacttaaattgagatctaaattattaaacgagtttttgagcaaattaggtgacttgttttaaaaatatttaattccgatttggaaccttagatgtctatttgattttttaaaaaaccttaatgtaagatatgaccagttaaaacaaagcaattcttgaattatataactgtaaaagtgtgcagttaacaaggctggatgtgaattttattctgagggtgatttgtgatcaagtttaatcacaaatctcttaatatttataaactacctgatgccaggagcttagggctttgcattgtgtctaatacattgatcccagtgttacgggattctcttgattcctggcaccaaaatcagattgttttcacagttatgattcccagtgggagaaaaatgcctcaatatatttgtaaccttaagaagagtatttttttgttaatactaagatgttcaaacttagacatgattaggtcatacattctcaggggttcaaatttccttctaccattcaaatgttttatcaacagcaaacttcagccgtttcactttttgttggagaaaaatagtagattttaatttgactcacagtttgaagcattctgtgatcccctggttactgagttaaaaaataaaaaagtacgagttagacatatgaaatggttatgaacgcttttgtgctgctgatttttaatgctgtaaagttttcctgtgtttagcttgttgaaatgttttgcatctgtcaattaaggaaaaaaaaaatcactctatgttgccccactttagagccctgtgtgccaccctgtgttcctgtgattgcaatgtgagaccgaatgtaatatggaaaacctaccagtggggtgtggttgtgccctgagcacgtgtgtaaaggactggggaggcgtgtcttgaaaaagcaactgcagaaattccttatgatgattgtgtgcaagttagttaacatgaaccttcatttgtaaattttttaaaatttcttttataatatgctttccgcagtcctaactatgctgcgttttataatagctttttcccttctgttctgttcatgtagcacagataagcattgcacttggtaccatgctttacctcatttcaagaaaatatgcttaacagagaggaaaaaaatgtggtttggccttgctgctgttttgatttatggaatttgaaaaagataattataatgcctgcaatgtgtcatatactcgcacaacttaaataggtcatttttgtctgtggcatttttactgtttgtgaaagtatgaaacagatttgttaactgaactcttaattatgtttttaaaatgtttgttatatttcttttcttttttcttttatattacgtgaagtgatgaaatttagaatgacctctaacactcctgtaattgtcttttaaaatactgatatttttatttgttaataatactttgccctcagaaagattctgataccctgccttgacaacatgaaacttgaggctgctttggttcatgaatccaggtgttcccccggcagtcggcttcttcagtcgctccctggaggcaggtgggcactgcagaggatcactggaatccagatcgagcgcagttcatgcacaaggccccgttgatttaaaatattggatcttgctccgttagggtgcctaatccctttacacaagattgaagccaccaaactgagaccttgatacctttttttaactgcatctgaaattatgttaagagtctttaacccatttgcattatctgcagaagagaaactcatgtcatgtttattacctatatggttgttttaattacatttgaataattatatttttccaaccactgattacttttcaggaatttaattatttccagataaatttctttattttatattgtacatgaaaagttttaaagatatgtttaagaccaagactattaaaatgatttttaaagttgttggagacgccaatagcaatatctaggaaatttgcattgagaccattgtattttccactagcagtgaaaatgatttttcacaactaacttgtaaatatattttaatcattacttctttttttctagtccatttttatttggacatcaaccacagacaatttaaattttatagatgcactaagaattcactgcagcagcaggttacatagcaaaaatgcaaaggtgaacaggaagtaaatttctggcttttctgctgtaaatagtgaaggaaaattactaaaatcaagtaaaactaatgcatattatttgattgacaataaaatatttaccatcacatgctgcagctgttttttaaggaacatgatgtcattcattcatacagtaatcatgctgcagaaatttgcagtctgcaccttatggatcacaattacctttagttgttttttttgtaataattgtagccaagtaaatctccaataaagttatcgtctgttc

SEQ ID NO: 580 - DNA, 3000 bp, Homo sapiens
cccgagcggcgagacggtccccgccatgtctgcggccatgagggagaggttcgaccggttcctgcacgagaagaactgcatgactgaccttctggccaagctcgaggccaaaaccggcgtgaacaggagcttcatcgctcttggtgtcatcggactggtggccttgtacctggtgttcggttatggagcctctctcctctgcaacctgataggatttggctacccagcctacatctcaattaaagctatagagagtcccaacaaagaagatgatacccagtggctgacctactgggtagtgtatggtgtgttcagcattgctgaattcttctctgatatcttcctgtcatggttccccttctactacatgctgaagtgtggcttcctgttgtggtgcatggccccgagcccttctaatggggctgaactgctctacaagcgcatcatccgtcctttcttcctgaagcacgagtcccagatggacagtgtggtcaaggaccttaaagacaaggccaaagagactgcagatgccatcactaaagaagcgaagaaagctaccgtgaatttactgggtgaagaaaagaagagcacctaaaccagactggatggaaacttcctgccctctctgtaccttcctactggagcttgatgttatattagggactgtggtataattattttaataatgttgccttggaaacatttttgagatattaaagattggaatgtgttgtaagtttctttgcttacttttactgtctatatatatagggagcactttaaacttaatgcagtgggcagtgtccacgtttttggaaaatgtattttgcctctgggtaggaaaagatgtatgttgctatcctgcaggaaatataaacttaaaataaaattatataccccacaggctgtgtactttactgggctctccctgcacgcattttctctgtagttacatttaggataatctttatggttctacttcctataatgtacaattttatataattctgaaatgtttttaatgtatttgtgcacatgtacatatggaaatgttactgtctgactacaacatgcatcatgctcatggggagggagcaggggaaggttgtatgtgtcatttataacttctgtacagtaagaccacctgccaaaagctggaggaaccattgtgctggtgtggtctactaaataatactttaggaaatacgtgattaatatgcaagtgaacaaagtgagaaatgaaatcgaatggagattggcctggttgtttccctagtatatggcatatgaataccaggatagctttataaagcagttagttagttactcactctagtgataaatcgggaaatttacacacacacacacacacacacacacacagagtaacctgtaactctcaattccctgaaaaactagtaatactgtcttatctgctataaactttacatatttgtctattgtcaagatgctacaatggaaaccatttctggttttatcttcaaagcggagaaacatgttgatttagtcttctttcccaatcttcttttttaaaccagtttaaggaacttctgaagatttgtccacctctgattacatgtatgttcttgtttgtatcattagcaacaacatgctaatgacgacacctagctctaagagcaattctgggagaatgaaaggaagtataaagtaacccataatctgcttggcaatagttaagtcaatctatcttcagtttttctctggcctttaaggtcaaacacaagaggcttccctagtttacaagtcagagtcacttgtagtccatttaaatgccctcatccgtattctttgtgttgataagctgcacatgactacatagtaagtacagaacagtaaagttaaaacggatgtctccattgatctgccaaatcgttatagagagcaatttgtctggactagaaaatctgagttttacaccatactgttaagagtccttttgaattaaactagactaaaacaagtgtataactaaactaacaagattaaatatccagccagtacagtattttttaaggcaaataaagatgattagctcaccttgagataacaatcaggtaagatcataacaatgtctcatgatgtaaaaaatattaaagatatcaatactaagtgacagtatcactctaatataatatggatcagagcatttattttggggaggaaaacagtggtgattaccggcattttattaaacttaaaactttgtagaaagcaaacaaaattgttcttgggagaaaatcaacttttagattaaaaaaattttaagtatctaggagtatttaaatccttttcccataaataaaagtacagttttcttggtggcagaatgaaaatcagcaacttctagcatatagactatataatcagattgacagcatatagaatatattatcagacaagatgaggaggtataaaagttactattgctcataatgacttacaggctaaaattagttttaaaatactatattaaattctgaatgcaatttttttttgttcccttgagaccaaaatttaagttaactgttgctggcagtctaagtgtaaatgttaacagcaggagaagttaagaattgagcagttctgttgcatgatttcccaaatgaaatactgccttggctagagtttgaaaaactaattgagcctgtgcctggctagaaaacaagcgtttatttgaatgtgaatagtgtttcaaaggtatgtagttacagaattcctaccaaacagcttaaattcttcaagaaagaattcctgcagcagttattcccttacctgaaggcttcaatcatttggatcaacaactgctactctcgggaagactcctctactcacagctgaagaaaatgagcacacccttcacactgttattacctatcctgaagatgtgatacactgaatggaaataaatagatgtaaataaaattgagttctcatttaacaaaaaaaaaaaaaaaaaaa

SEQ ID NO: 581 - DNA, 2354 bp, Homo sapiens
tcggagggaggttcgggtgggcatcgggcggctggaagagctcgactcgtcccgctgggaaagcgcgagtctgagtggaaccctggacgacttgcagagcggctggcgcagtcatggcggactactggaagtcacagccaaagaaattctgtgattactgcaagtgctggatagcagacaataggcctagtgttgaatttcatgaaagaggaaagaatcataaggaaaatgtggcaaaaaggatcagtgagattaaacagaaaagcctggataaggcaaaggaagaagaaaaggcatcaaaggagtttgctgcaatggaggcagctgccctgaaagcataccaagaggatttgaaaagacttggcttagagtcagaaattttggagccaagcataacaccagtaaccagcactatcccacctacctcgacatcaaatcaacagaaagaaaagaaagaaaagaagaaaagaaaaaaagatccttcaaagggcagatgggtagaaggcataacctctgagggttaccattactattatgatcttatctcaggagcatctcagtgggagaaacctgaaggatttcaaggagacttaaaaaagacagcagtgaagaccgtttgggtagaaggtttaagtgaagatggttttacctattactataatacagaaacaggagaatccagatgggagaaacctgatgatttcattccacacactagtgatctgccttctagtaaggtcaatgaaaattcacttggcaccctagatgaatccaaatcatcagattcgcatagtgattctgatggggaacaggaagcagaagaaggaggggtctctacagagacagaaaagccaaaaataaagtttaaggaaaaaaataaaaatagtgatggaggaagtgacccagaaacacagaaagaaaaaagtattcagaaacagaattcattaggttcaaatgaagaaaaatcgaaaactcttaagaaatcaaacccatatggagaatggcaagaaattaaacaagaggttgagtctcatgaggaggtagatttggaacttccaagcactgaaaatgagtatgtatcaacttcagaagctgatggtggcggagaacccaaagtggtatttaaagaaaaaacagtcacttctcttggagttatggcagatggagtggccccagtcttcaaaaagagaagaactgaaaatggaaaatctagaaatttaaggcaacgaggtgatgatcaatagttgcaggagagctttttgtacatgcttttaggacagaatggagacttatacacccaaagtttatctgtgtttgtttgtaagtattatgatgctaaaaatttagatttattctaaatgtatttgatgtgaattaaaataaatattttttcatgtgaaatttattttggttcctaaaatggaagcctaccacattgcattgtaatacagtgtattatgttcagtgtctaaaaactgctaattaagtcataatttaagatgctatgtatctgttatttaaaacatggagaaacagggcctttattccattcatattcataagagcatatttatcctgcattgaaaatgcattacttttgcacattgatattaactgttgtccaacaaataagtatcggagtacgtgagaatattcccagcccagtgatgatttggttctgaggctgatgtgagaaagctgatgtaaaaaatgtatgcatattggcttaccttactcaatttaaagtcaaaagccaacagccaggagcagctcaggtacttcagatgtgcttaatatggagtgaaaactggaccagaggtggaaagatgtatttgccccagttcacttcaaagcagcaaacgttgtttaagcattttagtttgaaccaggcattgtgttaggaatccagggataaagatgaatgaaatgtatttctgttcttcaggagttcacattctagcatatgccttttttcccccagtcatgcactctttttagcagtcttatatgtactagaaaagattttttaaagtttatttaaagctgtgtagatgaaggcttgatctaaaatagtataaggtctccagcttcagtaaaagtttttagtgtttacttaaattagtaatttctcactttctgtctggttaaaatgtcttaaaaagtagaattttcttctttaatccgtttagtagttacctcccttttacttttcaaattcacaaaattacatttctcataaattgtatagtatttaacttataatagttaatatttgtctttttaagatgactgtacatgtaagaaaaaagcttattaaaaacttgatcaaagaaaaaaaaaaaaaaaaaaaaaaa

SEQ ID NO: 582 - DNA, 1648 bp, Homo sapiens
ggaagttccggcgggggcggccgagggggaagagtgtgtctgcgggagaaagaggagaatcgcccaagcggcctcggaagtcccagggagtggaggcccccgccgtggagccgtgtggtgtatgtgtggtaacaccatgtctgtgcccctgctcaccgatgctgccaccgtgtctggagctgagcgggaaacggccgcggttatttttttacatggacttggagacacagggcacagctgggctgacgccctctccaccatccggctccctcacgtcaagtacatctgtccccatgcgcctaggatccctgtgaccctcaacatgaagatggtgatgccctcctggtttgacctgatggggctgagtccagatgccccagaggacgaggctggcatcaagaaggcagcagagaacatcaaggccttgattgagcatgaaatgaagaacgggatccctgccaatcgaatcgtcctgggaggcttttcacagggcggggccctgtccctctacacggccctcacctgcccccaccctctggctggcatcgtggcgttgagctgctggctgcctctgcaccgggccttcccccaggcagctaatggcagtgccaaggacctggccatactccagtgccatggggagctggaccccatggtgcccgtacggtttggggccctgacggctgagaagctccggtctgttgtcacacctgccagggtccagttcaagacatacccgggtgtcatgcacagctcctgtcctcaggagatggcagctgtgaaggaatttcttgagaagctgctgcctcctgtctaactagtcgctggccccagtgcagtaccccagctcatgggggactcagcaagcaagcgtggcaccatcttggatctgagccggtcgagcccctgtccccacccttcctgacctgtccttttcccacaggcctctgggggcaggtggcaaggcctggccgggccttccttcctggccttagccacctggctctgtctgcagcaggggcaggctgctttcttatccatttccctggaggcgggcccccctggcagcagtattggaggggctacaggcagctggagaaaggggcccagccgctgacccactcactcaggacctcactcactagccccgctttgggccccctcctgtgacctcagggtttggcccatggggcccccccaggcccctgccccaactgattctgcccagataatcgtgtctcctgcctccactcagctgcttctcagtcatgaatgtggccatggccccggggtccccttgctgctgtgggctccctgtccctgggcaggagtgctggtgaggaggtggagccttttgaggggggccttccctcagctgtttccccacactggggggctgggccctgcctccccgttaccctccttccctgcaggcctggagcctgtagggctggactgaggttcaggtctccccccagctgtctcacccccactttgtccccactctagagcagggaggcagtgggggaggagttgtgtctcgtcttctgtctccatgtggtttttgggtgtttttcttgttgtgtcctggattccgataaaattaaagaaattgcttcctcaaaaaaaaaaaaaaaaaaaaaaaaaa

SEQ ID NO: 583 - DNA, 4349 bp, Homo sapiens
gagccgcaggctgaggccgggaagggtcgggggcgaggccgcgtcgccgcctccccgaagccttttcctgttggggggagggcccgccagtgacggccgggcctgtcacgtgggcctgacagctggggagggggtggccggcgacaatgtggtcccgaagcggccagcgccgggagctgcagcgctgagacccccagcccgccccctcgggctcccggccggggccccatcatgttctccaggaagaaacgagagctcatgaaaaccccttccatctcgaaaaagaaccgcgcgggaagccccagcccgcagccctcgggggagctgcccaggaaggatggggctgacgcggtgttccccggaccaagcctggagccgcccgctgggtcctccggcgtcaaggccacagggaccctcaagcggcccaccagcctgagccgccacgccagcgcggctggcttccccctgtcgggtgctgcctcctggacactgggccggagccaccggagcccactgacagccgccagcccgggcgagctgcccaccgagggtgccggcccggacgtcgtcgaggacatctcccatctgctggcggacgtggcccgcttcgctgagggccttgagaaacttaaggagtgtgtgttgcgtgacgacctccttgaggcccgccgcccgcgggcccacgagtgcctgggtgaggctctgcgtgtcatgcatcagatcatctccaagtacccgctgctgaacaccgtggagacgctcaccgcagccggcaccctcattgccaaggtcaaagccttccattatgagagcaacaatgatctggagaaacaggagttcgagaaggccctggagacgattgctgtggccttcagtagcacagtgtccgagttcctcatgggtgaagtggacagcagcaccctcctagcagtgcctcctggggactcgagccagtccatggaaagcctgtatggaccgggcagtgagggcacgcctcccagcctggaagactgtgacgccggctgcctgcccgccgaggaggtggacgtgctgctacagcgctgtgaggggggcgtggatgccgcactgctgtatgccaagaacatggccaagtacatgaaggacctcatcagctacctggagaagcggacgacgctggagatggagtttgccaagggcctgcagaagatcgctcacaactgcagacagagcgtcatgcaggagccccacatgccgctcctgtccatctactcgctggccctggagcaggacctggagttcggccacagcatggtgcaggcggtgggcaccttgcagacccagaccttcatgcagcccctgaccctgcggcggcttgaacacgagaagcgcaggaaggagatcaaggaggcctggcaccgtgcccagaggaagctgcaagaggcggagtccaacctgcgcaaggccaagcagggttacgtgcagcgctgcgaggaccacgacaaggctcgcttcctcgtggccaaggcggaggaggagcaggctggcagcgcgccgggagcaggcagcacggccaccaagaccctggacaagcggcggcggctggaggaggaggccaagaacaaggcggaggaagctatggccacctaccgcacctgcgtggccgacgcgaagacgcagaagcaggagctggaggataccaaggtgacggcgctgcggcagatccaggaggtcatccggcagagcgaccaaaccatcaagtcggccacgatctcctactaccagatgatgcatatgcagacggcgccgctgcccgtgcacttccagatgctgtgtgagagcagcaagctgtatgacccaggccagcagtacgcctcccacgtgcgccagctgcagcgggaccaggagcccgatgtgcactacgactttgagccccacgtctccgccaacgcctggtcccccgtcatgcgtgcccggaagagcagcttcaacgtgagtgatgtggcgcggccggaggctgccgggagccccccagaagaaggcgggtgcactgagggcacacctgccaaggaccacagggccgggcgaggacaccaggttcacaagtcatggccgctctcgatctcagactcggacagtgggctggaccccggccctggcgcaggggactttaagaagttcgagcggacgtcatccagtggtaccatgtcgtccacggaggagctggtggacccagacggtggagccggggcttcagcctttgagcaggctgacctcaacggcatgacccccgagctgccggtggccgtgcccagtggaccgttccgccacgaggggctgtccaaggcggcccgtactcaccggctccggaagctccgcacgcccgccaagtgccgcgagtgcaacagctacgtctacttccagggtgctgagtgtgaagagtgctgcctggcctgccacaagaaatgtctggagacgctggccatacagtgcgggcacaagaagctgcaaggccgcctgcagctgttcggccaggacttcagccacgcggcccgcagcgcccccgacggcgtgcccttcatcgtcaagaagtgcgtctgcgagatcgagcggcgggcgctgcgcaccaagggcatctaccgggtcaatggggtaaagacacgcgtggagaagctgtgccaggccttcgagaacggcaaggagctggtcgagctgtcgcaggcctcgccccacgacatcagcaacgtcctcaagctctacctgcgtcagcttcccgagccgctcatctccttccgcctctaccacgagctcgtagggctggccaaggacagcctgaaggcagaggccgaggccaaggcggcgtcccggggccggcaggacggctcggagagcgaggcagtggcggtggccctggcaggtcggctgcgggagctcctgcgggacctgccgcctgagaaccgggcctcgctgcagtacctgctgcgtcacctacgcaggatcgtggaggtggagcaggacaacaagatgacccccgggaacctgggcatcgtgttcgggcccacgctgcttcggccacggcccaccgaggccaccgtgtccctctcctccctggtggattatccccatcaggcccgcgtcatcgagactctcatcgtccactacggcctggtcttcgaggaggagccggaggagacccccgggggccaggacgagtcatccaaccagcgagctgaggtagtcgtccaggtgccgtacctggaggcgggcgaggcggtggtctacccgctgcaggaggcggcggcggacgggtgcagagaatcccgagttgtgtccaacgattcggactcggacctagaggaggcctccgagctgctgtcctcatcggaggccagtgccctgggccacctcagcttcctggagcagcagcagagcgaggccagcctagaggtggcttctggcagccacagcggcagtgaggagcagctggaggccacagcccgggaggacggggacggggacgaggacggcccggcccagcagctctcaggattcaacaccaaccagtccaacaacgtgctgcaggccccactgccccccatgaggctccgtggcgggcggatgacactgggctcctgcagggaaaggcagccggaattcgtgtgagctggggtggggctgggaccacaggtggcttctctcttgcctgctcctgtccctccagcacgtcccctgcaccacggcatagcttaggtgcgccgtcctggggtcgctgccgagagcgcctggacttcgacgtcccaccagcgggcgcctcctcccagaggcttccaggagcacgagggccttgcggcacaggactgtgccctgtgctgtcccctgcaccccggctcagctgagctggggaacactgctgtcgtgtgaagtcacagtggccttgttggtgcccacagggctgtgtggatggaggaagctgtccctgcccagtgcatcccccaggtcatcacggggacgcaggaggcaggccctgccctgccctctcctcacaggtctgttgcagggactccagaaaccattctgggagccgtggatgggggcggagctggggtttggtgcagtttccagggtgcagtacagcagggcctgaatactggccctggactcccttttccagaacaccaggtgtggccacctggggctcaggtacacagtggggtctctcggaagccaccgtgtggttctttcacaggcacgtttattttgctgaaataaaaagtttttaatcgggaaaaaaaaaaaaaaaaaaaaaaaaaaaaaaaaaaaaaaaaaaaaaaaaaaaaaaaaaaaaaaaaaaaaaaaaaaaaaaaaaaaaa

SEQ ID NO: 584 - DNA, 498 bp, Homo sapiens
acgccccgcctcttccgcttctgtggtctgatcttcctgcggctgaaccgcccggctgagccgacattgccggcgtcttggcgattcggcccgacgagctccgctttcgctacagcatggtggcctactggagacaggctggactcagctacatccgatactcccagatctgtgcaaaagcagtgagagatgcactgaagacagaattcaaagcaaatgctgagaagacttctggcagcaacgtaaaaattgtgaaagtaaagaaggaataatctaccctgactaaagcttgaaatgctacatttccaaggtgaagatgtgtgggcacatgttatggcagattgaaaaggatctcattccatgggaaaaaaaaaaatcctgtcttgttcataaattgacaatgtcaataaattgaaatatggttcactgttactcttgaaaaaaaaaaaaaaaaaaaaaaaaaaaaaaaaaaaaaaaaaaaaaaaaaaaaaaaaaaaa

SEQ ID NO: 585 - DNA, 417 bp, Homo sapiens
gtggtctgatcttcctgcggctgaaccgcccggctgagccgacattgccggcgtcttggcgattcggcccgacgagctccgctttcgctacagcatggtggcctactggagacaggctggactcagctacatccgatactcccagatctgtgcaaaagcagtgagagatgcactgaagacagaattcaaagcaaatgctgagaagacttctggcagcaacgtaaaaattgtgaaagtaaagaaggaataatctaccctgactaaagcttgaaatgctacatttccaaggtgaagatgtgtgggcacatgttatggcagattgaaaaggatctcattccatgggaaaaaaaaaaatcctgtcttgttcataaattgacaatgtcaataaattgaaatatggttcactgttactcttga

SEQ ID NO: 586 - DNA, 479 bp, Homo sapiens
agattccgtcgcttcttccggagccgtacgtggcaccgccccgcctcgcgggcgaccgcggggcttgctgggaagagaggcgaagccaggtcacctttcaaggacccagaagtagggttttggcctaggtaacggggcagagatgtggttcgagattctccccggactctccgtcatgggcgtgtgcttgttgattccaggactggctactgcgtacatccacaggttcactaacgggggcaaggaaaaaagggttgctcattttgggtatcactggagtctgatggaaagagataggcgcatctctggagttgatcgttactatgtgtcaaagggtttggagaacattgattaaggaagcattttcctgattgatgaaaaaaataactcagttatggccatctacccctgctagaaggttacagtgtattatgtagcatgcaaatgtgtttatgtagtggcttaataaaaataaaatg

SEQ ID NO: 587 - DNA, 7191 bp, Homo sapiens
gcgcgcgcgcgggcgggagcggagggcaacggggcggcgcgggcggccgggcgcagggtcgcgggaggtgacgcgcggcgaggatggcggcgcggggccgggggctgctgctgctgacgctgtcggtgctgttggcggcgggcccctccgccgctgcggccaagctcaacatccccaaagtgctgctgcccttcacgcgggccacgcgcgttaacttcacgctggaggcctcggagggctgctaccgctggttgtccacccggccggaggtggccagcatcgagccgctgggcctggacgagcagcagtgctcccagaaggcagtggtgcaggcccgcctgacccagcctgcccgcctcaccagcatcatcttcgcagaggacatcaccacaggccaggtcctgcgctgtgatgccattgtggacctcatccatgacatccagatcgtctccaccacccgcgagctctacctggaggactcccccctggagctgaagatccaggccctggactccgaagggaacaccttcagcactctggctggactggtcttcgagtggacgattgtgaaggactccgaggcggacaggttctcagactcccacaatgcgctgcgaatcctcactttcttggagtctacgtacatccctccttcttacatctcagagatggagaaggctgccaagcaaggggacaccatcctggtgtctgggatgaagaccgggagctccaagctcaaggctcgcatccaggaggctgtctacaagaatgtacgccctgcagaagtcaggctgctgattttggaaaacatccttctgaacccggcctatgacgtctacctgatggtgggaacctccattcactacaaggtgcagaagatcaggcaagggaaaattacagaactctccatgccttccgatcagtacgagttgcagcttcagaacagcatcccgggccccgaaggagacccagcccggccggtggctgtcttggcccaggacacgtcgatggtcactgcactgcagctgggacagagcagcctcgtccttggccacaggagtattcgcatgcaaggtgcttctaggttacccaacagcactatctacgtggtcgaacctggatacctagggttcactgttcaccctggtgacaggtgggtgctggagaccggccgcctgtatgaaatcaccatcgaagtttttgacaagttcagcaacaaggtctatgtatctgacaacatccgaattgaaactgtgcttcctgctgagttcttcgaggtgctctcgtcctcccagaatgggtcataccatcgcatcagggcactaaagaggggacagacggccattgacgcggccctcacctctgtggtggaccaggatggaggggtccacatactacaggtgcctgtgtggaaccagcaggaggtggaaattcacatcccgatcaccctgtatcccagcatcttgacatttccgtggcaaccaaagacgggcgcctatcagtacacaataagggcccacggtggcagtgggaacttcagctggtcttcgtcaagccacctggttgccacagttactgtcaagggcgtgatgaccacaggcagtgacatcgggttcagtgtgatccaggcacatgatgtgcagaacccactccatttcggtgagatgaaggtgtatgtgatcgagccccacagcatggagtttgccccgtgccaggtggaggcacgtgtgggccaggccctggagctgcccctgaggatcagtggcctcatgcccggcggggccagtgaggtggtcaccttgagcgactgctcccactttgacttggctgtcgaggtggagaaccagggtgtgttccagccactcccagggaggctgccgccaggctctgagcactgcagcggcatccgggtaaaggccgaggcccagggctctaccacgcttcttgtgagctacagacacggccacgtccacctgagtgccaagatcaccattgctgcctacctgcccctcaaggctgtggatccctcctctgttgccttggtaaccctgggctcctcaaaggagatgctgtttgaaggaggtcccagaccttggatcctcgagccgtccaaattcttccagaacgtcaccgctgaggacactgacagcatcggcctggctctctttgccccccattcctcccggaattatcagcaacactggatccttgtgacctgtcaggccttgggtgagcaggtcatcgccctgtcggtggggaacaagcccagcctcaccaacccctttcctgcggtggagcctgccgtggtgaagttcgtctgcgccccaccgtccaggctcaccctcgcgcctgtctacaccagcccccagctggacatgtcctgtccgctgctgcagcagaacaagcaggtggtcccagtgtccagccaccgcaacccccggctggacctggctgcttacgaccaggagggccgccggttcgacaacttcagctctctgagcatccagtgggagtccaccaggccagtgttggccagcatcgagcctgagctgcccatgcagctggtgtcccaggacgatgagagtggccaaaagaagctgcacggtttgcaggccattttggttcacgaggcatcaggaaccacagccatcactgccactgccactggctaccaggagtcccacctcagctctgccagaacaaagcagccgcatgaccctctggtgcctctgtcggcctccatagagctcatcctggtggaggacgtgagggtgagcccagaagaggtgaccatctacaaccaccctggcatccaggcagagctccgcatcagggaaggctcaggttacttcttcctcaacaccagcaccgcagatgttgtcaaggtggcctaccaggaggccaggggtgtcgccatggtgcaccctttgctcccgggctcatccaccatcatgatccatgacttgtgcctcgtcttcccggccccagccaaggctgtcgtttacgtgtcggacattcaggagctgtacatccgtgtggttgacaaggtggagattgggaagacagtgaaggcatacgtccgcgtgctggacttgcacaagaagcccttccttgccaaatacttcccctttatggacctgaagctccgagcagcctccccgatcattacattggtggcccttgatgaagcccttgacaactacaccatcacattcctcatccgcggtgtggccatcggccagaccagtctaactgcaagtgtgaccaataaagctggacagagaatcaactcagccccacaacagattgaagtctttcccccgttcaggctgatgcccaggaaggtgacactgcttatcggggccacgatgcaggtcacctccgagggcggcccccagcctcagtccaacatccttttctccatcagcaatgagagcgttgcgctggtgagcgctgctgggctggtacagggcctcgccatcgggaacggcactgtgtctgggctcgtgcaggcagtggatgcagagaccggcaaggtggtcatcatctctcaggacctcgtgcaggtggaggtgctgctgctaagggccgtgaggatccgcgcccccatcatgcggatgaggacgggcacccagatgcccatctatgtcaccggcatcaccaaccaccagaaccctttctcctttggcaatgccgtgccaggcctgaccttccactggtctgtcaccaagcgggacgtcctggacctccgagggcggcaccacgaggcgtcgatccgactcccgtcacagtacaactttgccatgaacgtgctcggccgggtaaaaggccggaccgggctgagggtggtggtcaaggctgtggaccccacatcggggcagctgtatggcctggccagagaactctcggatgagatccaagtccaggtgtttgagaagctgcagctgctcaaccctgaaatagaagcagaacaaatattaatgtcgcccaactcatatataaagctgcagacaaacagggatggtgcagcctctctgagctaccgcgtcctggatggacccgaaaaggttccagttgtgcatgttgatgagaaaggctttctagcatcagggtctatgatcgggacatccaccatcgaagtgattgcacaagagccctttggggccaaccaaaccatcattgttgctgtaaaggtatcccctgtttcctacctgagggtttccatgagccctgtcctgcacacccagaacaaggaggccctggtggccgtgcctttgggaatgaccgtgaccttcactgtccacttccacgacaactctggagatgtcttccatgctcacagttcggtcctcaactttgccactaacagagacgactttgtgcagatcgggaagggccccaccaacaacacctgcgttgtccgcacagtcagcgtgggcctgacactgctccgtgtgtgggacgcagagcacccgggcctctcggacttcatgcccctgcctgtcctacaggccatctccccagagctgtctggggccatggtggtgggggacgtgctctgtctggccactgttctgaccagcctggaaggcctctcaggaacctggagctcctcagccaacagcatcctccacatcgaccccaagacgggtgtggctgtggcccgggccgtgggatccgtgacggtttactatgaggtcgctgggcacctgaggacctacaaggaggtggtggtcagcgtccctcagaggatcatggcccgtcacctccaccccatccagaccagcttccaggaggctacagcctccaaagtgattgttgccgtgggagacagaagctctaacctgagaggcgagtgcacccccacccagagggaagtcatccaggccttgcacccagagaccctcatcagctgccagtcccagttcaagccggccgtctttgatttcccatctcaagatgtgttcaccgtggagccacagtttgacactgctctcggccagtacttctgctcaatcacaatgcacaggctgacggacaagcagcggaagcacctgagcatgaagaagacagctctggtggtcagtgcctccctctccagcagccacttctccacagagcaggtgggggccgaggtgcccttcagcccaggtctcttcgccgaccaggctgaaatccttttgagcaaccactacaccagttccgagatcagggtctttggtgccccggaggttctggagaacttggaggtgaaatccgggtccccggccgtgctggcattcgcaaaggagaagtcttttgggtggcccagcttcatcacatacacggtcggcgtcttggaccccgcggctggcagccaagggcctctgtccactaccctgaccttctccagccccgtgaccaaccaagccattgccatcccagtgacagtggcttttgtggtggatcgccgtgggcccggtccttatggagccagcctcttccagcacttcctggattcctaccaggtcatgttcttcacgctcttcgccctgttggctgggacagcggtcatgatcatagcctaccacactgtctgcacgccccgggatcttgctgtgcctgcagccctcacgcctcgagccagccctggacacagcccccactatttcgctgcctcatcacccacatctcccaatgcattgcctcctgctcgcaaagccagccctccctcagggctgtggagcccagcctatgcctcccactaggccgcgtgaaggttcccggaggatgggtctcagccgagcctcgtgcacccccaagatggaacatccctgctgcattcacactggaacaagcccctccagatgagtgccccggccccaggccagcttcactgccgtctcttcacacagagctgtagtttcggctctgcccattagctcattttatgtaggagttttaaatgtgtgtttttttcctttcaagtcttacaaagctaagactttttggctcattcctttttgcatggttgtctagggtttctggacaatgtgctgttgcatttttattttcctagccttgctaaaatctttcccttctcaagactttgagcagttagaagtgctctttagaagttgtctgtgggtgatgttactgtagtggtctcagggaaaggattgtccagttactttagggggtttttggtggggtttttccccctgtgaaaacttactttgcccctagtctggctgctgctaggacttctgaggagcaatgggacatgagtgtccctgtatctgcgccactgccgcaagggaagcctcaggaaccagcacctggaggccaggatagccaagccctgggtgagcgagaggctggagaacacaggagctcacccagggctgctgcccaaccatgggccactgtgaacagacttcagtcctctgtttttgtttcataagccgttgagacatctgatggacttggcttaggccctgctgggacatcccacgtgtgatccctttcactccatcaggacaccaggactgtccttaggaaaatgtccttgagatggcagcaggagtcatattttctgtgtgtgtgtttcggaaagccgctgtgtcctgcctcagcacaaagacccagtgtcatttgctcctcctgttcctgtgccactccagaacctcagcagatctgagccaccgcctgccagtgtgagaggcggccactttcatggcagctcatcaggcgcagggccccagacagcttcccagcaggccctagagcccggcctgggccaatgatggagggcggccgccagcccagggcctgcccatccagaagggactccccagggcctgggggaggagacccttggaaaagtcctctcttcccagctcctgattctggatctgagattctcagatcacaggcccctgtgctccaggccgaggctgggctaccctcagggagatccagagactcatgcccatggccatccatgcgtggacgctgtgtggagagtccaggatgacgggatcccgcacaagctcccttcagtccttcagggctgggccatgtggttgatttttctaaagctggagaaaggaagaattgtgccttgcatattacttgagcttaaactgacaacctggatgtaaataggagcctttctactggtttatttaataaagttctatgtgatttttt

SEQ ID NO: 588 - DNA, 841 bp, Homo sapiens
tgtgggggaaaaggccccggaacgaggccggcccgcgagggcccgcgctcccctcctccccggcggccgcactcacccactccggaatcggccctgtcgcccccgcccgcactccagagccggctgagaacggcagcggcgagggctccacgtgcagcgtctctccgggtaagacctgcagctcccgcgactagaagtgtgaggtcccagggcccttcccgcggaatcggcgctgagaagccccaacccccctcccgcctcccaggcaccttcgggtccaggactacaactcccggcagggtgcgcaaaacgaccgcccaaggcaacggaggctcacgagaatcagcatgattcttcagaggctcttcaggttctcctctgtcattcggtcagccgtctcagtccatttgcggaggaacattggtgttacagcagtggcatttaataaggaacttgatcctatacagaaactctttgtggacaagattagagaatacaaatctaagcgacagacatctggaggacctgttgatgctagttcagagtatcagcaagagctggagagggagctttttaagctcaagcaaatgtttggtaatgcagacatgaatacatttcccaccttcaaatttgaagatcccaaatttgaagtcatcgaaaaaccccaggcctgaagaaataaagtaaaattaatctggtaatttgtcacggattagttgtacaactagttagaagtttcagaataaacatgcatttcataactgtcaaatgttcttttaattctgagtccaaataaattatttggtgatgttgagtgtgttcttgatgaattgaaaaaaaa

SEQ ID NO: 589 - DNA, 669 bp, Homo sapiens
tgtgggggaaaaggccccggaacgaggccggcccgcgagggcccgcgctcccctcctccccggcggccgcactcacccactccggaatcggccctgtcgcccccgcccgcactccagagccggctgagaacggcagcggcgagggctccacgtgcagcgtctctccggaatcagcatgattcttcagaggctcttcaggttctcctctgtcattcggtcagccgtctcagtccatttgcggaggaacattggtgttacagcagtggcatttaataaggaacttgatcctatacagaaactctttgtggacaagattagagaatacaaatctaagcgacagacatctggaggacctgttgatgctagttcagagtatcagcaagagctggagagggagctttttaagctcaagcaaatgtttggtaatgcagacatgaatacatttcccaccttcaaatttgaagatcccaaatttgaagtcatcgaaaaaccccaggcctgaagaaataaagtaaaattaatctggtaatttgtcacggattagttgtacaactagttagaagtttcagaataaacatgcatttcataactgtcaaatgttcttttaattctgagtccaaataaattatttggtgatgttgagtgtgttcttgatgaattgaaaaaaaa

SEQ ID NO: 590 - DNA, 1217 bp, Homo sapiens
tgtgggggaaaaggccccggaacgaggccggcccgcgagggcccgcgctcccctcctccccggcggccgcactcacccactccggaatcggccctgtcgcccccgcccgcactccagagccggctgagaacggcagcggcgagggctccacgtgcagcgtctctccgggtaagacctgcagctcccgcgactagaagtgtgaggtcccagggcccttcccgcggaatcggcgctgagaagccccaacccccctcccgcctcccaggcaccttcgggtccaggactacaactcccggcagggtgcgcaaaacgaccgcccaaggcaacggaggctcacgaggtacaaggaagcacaacgccccaatccgctttgttttacacagtctcactttccctgcacctttatacacttcgataaccctaacgaacaggacgctgactcggaggggagcttgaactaggggaaaggccactcaaagagcgcatgcgtacagagcaaggtttcaaggaggggaaaaagaacgggtcaaattaggcgaagaaaagatggcggaggctgtgccaggggacccggaagcacttaccctccacttcctcctcctgtttggcttctgtctcacctagacccgtccggtcgcagactgtctccgagacgcttcctgtccggtgagcgtcgaccgactgaaacggcggcccataatgcattgcgatggcggaatcagcatgattcttcagaggctcttcaggttctcctctgtcattcggtcagccgtctcagtccatttgcggaggaacattggtgttacagcagtggcatttaataaggaacttgatcctatacagaaactctttgtggacaagattagagaatacaaatctaagcgacagacatctggaggacctgttgatgctagttcagagtatcagcaagagctggagagggagctttttaagctcaagcaaatgtttggtaatgcagacatgaatacatttcccaccttcaaatttgaagatcccaaatttgaagtcatcgaaaaaccccaggcctgaagaaataaagtaaaattaatctggtaatttgtcacggattagttgtacaactagttagaagtttcagaataaacatgcatttcataactgtcaaatgttcttttaattctgagtccaaataaattatttggtgatgttgagtgtgttcttgatgaattgaaaaaaaa

SEQ ID NO: 591 - DNA, 1303 bp, Homo sapiens
tgtgggggaaaaggccccggaacgaggccggcccgcgagggcccgcgctcccctcctccccggcggccgcactcacccactccggaatcggccctgtcgcccccgcccgcactccagagccggctgagaacggcagcggcgagggctccacgtgcagcgtctctccgggtaagacctgcagctcccgcgactagaagtgtgaggtcccagggcccttcccgcggaatcggcgctgagaagccccaacccccctcccgcctcccaggcaccttcgggtccaggactacaactcccggcagggtgcgcaaaacgaccgcccaaggcaacggaggctcacgaggtacaaggaagcacaacgccccaatccgctttgttttacacagtctcactttccctgcacctttatacacttcgataaccctaacgaacaggacgctgactcggaggggagcttgaactaggggaaaggccactcaaagagcgcatgcgtacagagcaaggtttcaaggaggggaaaaagaacgggtcaaattaggcgaagaaaagatggcggaggctgtgccaggggacccggaagcacttaccctccacttcctcctcctgtttggcttctgtctcacctagacccgtccggtcgcagactgtctccgagacgcttcctgtccggtgagcgtcgaccgactgaaacggcggcccataatgcattgcgatggcgggtaggcgtgtgggggcggagccagggccggaagtagagcggaggtggtggcggcggaggctttggcagctcgggactgagtgcaagaatcagcatgattcttcagaggctcttcaggttctcctctgtcattcggtcagccgtctcagtccatttgcggaggaacattggtgttacagcagtggcatttaataaggaacttgatcctatacagaaactctttgtggacaagattagagaatacaaatctaagcgacagacatctggaggacctgttgatgctagttcagagtatcagcaagagctggagagggagctttttaagctcaagcaaatgtttggtaatgcagacatgaatacatttcccaccttcaaatttgaagatcccaaatttgaagtcatcgaaaaaccccaggcctgaagaaataaagtaaaattaatctggtaatttgtcacggattagttgtacaactagttagaagtttcagaataaacatgcatttcataactgtcaaatgttcttttaattctgagtccaaataaattatttggtgatgttgagtgtgttcttgatgaattgaaaaaaaa

SEQ ID NO: 592 - DNA, 1167 bp, Homo sapiens
tgtgggggaaaaggccccggaacgaggccggcccgcgagggcccgcgctcccctcctccccggcggccgcactcacccactccggaatcggccctgtcgcccccgcccgcactccagagccggctgagaacggcagcggcgagggctccacgtgcagcgtctctccgggtaagacctgcagctcccgcgactagaagtgtgaggtcccagggcccttcccgcggaatcggcgctgagaagccccaacccccctcccgcctcccaggcaccttcgggtccaggactacaactcccggcagggtgcgcaaaacgaccgcccaaggcaacggaggctcacgaggtacaaggaagcacaacgccccaatccgctttgttttacacagtctcactttccctgcacctttatacacttcgataaccctaacgaacaggacgctgactcggaggggagcttgaactaggggaaaggccactcaaagagcgcatgcgtacagagcaaggtttcaaggaggggaaaaagaacgggtcaaattaggcgaagaaaagatggcggaggctgtgccaggggacccggaagcacttaccctccacttcctcctcctgtttggcttctgtctcacctagacccgtccggtcgcagactgtctccgagacgcttcctgtccgaatcagcatgattcttcagaggctcttcaggttctcctctgtcattcggtcagccgtctcagtccatttgcggaggaacattggtgttacagcagtggcatttaataaggaacttgatcctatacagaaactctttgtggacaagattagagaatacaaatctaagcgacagacatctggaggacctgttgatgctagttcagagtatcagcaagagctggagagggagctttttaagctcaagcaaatgtttggtaatgcagacatgaatacatttcccaccttcaaatttgaagatcccaaatttgaagtcatcgaaaaaccccaggcctgaagaaataaagtaaaattaatctggtaatttgtcacggattagttgtacaactagttagaagtttcagaataaacatgcatttcataactgtcaaatgttcttttaattctgagtccaaataaattatttggtgatgttgagtgtgttcttgatgaattgaaaaaaaa

SEQ ID NO: 593 - DNA, 3003 bp, Homo sapiens
ctagttctagatccggcgagtagctggcggtcccgggtgctgctggttagtgtgctctgagggagggtccgagccagccgctgttttgccggaggagcccctcaggccgtagtaagcattaataatgtctttcatctttgagtggatctacaatggcttcagcagtgtgctccagttcctaggactgtacaagaaatctggaaaacttgtattcttaggtttggataatgcaggcaaaaccactcttcttcacatgctcaaagatgacagattgggccaacatgttccaacactacatccgacatcagaagagctaacaattgctggaatgacctttacaacttttgatcttggtgggcacgagcaagcacgtcgcgtttggaaaaattatctcccagcaattaatgggattgtctttctggtggactgtgcagatcattctcgcctcgtggaatccaaagttgagcttaatgctttaatgactgatgaaacaatatccaatgtgccaatccttatcttgggtaacaaaattgacagaacagatgcaatcagtgaagaaaaactccgtgagatatttgggctttatggacagaccacaggaaaggggaatgtgaccctgaaggagctgaatgctcgccccatggaagtgttcatgtgcagtgtgctcaagaggcaaggttacggcgagggtttccgctggctctcccagtatattgactgatgtttggacggtgaaaataaaagagttttacttctctggactgatcctattcacagcttcctcatgaacttttctaatagaacaaggaaagctctccaaccatgtctggcgttgagaagccaagagtctctgtcaactctctcattgcccagtggtgacatgtgctcttctccacactgttgggaggtaatgctgccccacgtgctggtgcaggtcagtatcctgggacttggaagctggcaggatttgccgggtaaagctgtatgccatcatggggcacctgaaaagaaaaacacgtctcaccactgtggttgattcaaaagaaagtgattctattttttaaagaaagcgttgttaatgtaattggtatccctcctaactttttgagttcacaatttacttggtccagagttttctattcttttttttttttaaactaatgaatgacatttagatacttcataaaattatgaacagatatggaggccagagctcatttgggtaaacttactcctgctgagttagcaggttggtgagagaagctcccctgagctcacctgtctctctgactgccttggagtaggtggcataaccttgtgcacagagaactagaaaaggggcagaaccccggccttgcagttgtggcaggtttccactgtggtaagctaggttcattcctcatcaaggaatgtgtagcagattgttcactgtggaggagttaattatagaatgggttattgttgttattcttactcatgaagttacagattttagccagtctttgcttttatacttttgtgaaatttaatttctctctatagcaccttcctttttcgttttcagttatcaaaagtgactttgacctcataaaagagttgagaacatctctcgtgtcacatactgcaggtgcatcagttacttttgcacagattctgggggacatttttctgaataggaagacaggacaaagttaacagcttaagggctcttaattctgtgagttgaggacttaaaagtattgtagcatttgtttggatccatgaaaaatgtattcagtgggctttaaaatttccatttgcagaatttggtctctcaggctgtttgggagctcttttttttacattttttctcctttgacacctattttattggtgtttaaagtaaaggttaacatctgtagcttttccaggtttttttttttttttttttgatatgaaattgtctttctccattgcagaaataagctagggaaacactaacccaaaaactttctgtagagctgttcctttggaggcagcatcacttattggcagtaaagactcagtataaaagcaccagcatccctacttgggtgatggggattaattttatagcattccattttcctagtgccacatgtgaaattggattttgatgatcttaatctatattctacccttataataaaagatcaaaagatatatctcctatgaacagattggagataggagatgaaaagttgggaggatgtctttattctaatgtgagggtagggaaaatgtggataacattactggggtgaaggaggcattgttctttagttggagttctcatttttattctccagtactgacttgtggggaaagcatactttttcactgccaggtactgaatgcagaggctcagtgaagtatatatgtgggaagtgcatgcatttcgtttattagcaaacatagctggattaagacaaagttgttggtttggaaaggggttaaagccttaagtgaacaaatctagctaacagtgaatgaactaggtaatataacttgcatatttttaatttcctttggttaaaggtcccccatacttctctgttcggagacatgagaagtatgattacttcagtgttagttttcttaattttttttttcccctatttgtcccttgtcactttgttgcaagctagaaatctgtgggttatacatagggcagctctttgtgaaagtggtttattccactggagaaaggggattgaaaatcagttagaaccaatgtatttcttgccccacggaacactattcctataagatagctgaaagaagctgctgtgaggagctcagctccaaacacaggatcagcaccttgtataggaattcccatgaattatgacttctcattctgttttatcagagtgcatatatgtcctacttcaggaaaagtaaaacagtcatttacgaaagaaagtcaatctgtatcctaagcattttaataaaaagttaaaacaaaaaaaaaaaaaaaaaaaa

SEQ ID NO: 594 - DNA, 1932 bp, Homo sapiens
gcatcccctgcgcgaagctgggtgccccggagagtctgaccaccatgccacctcctcgcctcctcttcttcctcctcttcctcacccccatggaagtcaggcccgaggaacctctagtggtgaaggtggaagagggagataacgctgtgctgcagtgcctcaaggggacctcagatggccccactcagcagctgacctggtctcgggagtccccgcttaaacccttcttaaaactcagcctggggctgccaggcctgggaatccacatgaggcccctggccatctggcttttcatcttcaacgtctctcaacagatggggggcttctacctgtgccagccggggcccccctctgagaaggcctggcagcctggctggacagtcaatgtggagggcagcggggagctgttccggtggaatgtttcggacctaggtggcctgggctgtggcctgaagaacaggtcctcagagggccccagctccccttccgggaagctcatgagccccaagctgtatgtgtgggccaaagaccgccctgagatctgggagggagagcctccgtgtgtcccaccgagggacagcctgaaccagagcctcagccaggacctcaccatggcccctggctccacactctggctgtcctgtggggtaccccctgactctgtgtccaggggccccctctcctggacccatgtgcaccccaaggggcctaagtcattgctgagcctagagctgaaggacgatcgcccggccagagatatgtgggtaatggagacgggtctgttgttgccccgggccacagctcaagacgctggaaagtattattgtcaccgtggcaacctgaccatgtcattccacctggagatcactgctcggccagtactatggcactggctgctgaggactggtggctggaaggtctcagctgtgactttggcttatctgatcttctgcctgtgttcccttgtgggcattcttcatcttcaaagagccctggtcctgaggaggaaaagaaagcgaatgactgaccccaccaggagattcttcaaagtgacgcctcccccaggaagcgggccccagaaccagtacgggaacgtgctgtctctccccacacccacctcaggcctcggacgcgcccagcgttgggccgcaggcctggggggcactgccccgtcttatggaaacccgagcagcgacgtccaggcggatggagccttggggtcccggagcccgccgggagtgggcccagaagaagaggaaggggagggctatgaggaacctgacagtgaggaggactccgagttctatgagaacgactccaaccttgggcaggaccagctctcccaggatggcagcggctacgagaaccctgaggatgagcccctgggtcctgaggatgaagactccttctccaacgctgagtcttatgagaacgaggatgaagagctgacccagccggtcgccaggacaatggacttcctgagccctcatgggtcagcctgggaccccagccgggaagcaacctccctggggtcccagtcctatgaggatatgagaggaatcctgtatgcagccccccagctccgctccattcggggccagcctggacccaatcatgaggaagatgcagactcttatgagaacatggataatcccgatgggccagacccagcctggggaggagggggccgcatgggcacctggagcaccaggtgatcctcaggtggccagcctggatctcctcaagtccccaagattcacacctgactctgaaatctgaagacctcgagcagatgatgccaacctctggagcaatgttgcttaggatgtgtgcatgtgtgtaagtgtgtgtgtgtgtgtgtgtgtgtatacatgccagtgacacttccagtcccctttgtattccttaaataaactcaatgagctcttccaa

SEQ ID NO: 595 - DNA, 1693 bp, Homo sapiens
ggcggggtttcccgcgctcggcggaagcggaaggggcggggctccgcgctcctagtctccactgctgccgccgtcgccgccacccgagccggagcgggctgggccgccaaggcaagatggtggactacagcgtgtgggaccacattgaggtgtctgatgatgaagacgagacgcaccccaacatcgacacggccagtctcttccgctggcggcatcaggcccgggtggaacgcatggagcagttccagaaggagaaggaggaactggacaggggctgccgcgagtgcaagcgcaaggtggccgagtgccagaggaaactgaaggagctggaggtggccgagggcggcaaggcagagctggagcgcctgcaggccgaggcacagcagctgcgcaaggaggagcggagctgggagcagaagctggaggagatgcgcaagaaggagaagagcatgccctggaacgtggacacgctcagcaaagacggcttcagcaagagcatggtaaataccaagcccgagaagacggaggaggactcagaggaggtgagggagcagaaacacaagaccttcgtggaaaaatacgagaaacagatcaagcactttggcatgcttcgccgctgggatgacagccaaaagtacctgtcagacaacgtccacctggtgtgcgaggagacagccaattacctggtcatttggtgcattgacctagaggtggaggagaaatgtgcactcatggagcaggtggcccaccagacaatcgtcatgcaatttatcctggagctggccaagagcctaaaggtggacccccgggcctgcttccggcagttcttcactaagattaagacagccgatcgccagtacatggagggcttcaacgacgagctggaagccttcaaggagcgtgtgcggggccgtgccaagctgcgcatcgagaaggccatgaaggagtacgaggaggaggagcgcaagaagcggctcggccccggcggcctggaccccgtcgaggtctacgagtccctccctgaggaactccagaagtgcttcgatgtgaaggacgtgcagatgctgcaggacgccatcagcaagatggaccccaccgacgcaaagtaccacatgcagcgctgcattgactctggcctctgggtccccaactctaaggccagcgaggccaaggagggagaggaggcaggtcctggggacccattactggaagctgttcccaagacgggcgatgagaaggatgtcagtgtgtgacctgccccagctaccaccgccacctgcttccaggcccctatgtgccccttttcagaaaacagatagatgccatctcgcccgctcctgacttcctctacttgcgctgctcggcccagcctggggggcccgcccagccctccctggcctctccactgtctccactctccagcgcccattcaagtctctgctttgagtcaaggggcttcactgcctgcagccccccatcagcattatgccaaaggcccgggggtccggggaagggcagaggtcaccaggctggtctaccaggtagttggggagggtccccagccaaggggccggctctcgtcactgggctctgttttcactgttcgtctgctgtctgtgtcttctatttggcaaacagcaatgatcttccaataaaagatttcagatgctcaaaaaaaaaaaaaaaaaaaaaa

SEQ ID NO: 596 - DNA, 5400 bp, Homo sapiens
atggcgggcgggccccccaaggccctgccgtccacggggccccactccctgcgcgacatgccgcacccgctggccggctccagcagcgaggaggccgtgggtggtgacagcacgcccagcccggacctgctgatggcccgcagcttcggtgacaaggatctcattttgcccaacggtggtactccagcaggtacttcaagtccagcttcttcatcttcccttctcaacagacttcagcttgatgatgatattgatggtgagactagagatctcttcgttatagttgatgatcccaagaagcatgtgtgtacaatggagacttacatcacctataggatcaccaccaaaagtactcgggtggagtttgacctgccagaatattctgttcgtcgaagataccaggattttgactggttgaggagcaaactggaagaatcccagcccactcatctcattccccctcttcccgagaagtttgtggtaaaaggtgttgtggatcgtttttcagaagagtttgtggagaccagaagaaaagctttggataaatttctaaaaagaattacggaccatcctgtgctgtctttcaatgaacactttaatattttccttactgctaaggacctgaacgcctacaagaagcaagggatagcattgctgaccagaatgggcgagtcagtcaagcacgtcactggcggctacaagctgaggactcggccgcttgagtttgctgccataggtgactacttagatacatttgcactcaaactgggaaccattgatcgaatagcccagcggatcatcaaagaagaaatagagtaccttgtggagctgagagaatacgggcctgtgtactccacatggagcgccttggagggtgagctggctgaacccctggagggtgtgtcagcttgcattgggaactgctctacagccttagaagagctgacagatgacatgacagaagacttcctacctgtgctcagggaatatattttatactctgactccatgaagagtgtattgaagaagagggaccaagttcaagcagagtatgaagccaaactggaagctgtggctctgcggaaggaagaccgccccaaggtaccggcggacgtcgagaaatgtcaggatcggatggagtgtttcaatgctgacctgaaagctgacatggagaggtggcagaacaacaagaggcaggacttccggcagctactcatggggatggctgacaagaacatccagtattatgagaagtgcctcatggcgtgggagtcgattattccactactgcaggagaaacaagaggccaagtaaagttctttcttgggacggagactcttctacctacacagggcctggcaccctataccggaatgtccctgcagtgccagagacgcagtgctgggaaaacaaccacagaaacatctctcctttgtgtatttttccctcccccacctttcaccccacagtggttttcaattagtatttattccatggtggagtctgtgaggctagaatatctctcagcaagagcagcatacctccatgttgtgaaggcatctgttcagtgaagcactacgaaaatttgaaaccaagggacaagacaacctgcagctgacgctctgacatttcatgacagtttcctctttagggacagctgagttgccagttgtgggagagaacccggggcctgcttttcaaggatgaggaggaggcaggaacagaaggcagctgctgctttctgtggaaacctggcccctctggaattggcctctgtgggcattgactcgtcttggcctaggaggcattggtgcctccctggcaagtccttaacgtacagtacctgtagctgtgagtgtggcctgctgcctgcttgtgatgagtgataccgtcttactgtttctgtttcacatagggacatttaaatcaatgtcaatgtgcgtccatgcttgagtgagcaagccagcgtccttgtcctcctgcaatgcctttgggaagctcaggggaatgctccccaagcttgtttctgacactagaatgcaacagattggaaactttttgtgtaaaatgaaaaaaacaaagtgctggttttttttttttttctgtgaaggtcttcagtgttttgcttgttcactgtcatcagagcagggattagacctgttagggaatatctattgtcttgaagtcagagtagctccccattgttgagatcagtgggcatataccaagctccacccccagtgtcagctttgtgcaatttgcctttacctcaccaaaaatacctactttaatatttcctcctgtgtcctctgaatgtctgggcgagcttttggtgagagggctggtatgtcatgttgttatgatacagtcgaaatttgtcaatgcagtgtgaatgttctacataaagtgctttaacccttaacatttcctggtcaggaaggaaaatcagtacctggacgggcctcgaaaatgacaaatgcaacagcgagccctttgtgtccagctaagctaaagtctcctcagtgtgcagccagattcctggggactgctgagtgtggttacaggctgcatttcagacaatgaccaggtttacttttcagatcacaaagcaaacagtcaccaaggatctgtcttccaactcttttttttttctgctgaaatgaagctacatgtcatgtttgtgttctttcatctgtggctcatccctgtaaaactacgaatctgagcctcaaataagcagtagtttttttgttgtttatttttaatgaaacagctgtgttaaggcgctgcttcagatgcaagttcacctggaaatactggtcagcgggcagcacgtcaaggtcacttaagcccacttttaactgcaggtcatcctcgcatcagccaaggctgtggtgctgttgatgccgcagttggacagcataggacggcttggttctgtttcattgtgtttgacaatgttgcagtttaaatgataatgtttaaatcaattggtacttgcctgtagtgttaaaccctatttgtgccattctcaagtcctttgatgtgaattttcagtttggtacagttagaaatgactcattgatgcggacaggtaagaacaacccatgtacccccgagtgattgcatgctttattctacctctaagccatcgtgttgacgtgggtatggacgcctgggtctgacctgacactgtgctgggagaatcaggatgtgtgtctaatggcgagctgacagccctctgctgatatttggcagaaggcaccagaccagcccagcagcaaatgctcatctttgggaacataggaagctttaccttggggaaggtatgctttacaaatgtccagtgtaatgaatgtttggaaaaaactggagttacaggaaaatgaaatctgactatctgctagttgccaaaacccagaaacattcctgtgtaatggttagttgggaaagaaggcagcacttgaaaaaatttaccaggttcctcactgggagatgtgggaaggggcgtgggacgcacgcggtcactccctctcctagtgagaggcagatggctggctctgaagggaggcaggcaccgtgggatttgggcttgctctgcttggtccccatgtgatgccctgtgctgtaagatatcagaaagacctggaacaaggcaaactttatgtcctcctggcatgttattgataacagagccaggaagtccagtgtacattacagattttctgggagaaatagtccttccagagaaaggattccttcccagcctccaggctggtgtctcatgaggtgaggaggctggcccagaaggaaggggacgttaggtggtgaagcaggctcccctgggcctctgagggccagcagtcccaaccatttgcctcttcgttttgaccaagcacaaaagagatattccctagaagtgtcacacggaggcttctgtgccaaagactgccttgtagaggtctcatcacctcacacttcttgacttcacaaaattgtggccctgagatcagtactcctctcttaagtatttattattattattatttactttacctcaagcagacagacataggttttgaggcttgaatacatggcagtggaatacaaggccctccctagcagccgccccaggcctggaaagtgggagatttcattcgcccgggttaaaaatccagaggaagacagaagagaggagtcctaggaactgagcagattttagagacgcaaatgatgtttaagagagccttgtttcagatagaaattctctatgggttgaaatgccaaaaacagaaaacatgatgttgactcatgtaatttagtccattttagcagagcctttagtgttaacaccagtggcgaggagcattgcatattctctgtcagcagcagcactcccacaccaggtggttctgggctctctgtaggctggtcctagtaggtgacacccagcaacacccctgttggacaggattgattgttcgcagtcttagaccaacacttcagtcagaaatgttactgggaggaggaaaggaaaatcactttttttcctccatgtggaaatgaggagagaggaaagtggattgcaaaccaaaatgtgagtcagtgtgatgaagcagtggctctgtcatctcggcctttatccaataacaaaccagcatctcttaaaggcgcttttggcctagacacccctgaagtttggatgaagtctggtggattccctgtctgttgtatttctgtgtgcctgttcccttcattgctgtgagttgggagtgcattgagagatgatgtccatctgatatattcctgtgaaataaactgccagcaaactttctaacttgtattttaactgttaaagaagagattaaaaacttcggctttggacatgtccacattatggactgtcatcttatttttaaaagtcattctttacgtttaaaattttaaaataaaaaccttctgaggtattgatgtagtccaccgtgtaaatgttaccttctctccatgctgccattatgccaaaacaaaagctgtgataaaaaaagtgcttgagagagtgtgttgataagaaagtgatttatttacagatggaagtctttgtttcatgaagctaccaaactttaaaaagaatgtcacccttttttttgtttgttatggaaaccagagattgtaaaatggaaaaagaatcgtttttttgttgactttttgatgctggcacgaggtttttgtccacttttttcatatatctgtgtataaaaaaattgttgtttactatggaattagtattacattttgaggtaaacaaaagaatttgtattgcttgataaatattagcttgtaaatttaaagtttctttacttcaattaacttaaaggaccaataaacccataaaagatgctt

SEQ ID NO: 597 - DNA, 3698 bp, Homo sapiens
agcagcaactgctacccagccagattttaattagtttctgttccctgttcagagtaccttgtggagctgagagaatacgggcctgtgtactccacatggagcgccttggagggtgagctggctgaacccctggagggtgtgtcagcttgcattgggaactgctctacagccttagaagagctgacagatgacatgacagaagacttcctacctgtgctcagggaatatattttatactctgactccatgaagagtgtattgaagaagagggaccaagttcaagcagagtatgaagccaaactggaagctgtggctctgcggaaggaagaccgccccaaggtaccggcggacgtcgagaaatgtcaggatcggatggagtgtttcaatgctgacctgaaagctgacatggagaggtggcagaacaacaagaggcaggacttccggcagctactcatggggatggctgacaagaacatccagtattatgagaagtgcctcatggcgtgggagtcgattattccactactgcaggagaaacaagaggccaagtaaagttctttcttgggacggagactcttctacctacacagggcctggcaccctataccggaatgtccctgcagtgccagagacgcagtgctgggaaaacaaccacagaaacatctctcctttgtgtatttttccctcccccacctttcaccccacagtggttttcaattagtatttattccatggtggagtctgtgaggctagaatatctctcagcaagagcagcatacctccatgttgtgaaggcatctgttcagtgaagcactacgaaaatttgaaaccaagggacaagacaacctgcagctgacgctctgacatttcatgacagtttcctctttagggacagctgagttgccagttgtgggagagaacccggggcctgcttttcaaggatgaggaggaggcaggaacagaaggcagctgctgctttctgtggaaacctggcccctctggaattggcctctgtgggcattgactcgtcttggcctaggaggcattggtgcctccctggcaagtccttaacgtacagtacctgtagctgtgagtgtggcctgctgcctgcttgtgatgagtgataccgtcttactgtttctgtttcacatagggacatttaaatcaatgtcaatgtgcgtccatgcttgagtgagcaagccagcgtccttgtcctcctgcaatgcctttgggaagctcaggggaatgctccccaagcttgtttctgacactagaatgcaacagattggaaactttttgtgtaaaatgaaaaaaacaaagtgctggttttttttttttttctgtgaaggtcttcagtgttttgcttgttcactgtcatcagagcagggattagacctgttagggaatatctattgtcttgaagtcagagtagctccccattgttgagatcagtgggcatataccaagctccacccccagtgtcagctttgtgcaatttgcctttacctcaccaaaaatacctactttaatatttcctcctgtgtcctctgaatgtctgggcgagcttttggtgagagggctggtatgtcatgttgttatgatacagtcgaaatttgtcaatgcagtgtgaatgttctcttcggccttgttctgccttgtgatcttttcaattcagtgaataaaccaggaatccattttttcaccaacccaccctgtagattgtcagctttttgtttgagagatgcctggtctcacagttacatgtatcagagtgtgtgtaagttgtctgtgttagaaaggttggggtgggggctttgttgcaggggattagactgttctttcttcatcataatttgagatacatcctgagtatgactgtctaaccctttctgtgtggcagaaaaatatgttttccaggtagtttttactactacagagagtctgtaaataagtgctttaaaaaaataacaaaccaataagatatttgtctcctatataaacattctgtgtatttagcacttgaaaatcaacaaatccagaatttaaaaaaatgccacagacttttcaaagcccaactctacttttttgagaatttgtccgtacctactaatatgccttattcttcttcacctagtgttttaaaagtcctgggtagaaagagttttagaaatgtaatcagttgttcagcttcaataatatagagatctaacatagtcagtcctcaggccccctaaagaaacaagcaagaaagtgagggccatcactagggttggctttggggaggggaaaactaaggactgcttttgccaaatgatatttttgataatgtaaggaaacacagggaccacaaaaccttttttttttttttaagtgtgaaagattagtgccttttggcatacttttgattttagaggatatagtatcggcattgacaaatcacgtagaaacaaagaatgctatagatgacaacagtattaaatgttactcctgattctgcagaacagcttttgaagatactggggggtatcttcaagcctcagagcagcttgtttcagatagaaattctctatgggttgaaatgccaaaaacagaaaacatgatgttgactcatgtaatttagtccattttagcagagcctttagtgttaacaccagtggcgaggagcattgcatattctctgtcagcagcagcactcccacaccaggtggttctgggctctctgtaggctggtcctagtaggtgacacccagcaacacccctgttggacaggattgattgttcgcagtcttagaccaacacttcagtcagaaatgttactgggaggaggaaaggaaaatcactttttttcctccatgtggaaatgaggagagaggaaagtggattgcaaaccaaaatgtgagtcagtgtgatgaagcagtggctctgtcatctcggcctttatccaataacaaaccagcatctcttaaaggcgcttttggcctagacacccctgaagtttggatgaagtctggtggattccctgtctgttgtatttctgtgtgcctgttcccttcattgctgtgagttgggagtgcattgagagatgatgtccatctgatatattcctgtgaaataaactgccagcaaactttctaacttgtattttaactgttaaagaagagattaaaaacttcggctttggacatgtccacattatggactgtcatcttatttttaaaagtcattctttacgtttaaaattttaaaataaaaaccttctgaggtattgatgtagtccaccgtgtaaatgttaccttctctccatgctgccattatgccaaaacaaaagctgtgataaaaaaagtgcttgagagagtgtgttgataagaaagtgatttatttacagatggaagtctttgtttcatgaagctaccaaactttaaaaagaatgtcacccttttttttgtttgttatggaaaccagagattgtaaaatggaaaaagaatcgtttttttgttgactttttgatgctggcacgaggtttttgtccacttttttcatatatctgtgtataaaaaaattgttgtttactatggaattagtattacattttgaggtaaacaaaagaatttgtattgcttgataaatattagcttgtaaatttaaagtttctttacttcaattaacttaaaggaccaataaacccataaaagatgctt

SEQ ID NO: 598 - DNA, 5400 bp, Homo sapiens
atggcgggcgggccccccaaggccctgccgtccacggggccccactccctgcgcgacatgccgcacccgctggccggctccagcagcgaggaggccgtgggtggtgacagcacgcccagcccggacctgctgatggcccgcagcttcggtgacaaggatctcattttgcccaacggtggtactccagcaggtacttcaagtccagcttcttcatcttcccttctcaacagacttcagcttgatgatgatattgatggtgagactagagatctcttcgttatagtcgatgatcccaagaagcatgtgtgtacaatggagacttacatcacctataggatcaccaccaaaagtactcgggtggagtttgacctcccagaatattctgttcgtcgaagataccaggattttgactggttgaggagcaaactggaagaatcccagcccactcatctcattccccctcttcccgagaagtttgtggtaaaaggtgttgtggatcgtttttcagaagagtttgtggagaccagaagaaaagctttggataaatttctaaaaagaattacggaccatcctgtgctgtctttcaatgaacactttaatattttccttactgctaaggacctgaacgcctacaagaagcaagggatagcattgctgaccagaatgggcgagtcagtcaagcacgtcactggcggctacaagctgaggactcggccgcttgagtttgctgccataggtgactacttagatacatttgcactcaaactgggaaccattgatcgaatagcccagcggatcatcaaagaagaaatagagtaccttgtggagctgagagaatacgggcctgtgtactccacatggagcgccttggagggtgagctggccgaacccctggagggtgtgtcagcttgcattgggaactgctctacagccttagaagagctgacagatgacatgacagaagacttcctacctgtgctcagggaatatattttatactctgactccatgaagagtgtattgaagaagagggaccaagttcaagcagagtatgaagccaaactggaagctgtggctctgcggaaggaagaccgccccaaggtaccggcggacgtcgagaaatgtcaggatcggatggagtgtttcaatgctgacctgaaagctgacatggagaggtggcagaacaacaagaggcaggacttccggcagctactcatggggatggctgacaagaacatccagtattatgagaagtgcctcatggcgtgggagtcgattattccactactgcaggagaaacaagaggccaagtaaagttctttcttgggacggagactcttctacctacacagggcctggcaccctataccggaatgtccctgcagtgccagagacgcagtgctgggaaaacaaccacagaaacatctctcctttgtgtatttttccctcccccacctttcaccccacagtggttttcaattagtatttattccatggtggagtctgtgaggctagaatatctctcagcaagagcagcatacctccatgttatgaaggcatctgttcagtgaagcactacgaaaatttgaaaccaagggacaagacaacttgcagctgacgctctgacatttcatgacagtttcctctttagggacagctgagttgccagttgtgggagagaacccggggcctgcttttcaaggatgaggaggaggcaggaacagaaggcagctgctgctttctgtggaaacctggcccctctggaattggcctctgtgggcattgacttgtcttggcctaggaggcattggtgcctccctggcaagtccttaacgtacagtacctgtagctgtgagtgtggcctgctgcctgcttgtgatgagtgataccgtcttactgtttctgtttcacatagggacatttaaatcaatgtcaatgtgcgtccatgcttgagtgagcaagccagcgtccttgtcctcctgcaatgcctttgggaagctcaggggaatgctccccaagcttgtttctgacactagaatgcaacagattggaaactttttgtgtaaaatgaaaaaaacaaagtgctgttttttttttttttctgtgaaggtcttcagtgttttgcttgttcactgtcatcagagcagggattagacctgttagggaatatctattgtcttgaagtcagagtagctccccattgttgagatcagtgggcatataccaagctccacccccagtgtcagctttgtgcaatttgcctttacctcaccaaaaatacctactttaatatttcctcctgtgtcctctgaatgtctgggcgagcttttggtgagagggctggtatgtcatgttgttatgatacagtcgaaatttgtcaatgcagtgtgaatgttctacataaagtgctttaacccttaacatttcctggtcaggaaggaaaatcagtacctggacgggcctcgaaaatgacaaatgcaacagcgagccctttgtgtccagctaagctaaagtctcctcagtgtgcagccagattcctggggactgctgagtgtggttacaggctgcatttcagacaatgaccaggtttacttttcagatcacaaagcaaacagtcaccaaggatctgtcttccaactcttttttttttctgctgaaatgaagctacatgtcatgtttgtgttctttcatctgtggctcatccctgtaaaactacgaatctgagcctcaaataagcagtagtttttttgttgtttatttttaatgaaacagctgtgttaaggcgctgcttcagatgcaagttcacctggaaatactggtcagcgggcagcacgtcaaggtcacttaagcccacttttaactgcaggtcatcctcgcatcagccaaggctgtggtgctgttgatgccgcagttggacagcataggacggcttggttctgtttcattgtgtttgacaatgttgcagtttaaatgataatgtttaaatcaattggtacttgcctgtagtgttaaaccctatttgtgccattctcaagtcctttgatgtgaattttcagtttggtacagttagaaatgactcattgatgcggacaggtaagaacaacccatgtacccccgagtgattgcatgctttattctacctctaagccatcgtgttggcgtgggtatggacgcctgggtctgacctgacactgtgctgggagaatcaggatgtgtgtctaatggcgagctgacagccctctgctgatatttggcagaaggcaccagaccagcccagcagcaaatgctcatctttgggaacataggaagctttaccttggggaaggtatgctttacaaatgtccagtgtaatgaatgtttggaaaaaactggagttacaggaaaatgaaatctgactatctgctagttgccaaaacccagaaacattcctgtgtaatggttagttgggaaagaaggcagcacttgaaaaaatttaccaggttcctcactgggagatgtgggaaggggcgtgggacgcacgcggtcactccctctcctagtgagaggcagatggctggctctgaagggaggcaggcaccgtgggatttgggcttgctctgcttggtccccatgtgatgccctgtgctgtaagatatcagaaagacctggaacaaggcaaactttatgtcttcctggcatgttattgataacagagccaggaagtccagtgtacattacagattttctgggagaaatagtccttccagagaaaggattccttcccagcctccaggctggtgtctcatgaggtgaggaggctggcccagaaggaaggggacgttaggtggtgaagcaggctcccctgggcctctgagggccagcagtcccaaccatttgcctcttcgttttgaccaagcacaaaagagatattccctagaagtgtcacacggaggcttctgtgccaaagactgccttgtagaggtctcatcacctcacacttcttgacttcacaaaattgtggccctgagatcagtactcctctcttaagtatttattattattattatttactttacctcaagcagacagacataggttttgaggcttgaatacatggcagtggaatacaaggccctccctagcagccgccccaggcctggaaagtgggagatttcattcgcccgggttaaaaatccagaggaagacagaagagaggagtcctaggaactgagcagattttagagacgcaaatgatgtttaagagagccttgtttcagatagaaattctctatgggttgaaatgccaaaaacagaaaacatgatgttgactcatgtaatttagtccattttagcagagcctttagtgttaacaccagtggcgaggagcattgcatattctctgtcagcagcagcactcccacaccaggtggttctgggctctctgtaggctggtcctagtaggtgacacccagcaacacccctgttggacaggattgattgttcgcagtcttagaccaacacttcagtcagaaatgttactgggaggaggaaaggaaaatcactttttttcctccatgtggaaatgaggagagaggaaagtggattgcaaaccaaaatgtgagtcagtgtgatgaagcagtggctctgtcatctcggcctttatccaataacaaaccagcatctcttaaaggcgcttttggcctagacacccctgaagtttggatgaagtctggtggattccctgtctgttgtatttctgtgtgcctgttcccttcattgctgtgagttgggagtgcattgagagatgatgtccatctgatatattcctgtgaaataaactgccagcaaactttctaacttgtattttaactgttaaagaagagattaaaaacttcggctttggacatgtccacattatggactgtcatcttatttttaaaagtcattctttacgtttaaaattttaaaataaaaaccttctgaggtattgatgtagtccaccgtgtaaatgttaccttctctccatgctgccattatgccaaaacaaaagctgtgataaaaaaagtgcttgagagagtgtgttgataagaaagtgatttatttacagatggaagtctttgtttcatgaagctaccaaactttaaaaagaatgtcacccttttttttgtttgttatggaaaccagagattgtaaaatggaaaaagaatcgttttttttgttgactttttgatgctggcacgaggtttttgtccacttttttcatatatctgtgtataaaaaaattgttgtttactatggaattagtattacattttgaggtaaacaaaagaatttgtattgcttgataaatattagcttgtaaatttaaagtttctttacttcaattaacttaaaggaccaataaacccataaaagatgctt

SEQ ID NO: 599 - DNA, 3697 bp, Homo sapiens
agcagcaactgctacccagccagattttaattagtttctgttccctgttcagagtaccttgtggagctgagagaatacgggcctgtgtactccacatggagcgccttggagggtgagctggccgaacccctggagggtgtgtcagcttgcattgggaactgctctacagccttagaagagctgacagatgacatgacagaagacttcctacctgtgctcagggaatatattttatactctgactccatgaagagtgtattgaagaagagggaccaagttcaagcagagtatgaagccaaactggaagctgtggctctgcggaaggaagaccgccccaaggtaccggcggacgtcgagaaatgtcaggatcggatggagtgtttcaatgctgacctgaaagctgacatggagaggtggcagaacaacaagaggcaggacttccggcagctactcatggggatggctgacaagaacatccagtattatgagaagtgcctcatggcgtgggagtcgattattccactactgcaggagaaacaagaggccaagtaaagttctttcttgggacggagactcttctacctacacagggcctggcaccctataccggaatgtccctgcagtgccagagacgcagtgctgggaaaacaaccacagaaacatctctcctttgtgtatttttccctcccccacctttcaccccacagtggttttcaattagtatttattccatggtggagtctgtgaggctagaatatctctcagcaagagcagcatacctccatgttatgaaggcatctgttcagtgaagcactacgaaaatttgaaaccaagggacaagacaacttgcagctgacgctctgacatttcatgacagtttcctctttagggacagctgagttgccagttgtgggagagaacccggggcctgcttttcaaggatgaggaggaggcaggaacagaaggcagctgctgctttctgtggaaacctggcccctctggaattggcctctgtgggcattgacttgtcttggcctaggaggcattggtgcctccctggcaagtccttaacgtacagtacctgtagctgtgagtgtggcctgctgcctgcttgtgatgagtgataccgtcttactgtttctgtttcacatagggacatttaaatcaatgtcaatgtgcgtccatgcttgagtgagcaagccagcgtccttgtcctcctgcaatgcctttgggaagctcaggggaatgctccccaagcttgtttctgacactagaatgcaacagattggaaactttttgtgtaaaatgaaaaaaacaaagtgctgttttttttttttttctgtgaaggtcttcagtgttttgcttgttcactgtcatcagagcagggattagacctgttagggaatatctattgtcttgaagtcagagtagctccccattgttgagatcagtgggcatataccaagctccacccccagtgtcagctttgtgcaatttgcctttacctcaccaaaaatacctactttaatatttcctcctgtgtcctctgaatgtctgggcgagcttttggtgagagggctggtatgtcatgttgttatgatacagtcgaaatttgtcaatgcagtgtgaatgttctcttcggccttgttctgccttgtgatcttttcaattcagtgaataaaccaggtatccattttttcaccaacccaccctgtagattgtcagctttttgtttgagagatgcctggtctcacagttacatgtatcagagtgtgtgtaagttgtctgtgttagaaaggttggggtgggggctttgttgcaggggattagactgttctttcttcatcataatttgagatacatcctgagtatgactgtctaaccctttctgtgtggcagaaaaatatgttttccaggtagtttttactactacagagagtctgtaaataagtgctttaaaaaaataacaaaccaataagatatttgtctcctatataaacattctgtgtatttagcacttgaaaatcaacaaatccagaatttaaaaaaatgccacagacttttcaaagcccaactgtacttttttgagaatttgtccgtacctactaatatgccttattcttcttcacctagtgttttaaaagtcctgggtagaaagagttttagaaatgtaatcagttgttcagcttcaataatatagagatctaacatagtcagtcctcaggccccctaaagaaacaagcaagaaagtgagggccatcactagggttggctttggggaggggaaaactaaggactgcttttgccaaatgatatttttgataatgtaaggaaacacagggaccacaaaacctttttttttttttaagtgtgaaagattagtgccttttggcatacttttgattttagaggatatagtatcggcattgacaaatcacgtagaaacaaagaatgctatagatgacaacagtattaaatgttactcctgattctgcagaacagcttttgaagatactggggggtatcttcaagcctcagagcagcttgtttcagatagaaattctctatgggttgaaatgccaaaaacagaaaacatgatgttgactcatgtaatttagtccattttagcagagcctttagtgttaacaccagtggcgaggagcattgcatattctctgtcagcagcagcactcccacaccaggtggttctgggctctctgtaggctggtcctagtaggtgacacccagcaacacccctgttggacaggattgattgttcgcagtcttagaccaacacttcagtcagaaatgttactgggaggaggaaaggaaaatcactttttttcctccatgtggaaatgaggagagaggaaagtggattgcaaaccaaaatgtgagtcagtgtgatgaagcagtggctctgtcatctcggcctttatccaataacaaaccagcatctcttaaaggcgcttttggcctagacacccctgaagtttggatgaagtctggtggattccctgtctgttgtatttctgtgtgcctgttcccttcattgctgtgagttgggagtgcattgagagatgatgtccatctgatatattcctgtgaaataaactgccagcaaactttctaacttgtattttaactgttaaagaagagattaaaaacttcggctttggacatgtccacattatggactgtcatcttatttttaaaagtcattctttacgtttaaaattttaaaataaaaaccttctgaggtattgatgtagtccaccgtgtaaatgttaccttctctccatgctgccattatgccaaaacaaaagctgtgataaaaaaagtgcttgagagagtgtgttgataagaaagtgatttatttacagatggaagtctttgtttcatgaagctaccaaactttaaaaagaatgtcacccttttttttgtttgttatggaaaccagagattgtaaaatggaaaaagaatcgttttttttgttgactttttgatgctggcacgaggtttttgtccacttttttcatatatctgtgtataaaaaaattgttgtttactatggaattagtattacattttgaggtaaacaaaagaatttgtattgcttgataaatattagcttgtaaatttaaagtttctttacttcaattaacttaaaggaccaataaacccataaaagatgctt

SEQ ID NO: 600 - DNA, 2243 bp, Homo sapiens
ggacgtcgaggcattacaatcgcgaaaccaagccatagcatgaaacagcgagcttgcagcctcaccgacgagtctcaactaaaagggactcccggagctaggggtggggactcggcctcacacagtgagtgccggctattggacttttgtccagtgacagctgagacaacaaggaccacgggaggaggtgtaggagagaagcgccgcgaacagcgatcgcccagcaccaagtccgcttccaggctttcggtttctttgcctccatcttgggtgcgccttcccggcgtctaggggagcgaaggctgaggtggcagcggcaggagagtccggccgcgacaggacgaactcccccactggaaaggattctgaaagaaatgaagtcagccctcagaaatgaagttgactgcctgctggctttcctgttgactggcccggagctgtactgcaagacccttgtgagcttccctagtctaagagtaggatgtctgctgaagtcatccatcaggttgaagaagcacttgatacagatgagaaggagatgctgctctttttgtgccgggatgttgctatagatgtggttccacctaatgtcagggaccttctggatattttacgggaaagaggtaagctgtctgtcggggacttggctgaactgctctacagagtgaggcgatttgacctgctcaaacgtatcttgaagatggacagaaaagctgtggagacccacctgctcaggaaccctcaccttgtttcggactatagagtgctgatggcagagattggtgaggatttggataaatctgatgtgtcctcattaattttcctcatgaaggattacatgggccgaggcaagataagcaaggagaagagtttcttggaccttgtggttgagttggagaaactaaatttggttgccccagatcaactggatttattagaaaaatgcctaaagaacatccacagaatagacctgaagacaaaaatccagaagtacaagcagtctgttcaaggagcagggacaagttacaggaatgttctccaagcagcaatccaaaagagtctcaaggatccttcaaataacttcaggctccataatgggagaagtaaagaacaaagacttaaggaacagcttggcgctcaacaagaaccagtgaagaaatccattcaggaatcagaagcttttttgcctcagagcatacctgaagagagatacaagatgaagagcaagcccctaggaatctgcctgataatcgattgcattggcaatgagacagagcttcttcgagacaccttcacttccctgggctatgaagtccagaaattcttgcatctcagtatgcatggtatatcccagattcttggccaatttgcctgtatgcccgagcaccgagactacgacagctttgtgtgtgtcctggtgagccgaggaggctcccagagtgtgtatggtgtggatcagactcactcagggctccccctgcatcacatcaggaggatgttcatgggagattcatgcccttatctagcagggaagccaaagatgttttttattcagaactatgtggtgtcagagggccagctggagaacagcagcctcttggaggtggatgggccagcgatgaagaatgtggaattcaaggctcagaagcgagggctgtgcacagttcaccgagaagctgacttcttctggagcctgtgtactgcggacatgtccctgctggagcagtctcacagctcaccgtccctgtacctgcagtgcctctcccagaaactgagacaagaaagaaaacgcccactcctggatcttcacattgaactcaatggctacatgtatgattggaacagcagagtttctgccaaggagaaatattatgtctggctgcagcacactctgagaaagaaacttatcctctcctacacataagaaaccaaaaggctgggcgtagtggctcacacctgtaatcccagcactttgggaggccaaggagggcagatcacttcaggtcaggagttcgagaccagcctggccaacatggtaaacgctgtccctagtaaaaatgcaaaaattagctgggtgtgggtgtgggtacctgtgttcccagttacttgggaggctgaggtgggaggatcttttgaacccaggagttcagggtcatagcatgctgtgattgtgcctacgaatagccactgcataccaacctgggcaatatagcaagatcccatctctttaaaaaaaaaaaaaa

SEQ ID NO: 601 - DNA, 1993 bp, Homo sapiens
ctcaggctcagctccgtctcgctcggtccctcgcttccccgccgggctctagccggccgtctggtggcccgaggtggcggcgggctgggcgcggggcgcgatgagcggcgcctgcacgagctacgtgagcgcagagcaggaggtggtgcgcggcttcagctgcccgcggccggggggcgaggcggccgctgtcttctgctgcggcttccgcgaccacaagtactgctgcgacgacccgcacagcttcttcccctacgagcacagctacatgtggtggctcagagatggggtttcaccatgttgcccaggctggtcttgaattcctggactcaagtgatcggcccaccttgtcatcccaaagtgctgagattacagcattggcgctctcataggcctgtccgtagcagcagtggttcttctcgccttcattgttaccgcctgtgtgctctgctacctgttcatcagctctaagccccacacaaagttggacctgggcttgagcttacagacagcaggacctgtgcaggttgccacaaacaagaggaatcagacagttctcaccctcaaggggctcacatggaggacaaggcaggcacacaaatggccaggaggcccagtggtggcccttcatggggctttagggaggaagaaatgatgtctgagctgaatcatcaaagatgactcaaagtttccaggtggttcctaacttcctggcaacaaccacaattgtaattcgttcaaagagattgactgctgtggagacagatcatcaccatcaccatcaccatcaccatcaccaccaccaccatcatcatcattgtcatcgtcatcattatgttgcttttagctcactggagcctcacagaaccctgtgagggcatggacagatcttcctcagaggaggcctcagcaagtgtcagccacacgaatgagtgtatggagcaaaggaggagtgaacgtctaggagaccagccgttaccccaactcctccccatccgctcctactctggactccaatctatgccctaccccagctcttggatttggcctttggatcaggttcttctggtaatgaagcctcacctttcccccaactaactctgatctggcctaccctgctcctgactaacctcaaggatcctgagtctccttcagcctaacagctccagaagctgaactccagccctaagagccccagctgcagacaggcctctggccaagagcttagtcaggctaccctgactaagccacagggttggcatgccctctgggcagcccctgaaccgggctctgaaaacacaggaatggacaaggtaatctacccgagtcctgagcctgcaaggtagttgagacagatcttgaaggagagtgggcacagtcagaaaggaaaaagtggctcagtgtaaaataaaactgacacaagcccatgtaccagcagccaattggatctttttttttttttttttttttgagatggggcttctcttattgcccaggctggtcttgaacttctgagctcaagcgatcctcccaccttggcctaccaaagtgctgggattacaggcgtgaaccaccaattggatctttactggacccctacagggcactgagctagggaatgttggagattcagaggctgaatcagatagcagcccaaccctgagatacaactgagctacaggcaagaggatactaccgggcgcagtggctcacacctgtaatcccagcactttgggaggccgaggcgggtggatcatgtgaggccaggagttcgagaataccctggccaacatggtgaaaccccatctctgttaaaaatacaaaaattagctggggttggtggcacatgcctgtaaacctagctacttgagaggctgagacacgagaatcacttgaacctgggaggtggaggttgcagtgagctgtgatcacgccactgcaccccagcctgggtgacagagcgagactctgtctcaaaaaaaaaaaaaaaaaa

SEQ ID NO: 602 - DNA, 1720 bp, Homo sapiens
cccaggcccagacgcaggcttcttctcctcgggtcttggtcctgcatcctctctctcccagagcctccgttagggggtgggaaaggactttgccataggtcgctgaggccaccatctgctctcttactggccaagggcgtaaaaagatagtcctcccattagctagagagcaaaccccagaaagcctattggctgcgccgtccgcgggccttggtccgctttgaaggcgggctgcggctgcgagaggagggcgggcgggaggctagctgttgtcgtggttgctcggaggcacgtgtgcagtcccggaagcggcgaggggaaactgctccgcgcgcgccgcgggaggaggaaccgcccggtcctttagggtccgggcccggccgggccatggattcaatgcctgagcccgcgtcccgctgtcttctgcttcttcccttgctgctgctgctgctgctgctgctgccggccccggagctgggcccgagccaggccggagctgaggagaacgactgggttcgcctgcccagcaaatgcgaagtgtgtaaatatgttgctgtggagctgaagtcagcctttgaggaaaccggcaagaccaaggaggtgattggcacgggctatggcatcctggaccagaaggcctctggagtcaaatacaccaagtcggacttgcggttaatcgaagtcactgagaccatttgcaagaggctcctggattatagcctgcacaaggagaggaccggcagcaatcgatttgccaagggcatgtcagagacctttgagacattacacaacctggtacacaaaggggtcaaggtggtgatggacatcccctatgagctgtggaacgagacttctgcagaggtggctgacctcaagaagcagtgtgatgtgctggtggaagagtttgaggaggtgatcgaggactggtacaggaaccaccaggaggaagacctgactgaattcctctgcgccaaccacgtgctgaagggaaaagacaccagttgcctggcagagcagtggtccggcaagaagggagacacagctgccctgggagggaagaagtccaagaagaagagcagcagggccaaggcagcaggcggcaggagtagcagcagcaaacaaaggaaggagctgggtggccttgagggagaccccagccccgaggaggatgagggcatccagaaggcatcccctctcacacacagcccccctgatgagctctgagcccacccagcatcctctgtcctgagacccctgattttgaagctgaggagtcaggggcatggctctggcaggccgggatggccccgcagccttcagcccctccttgccttggctgtgccctcttctgccaaggaaagacacaagccccaggaagaactcagagccgtcatgggtagcccacgccgtcctttcccctccccaagtgtttctctcctgacccagggttcaggcaggccttgtggtttcaggactgcaaggactccagtgtgaactcaggaggggcaggtgtcagaactgggcaccaggactggagccccctccggagaccaaactcaccatccctcagtcctccccaacagggtactaggactgcagccccctgtagctcctctctgcttacccctcctgtggacaccttgcactctgcctggcccttcccagagcccaaagagtaaaaatgttctggttctgaaaaaaaaaaaaaaaaaaaaaaaaa

SEQ ID NO: 603 - DNA, 1593 bp, Homo sapiens
cagacgcaggcttcttctcctcgggtcttggtcctgcatcctctctctcccagagcctccgttagggggtgggaaaggactttgccataggtcgctgaggccaccatctgctctcttactggccaagggcgtaaaaagatagtcctcccattagctagagagcaaaccccagaaagcctattggctgcgccgtccgcgggccttggtccgctttgaaggcgggctgcggctgcgagaggagggcgggcgggaggctagctgttgtcgtggttgctcggaggcacgtgtgcagtcccggaagcggcgaggggaaactgctccgcgcgcgccgcgggaggaggaaccgcccggtcctttagggtccgggcccggccgggccatggattcaatgcctgagcccgcgtcccgctgtcttctgcttcttcccttgctgctgctgctgctgctgctgctgccggccccggagctgggcccgagccaggccggagctgaggagaacgactgggttcgcctgcccagcaaatgcgaagggacttgcggttaatcgaagtcactgagaccatttgcaagaggctcctggattatagcctgcacaaggagaggaccggcagcaatcgatttgccaagggcatgtcagagacctttgagacattacacaacctggtacacaaaggggtcaaggtggtgatggacatcccctatgagctgtggaacgagacttctgcagaggtggctgacctcaagaagcagtgtgatgtgctggtggaagagtttgaggaggtgatcgaggactggtacaggaaccaccaggaggaagacctgactgaattcctctgcgccaaccacgtgctgaagggaaaagacaccagttgcctggcagagcagtggtccggcaagaagggagacacagctgccctgggagggaagaagtccaagaagaagagcagcagggccaaggcagcaggcggcaggagtagcagcagcaaacaaaggaaggagctgggtggccttgagggagaccccagccccgaggaggatgagggcatccagaaggcatcccctctcacacacagcccccctgatgagctctgagcccacccagcatcctctgtcctgagacccctgattttgaagctgaggagtcaggggcatggctctggcaggccgggatggccccgcagccttcagcccctccttgccttggctgtgccctcttctgccaaggaaagacacaagccccaggaagaactcagagccgtcatgggtagcccacgccgtcctttcccctccccaagtgtttctctcctgacccagggttcaggcaggccttgtggtttcaggactgcaaggactccagtgtgaactcaggaggggcaggtgtcagaactgggcaccaggactggagccccctccggagaccaaactcaccatccctcagtcctccccaacagggtactaggactgcagccccctgtagctcctctctgcttacccctcctgtggacaccttgcactctgcctggcccttcccagagcccaaagagtaaaaatgttctggttctgaaaaaaaaaaaaaaaaaaaaaaaaaaaaaa

SEQ ID NO: 604 - DNA, 1255 bp, Homo sapiens
gccggaagtgggttgacgtagcccggaaggggaatacttccaagttgtagtgttgttgttttcagcctgctgctgctgctgctgttgcggctaggggaaccgtcgtggggaaggatggtgtgcgaaaaatgtgaaaagaaacttggtactgttatcactccagatacatggaaagatggtgctaggaataccacagaaagtggtggaagaaagctgaatgaaaataaagctttgacttcaaaaaaagcaagatttgatccatatggaaagaataagttctccacttgtagaatttgtaaaagttctgtgcaccaaccaggttctcattactgccagggctgtgcctacaaaaaaggcatctgtgcgatgtgtggaaaaaaggttttggataccaaaaactacaagcaaacatctgtctagatgtattgatggaatttctggctttctaaatgattttactttctgccttgaattttcaaggcatagatgtcaacttacagaataacatgttttaagataattaagtttaaaccagagaatttgattgttactcattttgctctcatgttctaaacagcaacagtgtaactagtcttttgttgtaaatggttattttccttataagaattttaagaactaagtggcaaattccatgaaaatatttctcagttctgtatgcacttttatttaacattattcatataattctccccccaccactttatttatagatactgcaaaagtgagaaggagataatagatactttgctctgaatttggcatccagagttaacatttctcccctcactcccttgctggtgtcatagttattagaatcagcagcctcttaactaattgcggtttcataggatatataaatgtttcaagccattattgctgaatggttctttagttattaacctagacccaaatcaaagaccagttggatttatgatattttttatttgttcttgcagccaaagtgccagtttctttaatatgtgaccaagaacacaaggagcatccatatggccaaataaatacactgaattttagaaaaacatattactttgaattcaaattgtcatgaaaaccagaacagtgtttgtccatgttgcatgtaatgaaaataaatccctgctctgagaaaagctctttgaagcaaaaaccaaactttttttttttttttttacctcctgtcttgccccctaaaagaaataaatagagcaaacatctcgaaaaaaaaaaaaaaaaa

SEQ ID NO: 605 - DNA, 988 bp, Homo sapiens
gggcgggagcggcggtccagactggggagggacgcgcaccggccaggaggcttcaagaggagggcactagggccctgcgagcggcgtcttaaccggcggcgctaggactccgcgggaaacggcgggggcggagcgggcggcaccaggacccaggggaaccgcgacgggcgggcggcgagcaggcccgggagccgggaggctgcgggcggcggcgctggacccgacgcggcgagagaggccccgagatgccgagcaagaagaagaagtacaacgcgcggttcccgccggcgcggatcaagaagatcatgcagacggacgaagagattgggaaggtggcggcggcggtgcctgtcatcatctcccgggcgctcgagctcttcctagagtcgctgttgaagaaggcctgccaggtgacccagtcgcggaacgcgaagaccatgaccacatcccacctgaagcagtgcatcgagctggagcagcagtttgacttcttgaaggacctggtggcatctgttcccgacatgcagggggacggggaagacaaccacatggatggggacaagggcgcccgcaggggccggaagccaggcagcggcggccggaagaacggtgggatgggaacgaaaagcaaggacaagaagctgtccgggacagactcggagcaggaggatgaatctgaggacacagatactgatggggaagaggagacatcacaacccccaccccaggccagccacccctctgcccactttcagagccccccgacacccttcctgcccttcgcctctactctgcctttgcccccagcgcccccgggcccctcagcacctgatgaagaggacgaagaagattacgactcctagcgccttctgccccccagaccatagccccttttagttggttttagttgctctggggggaggagagaaggtagagctgttcttaaatttattaaaaaaaaaaataaaagggaatctcagtgtctgtt

SEQ ID NO: 606 - DNA, 1754 bp, Homo sapiens
ggaaggtgcgtccgagccatggccgctgccaacccgtgggacccggcgtccgcgcctaacggcgctgggctagtgctaggccacttcatagcttcggggatggtcaatcaggagatgttaaacatgtctaagaaaacagtttcttgttttgtgaacttcaccagactacagcagatcacaaatattcaagctgaaatctaccagaaaaacctggaaattgaactcctgaaactagaaaaagatacagcagatgttgttcatcctttctttttggctcagaagtgtcatactctgcaaagcatgaataatcatttggaagcagtgctgaaagagaagagatcccttaggcaaagactgttgaaacccatgtgccaggaaaacttacctattgaagctgtttatcacagatatatggtacatttgctggagttggctgtgactttcattgagagattagaaacccaccttgaaacaattagaaatattcctcatttagctgcaaatctaaagaaaatgaaccaggctttagcaaagatggatatattggtgactgagacagaagaactggcagagaatatactcaagtggcgtaaacaacaaaacgaagtttcgtcttgtatccccaaaatattagctgaagaaagttatctttataaacatgatattataatgcctcctttaccttttacttctaaagttcatgtccaaactattaatgccaagtagtcatcaactttatttttgcttaattatgtgtagtcatatgaagtctatttctagttgactgtaacatgggtattaatagtctttgctgctggtaatactgaaagaacctgctttatattggagtatcaagatctcaggttcattaagaccaaactgacttttcctttgtttttcatatatttttattctacctttcagtaaaactagagaagctaaaaaagagccatgacaatttattaatataagtgaattaaccatttctcaggtgggaaattctctttttttaaaaatgtgtgtttatcgtctggtgtggtggctcacacctgtaatcctaacacttggggaggctgaggcgggcagatcacttaaacccaggagttcaagaccagcctgggtaacatggtgaaatcccatatctacaaaataaacaaaaaattagccgaccatggtggtgcatgcctgtagtcccagctattcgggaggctgaggtaagaggatcacctaagcctgtgaggtcatggttgcaatgagtcatgatcacgccactgcgctacagcctgggcgacacagtaagaccctgtctcaaaaaaaagaagtgtgtttctggccaggcacggtggctcacgcctgtaatcccagcactttgggaggcctaggtgggcagatcatgaggtcaggagttcgagaccagcctggccaacatggcgaaacacctgtctctactaaaaatacaaaaattaggccgggcgcagtggctcacacctgtaatcccaacactttgggaggccgacccagatgggtggatcacctgaggtcaggagtttgagaccagccttgacaacatggtgaaaccccatctctggtagaaatataaaaaattaaccgggcatggtggtggacgcctgtaatcccagctacttgggaggctgaggcagaataatcgcttgaacccaggaggcagaggttgcagtaagccaagatcgtgcctctgcactccaacctgggtgatggagcaagactccatctcc

SEQ ID NO: 607 - DNA, 2992 bp, Homo sapiens
gaggcgctgctggcgcccctgccccgcgggacgtggagaaggtggaggaggaagaagccccgttgtcgccaccgttgcatgacccgccgctcctgaggccctaccccacgcccggaccctcgacgccccccgccgggtcccccactcacgcatgggggttcggcgctaaggacccccctccctccgggggccccggggcgcgtccccttagagccatgcccggctgccccgcccgccccggaggaccctagagcagcgtcgtgggggccatggcggccgccagcggctacacggacctgcgtgagaagctcaagtccatgacgtcccgggacaactataaggcgggcagccgggaggccgccgccgctgccgcagccgccgtagccgccgcagccgcagccgccgctgccgccgaaccttaccctgtgtccggggccaagcgcaagtatcaggaggactcggaccccgagcgcagcgactatgaggagcagcagctgcagaaggaggaggaggcgcgcaaggtgaagagcggcatccgccagatgcgcctcttcagccaggacgagtgcgccaagatcgaggcccgcattgacgaggtggtgtcccgcgctgagaagggcctgtacaacgagcacacggtggaccgggccccactgcgcaacaagtacttcttcggcgaaggctacacttacggcgcccagctgcagaagcgcgggcccggccaggagcgcctctacccgccgggcgacgtggacgagatccccgagtgggtgcaccagctggtgatccaaaagctggtggagcaccgcgtcatccccgagggcttcgtcaacagcgccgtcatcaacgactaccagcccggcggctgcatcgtgtctcacgtggaccccatccacatcttcgagcgccccatcgtgtccgtgtccttctttagcgactctgcgctgtgcttcggctgcaagttccagttcaagcctattcgggtgtcggaaccagtgctttccctgccggtgcgcaggggaagcgtgactgtgctcagtggatatgctgctgatgaaatcactcactgcatacggcctcaggacatcaaggagcgccgagcagtcatcatcctcaggaagacaagattagatgcaccccggttggaaacaaagtccctgagcagctccgtgttaccacccagctatgcttcagatcgcctgtcaggaaacaacagggaccctgctctgaaacccaagcggtcccaccgcaaggcagaccctgatgctgcccacaggccacggattctggagatggacaaggaagagaaccggcgctcggtgctgctgcccacacaccggcggaggggtagcttcagctctgagaactactggcgcaagtcatacgagtcctcagaggactgctctgaggcagcaggcagccctgggaactctggctcatccttacgtagttgcccctccttttgttttgagggttttgtttttgttcattggggggtttttgttttttgttttttgttttttttgattctatatatttttccttggttttgttgcctgttagggctgaagaatagaattggccaggacctaggttctcatattcttggtattcctcctggatggaaaggctgttggcatcaataggggacagaggctgatgctggagtggccagtagaggtggtggagcagagcagccatcttttaagtggggctgtatcaggctgggtttatttaaaagcaacaaaatgttttggttaagaaaattattttgctttcagtgtaaatcttcgcagtgttctaaacaaagttcagtcttctgctcgcccctttccctcactgatgtctgcacttggttgaggtctcctggagcctcacaggctctgctgttctccacttctcacctgccatccacgccctgcaagctcatgcaaacaccctttcttcctcctgcggcagagttgttcaggttgcctgggcaggggcttaaacagtgccagcccctgccatcccaaagctattgttaagccccccaggcgtcctccacccacgcccactagcctgccatgtccacagttccttgggctgctgaggggctagtgcagtggtcctgacctctcttatcaggagcacacttctttgctggttgctccttttgagcatatgcgtgtgattatttggaacagttagacttgccacgttgggtcagttttagaaattgtttctagctagagggactggtgtccttccaagtctagcatttggggtatggaaaattgttgtggtgtgtggtagggtttttgttttcttttttgagtttttttttccccctttagtctcctggctttttcctttcccttcccttctccactggccagcttgggcctcatcctcatgtcatccttctaggaaggcgcctgccccatcttgtctgccggcagcatgcatccaaggccagagctcaggcctgcagactgggctggtgcctcctccgcttcagggtatgggagttggtgaaggggctttcaaaaaataataaggaaaaaaaggtaaagtctttggtagcttctatccactcagatcctggaaggcagcaaggttttgtggatctagattcattaggaatgtcttcttgtcagccaggccaggacccgggcttgccaagagcagaggccctcccagcaaccaggataccaccactttgggggctttgtgtacagaggtccgggtctgagacctcataggctgcagaaatctggggcagccaccatcaagaagcccctctcaggggccagaactcctttgccagcgtggatttctcaagtcgggactgcataattaaagcagttgcagttttattttttttacagcttttttcccaaaaatgatttgtagttgtgtgtgcagcacttcgccctgatatgtgtgctctacaataaaaaccaaatctaatatattttgaaaaaaaaaaaaaaaaaaaaaaaaaaaaaaa

SEQ ID NO: 608 - DNA, 730 bp, Homo sapiens
tgcgaaggtgcagcgggcgggaggcccgttgggggctcagccggctgccagaagctctcgggctctttccttccgtgcccctcacttgctcatgggcccatgcctagccctgattcgttggacagagcctttgtagacccttgtctgagaccgagctatgtggggcgacctctggctcctcccgcctgcctctgccaatccgggcactgggacagaggctgagtttgagaaagctgcagaggaggttaggcaccttaagaccaagccatcggatgaggagatgctgttcatctatggccactacaaacaagcaactgtgggcgacataaatacagaacggcccgggatgttggacttcacgggcaaggccaagtgggatgcctggaatgagctgaaagggacttccaaggaagatgccatgaaagcttacatcaacaaagtagaagagctaaagaaaaaatacgggatatgagagactggatttggttactgtgccatgtgtttatcctaaactgagacaatgccttgtttttttctaataccgtggatggtgggaattcgggaaaataaccagttaaaccagctactcaaggctgctcaccatacggctctaacagattaggggctaaaacgattactgactttccttgagtagtttttatctgaaatcaattaaaagtgtatttgttactttaaataaaaaaaaaaaaaaaaaaaaaaaaaaaaaaaa

SEQ ID NO: 609 - DNA, 1097 bp, Homo sapiens
ctctgtcctcattgcgcccagacgggccggcccagagctcccgggtcgtctttcgtgtggccgcgagacactcttgcactcctgtaatgagcctggcactgtgatgaaacacttttcccgtgtcgtttgagtgcatcttctcaacaaccctaggagggttcttgaagcttttgagattaacaatggcaggaaaatcatcactttttaaagtaattctccttggagatggtggagttgggaagagttcacttatgaacagatatgtaactaataagtttgatacccagctcttccatacaataggtgtggaatttttaaataaagatttggaagtggatggacattttgttaccatgcagatttgggacacggcaggtcaggagcgattccgaagcctgaggacaccattttacagaggttctgactgctgcctgcttacttttagtgtcgatgattcacaaagcttccagaacttaagtaactggaagaaagaattcatatattatgcagatgtgaaagagcctgagagctttccttttgtgattctgggtaacaagattgacataagcgaacggcaggtgtctacagaagaagcccaagcttggtgcagggacaacggcgactatccttattttgaaacaagtgcaaaagatgccacaaatgtggcagcagcctttgaggaagcggttcgaagagttcttgctaccgaggataggtcagatcatttgattcagacagacacagtcaatcttcaccgaaagcccaagcctagctcatcttgctgttgattgttagattgttgatgcattctaaccaactcacacatatacacaaaatcaacatggggatggagaagagaattagcgtttgcagcagtgtatcatctactaataaaattaaactaatgttgctgcttcattagttggtgggagaagggacacatccactcttggaggaatatatttactcaataatggcaccttacatttataaattgtaacagttgtctaataacgtttctttaatttaaatatgtaagttgcagagctaataaatgaaatgaccaagactttaattataaaaaaaaaaaaaaaaaa

SEQ ID NO: 610 - DNA, 3894 bp, Homo sapiens
ctctttccgggacaacatggcgccgtccacgccgctcttgacagtccgaggatcagaaggactgtacatggtgaatggaccaccacattttacagaaagcacagtgtttccaagggaatctgggaagaattgcaaagtctgtatctttagtaaggatgggaccttgtttgcctggggcaatggagaaaaagtaaatattatcagtgtcactaacaagggactactgcactccttcgacctcctgaaggcagtttgccttgaattctcacccaaaaatactgtcctggcaacgtggcagccttacactacttctaaagatggcacagctgggatacccaacctacaactttatgatgtgaaaactgggacatgtttgaaatctttcatccagaaaaaaatgcaaaattggtgtccatcctggtcagaagatgaaactctttgtgcccgcaatgttaacaatgaagttcacttctttgaaaacaacaattttaacacaattgcaaataaattgcatttgcaaaaaattaatgattttgtattatcacctggaccccaaccatacaaggtggctgtctatgttccaggaagtaaaggtgcaccttcatttgttagattatatcagtaccccaactttgctggacctcatgcagctttagctaataaaagtttctttaaggcagataaagttacaatgctgtggaataaaaaagctactgctgtgttggtaatagctagcacagatgttgacaagacaggagcttcctactatggagaacaaactctacactacattgcaacaaatggagaaagtgctgtagtgcaattaccaaaaaatggccccatttatgatgtagtttggaattctagttctactgagttttgtgctgtatatggttttatgcctgccaaagcgacaattttcaacttgaaatgtgatcctgtatttgactttggaactggtcctcgtaatgcagcctactatagccctcatggacatatattagtattagctggatttggaaatctgaggggacaaatggaagtgtgggatgtgaaaaactacaaacttatttctaaaccggtggcttctgattctacatattttgcttggtgcccggatggtgagcatattttaacagctacatgtgctcccaggttacgggttaataatggatacaaaatttggcattatactggctctatcttgcacaagtatgatgtgccatcaaatgcagaattatggcaggtttcttggcagccatttttggatggaatatttccagcaaaaacaataacttaccaagcagttccaagtgaagtacccaatgaggaacctaaagttgcaacagcttatagacccccagctttaagaaataaaccaatcaccaattccaaattgcatgaagaggaaccacctcagaatatgaaaccacaatcaggaaacgataagccattatcaaaaacagctcttaaaaatcaaaggaagcatgaagctaagaaagctgcaaagcaggaagcaagaagtgacaagagtccagatttggcacctactcctgccccacagagcacaccacgaaacactgtctctcagtcaatttctggggaccctgagatagacaaaaaaatcaagaacctaaagaagaaactgaaagcaatcgaacaactgaaagaacaagcagcaactggaaaacagctagaaaaaaatcagttggagaaaattcagaaagaaacagcccttctccaggagctggaagatttggaattgggtatttaaagattcacggaaagcaagttgatgaccagaaatcagtgcaaacacatcttctgttaaacccattggtatacacagaatattcctgtgcccacacttaatgtcaatctataattttaaccatttatccaagattctactaagtgtaaaattatttaataatgtctattaaattgatatttatatcttgcatcctatatcatgtcaatatgtgatatagaaaagagatacgtgaattttttagctaagcttgacagattgaaagacaagtgtcatttttttttgtagagggtgatatataccatgtaaatgaataaagacattttaaatttaatcactgtttttattataagttccttagttcagatatcctttattaatttataagatgtgtaaaactacttaattctcacaagactctatgaagtaattcttttaatctctattttataaatgaaaaaactaaggccataaatttaagaaatttgtcagtgtctcaaagctaggaaatggccatctaatcccagagcctatgctttaggtcactatgatatatactactcctgtatcctcaagtaatgtatcatttagtaacactaagcaccctgcttagttttcatggatactgccaaattgccctatctcaagctttatacttgcaccatttaaagttttccacactgttggcaatatcagaagtgataaggctttgaaatgttcgccactttgataaagaggaaatgattgtttgttactgttatatacatgtatttttatcagagatgggttatgtacttttccacgtttgatagttggttgtatttctttagtgaattgatttttcttttcctttgcccatttttctgtttggatgtttgactttcttcttaatttgtaagagtatcctatgtagtaacaaaatccttttttaaaaatttttaaagaaaaagtatacacacaggacttttttttttctaattcaaaaaatacaaaggcatgcaatgaaaattaagtctgttccactaccacattttccagttttttgtgtatctttctaatgatagataccatatgagtattcaaatatacatacacatacacttaaaaaaaaaagatggcatatactaactgttctgtttggggctttttggtggtggtgtttgtttgacagggtctcactctgcctcccaggttggagtgcaccttgaactcctggactcaagtgatccttcacctcctccttccaagtatctgacactacaggcttgcatcactatgcccagcttatactcaccatagtggttctgtactcccttaaaatattctggaggccaggcatgctggctcacacctgtaatcccagcaccttgggaggccaaggtgggtggatcacctgaggtcaggagttcaagaccagcctgatcaacatggtgaaaccccatctctactaaaaatacaaaagtatccaggcgtggtagcacatacctgtaatcccagctacttgggaggctgaggtaggaaaattgtttgaacccggcagacagaggttgcagtgagccgacatcgtgccattgcactccaagcctgggcaacaagagtgaaaccgtctcacacacacacaaaaaaaaatattttggagctccttctatatgagtctctctctcttatctctctcaggatgtgtgtatgtgtttgtttctctggaaaaccctgactaatacagattagctatgtattaggtaatacataatgcctaatacataactaatatatggacaggaagttaatagactgactgtgccaccttaaaactcgtatgttgaagccctaacctccaacgtggtggtattgggagatgggccttttggaaggtaagtgtgtttgaatgaggtgaagaggttggggacttcgtgatgggattattgtccttacaagaaaagacaccagagagcttgttctgtctctttgggccatgtgaagacatggtgagaaagcagccagctgtaagccagagagtcctcaccagaacctaaccatgctggtgatatcctcatctcagacttctaacctccagaactgtgagaaaataaacttctttgtttaaaccaaaaaaaaaaaaaaaa

SEQ ID NO: 611 - DNA, 3951 bp, Homo sapiens
cgcctgcttcctccgaagacttcagggagagtctgcgagctgccgtccccgcgtgtgaggcacagaagggctggatgtcagaaccgcataattattcattaaactacaaactttttttaacccaaagaatatcggtgatttttgtccactgcgaggagaagaagagagagcccagggctcatgaaatgcagcagaatccttatttataaacaggccgcggtagtgatatatgcaaccccagtctactcagtgagttttctatcctatggatatcggtcttgagagttgagattggagagcagcgccgtctgtactgggtcctgcagcctctgtcctttcaatgcctggttttttctgtgactgctggccttccctggagatcagagcgctcctgtatgccatgggctgtattcagagcatcggaggcaaagccagagtcttccgggaagggatcacggtgattgatgtgaaagcctccatcgaccccgtccccactagcatcgatgagtcctccagcgtggtgctccgctaccggacaccccacttccgggcctcggcccaggtggtcatgccgcccatccccaagaaggagacttgggtagttggctggatccaggcgtgcagccacatggagttctacaaccagtacggcgagcagggcatgtccagctgggagctccccgacctccaggagggcaagatccaagccatcagcgactcggacggggtgaactacccctggtacggcaacaccacagagacctgcaccatcgtgggccccaccaagagggactccaagttcatcatcagcatgaatgacaacttctaccccagcgtcacatgggccgtgcccgtcagcgagagcaacgtggccaagctcaccaacatctaccgggaccagagcttcaccacctggctggtggccaccaacacctccaccaacgacatgatcatcctgcagacgctgcactggcgcatgcagctcagcatcgaggtgaaccccaaccggcccctgggccagcgcgcccggctgcgggagcccatcgcccaggaccagcccaaaatcctgagcaagaatgagcccatcccgcccagcgccctggtcaagcccaatgccaacgatgcccaggtcctcatgtggcggcccaagtacgggcagccgctggtggtgatcccgcccaagcaccggtgacagccaggaccacccgctaggttagactcacaaataataataccgctgaaaacaaaactcagactcactcttcagtcattcagcaagatacaaccattctaccctctccagcgggcggatctcactgtgctgatgcccccgggaaggcctccccggctctcggcacctgcttcctttcagggagaggggagatctaagcaggacagacagaccccacgtgcgccctcagggtgacctctggtctccttgcctctcctttttctcagtttcagtcgctcacttgtaacagattccctgaaacactgctttttccgttttttaaaaaaactcctcttttgggggctcaggggcaggaggagggggagctgattaggagggaagctccagcccccgatcaaagagacagatccacactgctgccgatttgtggcgctggccggccttccccccaggtccctccgccctctgtcatgcggccttatgtagacttgctttgccaaacttttgccttaagctgaattgaaaggaagaaaaccaatcggagaaagaaagcaggatctcttttctaccggacttttcctcttctgccagaggtggagggagggttggggtcgcccgcgagagtctcttgagcccttcttcccggttgtcttgggagaagggtgaggatgggcatttagacccgaaaccagctgctcactctttctttttggcagaaataaaaccacaggtagattctgcctgaacagccccttctctccctccacccccaggtcgtatccctgcacctgcggagaggggctgtgagctctggcggggggtggctccaccagtcgcctggcctcttctcccctctcttcccagcagccttaacttcccttgggcggctctaggaggagagaggcaggctcctgtgagcccagggaattttcaccctctcagtcctcaggacccacccccagttgagtccctggcccttcctccaggtgtgtggctttttccttctccatccacactggtcccaaatgcctgggggccggccacctggaccgccgacacacagcctcaatgttagtctcaaaggtaaggaaggcattcacgtcccttcttgcagggcattttaagacttgaatcgggtgggccccggcccctgtggctggctggcccctggtgtactgtaaaagggccaagacagggctcgttctcaggggcgcccctcccaggccctcagggcagcgggacggtgcagtcaggctctgggtgccacagtgatggaggtggaaggcacccaagctctagggaagtcttgggaggcagtcggccgagcccctgcttcctgtcctcaaataagtgaatccaggccaagggctgggagggctgggtgggcttatcgtcgagagggttcagagccactctggaggctgggctggcacagtggagagcgacaggtgaggacagacgtctggaagcccatccctgggacctgccctcccttggtcccaggtcactggagctccagggcttacttagtcctgacccattgtgccagggttctgagcagtgtcggccttgtggccacttgcaggggctattaggggacatcccgctgaagccacgctccttccagcttgccaaacccacagctacccgcccgggacccacactcagcctaataattatcaagcacagaaaaccgtccatttagaaaaataatccatttctgctgcagatgagccacttgtaagagtctccgtgacagcgtgggacggtgtgggaaccaaagtccctgccctgctcctttgtccacgggctattgcgtttattcaaggggtgcttaatgaccgtttagccactgccgtcggtctccgggcccagctcgtgccaggaggctgtcctgggacacactgggctggagctgccggctggcacggtgctcagggggcccctgatgggggccaggacctccccgcagaaactgcaggttctcttgtgaggatggaggccgtgccaccccgaaaggcagtagccttaggggaacagtgggtcccagctgcatgtctgaggatgggtggggacagggctgggactcagctttcattcactggagacttctccactcaggtctttgttgcactaaagcagggacaggaccctgggggttcaggaagcgggtctcaggccgctggtttattcctggaggtggggctggagaccagaatggaaaggggcttcctgagctgctagggggtgaaggacccccgaacccgcatttcttgagtgagagcaaacactcgaggcaggagccagcacccctcccactgcatgcccggcccccagcccaccttgccccctgacccaccttcacccgtgccccttctttctgcccttcctcaccgaagaagggctaggaacaccctggagaggctgcaggtccggccacggacgctcagctgagccccggtctgctccttcagcctccttgctcttgttggagcacaggccccaggcttcctgccagggccccgattcttcttatgtcctccagccccgccctggcgtggacatccactcactccttccagcaataagaaccgtccttggtcgtggagagtactgtgaaacaaaccaatgcacttaccaggaggcacaagactcttgaagaagatgtaaaatgaaccttttttttttttacaaaaaacaaaaagcaaatattcataaagagaaataaaatgtaattttaaagtaaaaaaaaaaaaaaa

SEQ ID NO: 612 - DNA, 1281 bp, Homo sapiens
tgaggagcgtggctacgttgcttccggtgcctggctccgtttcctgcttttggttcttacagtagtcggcgtaggccttaggtgggttcgtgcgccttctacctcgctgtttcggttttcctggctcctcggcccttttctcccctgttgcagctgggagcggacgaagcgcgaagctgggattttttactgtctcctgaagaatttaacacaaacatggatatcagaccaaatcatacaatttatatcaacaatatgaatgacaaaattaaaaaggaagaattgaagagatccctatatgccctgttttctcagtttggtcatgtggtggacattgtggctttaaagaccatgaagatgagggggcaggcctttgtcatatttaaggaactgggctcatccacaaatgccttgagacagctacaaggatttccattttatggtaaaccaatgcgaatacagtatgcaaaaacagattcggatataatatcaaaaatgcgtggaacttttgctgacaaagaaaagaaaaaagaaaagaaaaaagccaaaactgtggaacagactgcaacaaccacaaacaaaaagcctggccagggaactccaaattcagctaatacccaaggaaattcaacaccaaatcctcaggtccctgattaccctccaaactatattttattccttaataacttaccagaagagactaatgagatgatgttatccatgctgtttaatcagttccctggcttcaaggaagtacgtctggtaccagggaggcatgacattgcttttgttgaatttgaaaatgatgggcaggctggagctgccagggatgctttacagggatttaagatcacaccgtcccatgctatgaagatcacctatgccaagaaataacatttgggatagtcgtctttaaaagacttggtgttatttacagtgtttgttttgataacatttggctgggtcattttaatagttagagatgaggaggagtaaaagtgaaatttttgtgaaggacttaaattatccagtgtttctttagccttggtgaactatgaaatacgaaggccttaattttgtacaataaacttttatttgtattctgtgtatataatgctttcttgattgacccatctccctatcatcaaatgacttctagtctagaacacacttaaggtttataaacttgtgtaataggatgcttttctagtgttactttggaggagctaattatacaacatcattgaaccattcaataaaagttaagtaaaattagatcac

SEQ ID NO: 613 - DNA, 1181 bp, Homo sapiens
tgaggagcgtggctacgttgcttccggtgcctggctccgtttcctgcttttggttcttacagtagtcggcgtaggccttagattttttactgtctcctgaagaatttaacacaaacatggatatcagaccaaatcatacaatttatatcaacaatatgaatgacaaaattaaaaaggaagaattgaagagatccctatatgccctgttttctcagtttggtcatgtggtggacattgtggctttaaagaccatgaagatgagggggcaggcctttgtcatatttaaggaactgggctcatccacaaatgccttgagacagctacaaggatttccattttatggtaaaccaatgcgaatacagtatgcaaaaacagattcggatataatatcaaaaatgcgtggaacttttgctgacaaagaaaagaaaaaagaaaagaaaaaagccaaaactgtggaacagactgcaacaaccacaaacaaaaagcctggccagggaactccaaattcagctaatacccaaggaaattcaacaccaaatcctcaggtccctgattaccctccaaactatattttattccttaataacttaccagaagagactaatgagatgatgttatccatgctgtttaatcagttccctggcttcaaggaagtacgtctggtaccagggaggcatgacattgcttttgttgaatttgaaaatgatgggcaggctggagctgccagggatgctttacagggatttaagatcacaccgtcccatgctatgaagatcacctatgccaagaaataacatttgggatagtcgtctttaaaagacttggtgttatttacagtgtttgttttgataacatttggctgggtcattttaatagttagagatgaggaggagtaaaagtgaaatttttgtgaaggacttaaattatccagtgtttctttagccttggtgaactatgaaatacgaaggccttaattttgtacaataaacttttatttgtattctgtgtatataatgctttcttgattgacccatctccctatcatcaaatgacttctagtctagaacacacttaaggtttataaacttgtgtaataggatgcttttctagtgttactttggaggagctaattatacaacatcattgaaccattcaataaaagttaagtaaaattagatcac

SEQ ID NO: 614 - DNA, 2676 bp, Homo sapiens
gttccggcgaggaggccgcgccagtgacagcgatggcggcggagtcggcgctccaagttgtggagaagctgcaggcgcgcctggccgcgaacccggaccctaagaagctattgaaatatttgaagaaactctccaccctgcctattacagtagacattcttgcggagactggggttgggaaaacagtaaatagcttgcgaaaacacgagcatgttggaagctttgccagggacctagtggcccagtggaagaagctggttcctgtggaacgaaatgctgagcctgatgaacaggactttgagaagagcaattcccgaaagcgccctcgggatgccctgcagaaggaggaggagatggagggggactaccaagaaacctggaaagccacggggagccgatcctatagccctgaccacaggcagaagaaacataggaaactctcggagctcgagagacctcacaaagtgtctcacggtcatgagaggagagatgagagaaagaggtgtcacagaatgtcaccaacttactcttcagaccctgagtcttctgattatggccatgttcaatcccctccatcttgtaccagtcctcatcagatgtacgtcgaccactacagatccctggaggaggaccaggagcccattgtttcacaccagaagcctgggaaaggccacagcaatgcctttcaggacagactcggggccagccaagaacgacacctgggtgaaccccatgggaaaggggttgtgagtcaaaacaaggagcacaaatcttcccacaaggacaaacgccccgtggatgccaagagtgatgagaaggcctctgtggtgagcagagagaaatcacacaaggccctctccaaagaggagaaccgaaggccaccctcaggggacaatgcaagggagaaaccgccctctagtggcgtaaagaaagagaaggacagagagggcagcagcctgaagaagaagtgtttgcctccctcagaggccgcttcagacaaccacctgaaaaagccaaagcacagagacccagagaaagccaaattggacaaaagcaagcaaggtctggacagctttgacacaggaaaaggagcaggagacctgttgcccaaggtaaaagagaagggttctaacaacctaaagactccagaagggaaagtcaaaactaatttggatagaaagtcactgggctccctccctaaagttgaggagacagatatggaggatgaattcgagcagccaaccatgtcttttgaatcctacctcagctatgaccagccccggaagaaaaagaaaaagattgtgaaaacttcagccacggcacttggagataaaggacttaaaaaaaatgactctaaaagcactggtaaaaacttggactcagttcagaaattacccaaggtgaacaaaaccaagtcagagaagccggctggagctgatttagccaagctgagaaaggtgcctgatgtgttgccagtgttgccagacctcccgttacccgcgatacaggccaattaccgtccactgccttccctcgagctgatatcctccttccagccaaagcgaaaagcgttctcttcaccccaggaagaagaagaagctggatttactgggcgcagaatgaattccaagatgcaggtgtattctggttccaagtgtgcctatctccctaaaatgatgaccttgcaccagcaatgcatccgagtacttaaaaacaacatcgattcaatctttgaagtgggaggagtcccatactctgttcttgaacccgttttggagaggtgtacacctgatcagctgtatcgcatagaggaatacaatcatgtattaattgaagaaacagatcaattatggaaagttcattgtcaccgagactttaaggaagaaagacccgaagagtatgagtcgtggcgagagatgtacctgcggcttcaggacgcccgagagcagcggctacgagtactaacaaagaatatccagttcgcacatgccaataagcccaaaggccgacaagcaaagatggcctttgtcaactctgtggccaagccacctcgtgacgtccggaggaggcaggaaaagtttggaacgggaggagcagctgtccctgagaaaatcaagatcaagccagccccgtaccccatgggaagcagccatgcttccgccagtagcatcagctttaaccccagccctgaggagccggcctatgatggcccaagcaccagcagtgcccacttggcaccagtggtcagcagcactgtttcctatgatcctaggaaacccactgtgaagaaaattgccccaatgatggccaagacaattaaagctttcaagaacagattctcccgacgataaactgaggacttgccttggaaatggaatctggggaggcaggaatacaaggacagtgggggttggggaatggaattctacaggagactggagtcttgctttgtggatccttttggtctccgagtctgcagtctgcaggtgctgcccctgggaacctgcgtgccacagccccgcctccctgcctggagcacactttagaattctgaagatgtgaagcctctgtctcactgaggattttaaaggtcaattatacttttgttgttcattagcatctttgtaaactataagacgtagttttaattaataaatattgcccccagatgttaaa

SEQ ID NO: 615 - DNA, 2312 bp, Homo sapiens
ggatgagtctcaagatggacaaccgggatgttgcaggaaaggctaaccggtggtttggggttgctccccctaaatctggaaaaatgaacatgaacatccttcaccaggaagagctcatcgctcagaagaaacgggaaattgaagccaaaatggaacagaaagccaagcagaatcaggtggccagccctcagcccccacatcctggcgaaatcacaaatgcacacaactcttcctgcatttccaacaagtttgccaacgatggtagcttcttgcagcagtttctgaagttgcagaaggcacagaccagcacagacgccccgaccagtgcgcccagcgcccctcccagcacacccacccccagcgctgggaagaggtccctgctcatcagcaggcggacaggcctggggctggccagcctgccgggccctgtgaagagctactcccacgccaagcagctgcccgtggcgcaccgcccgagtgtcttccagtcccctgacgaggacgaggaggaggactatgagcagtggctggagatcaaagtgtgtctcaccaagacagtgagaccgactcccccctcgtcatggtgttttgtgcctggactcgggacgcccgacagcctcctgcatctcacactcttctccccccaccccctctgtcgttgtggtccatagagagagtgtgcctattgactgtggggtgtgtgagttgaaccccagtactgacagcctccttaaagtttcacccccagagggagccgagactcggaaagtgatagagaaattggcccgctttgtggcagaaggaggccccgagttagaaaaagtagctatggaggactacaaggataacccagcatttgcatttttgcacgataagaatagcagggaattcctctactacaggaagaaggtggctgagataagaaaggaagcacagaagtcgcaggcagcctctcagaaagtttcacccccagaggacgaagaggtcaagaaccttgcagaaaagttggccaggttcatagcggacgggggtcccgaggtggaaaccattgccctccagaacaaccgtgagaaccaggcattcagctttctgtatgagcccaatagccaagggtacaagtactaccgacagaagctggaggagttccggaaagccaaggccagctccacaggcagcttcacagcacctgatcccggcctgaagcgcaagtcccctcctgaggccctgtcagggtccttacccccagccaccacctgccccgcctcgtccacgcctgcgcccactatcatccctgctccagctgcccccgggaagccagcctccgcagccaccgtgaagaggaagcggaagagccggtgggggcctgaagaggataaggtagagctcccacctgctgaactggtgcagagggacgtggatgcctctccctcgcctctgtcagttcaggacctcaaggggctcggctatgagaaggggaagcctgtgggtctagtgggcgtcacagagctttcagacgcccagaagaagcagctgaaggagcagcaggagatgcagcagatgtacgacatgatcatgcagcacaagcgggccatgcaggacatgcagctgctgtgggagaaggcagtccaacagcaccagcacggctatgacagtgatgaggaggtggacagcgagctgggcacctgggagcaccagctgcggcgcatggagatggataagaccagggaatgggccgagcagctgacaaagatgggccggggcaagcacttcatcggagacttcctgcctccagacgagctggaaaagtttatggagaccttcaaggccctgaaggagggccgtgagcctgactactcagagtacaaggagttcaagctgactgtggagaacatcggctaccagatgctgatgaagatgggctggaaggagggcgaggggctgggctcagagggccagggcatcaagaacccagtgaacaagggcaccaccacagtggacggcgctggcttcggcattgaccggccggcggagctctccaaggaggacgacgagtatgaggcgttccgcaagaggatgatgctggcctaccgcttccggcccaaccccctgaacaatcccagacggccttactactgagtgttctggaaatacatactttctgaatgaccaaccgtccctggactgtggaatgttccggcctgcatttctgcccaccccttccgttgtcacgagtgccgtgccgtgtaataaagtcccagtgctcatccaccaaaaaaaaaaaaaaaaaaaaaaaaaaaaaaaaaaaaaaaaaa

SEQ ID NO: 616 - DNA, 2101 bp, Homo sapiens
ggatgagtctcaagatggacaaccgggatgttgcaggaaaggctaaccggtggtttggggttgctccccctaaatctggaaaaatgaacatgaacatccttcaccaggaagagctcatcgctcagaagaaacgggaaattgaagccaaaatggaacagaaagccaagcagaatcaggtggccagccctcagcccccacatcctggcgaaatcacaaatgcacacaactcttcctgcatttccaacaagtttgccaacgatggtagcttcttgcagcagtttctgaagttgcagaaggcacagaccagcacagacgccccgaccagtgcgcccagcgcccctcccagcacacccacccccagcgctgggaagaggtccctgctcatcagcaggcggacaggcctggggctggccagcctgccgggccctgtgaagagctactcccacgccaagcagctgcccgtggcgcaccgcccgagtgtcttccagtcccctgacgaggacgaggaggaggactatgagcagtggctggagatcaaagtttcacccccagagggagccgagactcggaaagtgatagagaaattggcccgctttgtggcagaaggaggccccgagttagaaaaagtagctatggaggactacaaggataacccagcatttgcatttttgcacgataagaatagcagggaattcctctactacaggaagaaggtggctgagataagaaaggaagcacagaagtcgcaggcagcctctcagaaagtttcacccccagaggacgaagaggtcaagaaccttgcagaaaagttggccaggttcatagcggacgggggtcccgaggtggaaaccattgccctccagaacaaccgtgagaaccaggcattcagctttctgtatgagcccaatagccaagggtacaagtactaccgacagaagctggaggagttccggaaagccaaggccagctccacaggcagcttcacagcacctgatcccggcctgaagcgcaagtcccctcctgaggccctgtcagggtccttacccccagccaccacctgccccgcctcgtccacgcctgcgcccactatcatccctgctccagctgcccccgggaagccagcctccgcagccaccgtgaagaggaagcggaagagccggtgggggcctgaagaggataaggtagagctcccacctgctgaactggtgcagagggacgtggatgcctctccctcgcctctgtcagttcaggacctcaaggggctcggctatgagaaggggaagcctgtgggtctagtgggcgtcacagagctttcagacgcccagaagaagcagctgaaggagcagcaggagatgcagcagatgtacgacatgatcatgcagcacaagcgggccatgcaggacatgcagctgctgtgggagaaggcagtccaacagcaccagcacggctatgacagtgatgaggaggtggacagcgagctgggcacctgggagcaccagctgcggcgcatggagatggataagaccagggaatgggccgagcagctgacaaagatgggccggggcaagcacttcatcggagacttcctgcctccagacgagctggaaaagtttatggagaccttcaaggccctgaaggagggccgtgagcctgactactcagagtacaaggagttcaagctgactgtggagaacatcggctaccagatgctgatgaagatgggctggaaggagggcgaggggctgggctcagagggccagggcatcaagaacccagtgaacaagggcaccaccacagtggacggcgctggcttcggcattgaccggccggcggagctctccaaggaggacgacgagtatgaggcgttccgcaagaggatgatgctggcctaccgcttccggcccaaccccctgaacaatcccagacggccttactactgagtgttctggaaatacatactttctgaatgaccaaccgtccctggactgtggaatgttccggcctgcatttctgcccaccccttccgttgtcacgagtgccgtgccgtgtaataaagtcccagtgctcatccaccaaaaaaaaaaaaaaaaaaaaaaaaaaa

SEQ ID NO: 617 - DNA, 2673 bp, Homo sapiens
attgtgggattggatgagtctcaagatggacaaccgggatgttgcaggaaaggctaaccggtggtttggggttgctccccctaaatctggaaaaatgaacatgaacatccttcaccaggaagagctcatcgctcagaagaaacgggaaattgaagccaaaatggaacagaaagccaagcagaatcaggtggccagccctcagcccccacatcctggcgaacgccccgaccagtgcgcccagcgcccctcccagcacacccacccccagcgctgggaagaggtccctgctcatcagcaggcggacaggcctggggctggccagcctgccgggccctgtgaagagctactcccacgccaagcagctgcccgtggcgcaccgcccgagtgtcttccagtcccctgacgaggacgaggaggaggactatgagcagtggctggagatcaaagtgtgtctcaccaagacagtgagaccgactcccccctcgtcatggtgttttgtgcctggactcgggacgcccgacagcctcctgcatctcacactcttctccccccaccccctctgtcgttgtggtccatagagagagtgtgcctattgactgtggggtgtgtgagttgaaccccagtactgacagcctccttaaagtttcacccccagagggagccgagactcggaaagtgatagagaaattggcccgctttgtggcagaaggaggccccgagttagaaaaagtagctatggaggactacaaggataacccagcatttgcatttttgcacgataagaatagcagggaattcctctactacaggaagaaggtggctgagataagaaaggaagcacagaagtcgcaggcagcctctcagaaagtttcacccccagaggacgaagaggtcaagaaccttgcagaaaagttggccaggttcatagcggacgggggtcccgaggtggaaaccattgccctccagaacaaccgtgagaaccaggcattcagctttctgtatgagcccaatagccaagggtacaagtactaccgacagaagctggaggagttccggaaagccaaggccagctccacaggcagcttcacagcacctgatcccggcctgaagcgcaagtcccctcctgaggccctgtcagggtccttacccccagccaccacctgccccgcctcgtccacgcctgcgcccactatcatccctgctccagctgcccccgggaagccagcctccgcagccaccgtgaagaggaagcggaagagccggtgggggcctgaagaggataaggtagagctcccacctgctgaactggtgcagagggacgtggatgcctctccctcgcctctgtcagttcaggacctcaaggggctcggctatgagaaggggaagcctgtgggtctagtgggcgtcacagagctttcagacgcccagaagaagcagctgaaggagcagcaggagatgcagcagatgtacgacatgatcatgcagcacaagcgggccatgcaggacatgcagctgctgtgggagaaggcagtccaacagcaccagcacggctatgacagtgatgaggaggtggacagcgagctgggcacctgggagcaccagctgcggcgcatggagatggataagaccagggaatgggccgagcagctgacaaagatgggccggggcaagcacttcatcggagacttcctgcctccagacgagctggaaaagtttatggagaccttcaaggccctgaaggagggccgtgagcctgactactcagagtacaaggagttcaagctgactgtggagaacatcggctaccagatgctgatgaagatgggctggaaggagggcgaggggctgggctcagagggccagggcatcaagaacccagtgaacaagggcaccaccacagtggacggcgctggcttcggcattgaccggccggcggagctctccaaggaggacgacgagtatgaggcgttccgcaagaggatgatgctggcctaccgcttccggcccaaccccctgaacaatcccagacggccttactactgagtgttctggaaatacatactttctgaatgaccaaccgtccctcgactgtggaatgttccggcctgcatttctgcccaccccttccgttgtcacgagtgccgtgccgtgtaataaagtcccagtgctcatccaccacagatgcctggtcctgttgcaggaagcccctcctgttagcagcgggatgcaagatgctgtctcggggctctccttattggcctgtggagtctccatccccgctcagcctgggttgcactggaggggaggaagaaagttgttttcagcatagtaaagctggaaggccaggtgcagtgtctcacccctgtcatcccagcactttgagaggccaaggcgggcggatcactggaggtcaggagtttaagaccagcctggccaacatggtgaaatcctgtctctactaaaaatataaaattagctgggcatggtggtgcacacctgtcgtctcagctactcgggaggcagaggcaggagaatggcttgaacctgggaagcggttgcagtgagccaagattgcgcctttgcactccagcctgggcaagagagcaagactctgtctcaaataataataataataataaagctggagacttggccacacctgggctaaaggaa

SEQ ID NO: 618 - DNA, 5493 bp, Homo sapiens
tcggtcctcagaggaggggcccgggcaccctccgtgcgggccgcagcacgccggtctttgagggacccttggactcccggatctgcatgcgagggatgcggtcgaagacgagatgagggagctgacgggaggggaaacggaggggcaggtgaacatggagagagcaggaacagggagagagtagggacagcgactgggagacgcgctccacagaaacccggactgagaggcagcgagaggacagagtctggctctgtcgcccaggcgggaatgcagtggcgcaatcttggctcaccgcaacctctgcctccctggttcaagcaattctcatgcctcagcctcccaagcagctgggactacagacatctgaatgggactccgagtgccttacatccctgcagccccttcctcttcctacacccccagcagcaaatgaggcacacctgcagacagcagctatctctctgtggacagtggtggccgccgtgcaggctatagagaggaaggtggagatccacagccggcgactcctacacctggaaggtcggacagggacagcagagaagaaactagccagctgtgaaaagacagttaccgagcttgggaaccagctggagggcaagtgggccgtgctgggaaccctgctgcaggagtacgggctgctgcagaggcggctggagaacttggagaacctgctgcgcaacaggaacttctggatcctgcggctccctccaggtattaagggagatatcccaaaggtgcctgtggcatttgatgatgtctccatctacttttccactccagagtgggaaaaattagaagaatggcaaaaggaactttacaagaatatcatgaagggcaactacgagtctctcatctccatggattatgctataaatcaacctgatgtcttatctcagattcaaccagaaggggaacataatacagaggaccaggcagggccagaggaaagtgagattcccacagaccccagtgaagagcctggtatttcaacatcagatattctgtcttggattaaacaagaagaagagcctcaggttggggccccaccggagtccaaggagagtgacgtgtacaaaagcacttatgctgatgaagagcttgtcatcaaagctgaaggccttgctagatcctcgttgtgccctgaggttccagtccctttctcttctccaccagcagcagcaaaggatgctttttcagatgtggctttcaaaagccagcagtctacatccatgacaccttttggacgtccagccactgacctgcctgaagcctctgagggacaagtgacttttactcagttgggtagctatcccctcccacctccagttggcgagcaggtgttctcatgccaccactgtggcaagaatctcagccaagacatgttgctgacccaccaatgtagccatgctactgagcaccccttaccctgtgcccagtgccctaagcactttactccacaggcggacctcagcagcacctcccaggaccatgccagcgagacaccccccacctgcccacactgtgccaggacttttactcacccatcaagacttacctaccatcttcgggtccataacagcactgagcgtcctttcccctgtcctgattgccccaagcgctttgctgaccaggctcgactcaccagccaccggagagctcatgcaagcgaaaggcccttccgctgtgcccagtgcggcaggagcttcagcttgaaaatcagcctcctgctccaccagcggggtcatgcacaagagcgccctttctcctgccctcagtgtggcattgacttcaacggccactcggccctgatccgccaccagatgatccacacaggcgagcgtccttacccctgcactgactgcagtaagagcttcatgcgcaaggagcacctgctgaaccaccggcggctgcacacaggcgagcggcccttcagttgtcctcactgtggcaagagcttcatccgcaagcaccacctaatgaaacaccagcgcatccacaccggggagcggccctacccctgctcctactgtggcaggagcttccgctacaaacagacactcaaggaccacctccgttcaggccacaatggaggctgtgggggtgatagtgacccatcaggtcagccacccaacccaccaggtcccctcataactgggcttgaaacttctggcctgggtgtcaacactgaaggtctagagaccaaccagtggtatggggaagggagtggagggggagttttgtaaatccaaatctctgtggcttcatgcttgtatatgctcacagcagggcacaaaatccaagagaaggtctgtgagccccatccaacacccacagtaattattatctggcacatcaatgaatttggggtcctatacacttgactagagacatgcttgtgttttggaatttcacacccttacaagaataccacattttgaaacccagaaagacctggaaaggagcccagcatgtccatcttttcaaagatacaacaaaagcagaagttacaagaatattgcggagaggttggaaagcaggatttaacctctagttctcttgttctcagagaacagcaggttgatagtagattatgtctctaggtagagacagatacatgagaagagcctccaaaactggaagcccatcataaggcatgagaatgtttaactataaagccttttattagttctttgatagctaagatggttgttggagaaagtgcttaagccactgtttatgttgctgcctcctctctcaaaaccagccaagatctgttcacacacctctgtggctgtctttccctgaaacatggtaactcaagactgcctgcctaggtttcttagattaattattcacataaattttgtttaatattggttgaacaagaaatctgactttaaaagattattaaggagaatattccttaactatactggcttgatttgaaacaggctcttattgccatttaaactgccagaaatctttgccaaggtcctggttaaaaaaattggaaacggttttcttagccccagctttaaaagctagagatctcagagaaatagctggcttaacaatgacagaacagcttaaaatttgtgcctacaccatgttctgagagtcgttcacatcaaattcttatcttttccaagccagtaagttggcttctccattcctggtgtctgatattcttgacaatcatcagcaacaaagatcacagcactttccagaagcatggagcttcagaaagtgccagtgaactcttggtcctcagtagtgagatgataacagtgttataatgcagcttccttgagccatcagagagagtgtatgttcaccctatctggctgtatcccattggcagtggacagattgaggaaattcctagatcactgagagctaagcaccatgcatagacaacagtttgttcttgcctgtgttgcttttagggactttgactaccacatgttcttttcttggggtgatttaatcacctgggagcatctgagtctgctcctaagtggctttgcaactgggcctaagttctgtttcctttatggatctcaaattttcatctgcacaatgaggctgttgaaaggaaaaaaagtgagcctctaggaattattcaaaaaaagtctgtgatacattccttttcctgccaaagttctgtctctgtctttggcttctgtccaggcaaagctaaataagacagcaaagtcaaagcagataaattcttgttgaaacttgactaaaatttatttgatttgttgttttactcccacttggaatcctgaggtagaagacagaatgcagaagtcttacatcttgggcaggaaactggtttattcctatactcttgtttcctctgcttcttcctgaggtctagaacaaggtctggaaatgtttagacaggatattttcttgatgaagtgataaggaaaggacccatttttttgctcatcacctagcccatccttcactctctctagttatgcataacaacactagaagaaggtgttagcccagctaactttgcttctgggaaggctatgtctgaacatgttgctctgtaggataatcacacttagaaaacatctgctccatgacattcacaataccagggaccatgggagacacaagaaatgtgtgtctgctgtcataacttacagtgaaaaagcccaataatacagaacaagacatgatgggcaataccctagcatattgggattaagagctttctagccagaatctggacctataccatgggaaaatttaggggtgctgggaatcccaaagccaaggttctggcttcattggcaacccactaggaacttgaatgtgagattcagctctagtttgcaccttgatttccccagtgaaaagggagaagagccaaagtattgtctaggtgctgagttcccttttctgagtggatttcaagcatttgccagggtatgctggaggagggactcctaaagtaggtgagatgtgggactaggtaacactttaaatacttttttactcaaagatttgccaagaacacagcttattagtgaaagagacctgtggattgaaatggctgcagatagatcccgcagtcccttctgaaaggaactgtgtagccagcagggacctaaactttggcaaaaagtgaacacaattcaaatacgaatgaaggaagagccctcagatggaacgaaaggcgatgtgcaaggccatcccagagagacggaagcaggtgcgatactaagcctcagcccaagaataaaagagagttcaactgttactcttttctttcatcaatcccctatcagttagaactgcaggccagttccaaagagtgtttgcttaagattcaaaagtgggtaagtaaaatggatcagtgggaaggataaggtgtccaacagaaagtgtggaggagaaactcttggcctatcaagtgctcctgagagaaaccatgcaatttaacacttcagttaaagaaatacatgagaactgcttgtcatgaccagacaagataggaaaggggaaaccccagaaacgtgctcttcatctgtcagccttttggaccaagaagctgtcactatcacacataagcaccattcccttagagtggatccaggtgttgactataaccagatttactctttgcttactaggttttccattgtcaccattggatgaacctctggtttagccacagttgtgaaaataaatggaagttggttgattgtctagaaagtgcaagaagatggccctgctccttttctgctgaacatttagtattggaaactcctacttcccttttcattaataatgtgtgcaagtttcctattagcggggaaggtgtggggctctgctgggcttctcttgagcatatctgagaaatgatgttcatgtctatctcaaccaggaccagaccctgtgacttactcggtaataacagtccacacaagcctcgttgatattaaa

SEQ ID NO: 619 - DNA, 5172 bp, Homo sapiens
ctagacagcgcagggccatggctgaggcggccccggccccgacatctgaatgggactccgagtgccttacatccctgcagccccttcctcttcctacacccccagcagcaaatgaggcacacctgcagacagcagctatctctctgtggacagtggtggccgccgtgcaggctatagagaggaaggtggagatccacagccggcgactcctacacctggaaggtcggacagggacagcagagaagaaactagccagctgtgaaaagacagttaccgagcttgggaaccagctggagggcaagtgggccgtgctgggaaccctgctgcaggagtacgggctgctgcagaggcggctggagaacttggagaacctgctgcgcaacaggaacttctggatcctgcggctccctccaggtattaagggagatatcccaaaggtgcctgtggcatttgatgatgtctccatctacttttccactccagagtgggaaaaattagaagaatggcaaaaggaactttacaagaatatcatgaagggcaactacgagtctctcatctccatggattatgctataaatcaacctgatgtcttatctcagattcaaccagaaggggaacataatacagaggaccaggcagggccagaggaaagtgagattcccacagaccccagtgaagagcctggtatttcaacatcagatattctgtcttggattaaacaagaagaagagcctcaggttggggccccaccggagtccaaggagagtgacgtgtacaaaagcacttatgctgatgaagagcttgtcatcaaagctgaaggccttgctagatcctcgttgtgccctgaggttccagtccctttctcttctccaccagcagcagcaaaggatgctttttcagatgtggctttcaaaagccagcagtctacatccatgacaccttttggacgtccagccactgacctgcctgaagcctctgagggacaagtgacttttactcagttgggtagctatcccctcccacctccagttggcgagcaggtgttctcatgccaccactgtggcaagaatctcagccaagacatgttgctgacccaccaatgtagccatgctactgagcaccccttaccctgtgcccagtgccctaagcactttactccacaggcggacctcagcagcacctcccaggaccatgccagcgagacaccccccacctgcccacactgtgccaggacttttactcacccatcaagacttacctaccatcttcgggtccataacagcactgagcgtcctttcccctgtcctgattgccccaagcgctttgctgaccaggctcgactcaccagccaccggagagctcatgcaagcgaaaggcccttccgctgtgcccagtgcggcaggagcttcagcttgaaaatcagcctcctgctccaccagcggggtcatgcacaagagcgccctttctcctgccctcagtgtggcattgacttcaacggccactcggccctgatccgccaccagatgatccacacaggcgagcgtccttacccctgcactgactgcagtaagagcttcatgcgcaaggagcacctgctgaaccaccggcggctgcacacaggcgagcggcccttcagttgtcctcactgtggcaagagcttcatccgcaagcaccacctaatgaaacaccagcgcatccacaccggggagcggccctacccctgctcctactgtggcaggagcttccgctacaaacagacactcaaggaccacctccgttcaggccacaatggaggctgtgggggtgatagtgacccatcaggtcagccacccaacccaccaggtcccctcataactgggcttgaaacttctggcctgggtgtcaacactgaaggtctagagaccaaccagtggtatggggaagggagtggagggggagttttgtaaatccaaatctctgtggcttcatgcttgtatatgctcacagcagggcacaaaatccaagagaaggtctgtgagccccatccaacacccacagtaattattatctggcacatcaatgaatttggggtcctatacacttgactagagacatgcttgtgttttggaatttcacacccttacaagaataccacattttgaaacccagaaagacctggaaaggagcccagcatgtccatcttttcaaagatacaacaaaagcagaagttacaagaatattgcggagaggttggaaagcaggatttaacctctagttctcttgttctcagagaacagcaggttgatagtagattatgtctctaggtagagacagatacatgagaagagcctccaaaactggaagcccatcataaggcatgagaatgtttaactataaagccttttattagttctttgatagctaagatggttgttggagaaagtgcttaagccactgtttatgttgctgcctcctctctcaaaaccagccaagatctgttcacacacctctgtggctgtctttccctgaaacatggtaactcaagactgcctgcctaggtttcttagattaattattcacataaattttgtttaatattggttgaacaagaaatctgactttaaaagattattaaggagaatattccttaactatactggcttgatttgaaacaggctcttattgccatttaaactgccagaaatctttgccaaggtcctggttaaaaaaattggaaacggttttcttagccccagctttaaaagctagagatctcagagaaatagctggcttaacaatgacagaacagcttaaaatttgtgcctacaccatgttctgagagtcgttcacatcaaattcttatcttttccaagccagtaagttggcttctccattcctggtgtctgatattcttgacaatcatcagcaacaaagatcacagcactttccagaagcatggagcttcagaaagtgccagtgaactcttggtcctcagtagtgagatgataacagtgttataatgcagcttccttgagccatcagagagagtgtatgttcaccctatctggctgtatcccattggcagtggacagattgaggaaattcctagatcactgagagctaagcaccatgcatagacaacagtttgttcttgcctgtgttgcttttagggactttgactaccacatgttcttttcttggggtgatttaatcacctgggagcatctgagtctgctcctaagtggctttgcaactgggcctaagttctgtttcctttatggatctcaaattttcatctgcacaatgaggctgttgaaaggaaaaaaagtgagcctctaggaattattcaaaaaaagtctgtgatacattccttttcctgccaaagttctgtctctgtctttggcttctgtccaggcaaagctaaataagacagcaaagtcaaagcagataaattcttgttgaaacttgactaaaatttatttgatttgttgttttactcccacttggaatcctgaggtagaagacagaatgcagaagtcttacatcttgggcaggaaactggtttattcctatactcttgtttcctctgcttcttcctgaggtctagaacaaggtctggaaatgtttagacaggatattttcttgatgaagtgataaggaaaggacccatttttttgctcatcacctagcccatccttcactctctctagttatgcataacaacactagaagaaggtgttagcccagctaactttgcttctgggaaggctatgtctgaacatgttgctctgtaggataatcacacttagaaaacatctgctccatgacattcacaataccagggaccatgggagacacaagaaatgtgtgtctgctgtcataacttacagtgaaaaagcccaataatacagaacaagacatgatgggcaataccctagcatattgggattaagagctttctagccagaatctggacctataccatgggaaaatttaggggtgctgggaatcccaaagccaaggttctggcttcattggcaacccactaggaacttgaatgtgagattcagctctagtttgcaccttgatttccccagtgaaaagggagaagagccaaagtattgtctaggtgctgagttcccttttctgagtggatttcaagcatttgccagggtatgctggaggagggactcctaaagtaggtgagatgtgggactaggtaacactttaaatacttttttactcaaagatttgccaagaacacagcttattagtgaaagagacctgtggattgaaatggctgcagatagatcccgcagtcccttctgaaaggaactgtgtagccagcagggacctaaactttggcaaaaagtgaacacaattcaaatacgaatgaaggaagagccctcagatggaacgaaaggcgatgtgcaaggccatcccagagagacggaagcaggtgcgatactaagcctcagcccaagaataaaagagagttcaactgttactcttttctttcatcaatcccctatcagttagaactgcaggccagttccaaagagtgtttgcttaagattcaaaagtgggtaagtaaaatggatcagtgggaaggataaggtgtccaacagaaagtgtggaggagaaactcttggcctatcaagtgctcctgagagaaaccatgcaatttaacacttcagttaaagaaatacatgagaactgcttgtcatgaccagacaagataggaaaggggaaaccccagaaacgtgctcttcatctgtcagccttttggaccaagaagctgtcactatcacacataagcaccattcccttagagtggatccaggtgttgactataaccagatttactctttgcttactaggttttccattgtcaccattggatgaacctctggtttagccacagttgtgaaaataaatggaagttggttgattgtctagaaagtgcaagaagatggccctgctccttttctgctgaacatttagtattggaaactcctacttcccttttcattaataatgtgtgcaagtttcctattagcggggaaggtgtggggctctgctgggcttctcttgagcatatctgagaaatgatgttcatgtctatctcaaccaggaccagaccctgtgacttactcggtaataacagtccacacaagcctcgttgatattaaa

SEQ ID NO: 620 - DNA, 1997 bp, Homo sapiens
agccgcctctgccgccgccgccgcgttggcctcgccgcccctgctcggacaccatgccacaaggagagtgatctcttcccctgttttcacaatggaggactccggaaagactttcagctccgaggaggaagaagctaactattggaaagatctggcgatgacctacaaacagagggcagaaaatacgcaagaggaactccgagaattccaggagggaagccgagaatatgaagctgaattggagacgcagctgcaacaaattgaaaccaggaacagagacctcctgtccgaaaataaccgccttcgcatggagctggaaaccatcaaggagaagtttgaagtgcagcactctgaaggctaccggcagatctcagccttggaggatgacctcgcgcagaccaaagccattaaagaccaattgcagaaatacatcagagagctggagcaagcaaatgacgacctggaaagagccaagcgcgccacgatcatgtctctcgaagactttgagcagcgcttgaatcaggccatcgaaagaaatgccttcctggaaagtgaacttgatgaaaaagagaatctcctggaatctgttcagagactgaaggatgaagccagagatttgcggcaggaactggccgtgcagcagaagcaggagaaacccaggacccccatgcccagctcagtggaagctgagaggacagacacagctgtgcaggccacgggctccgtgccgtccacgcccattgctcaccgaggacccagctcaagtttaaacacacctgggagcttcagacgtggcctggacgactccaccggggggacccccctcacacctgcggcccggatatcagccctcaacattgtgggagacctactgcggaaagtcggggcactggagtccaaactcgcttcctgccggaacctcgtgtacgatcagtccccaaaccgaacaggtggcccagcctctgggcggagcagcaagaacagagatggcggggagagacggccaagcagcaccagcgtgcctttgggtgataaggggttggacacgagttgccgctggttgtccaaatcaacaaccaggtcgtccagctcctgctgaagcctgttcttggtcttttccagtttatcatacgcggccgccttctcctcgtactgctgggtgaggttctcgatctccttctggaacctcttcttcccctcttccagagcttccacggtgctggcaaagtcctgcagcttcttcttcgagtcggagagctacaaggacagcgtccagggtagggtgagagggggaccatgaatggcccctgtccctggccccacagactctgagaagcgaagaccatgtctcctcgttggagaaacccaatagcaggggaagctggggggtcaagcaccatcgcaccaacactccaccgcgatctgcctgcgggggatctcagcgcagagaagttgagaggacccatgaaggaagcaaggacacggggcaggcacctggatgttgagagtggagatgtggcgctccaggttctgcttggcctccatctcctcgtccagctggtcttgcaggctgttccgctcctcctccagctggcgcagcttcgtagacacgttgagcttctgccgggtttcttcttgaagcagctcctgcaaaagggatgcaaagaggtcccagggacctgccccgaggaaggccaccccccaggtcccctggatgatgtggcaggacactcacctgggtgtcctggagctgggaactgagggacgccacgtccttggccagcttaatggccttcccctcggcctcgttaagcatccctgtgacgctctcaacttcattctaagggtgccaagagactggttagtcaaagcctctagaaggggatcctcgttgaaaggagccctttttactcaaaacacatgggctagtacttgaggtgttcactgattgagaaaatacccgtgaggtatgggactctgaaaaaaaaaaaaaaaaa

SEQ ID NO: 621 - DNA, 4167 bp, Homo sapiens
agttccctccagctgcagagagcttcagtttgtctttttttttttaaactaaaatggaggctggtttcttgccttaaggagcccattgcctttcccgctgaagtctagatgttgacatgtaataaagcgggcagcaggatggtggtggatgcggccaactccaatgggcctttccagcccgtggtccttctccatattcgagatgttcctcctgctgatcaagagaagctttttatccagaagttacgtcagtgttgcgtcctctttgactttgtttctgatccactaagtgacctaaagtggaaggaagtaaaacgagctgctttaagtgaaatggtagaatatatcacccataatcggaatgtgatcacagagcctatttacccagaagtagtccatatgtttgcagttaacatgtttcgaacattaccaccttcctccaatcctacgggagcggaatttgacccggaggaagatgaaccaacgttagaagcagcctggcctcatctacagcttgtttatgaatttttcttaagatttttagagtctccagatttccaacctaatatagcgaagaaatatattgatcagaagtttgtattgcagcttttagagctctttgacagtgaagatcctcgggagagagattttcttaaaaccacccttcacagaatctatgggaaattcctaggcttgagagcttacatcagaaaacagataaataatatattttataggtttatttatgaaacagagcatcataatggcatagcagagttactggaaatattgggaagtataattaatggatttgccttaccactaaaagaagagcacaagattttcttattgaaggtgttactacctttgcacaaagtgaaatctctgagtgtctaccatccccagctggcatactgtgtagtgcagtttttagaaaaggacagcaccctcacggaaccagtggtgatggcacttctcaaatactggccaaagactcacagtccaaaagaagtaatgttcttaaacgaattagaagagattttagatgtcattgaaccatcagaatttgtgaagatcatggaacccctcttccggcagttggccaaatgtgtctccagcccacacttccaggtggcagagcgagctctctattactggaataatgaatacatcatgagtttaatcagtgacaacgcagcgaagattctgcccatcatgtttccttccttgtaccgcaactcaaagacccattggaacaagacaatacatggcttgatatacaacgccctgaagctcttcatggagatgaaccaaaagctatttgatgactgtacacaacagttcaaagcagagaaactaaaagagaagctaaaaatgaaagaacgggaagaagcatgggttaaaatagaaaatctagccaaagccaatccccagtacacagtgtatagtcaagccagcaccatgagcattccggttgcaatggagacagatgggcctttatttgaagatgtgcagatgctgagaaagacagtgaaggacgaggctcatcaggcacagaaagatccgaagaaggaccgtcctcttgcacgccgcaagtccgagctgcctcaggacccccacaccaagaaagccttggaagctcactgcagggccgatgagctggcctcccaggacggccgctagcctccggggcgccgcgtcggggccgggcccgccagttcttttccggattctgtagaaaatacatacttcctgtgccataccaatcagttacactcaaagctttcttggaccccgttccgtaggcaataacgtgcgtccgcctcagcgcgagattaggagttcaaacaatggtgacttcccagagcccgctggcagagccgcgggttgacgacggtgtcctcgcagtgtcgccgccaccccagcgtagtccaagtcagactatttcacaaagtcagagcgataggaaagcaccctgcccttcatcttcatgttctcccaaatggaacttaggatcttttaacataggtggttctgtgataacatcagtgttttccaaatcaaaggaacgctttaaaaaataggacctattttttaagactttacagcctttgaaatggtttccacgtgattgttacgccagcagttctcgttttgtttgtttttcaatctcagtgaaatggctctttgctttcgagttctcacgcaacgtactgggcaaatgacaatcctcagccgctggtattttctaaggggtctcttcactttgatgagtgacatgaacaccgtgtctccttctcttgtgtgtacctaaagccatatttccaagtctgtggtactccaggattccaggagtaagcctgtagaagagatttattttaaaagagattgctctgaaatttatcttaaaagagcttgctctgtctaccttgacagaaattggagttttaaaattatgtgttaatatttttatttgcagatttcgtttccgtcaacttaaacattgttgcccttcaacaaggctcttgaattaataaaattatagtctctaagaattccacattttatggaaagttagagcaaaatcattttgagttaagccagttcttagcctaatgcaaactgcagcgcctttaagcataaagtaacacaacagcattgcacggggccggcactgccgctgccttcactgaaggctgcagtgctgttctgagagcttggaggaggcaccagcgaggatgacgtttagtggagctctttctgttgaaaagagctcacgttatcaacaccttgtaaggaaaatacagtgtctgagttttcatcggtcttcacatgctgctatatattccacagagttccttgcatgtactgagcttttgttttagatggaatagcacaaggagaaaaatctttaaacttagtgctttgtctattctttatttctctcagggtggccagtattttgacttatttatcctgcttgaaagctacttgagatgtgtactgctattctaaacacgtgatctagtttctttcatctctggcataagattatataacttaatgttaagtgtcttgaggcataaaagacaaaatgtggcttattttaggatctgttttttcatcgaggtctcgggtatcctttcaaagatagtgagaagcagacactgctccttgtgcagctctggtacctcctgcccactgctgtcacttcaagccactggcaatgcttctgtcctcgtgtcttggaggaaaatcacctggggggaggggacttcttgtggtaagagcaagtgcaggtatgaaatgcgaagattgccccagctaaaagtggacaagtccgctttgtgagatgaatacttcctgagaaacttgacaagtatctctccattttaccattatgaaaactatcattaaaaaaaacagtttagatgccttctccttttgagggaaaaagggtgctttttattgtataaagcagcgtcttatgtattttgatataccattgtttgaacttccgtctttagctgatagattctcaaatatccttgattttggatgttcagtatgtttgtgagagaggtttctgggaagactctctttttgccctcgggaaaaagcaaaatatcaatgtttgggtgactgtgtaaagctcagtgtgtaagaacatctttttgtctaggttttctttctgctctttattgaagacaaacactcaccaaaaagaaaaataaaagttttcagagaaactaattttctttggcaagagtattacttaatattttggcctcctaaagtttccctagttagtactcggactcctgtgctaattgtcagcttacatatcattgtatagagactgtttattctgtaccaaactgatttcaaaagtactacattgaaaataaaccggtgactgtttttcttcataaagttctgcgtttggcatcttcactctttccaaaatgtatctgtacatcagaaatgtcactattccaagtgtctttttagtgtggctttagtatggcttccttttaatattgtacatacattgtatctttgttttatggtaataagtaataaaaatgtagacttcatattttgtacaaaatgtcctatgtacagaataaaaaagttcatagaaacagcaaaaaaaaaaaaaaaaaa

SEQ ID NO: 622 - DNA, 4050 bp, Homo sapiens
agttccctccagctgcagagagcttcagtttgtctttttttttttaaactaaaatggaggctggtttcttgccttaaggagcccattgcctttcccgctgaagtctagatgttgacatgtaataaagcgggcagcaggatggtggtggatgcggccaactccaatgggcctttccagcccgtggtccttctccatattcgagatgttcctcctgctgatcaagagaagctttttatccagaagttacgtcagtgttgcgtcctctttgactttgtttctgatccactaagtgacctaaagtggaaggaagtaaaacgagctgctttaagtgaaatggtagaatatatcacccataatcggaatgtgatcacagagcctatttacccagaagtagtccatatgtttgcagttaacatgtttcgaacattaccaccttcctccaatcctacgggagcggaatttgacccggaggaagatgaaccaacgttagaagcagcctggcctcatctacagcttgtttatgaatttttcttaagatttttagagtctccagatttccaacctaatatagcgaagaaatatattgatcagaagtttgtattgcagcttttagagctctttgacagtgaagatcctcgggagagagattttcttaaaaccacccttcacagaatctatgggaaattcctaggcttgagagcttacatcagaaaacagataaataatatattttataggtttatttatgaaacagagcatcataatggcatagcagagttactggaaatattgggaagtataattaatggatttgccttaccactaaaagaagagcacaagattttcttattgaaggtgttactacctttgcacaaagtgaaatctctgagtgtctaccatccccagctggcatactgtgtagtgcagtttttagaaaaggacagcaccctcacggaaccagtggtgatggcacttctcaaatactggccaaagactcacagtccaaaagaagtaatgttcttaaacgaattagaagagattttagatgtcattgaaccatcagaatttgtgaagatcatggaacccctcttccggcagttggccaaatgtgtctccagcccacacttccaggtggcagagcgagctctctattactggaataatgaatacatcatgagtttaatcagtgacaacgcagcgaagattctgcccatcatgtttccttccttgtaccgcaactcaaagacccattggaacaagacaatacatggcttgatatacaacgccctgaagctcttcatggagatgaaccaaaagctatttgatgactgtacacaacagttcaaagcagagaaactaaaagagaagctaaaaatgaaagaacgggaagaagcatgggttaaaatagaaaatctagccaaagccaatccccaggcacagaaagatccgaagaaggaccgtcctcttgcacgccgcaagtccgagctgcctcaggacccccacaccaagaaagccttggaagctcactgcagggccgatgagctggcctcccaggacggccgctagcctccggggcgccgcgtcggggccgggcccgccagttcttttccggattctgtagaaaatacatacttcctgtgccataccaatcagttacactcaaagctttcttggaccccgttccgtaggcaataacgtgcgtccgcctcagcgcgagattaggagttcaaacaatggtgacttcccagagcccgctggcagagccgcgggttgacgacggtgtcctcgcagtgtcgccgccaccccagcgtagtccaagtcagactatttcacaaagtcagagcgataggaaagcaccctgcccttcatcttcatgttctcccaaatggaacttaggatcttttaacataggtggttctgtgataacatcagtgttttccaaatcaaaggaacgctttaaaaaataggacctattttttaagactttacagcctttgaaatggtttccacgtgattgttacgccagcagttctcgttttgtttgtttttcaatctcagtgaaatggctctttgctttcgagttctcacgcaacgtactgggcaaatgacaatcctcagccgctggtattttctaaggggtctcttcactttgatgagtgacatgaacaccgtgtctccttctcttgtgtgtacctaaagccatatttccaagtctgtggtactccaggattccaggagtaagcctgtagaagagatttattttaaaagagattgctctgaaatttatcttaaaagagcttgctctgtctaccttgacagaaattggagttttaaaattatgtgttaatatttttatttgcagatttcgtttccgtcaacttaaacattgttgcccttcaacaaggctcttgaattaataaaattatagtctctaagaattccacattttatggaaagttagagcaaaatcattttgagttaagccagttcttagcctaatgcaaactgcagcgcctttaagcataaagtaacacaacagcattgcacggggccggcactgccgctgccttcactgaaggctgcagtgctgttctgagagcttggaggaggcaccagcgaggatgacgtttagtggagctctttctgttgaaaagagctcacgttatcaacaccttgtaaggaaaatacagtgtctgagttttcatcggtcttcacatgctgctatatattccacagagttccttgcatgtactgagcttttgttttagatggaatagcacaaggagaaaaatctttaaacttagtgctttgtctattctttatttctctcagggtggccagtattttgacttatttatcctgcttgaaagctacttgagatgtgtactgctattctaaacacgtgatctagtttctttcatctctggcataagattatataacttaatgttaagtgtcttgaggcataaaagacaaaatgtggcttattttaggatctgttttttcatcgaggtctcgggtatcctttcaaagatagtgagaagcagacactgctccttgtgcagctctggtacctcctgcccactgctgtcacttcaagccactggcaatgcttctgtcctcgtgtcttggaggaaaatcacctggggggaggggacttcttgtggtaagagcaagtgcaggtatgaaatgcgaagattgccccagctaaaagtggacaagtccgctttgtgagatgaatacttcctgagaaacttgacaagtatctctccattttaccattatgaaaactatcattaaaaaaaacagtttagatgccttctccttttgagggaaaaagggtgctttttattgtataaagcagcgtcttatgtattttgatataccattgtttgaacttccgtctttagctgatagattctcaaatatccttgattttggatgttcagtatgtttgtgagagaggtttctgggaagactctctttttgccctcgggaaaaagcaaaatatcaatgtttgggtgactgtgtaaagctcagtgtgtaagaacatctttttgtctaggttttctttctgctctttattgaagacaaacactcaccaaaaagaaaaataaaagttttcagagaaactaattttctttggcaagagtattacttaatattttggcctcctaaagtttccctagttagtactcggactcctgtgctaattgtcagcttacatatcattgtatagagactgtttattctgtaccaaactgatttcaaaagtactacattgaaaataaaccggtgactgtttttcttcataaagttctgcgtttggcatcttcactctttccaaaatgtatctgtacatcagaaatgtcactattccaagtgtctttttagtgtggctttagtatggcttccttttaatattgtacatacattgtatctttgttttatggtaataagtaataaaaatgtagacttcatattttgtacaaaatgtcctatgtacagaataaaaaagttcatagaaacagcaaaaaaaaaaaaaaaaaa

SEQ ID NO: 623 - DNA, 1586 bp, Homo sapiens
agttccctccagctgcagagagcttcagtttgtctttttttttttaaactaaaatggaggctggtttcttgccttaaggagcccattgcctttcccgctgaagtctagatgttgacatgtaataaagcgggcagcaggatggtggtggatgcggccaactccaatgggcctttccagcccgtggtccttctccatattcgagatgttcctcctgctgatcaagagaagctttttatccagaagttacgtcagtgttgcgtcctctttgactttgtttctgatccactaagtgacctaaagtggaaggaagtaaaacgagctgctttaagtgaaatggtagaatatatcacccataatcggaatgtgatcacagagcctatttacccagaagtagtccatatgtttgcagttaacatgtttcgaacattaccaccttcctccaatcctacgggagcggaatttgacccggaggaagatgaaccaacgttagaagcagcctggcctcatctacagcttgtttatgaatttttcttaagatttttagagtctccagatttccaacctaatatagcgaagaaatatattgatcagaagtttgtattgcagcttttagagctctttgacagtgaagatcctcgggagagagattttcttaaaaccacccttcacagaatctatgggaaattcctaggcttgagagcttacatcagaaaacagataaataatatattttataggtttatttatgaaacagagcatcataatggcatagcagagttactggaaatattgggaagtataattaatggatttgccttaccactaaaagaagagcacaagattttcttattgaaggtgttactacctttgcacaaagtgaaatctctgagtgtctaccatccccagctggcatactgtgtagtgcagtttttagaaaaggacagcaccctcacggaaccagtggtgatggcacttctcaaatactggccaaagactcacagtccaaaagaagtaatgttcttaaacgaattagaagagattttagatgtcattgaaccatcagaatttgtgaagatcatggaacccctcttccggcagttggccaaatgtgtctccagcccacacttccaggtggcagagcgagctctctattactggaataatgaatacatcatgagtttaatcagtgacaacgcagcgaagattctgcccatcatgtttccttccttgtaccgcaactcaaagacccattggaacaagacaatacatggcttgatatacaacgccctgaagctcttcatggagatgaaccaaaagctatttgatgactgtacacaacagttcaaagcagagaaactaaaagagaagctaaaaatgaaagaacgggaagaagcatgggttaaaatagaaaatctagccaaagccaatccccaggtactaaaaaagagaataacatgaaaacgcccagggttacttgaatgtttttataagataggaatatatgtcttcaccatggggggggtctcgatttcactaacgttgtatatgaaaatgtctgcaataaaaagtacttttaaactttgtaa

SEQ ID NO: 624 - DNA, 1460 bp, Homo sapiens
agttccctccagctgcagagagcttcagtttgtctttttttttttaaactaaaatggaggctggtttcttgccttaaggagcccattgcctttcccgctgaagtctagatgttgacatgtaataaagcgggcagcaggatggtggtggatgcggccaactccaatgggcctttccagcccgtggtccttctccatattcgagatgttcctcctgctgatcaagagaagctttttatccagaagttacgtcagtgttgcgtcctctttgactttgtttctgatccactaagtgacctaaagtggaaggaagtaaaacgagctgctttaagtgaaatggtagaatatatcacccataatcggaatgtgatcacagagcctatttacccagaagtagtccatatgtttgcagttaacatgtttcgaacattaccaccttcctccaatcctacgggagcggaatttgacccggaggaagatgaaccaacgttagaagcagcctggcctcatctacagcttgtttatgaatttttcttaagatttttagagtctccagatttccaacctaatatagcgaagaaatatattgatcagaagtttgtattgcagcttttagagctctttgacagtgaagatcctcgggagagagattttcttaaaaccacccttcacagaatctatgggaaattcctaggcttgagagcttacatcagaaaacagataaataatatattttataggtttatttatgaaacagagcatcataatggcatagcagagttactggaaatattgggaagtataattaatggatttgccttaccactaaaagaagagcacaagattttcttattgaaggtgttactacctttgcacaaagtgaaatctctgagtgtctaccatccccagctggcatactgtgtagtgcagtttttagaaaaggacagcaccctcacggaaccagtggtgatggcacttctcaaatactggccaaagactcacagtccaaaagaagtaatgttcttaaacgaattagaagagattttagatgtcattgaaccatcagaatttgtgaagatcatggaacccctcttccggcagttggccaaatgtgtctccagcccacacttccaggtggcagagcgagctctctattactggaataatgaatacatcatgagtttaatcagtgacaacgcagcgaagattctgcccatcatgtttccttccttgtaccgcaactcaaagacccattggaacaagtaagaaagaactggctgccatctttttcagtcattttaaaatatggcacgttttactgctacttcagtaagaataaatatcagaattttaaatatcaattaaaaaacaagaaggtcaaaaaaaaaaaaaaaaaaaaaaaaaaaaaaaaaaaaaaaaaaaaaaaaaaaaaaaaaaaaaaaaaaaaaaaaaaaaaaaaaaaa

SEQ ID NO: 625 - DNA, 4698 bp, Homo sapiens
ccgccgccactgccgtcgggtaaggtcccagcacggacatggcctcgcgcggcgcccgcccgggcccgagtcccccgcgccccgctttgtagccccccggcggagaggcggcctcgacggtgcggacggcgcagacggccgggcgggcggcatggaggcggcgcatctgctcccggccgccgacgtgctgcgccacttctcggtgacagccgagggcggcctgagcccggcgcaggtgaccggcgcgcgggagcgctacggccccaacgagctcccgagtgaggaagggaagtccctgtgggagctggtgctggaacagtttgaggacctcctggtgcgcatcctgctgctggctgcccttgtctcctttgtcctggcctggttcgaggagggcgaggagaccacgaccgccttcgtggagcccctggtcatcatgctgatcctcgtggccaacgccattgtgggcgtgtggcaggaacgcaacgccgagagtgccatcgaggccctgaaggagtatgagcctgagatgggcaaggtgatccgctcggaccgcaagggcgtgcagaggatccgtgcccgggacatcgtcccaggggacattgtagaagtggcagtgggggacaaagtgcctgctgacctccgcctcatcgagatcaagtccaccacgctgcgagtggaccagtccatcctgacgggtgaatctgtgtccgtgaccaagcacacagaggccatcccagaccccagagctgtgaaccaggacaagaagaacatgctgttttctggcaccaatatcacatcgggcaaagcggtgggtgtggccgtggccaccggcctgcacacggagctgggcaagatccggagccagatggcggcagtcgagcccgagcggacgccgctgcagcgcaagctggacgagtttggacggcagctgtcccacgccatctctgtgatctgcgtggccgtgtgggtcatcaacatcggccacttcgccgacccggcccacggtggctcctggctgcgtggcgctgtctactacttcaagatcgccgtggccctggcggtggcggccatccccgagggcctcccggctgtcatcactacatgcctggcactgggcacgcggcgcatggcacgcaagaacgccatcgtgcgaagcctgccgtccgtggagaccctgggctgcacctcagtcatctgctccgacaagacgggcacgctcaccaccaatcagatgtctgtctgccggatgttcgtggtagccgaggccgatgcgggctcctgccttttgcacgagttcaccatctcgggtaccacgtatacccccgagggcgaagtgcggcagggggatcagcctgtgcgctgcggccagttcgacgggctggtggagctggcgaccatctgcgccctgtgcaacgactcggctctggactacaacgaggccaagggtgtgtatgagaaggtgggagaggccacggagacagctctgacttgcctggtggagaagatgaacgtgttcgacaccgacctgcaggctctgtcccgggtggagcgagctggcgcctgtaacacggtcatcaagcagctgatgcggaaggagttcaccctggagttctcccgagaccggaaatccatgtccgtgtactgcacgcccacccgccctcaccctactggccagggcagcaagatgtttgtgaagggggctcctgagagtgtgatcgagcgctgtagctcagtccgcgtggggagccgcacagcacccctgacccccacctccagggagcagatcctggcaaagatccgggattggggctcaggctcagacacgctgcgctgcctggcactggccacccgggacgcgcccccaaggaaggaggacatggagctggacgactgcagcaagtttgtgcagtacgagacggacctgaccttcgtgggctgcgtaggcatgctggacccgccgcgacctgaggtggctgcctgcatcacacgctgctaccaggcgggcatccgcgtggtcatgatcacgggggataacaaaggcactgccgtggccatctgccgcaggcttggcatctttggggacacggaagacgtggcgggcaaggcctacacgggccgcgagtttgatgacctcagccccgagcagcagcgccaggcctgccgcaccgcccgctgcttcgcccgcgtggagcccgcacacaagtcccgcatcgtggagaacctgcagtcctttaacgagatcactgctatgactggcgatggagtgaacgacgcaccagccctgaagaaagcagagatcggcatcgccatgggctcaggcacggccgtggccaagtcggcggcagagatggtgctgtcagatgacaactttgcctccatcgtggctgcggtggaggagggccgggccatctacagcaacatgaagcaattcatccgctacctcatctcctccaatgttggcgaggtcgtctgcatcttcctcacggcaattctgggcctgcccgaagccctgatccctgtgcagctgctctgggtgaacctggtgacagacggcctacctgccacggctctgggcttcaacccgccagacctggacatcatggagaagctgccccggagcccccgagaagccctcatcagtggctggctcttcttccgatacctggctatcggagtgtacgtaggcctggccacagtggctgccgccacctggtggtttgtgtatgacgccgagggacctcacatcaacttctaccagctgaggaacttcctgaagtgctccgaagacaacccgctctttgccggcatcgactgtgaggtgttcgagtcacgcttccccaccaccatggccttgtccgtgctcgtgaccattgaaatgtgcaatgccctcaacagcgtctcggagaaccagtcgctgctgcggatgccgccctggatgaacccctggctgctggtggctgtggccatgtccatggccctgcacttcctcatcctgctcgtgccgcccctgcctctcattttccaggtgaccccactgagcgggcgccagtgggtggtggtgctccagatatctctgcctgtcatcctgctggatgaggccctcaagtacctgtcccggaaccacatgcacgaagaaatgagccagaagtgagcgctgggaacagagtggagtctccggtgtgtacctcagactgatggtgcccatgtgttcgcctccgccccccacccttgccaccacactcgcccacttgcccaccgggtcccgccggataaatgacaggcccgaggtcagaatggccatccccgggccccgtcctggggtctctgtccccacttccttctggcctgggaggtctgtaattcctgtctcctggactctcctgggaagttccctgctctgcagctctggcccaggagctgcaggctgggagggggcagccaagaagccggagctggcagcatacccagagatccggggcccccccacccccaaatcacgagtgcagctggagcttgctcccccttgttcggaagctggacgttcacttggtgactggtgcctctgcactgacggaggactctgggggtccttcttaccggctctgacctctctcttcgtgcctggtctgggactgggtcagccctgggggatcagaaggggccatctgggcccagctgtgtacagcgagggtgggcagccccctccactccactctgcttccacaaagtcggctcccgagagctcgaggctgcttctgtttatatgtgcagggcccgggcgggtgaagggtcagagagacggacacaaggagccggcaggagggcggagcgaggatgtcctttcccgggagacaagtcgggaaagcctggctggactgcctcagccccgcgcgcctcctggactcagggttccccgtcctgagctcgggagatgttcagagtcacactgccgcccggtctgccacgcagaggtccaacttgccacccgcgtccctggtacctgagaccaccgacatcctcaggttcctgaccgtggcgcccttctacccagcccagtgtgcggccgccgcgctgtctgcacagctgggggcctctgagcctggtgggcttcctggactcttggcctcactccttgccccctccccacgacacccatgagccgaaaggatgtcactaaggatggctgattccccaagggcacccgctctccctccctccctgctggaggaacacgtcatatcagatgagaggaagatggcctctgatggacagaatttttctcttaactcagcttttgctactttggcaaaaactagcgaggggtagcagaaacctgcaccaaggattgtccctatgtcttggccactcctagagcgtgtgcagactgatgattttatatgtaaatcaagactcacatccctttcctagtcccccacatccaaagcccctcagcctgccttgcagaccaatgggctccatgttctgtagccccctcccctacgcctcacccctcctccctctcacaggttctgggcggccagtgagagaaacgcagtgggggaggcagggagtctggtgcctgcagagattctctgcttctttcctggggggaggtggggaggtcttagcaggagcgggccctgtacccacctgctgacctgctgtttggtagagaaataaaggttgtgtgactggggg

SEQ ID NO: 626 - DNA, 4857 bp, Homo sapiens
ccgccgccactgccgtcgggtaaggtcccagcacggacatggcctcgcgcggcgcccgcccgggcccgagtcccccgcgccccgctttgtagccccccggcggagaggcggcctcgacggtgcggacggcgcagacggccgggcgggcggcatggaggcggcgcatctgctcccggccgccgacgtgctgcgccacttctcggtgacagccgagggcggcctgagcccggcgcaggtgaccggcgcgcgggagcgctacggccccaacgagctcccgagtgaggaagggaagtccctgtgggagctggtgctggaacagtttgaggacctcctggtgcgcatcctgctgctggctgcccttgtctcctttgtcctggcctggttcgaggagggcgaggagaccacgaccgccttcgtggagcccctggtcatcatgctgatcctcgtggccaacgccattgtgggcgtgtggcaggaacgcaacgccgagagtgccatcgaggccctgaaggagtatgagcctgagatgggcaaggtgatccgctcggaccgcaagggcgtgcagaggatccgtgcccgggacatcgtcccaggggacattgtagaagtggcagtgggggacaaagtgcctgctgacctccgcctcatcgagatcaagtccaccacgctgcgagtggaccagtccatcctgacgggtgaatctgtgtccgtgaccaagcacacagaggccatcccagaccccagagctgtgaaccaggacaagaagaacatgctgttttctggcaccaatatcacatcgggcaaagcggtgggtgtggccgtggccaccggcctgcacacggagctgggcaagatccggagccagatggcggcagtcgagcccgagcggacgccgctgcagcgcaagctggacgagtttggacggcagctgtcccacgccatctctgtgatctgcgtggccgtgtgggtcatcaacatcggccacttcgccgacccggcccacggtggctcctggctgcgtggcgctgtctactacttcaagatcgccgtggccctggcggtggcggccatccccgagggcctcccggctgtcatcactacatgcctggcactgggcacgcggcgcatggcacgcaagaacgccatcgtgcgaagcctgccgtccgtggagaccctgggctgcacctcagtcatctgctccgacaagacgggcacgctcaccaccaatcagatgtctgtctgccggatgttcgtggtagccgaggccgatgcgggctcctgccttttgcacgagttcaccatctcgggtaccacgtatacccccgagggcgaagtgcggcagggggatcagcctgtgcgctgcggccagttcgacgggctggtggagctggcgaccatctgcgccctgtgcaacgactcggctctggactacaacgaggccaagggtgtgtatgagaaggtgggagaggccacggagacagctctgacttgcctggtggagaagatgaacgtgttcgacaccgacctgcaggctctgtcccgggtggagcgagctggcgcctgtaacacggtcatcaagcagctgatgcggaaggagttcaccctggagttctcccgagaccggaaatccatgtccgtgtactgcacgcccacccgccctcaccctactggccagggcagcaagatgtttgtgaagggggctcctgagagtgtgatcgagcgctgtagctcagtccgcgtggggagccgcacagcacccctgacccccacctccagggagcagatcctggcaaagatccgggattggggctcaggctcagacacgctgcgctgcctggcactggccacccgggacgcgcccccaaggaaggaggacatggagctggacgactgcagcaagtttgtgcagtacgagacggacctgaccttcgtgggctgcgtaggcatgctggacccgccgcgacctgaggtggctgcctgcatcacacgctgctaccaggcgggcatccgcgtggtcatgatcacgggggataacaaaggcactgccgtggccatctgccgcaggcttggcatctttggggacacggaagacgtggcgggcaaggcctacacgggccgcgagtttgatgacctcagccccgagcagcagcgccaggcctgccgcaccgcccgctgcttcgcccgcgtggagcccgcacacaagtcccgcatcgtggagaacctgcagtcctttaacgagatcactgctatgactggcgatggagtgaacgacgcaccagccctgaagaaagcagagatcggcatcgccatgggctcaggcacggccgtggccaagtcggcggcagagatggtgctgtcagatgacaactttgcctccatcgtggctgcggtggaggagggccgggccatctacagcaacatgaagcaattcatccgctacctcatctcctccaatgttggcgaggtcgtctgcatcttcctcacggcaattctgggcctgcccgaagccctgatccctgtgcagctgctctgggtgaacctggtgacagacggcctacctgccacggctctgggcttcaacccgccagacctggacatcatggagaagctgccccggagcccccgagaagccctcatcagtggctggctcttcttccgatacctggctatcggagtgtacgtaggcctggccacagtggctgccgccacctggtggtttgtgtatgacgccgagggacctcacatcaacttctaccagctgaggaacttcctgaagtgctccgaagacaacccgctctttgccggcatcgactgtgaggtgttcgagtcacgcttccccaccaccatggccttgtccgtgctcgtgaccattgaaatgtgcaatgccctcaacagcgtctcggagaaccagtcgctgctgcggatgccgccctggatgaacccctggctgctggtggctgtggccatgtccatggccctgcacttcctcatcctgctcgtgccgcccctgcctctcattttccaggtgaccccactgagcgggcgccagtgggtggtggtgctccagatatctctgcctgtcatcctgctggatgaggccctcaagtacctgtcccggaaccacatgcacgcctgtctttatccaggccttctcaggacagtctcgcaggcctggagtaggcagccgctgaccacctcttggaccccagaccacaccgggttggcctctttgggccagggacacagcatcgtctcgctgtcagagctgctcagagagggaggaagcagggaagaaatgagccagaagtgagcgctgggaacagagtggagtctccggtgtgtacctcagactgatggtgcccatgtgttcgcctccgccccccacccttgccaccacactcgcccacttgcccaccgggtcccgccggataaatgacaggcccgaggtcagaatggccatccccgggccccgtcctggggtctctgtccccacttccttctggcctgggaggtctgtaattcctgtctcctggactctcctgggaagttccctgctctgcagctctggcccaggagctgcaggctgggagggggcagccaagaagccggagctggcagcatacccagagatccggggcccccccacccccaaatcacgagtgcagctggagcttgctcccccttgttcggaagctggacgttcacttggtgactggtgcctctgcactgacggaggactctgggggtccttcttaccggctctgacctctctcttcgtgcctggtctgggactgggtcagccctgggggatcagaaggggccatctgggcccagctgtgtacagcgagggtgggcagccccctccactccactctgcttccacaaagtcggctcccgagagctcgaggctgcttctgtttatatgtgcagggcccgggcgggtgaagggtcagagagacggacacaaggagccggcaggagggcggagcgaggatgtcctttcccgggagacaagtcgggaaagcctggctggactgcctcagccccgcgcgcctcctggactcagggttccccgtcctgagctcgggagatgttcagagtcacactgccgcccggtctgccacgcagaggtccaacttgccacccgcgtccctggtacctgagaccaccgacatcctcaggttcctgaccgtggcgcccttctacccagcccagtgtgcggccgccgcgctgtctgcacagctgggggcctctgagcctggtgggcttcctggactcttggcctcactccttgccccctccccacgacacccatgagccgaaaggatgtcactaaggatggctgattccccaagggcacccgctctccctccctccctgctggaggaacacgtcatatcagatgagaggaagatggcctctgatggacagaatttttctcttaactcagcttttgctactttggcaaaaactagcgaggggtagcagaaacctgcaccaaggattgtccctatgtcttggccactcctagagcgtgtgcagactgatgattttatatgtaaatcaagactcacatccctttcctagtcccccacatccaaagcccctcagcctgccttgcagaccaatgggctccatgttctgtagccccctcccctacgcctcacccctcctccctctcacaggttctgggcggccagtgagagaaacgcagtgggggaggcagggagtctggtgcctgcagagattctctgcttctttcctggggggaggtggggaggtcttagcaggagcgggccctgtacccacctgctgacctgctgtttggtagagaaataaaggttgtgtgactggggg

SEQ ID NO: 627 - DNA, 4844 bp, Homo sapiens
ccgccgccactgccgtcgggtaaggtcccagcacggacatggcctcgcgcggcgcccgcccgggcccgagtcccccgcgccccgctttgtagccccccggcggagaggcggcctcgacggtgcggacggcgcagacggccgggcgggcggcatggaggcggcgcatctgctcccggccgccgacgtgctgcgccacttctcggtgacagccgagggcggcctgagcccggcgcaggtgaccggcgcgcgggagcgctacggccccaacgagctcccgagtgaggaagggaagtccctgtgggagctggtgctggaacagtttgaggacctcctggtgcgcatcctgctgctggctgcccttgtctcctttgtcctggcctggttcgaggagggcgaggagaccacgaccgccttcgtggagcccctggtcatcatgctgatcctcgtggccaacgccattgtgggcgtgtggcaggaacgcaacgccgagagtgccatcgaggccctgaaggagtatgagcctgagatgggcaaggtgatccgctcggaccgcaagggcgtgcagaggatccgtgcccgggacatcgtcccaggggacattgtagaagtggcagtgggggacaaagtgcctgctgacctccgcctcatcgagatcaagtccaccacgctgcgagtggaccagtccatcctgacgggtgaatctgtgtccgtgaccaagcacacagaggccatcccagaccccagagctgtgaaccaggacaagaagaacatgctgttttctggcaccaatatcacatcgggcaaagcggtgggtgtggccgtggccaccggcctgcacacggagctgggcaagatccggagccagatggcggcagtcgagcccgagcggacgccgctgcagcgcaagctggacgagtttggacggcagctgtcccacgccatctctgtgatctgcgtggccgtgtgggtcatcaacatcggccacttcgccgacccggcccacggtggctcctggctgcgtggcgctgtctactacttcaagatcgccgtggccctggcggtggcggccatccccgagggcctcccggctgtcatcactacatgcctggcactgggcacgcggcgcatggcacgcaagaacgccatcgtgcgaagcctgccgtccgtggagaccctgggctgcacctcagtcatctgctccgacaagacgggcacgctcaccaccaatcagatgtctgtctgccggatgttcgtggtagccgaggccgatgcgggctcctgccttttgcacgagttcaccatctcgggtaccacgtatacccccgagggcgaagtgcggcagggggatcagcctgtgcgctgcggccagttcgacgggctggtggagctggcgaccatctgcgccctgtgcaacgactcggctctggactacaacgaggccaagggtgtgtatgagaaggtgggagaggccacggagacagctctgacttgcctggtggagaagatgaacgtgttcgacaccgacctgcaggctctgtcccgggtggagcgagctggcgcctgtaacacggtcatcaagcagctgatgcggaaggagttcaccctggagttctcccgagaccggaaatccatgtccgtgtactgcacgcccacccgccctcaccctactggccagggcagcaagatgtttgtgaagggggctcctgagagtgtgatcgagcgctgtagctcagtccgcgtggggagccgcacagcacccctgacccccacctccagggagcagatcctggcaaagatccgggattggggctcaggctcagacacgctgcgctgcctggcactggccacccgggacgcgcccccaaggaaggaggacatggagctggacgactgcagcaagtttgtgcagtacgagacggacctgaccttcgtgggctgcgtaggcatgctggacccgccgcgacctgaggtggctgcctgcatcacacgctgctaccaggcgggcatccgcgtggtcatgatcacgggggataacaaaggcactgccgtggccatctgccgcaggcttggcatctttggggacacggaagacgtggcgggcaaggcctacacgggccgcgagtttgatgacctcagccccgagcagcagcgccaggcctgccgcaccgcccgctgcttcgcccgcgtggagcccgcacacaagtcccgcatcgtggagaacctgcagtcctttaacgagatcactgctatgactggcgatggagtgaacgacgcaccagccctgaagaaagcagagatcggcatcgccatgggctcaggcacggccgtggccaagtcggcggcagagatggtgctgtcagatgacaactttgcctccatcgtggctgcggtggaggagggccgggccatctacagcaacatgaagcaattcatccgctacctcatctcctccaatgttggcgaggtcgtctgcatcttcctcacggcaattctgggcctgcccgaagccctgatccctgtgcagctgctctgggtgaacctggtgacagacggcctacctgccacggctctgggcttcaacccgccagacctggacatcatggagaagctgccccggagcccccgagaagccctcatcagtggctggctcttcttccgatacctggctatcggagtgtacgtaggcctggccacagtggctgccgccacctggtggtttgtgtatgacgccgagggacctcacatcaacttctaccagctgaggaacttcctgaagtgctccgaagacaacccgctctttgccggcatcgactgtgaggtgttcgagtcacgcttccccaccaccatggccttgtccgtgctcgtgaccattgaaatgtgcaatgccctcaacagcgtctcggagaaccagtcgctgctgcggatgccgccctggatgaacccctggctgctggtggctgtggccatgtccatggccctgcacttcctcatcctgctcgtgccgcccctgcctctcattttccaggtgaccccactgagcgggcgccagtgggtggtggtgctccagatatctctgcctgtcatcctgctggatgaggccctcaagtacctgtcccggaaccacatgcacgcctgtctttatccaggccttctcaggacagtctcgcaggcctggagtaggcagccgctgaccacctcttggaccccagaccacaccggggccagggacacagcatcgtctcgctgtcagagctgctcagagagggaggaagcagggaagaaatgagccagaagtgagcgctgggaacagagtggagtctccggtgtgtacctcagactgatggtgcccatgtgttcgcctccgccccccacccttgccaccacactcgcccacttgcccaccgggtcccgccggataaatgacaggcccgaggtcagaatggccatccccgggccccgtcctggggtctctgtccccacttccttctggcctgggaggtctgtaattcctgtctcctggactctcctgggaagttccctgctctgcagctctggcccaggagctgcaggctgggagggggcagccaagaagccggagctggcagcatacccagagatccggggcccccccacccccaaatcacgagtgcagctggagcttgctcccccttgttcggaagctggacgttcacttggtgactggtgcctctgcactgacggaggactctgggggtccttcttaccggctctgacctctctcttcgtgcctggtctgggactgggtcagccctgggggatcagaaggggccatctgggcccagctgtgtacagcgagggtgggcagccccctccactccactctgcttccacaaagtcggctcccgagagctcgaggctgcttctgtttatatgtgcagggcccgggcgggtgaagggtcagagagacggacacaaggagccggcaggagggcggagcgaggatgtcctttcccgggagacaagtcgggaaagcctggctggactgcctcagccccgcgcgcctcctggactcagggttccccgtcctgagctcgggagatgttcagagtcacactgccgcccggtctgccacgcagaggtccaacttgccacccgcgtccctggtacctgagaccaccgacatcctcaggttcctgaccgtggcgcccttctacccagcccagtgtgcggccgccgcgctgtctgcacagctgggggcctctgagcctggtgggcttcctggactcttggcctcactccttgccccctccccacgacacccatgagccgaaaggatgtcactaaggatggctgattccccaagggcacccgctctccctccctccctgctggaggaacacgtcatatcagatgagaggaagatggcctctgatggacagaatttttctcttaactcagcttttgctactttggcaaaaactagcgaggggtagcagaaacctgcaccaaggattgtccctatgtcttggccactcctagagcgtgtgcagactgatgattttatatgtaaatcaagactcacatccctttcctagtcccccacatccaaagcccctcagcctgccttgcagaccaatgggctccatgttctgtagccccctcccctacgcctcacccctcctccctctcacaggttctgggcggccagtgagagaaacgcagtgggggaggcagggagtctggtgcctgcagagattctctgcttctttcctggggggaggtggggaggtcttagcaggagcgggccctgtacccacctgctgacctgctgtttggtagagaaataaaggttgtgtgactggggg

SEQ ID NO: 628 - DNA, 4786 bp, Homo sapiens
ccgccgccactgccgtcgggtaaggtcccagcacggacatggcctcgcgcggcgcccgcccgggcccgagtcccccgcgccccgctttgtagccccccggcggagaggcggcctcgacggtgcggacggcgcagacggccgggcgggcggcatggaggcggcgcatctgctcccggccgccgacgtgctgcgccacttctcggtgacagccgagggcggcctgagcccggcgcaggtgaccggcgcgcgggagcgctacggccccaacgagctcccgagtgaggaagggaagtccctgtgggagctggtgctggaacagtttgaggacctcctggtgcgcatcctgctgctggctgcccttgtctcctttgtcctggcctggttcgaggagggcgaggagaccacgaccgccttcgtggagcccctggtcatcatgctgatcctcgtggccaacgccattgtgggcgtgtggcaggaacgcaacgccgagagtgccatcgaggccctgaaggagtatgagcctgagatgggcaaggtgatccgctcggaccgcaagggcgtgcagaggatccgtgcccgggacatcgtcccaggggacattgtagaagtggcagtgggggacaaagtgcctgctgacctccgcctcatcgagatcaagtccaccacgctgcgagtggaccagtccatcctgacgggtgaatctgtgtccgtgaccaagcacacagaggccatcccagaccccagagctgtgaaccaggacaagaagaacatgctgttttctggcaccaatatcacatcgggcaaagcggtgggtgtggccgtggccaccggcctgcacacggagctgggcaagatccggagccagatggcggcagtcgagcccgagcggacgccgctgcagcgcaagctggacgagtttggacggcagctgtcccacgccatctctgtgatctgcgtggccgtgtgggtcatcaacatcggccacttcgccgacccggcccacggtggctcctggctgcgtggcgctgtctactacttcaagatcgccgtggccctggcggtggcggccatccccgagggcctcccggctgtcatcactacatgcctggcactgggcacgcggcgcatggcacgcaagaacgccatcgtgcgaagcctgccgtccgtggagaccctgggctgcacctcagtcatctgctccgacaagacgggcacgctcaccaccaatcagatgtctgtctgccggatgttcgtggtagccgaggccgatgcgggctcctgccttttgcacgagttcaccatctcgggtaccacgtatacccccgagggcgaagtgcggcagggggatcagcctgtgcgctgcggccagttcgacgggctggtggagctggcgaccatctgcgccctgtgcaacgactcggctctggactacaacgaggccaagggtgtgtatgagaaggtgggagaggccacggagacagctctgacttgcctggtggagaagatgaacgtgttcgacaccgacctgcaggctctgtcccgggtggagcgagctggcgcctgtaacacggtcatcaagcagctgatgcggaaggagttcaccctggagttctcccgagaccggaaatccatgtccgtgtactgcacgcccacccgccctcaccctactggccagggcagcaagatgtttgtgaagggggctcctgagagtgtgatcgagcgctgtagctcagtccgcgtggggagccgcacagcacccctgacccccacctccagggagcagatcctggcaaagatccgggattggggctcaggctcagacacgctgcgctgcctggcactggccacccgggacgcgcccccaaggaaggaggacatggagctggacgactgcagcaagtttgtgcagtacgagacggacctgaccttcgtgggctgcgtaggcatgctggacccgccgcgacctgaggtggctgcctgcatcacacgctgctaccaggcgggcatccgcgtggtcatgatcacgggggataacaaaggcactgccgtggccatctgccgcaggcttggcatctttggggacacggaagacgtggcgggcaaggcctacacgggccgcgagtttgatgacctcagccccgagcagcagcgccaggcctgccgcaccgcccgctgcttcgcccgcgtggagcccgcacacaagtcccgcatcgtggagaacctgcagtcctttaacgagatcactgctatgactggcgatggagtgaacgacgcaccagccctgaagaaagcagagatcggcatcgccatgggctcaggcacggccgtggccaagtcggcggcagagatggtgctgtcagatgacaactttgcctccatcgtggctgcggtggaggagggccgggccatctacagcaacatgaagcaattcatccgctacctcatctcctccaatgttggcgaggtcgtctgcatcttcctcacggcaattctgggcctgcccgaagccctgatccctgtgcagctgctctgggtgaacctggtgacagacggcctacctgccacggctctgggcttcaacccgccagacctggacatcatggagaagctgccccggagcccccgagaagccctcatcagtggctggctcttcttccgatacctggctatcggagtgtacgtaggcctggccacagtggctgccgccacctggtggtttgtgtatgacgccgagggacctcacatcaacttctaccagctgaggaacttcctgaagtgctccgaagacaacccgctctttgccggcatcgactgtgaggtgttcgagtcacgcttccccaccaccatggccttgtccgtgctcgtgaccattgaaatgtgcaatgccctcaacagcgtctcggagaaccagtcgctgctgcggatgccgccctggatgaacccctggctgctggtggctgtggccatgtccatggccctgcacttcctcatcctgctcgtgccgcccctgcctctcattttccaggtgaccccactgagcgggcgccagtgggtggtggtgctccagatatctctgcctgtcatcctgctggatgaggccctcaagtacctgtcccggaaccacatgcacgcctgtctttatccaggccttctcaggacagtctcgcaggcctggagtaggcagccgctgaccacctcttggaccccagaccacaccggaagaaatgagccagaagtgagcgctgggaacagagtggagtctccggtgtgtacctcagactgatggtgcccatgtgttcgcctccgccccccacccttgccaccacactcgcccacttgcccaccgggtcccgccggataaatgacaggcccgaggtcagaatggccatccccgggccccgtcctggggtctctgtccccacttccttctggcctgggaggtctgtaattcctgtctcctggactctcctgggaagttccctgctctgcagctctggcccaggagctgcaggctgggagggggcagccaagaagccggagctggcagcatacccagagatccggggcccccccacccccaaatcacgagtgcagctggagcttgctcccccttgttcggaagctggacgttcacttggtgactggtgcctctgcactgacggaggactctgggggtccttcttaccggctctgacctctctcttcgtgcctggtctgggactgggtcagccctgggggatcagaaggggccatctgggcccagctgtgtacagcgagggtgggcagccccctccactccactctgcttccacaaagtcggctcccgagagctcgaggctgcttctgtttatatgtgcagggcccgggcgggtgaagggtcagagagacggacacaaggagccggcaggagggcggagcgaggatgtcctttcccgggagacaagtcgggaaagcctggctggactgcctcagccccgcgcgcctcctggactcagggttccccgtcctgagctcgggagatgttcagagtcacactgccgcccggtctgccacgcagaggtccaacttgccacccgcgtccctggtacctgagaccaccgacatcctcaggttcctgaccgtggcgcccttctacccagcccagtgtgcggccgccgcgctgtctgcacagctgggggcctctgagcctggtgggcttcctggactcttggcctcactccttgccccctccccacgacacccatgagccgaaaggatgtcactaaggatggctgattccccaagggcacccgctctccctccctccctgctggaggaacacgtcatatcagatgagaggaagatggcctctgatggacagaatttttctcttaactcagcttttgctactttggcaaaaactagcgaggggtagcagaaacctgcaccaaggattgtccctatgtcttggccactcctagagcgtgtgcagactgatgattttatatgtaaatcaagactcacatccctttcctagtcccccacatccaaagcccctcagcctgccttgcagaccaatgggctccatgttctgtagccccctcccctacgcctcacccctcctccctctcacaggttctgggcggccagtgagagaaacgcagtgggggaggcagggagtctggtgcctgcagagattctctgcttctttcctggggggaggtggggaggtcttagcaggagcgggccctgtacccacctgctgacctgctgtttggtagagaaataaaggttgtgtgactggggg

SEQ ID NO: 629 - DNA, 4799 bp, Homo sapiens
ccgccgccactgccgtcgggtaaggtcccagcacggacatggcctcgcgcggcgcccgcccgggcccgagtcccccgcgccccgctttgtagccccccggcggagaggcggcctcgacggtgcggacggcgcagacggccgggcgggcggcatggaggcggcgcatctgctcccggccgccgacgtgctgcgccacttctcggtgacagccgagggcggcctgagcccggcgcaggtgaccggcgcgcgggagcgctacggccccaacgagctcccgagtgaggaagggaagtccctgtgggagctggtgctggaacagtttgaggacctcctggtgcgcatcctgctgctggctgcccttgtctcctttgtcctggcctggttcgaggagggcgaggagaccacgaccgccttcgtggagcccctggtcatcatgctgatcctcgtggccaacgccattgtgggcgtgtggcaggaacgcaacgccgagagtgccatcgaggccctgaaggagtatgagcctgagatgggcaaggtgatccgctcggaccgcaagggcgtgcagaggatccgtgcccgggacatcgtcccaggggacattgtagaagtggcagtgggggacaaagtgcctgctgacctccgcctcatcgagatcaagtccaccacgctgcgagtggaccagtccatcctgacgggtgaatctgtgtccgtgaccaagcacacagaggccatcccagaccccagagctgtgaaccaggacaagaagaacatgctgttttctggcaccaatatcacatcgggcaaagcggtgggtgtggccgtggccaccggcctgcacacggagctgggcaagatccggagccagatggcggcagtcgagcccgagcggacgccgctgcagcgcaagctggacgagtttggacggcagctgtcccacgccatctctgtgatctgcgtggccgtgtgggtcatcaacatcggccacttcgccgacccggcccacggtggctcctggctgcgtggcgctgtctactacttcaagatcgccgtggccctggcggtggcggccatccccgagggcctcccggctgtcatcactacatgcctggcactgggcacgcggcgcatggcacgcaagaacgccatcgtgcgaagcctgccgtccgtggagaccctgggctgcacctcagtcatctgctccgacaagacgggcacgctcaccaccaatcagatgtctgtctgccggatgttcgtggtagccgaggccgatgcgggctcctgccttttgcacgagttcaccatctcgggtaccacgtatacccccgagggcgaagtgcggcagggggatcagcctgtgcgctgcggccagttcgacgggctggtggagctggcgaccatctgcgccctgtgcaacgactcggctctggactacaacgaggccaagggtgtgtatgagaaggtgggagaggccacggagacagctctgacttgcctggtggagaagatgaacgtgttcgacaccgacctgcaggctctgtcccgggtggagcgagctggcgcctgtaacacggtcatcaagcagctgatgcggaaggagttcaccctggagttctcccgagaccggaaatccatgtccgtgtactgcacgcccacccgccctcaccctactggccagggcagcaagatgtttgtgaagggggctcctgagagtgtgatcgagcgctgtagctcagtccgcgtggggagccgcacagcacccctgacccccacctccagggagcagatcctggcaaagatccgggattggggctcaggctcagacacgctgcgctgcctggcactggccacccgggacgcgcccccaaggaaggaggacatggagctggacgactgcagcaagtttgtgcagtacgagacggacctgaccttcgtgggctgcgtaggcatgctggacccgccgcgacctgaggtggctgcctgcatcacacgctgctaccaggcgggcatccgcgtggtcatgatcacgggggataacaaaggcactgccgtggccatctgccgcaggcttggcatctttggggacacggaagacgtggcgggcaaggcctacacgggccgcgagtttgatgacctcagccccgagcagcagcgccaggcctgccgcaccgcccgctgcttcgcccgcgtggagcccgcacacaagtcccgcatcgtggagaacctgcagtcctttaacgagatcactgctatgactggcgatggagtgaacgacgcaccagccctgaagaaagcagagatcggcatcgccatgggctcaggcacggccgtggccaagtcggcggcagagatggtgctgtcagatgacaactttgcctccatcgtggctgcggtggaggagggccgggccatctacagcaacatgaagcaattcatccgctacctcatctcctccaatgttggcgaggtcgtctgcatcttcctcacggcaattctgggcctgcccgaagccctgatccctgtgcagctgctctgggtgaacctggtgacagacggcctacctgccacggctctgggcttcaacccgccagacctggacatcatggagaagctgccccggagcccccgagaagccctcatcagtggctggctcttcttccgatacctggctatcggagtgtacgtaggcctggccacagtggctgccgccacctggtggtttgtgtatgacgccgagggacctcacatcaacttctaccagctgaggaacttcctgaagtgctccgaagacaacccgctctttgccggcatcgactgtgaggtgttcgagtcacgcttccccaccaccatggccttgtccgtgctcgtgaccattgaaatgtgcaatgccctcaacagcgtctcggagaaccagtcgctgctgcggatgccgccctggatgaacccctggctgctggtggctgtggccatgtccatggccctgcacttcctcatcctgctcgtgccgcccctgcctctcattttccaggtgaccccactgagcgggcgccagtgggtggtggtgctccagatatctctgcctgtcatcctgctggatgaggccctcaagtacctgtcccggaaccacatgcacgcctgtctttatccaggccttctcaggacagtctcgcaggcctggagtaggcagccgctgaccacctcttggaccccagaccacaccgggttggcctctttgaagaaatgagccagaagtgagcgctgggaacagagtggagtctccggtgtgtacctcagactgatggtgcccatgtgttcgcctccgccccccacccttgccaccacactcgcccacttgcccaccgggtcccgccggataaatgacaggcccgaggtcagaatggccatccccgggccccgtcctggggtctctgtccccacttccttctggcctgggaggtctgtaattcctgtctcctggactctcctgggaagttccctgctctgcagctctggcccaggagctgcaggctgggagggggcagccaagaagccggagctggcagcatacccagagatccggggcccccccacccccaaatcacgagtgcagctggagcttgctcccccttgttcggaagctggacgttcacttggtgactggtgcctctgcactgacggaggactctgggggtccttcttaccggctctgacctctctcttcgtgcctggtctgggactgggtcagccctgggggatcagaaggggccatctgggcccagctgtgtacagcgagggtgggcagccccctccactccactctgcttccacaaagtcggctcccgagagctcgaggctgcttctgtttatatgtgcagggcccgggcgggtgaagggtcagagagacggacacaaggagccggcaggagggcggagcgaggatgtcctttcccgggagacaagtcgggaaagcctggctggactgcctcagccccgcgcgcctcctggactcagggttccccgtcctgagctcgggagatgttcagagtcacactgccgcccggtctgccacgcagaggtccaacttgccacccgcgtccctggtacctgagaccaccgacatcctcaggttcctgaccgtggcgcccttctacccagcccagtgtgcggccgccgcgctgtctgcacagctgggggcctctgagcctggtgggcttcctggactcttggcctcactccttgccccctccccacgacacccatgagccgaaaggatgtcactaaggatggctgattccccaagggcacccgctctccctccctccctgctggaggaacacgtcatatcagatgagaggaagatggcctctgatggacagaatttttctcttaactcagcttttgctactttggcaaaaactagcgaggggtagcagaaacctgcaccaaggattgtccctatgtcttggccactcctagagcgtgtgcagactgatgattttatatgtaaatcaagactcacatccctttcctagtcccccacatccaaagcccctcagcctgccttgcagaccaatgggctccatgttctgtagccccctcccctacgcctcacccctcctccctctcacaggttctgggcggccagtgagagaaacgcagtgggggaggcagggagtctggtgcctgcagagattctctgcttctttcctggggggaggtggggaggtcttagcaggagcgggccctgtacccacctgctgacctgctgtttggtagagaaataaaggttgtgtgactggggg

SEQ ID NO: 630 - DNA, 4695 bp, Homo sapiens
ccgccgccactgccgtcgggtaaggtcccagcacggacatggcctcgcgcggcgcccgcccgggcccgagtcccccgcgccccgctttgtagccccccggcggagaggcggcctcgacggtgcggacggcgcagacggccgggcgggcggcatggaggcggcgcatctgctcccggccgccgacgtgctgcgccacttctcggtgacagccgagggcggcctgagcccggcgcaggtgaccggcgcgcgggagcgctacggccccaacgagctcccgagtgaggaagggaagtccctgtgggagctggtgctggaacagtttgaggacctcctggtgcgcatcctgctgctggctgcccttgtctcctttgtcctggcctggttcgaggagggcgaggagaccacgaccgccttcgtggagcccctggtcatcatgctgatcctcgtggccaacgccattgtgggcgtgtggcaggaacgcaacgccgagagtgccatcgaggccctgaaggagtatgagcctgagatgggcaaggtgatccgctcggaccgcaagggcgtgcagaggatccgtgcccgggacatcgtcccaggggacattgtagaagtggcagtgggggacaaagtgcctgctgacctccgcctcatcgagatcaagtccaccacgctgcgagtggaccagtccatcctgacgggtgaatctgtgtccgtgaccaagcacacagaggccatcccagaccccagagctgtgaaccaggacaagaagaacatgctgttttctggcaccaatatcacatcgggcaaagcggtgggtgtggccgtggccaccggcctgcacacggagctgggcaagatccggagccagatggcggcagtcgagcccgagcggacgccgctgcagcgcaagctggacgagtttggacggcagctgtcccacgccatctctgtgatctgcgtggccgtgtgggtcatcaacatcggccacttcgccgacccggcccacggtggctcctggctgcgtggcgctgtctactacttcaagatcgccgtggccctggcggtggcggccatccccgagggcctcccggctgtcatcactacatgcctggcactgggcacgcggcgcatggcacgcaagaacgccatcgtgcgaagcctgccgtccgtggagaccctgggctgcacctcagtcatctgctccgacaagacgggcacgctcaccaccaatcagatgtctgtctgccggatgttcgtggtagccgaggccgatgcgggctcctgccttttgcacgagttcaccatctcgggtaccacgtatacccccgagggcgaagtgcggcagggggatcagcctgtgcgctgcggccagttcgacgggctggtggagctggcgaccatctgcgccctgtgcaacgactcggctctggactacaacgaggccaagggtgtgtatgagaaggtgggagaggccacggagacagctctgacttgcctggtggagaagatgaacgtgttcgacaccgacctgcaggctctgtcccgggtggagcgagctggcgcctgtaacacggtcatcaagcagctgatgcggaaggagttcaccctggagttctcccgagaccggaaatccatgtccgtgtactgcacgcccacccgccctcaccctactggccagggcagcaagatgtttgtgaagggggctcctgagagtgtgatcgagcgctgtagctcagtccgcgtggggagccgcacagcacccctgacccccacctccagggagcagatcctggcaaagatccgggattggggctcaggctcagacacgctgcgctgcctggcactggccacccgggacgcgcccccaaggaaggaggacatggagctggacgactgcagcaagtttgtgcagtacgagacggacctgaccttcgtgggctgcgtaggcatgctggacccgccgcgacctgaggtggctgcctgcatcacacgctgctaccaggcgggcatccgcgtggtcatgatcacgggggataacaaaggcactgccgtggccatctgccgcaggcttggcatctttggggacacggaagacgtggcgggcaaggcctacacgggccgcgagtttgatgacctcagccccgagcagcagcgccaggcctgccgcaccgcccgctgcttcgcccgcgtggagcccgcacacaagtcccgcatcgtggagaacctgcagtcctttaacgagatcactgctatgactggcgatggagtgaacgacgcaccagccctgaagaaagcagagatcggcatcgccatgggctcaggcacggccgtggccaagtcggcggcagagatggtgctgtcagatgacaactttgcctccatcgtggctgcggtggaggagggccgggccatctacagcaacatgaagcaattcatccgctacctcatctcctccaatgttggcgaggtcgtctgcatcttcctcacggcaattctgggcctgcccgaagccctgatccctgtgcagctgctctgggtgaacctggtgacagacggcctacctgccacggctctgggcttcaacccgccagacctggacatcatggagaagctgccccggagcccccgagaagccctcatcagtggctggctcttcttccgatacctggctatcggagtgtacgtaggcctggccacagtggctgccgccacctggtggtttgtgtatgacgccgagggacctcacatcaacttctaccagctgaggaacttcctgaagtgctccgaagacaacccgctctttgccggcatcgactgtgaggtgttcgagtcacgcttccccaccaccatggccttgtccgtgctcgtgaccattgaaatgtgcaatgccctcaacagcgtctcggagaaccagtcgctgctgcggatgccgccctggatgaacccctggctgctggtggctgtggccatgtccatggccctgcacttcctcatcctgctcgtgccgcccctgcctctcattttccaggtgaccccactgagcgggcgccagtgggtggtggtgctccagatatctctgcctgtcatcctgctggatgaggccctcaagtacctgtcccggaaccacatgcacgaaatgagccagaagtgagcgctgggaacagagtggagtctccggtgtgtacctcagactgatggtgcccatgtgttcgcctccgccccccacccttgccaccacactcgcccacttgcccaccgggtcccgccggataaatgacaggcccgaggtcagaatggccatccccgggccccgtcctggggtctctgtccccacttccttctggcctgggaggtctgtaattcctgtctcctggactctcctgggaagttccctgctctgcagctctggcccaggagctgcaggctgggagggggcagccaagaagccggagctggcagcatacccagagatccggggcccccccacccccaaatcacgagtgcagctggagcttgctcccccttgttcggaagctggacgttcacttggtgactggtgcctctgcactgacggaggactctgggggtccttcttaccggctctgacctctctcttcgtgcctggtctgggactgggtcagccctgggggatcagaaggggccatctgggcccagctgtgtacagcgagggtgggcagccccctccactccactctgcttccacaaagtcggctcccgagagctcgaggctgcttctgtttatatgtgcagggcccgggcgggtgaagggtcagagagacggacacaaggagccggcaggagggcggagcgaggatgtcctttcccgggagacaagtcgggaaagcctggctggactgcctcagccccgcgcgcctcctggactcagggttccccgtcctgagctcgggagatgttcagagtcacactgccgcccggtctgccacgcagaggtccaacttgccacccgcgtccctggtacctgagaccaccgacatcctcaggttcctgaccgtggcgcccttctacccagcccagtgtgcggccgccgcgctgtctgcacagctgggggcctctgagcctggtgggcttcctggactcttggcctcactccttgccccctccccacgacacccatgagccgaaaggatgtcactaaggatggctgattccccaagggcacccgctctccctccctccctgctggaggaacacgtcatatcagatgagaggaagatggcctctgatggacagaatttttctcttaactcagcttttgctactttggcaaaaactagcgaggggtagcagaaacctgcaccaaggattgtccctatgtcttggccactcctagagcgtgtgcagactgatgattttatatgtaaatcaagactcacatccctttcctagtcccccacatccaaagcccctcagcctgccttgcagaccaatgggctccatgttctgtagccccctcccctacgcctcacccctcctccctctcacaggttctgggcggccagtgagagaaacgcagtgggggaggcagggagtctggtgcctgcagagattctctgcttctttcctggggggaggtggggaggtcttagcaggagcgggccctgtacccacctgctgacctgctgtttggtagagaaataaaggttgtgtgactggggg

SEQ ID NO: 631 - DNA, 4205 bp, Homo sapiens
ccgccgccactgccgtcgggtaaggtcccagcacggacatggcctcgcgcggcgcccgcccgggcccgagtcccccgcgccccgctttgtagccccccggcggagaggcggcctcgacggtgcggacggcgcagacggccgggcgggcggcatggaggcggcgcatctgctcccggccgccgacgtgctgcgccacttctcggtgacagccgagggcggcctgagcccggcgcaggtgaccggcgcgcgggagcgctacggccccaacgagctcccgagtgaggaagggaagtccctgtgggagctggtgctggaacagtttgaggacctcctggtgcgcatcctgctgctggctgcccttgtctcctttgtcctggcctggttcgaggagggcgaggagaccacgaccgccttcgtggagcccctggtcatcatgctgatcctcgtggccaacgccattgtgggcgtgtggcaggaacgcaacgccgagagtgccatcgaggccctgaaggagtatgagcctgagatgggcaaggtgatccgctcggaccgcaagggcgtgcagaggatccgtgcccgggacatcgtcccaggggacattgtagaagtggcagtgggggacaaagtgcctgctgacctccgcctcatcgagatcaagtccaccacgctgcgagtggaccagtccatcctgacgggtgaatctgtgtccgtgaccaagcacacagaggccatcccagaccccagagctgtgaaccaggacaagaagaacatgctgttttctggcaccaatatcacatcgggcaaagcggtgggtgtggccgtggccaccggcctgcacacggagctgggcaagatccggagccagatggcggcagtcgagcccgagcggacgccgctgcagcgcaagctggacgagtttggacggcagctgtcccacgccatctctgtgatctgcgtggccgtgtgggtcatcaacatcggccacttcgccgacccggcccacggtggctcctggctgcgtggcgctgtctactacttcaagatcgccgtggccctggcggtggcggccatccccgagggcctcccggctgtcatcactacatgcctggcactgggcacgcggcgcatggcacgcaagaacgccatcgtgcgaagcctgccgtccgtggagaccctgggctgcacctcagtcatctgctccgacaagacgggcacgctcaccaccaatcagatgtctgtctgccggatgttcgtggtagccgaggccgatgcgggctcctgccttttgcacgagttcaccatctcgggtaccacgtatacccccgagggcgaagtgcggcagggggatcagcctgtgcgctgcggccagttcgacgggctggtggagctggcgaccatctgcgccctgtgcaacgactcggctctggactacaacgaggccaagggtgtgtatgagaaggtgggagaggccacggagacagctctgacttgcctggtggagaagatgaacgtgttcgacaccgacctgcaggctctgtcccgggtggagcgagctggcgcctgtaacacggtcatcaagcagctgatgcggaaggagttcaccctggagttctcccgagaccggaaatccatgtccgtgtactgcacgcccacccgccctcaccctactggccagggcagcaagatgtttgtgaagggggctcctgagagtgtgatcgagcgctgtagctcagtccgcgtggggagccgcacagcacccctgacccccacctccagggagcagatcctggcaaagatccgggattggggctcaggctcagacacgctgcgctgcctggcactggccacccgggacgcgcccccaaggaaggaggacatggagctggacgactgcagcaagtttgtgcagtacgagacggacctgaccttcgtgggctgcgtaggcatgctggacccgccgcgacctgaggtggctgcctgcatcacacgctgctaccaggcgggcatccgcgtggtcatgatcacgggggataacaaaggcactgccgtggccatctgccgcaggcttggcatctttggggacacggaagacgtggcgggcaaggcctacacgggccgcgagtttgatgacctcagccccgagcagcagcgccaggcctgccgcaccgcccgctgcttcgcccgcgtggagcccgcacacaagtcccgcatcgtggagaacctgcagtcctttaacgagatcactgctatgactggcgatggagtgaacgacgcaccagccctgaagaaagcagagatcggcatcgccatgggctcaggcacggccgtggccaagtcggcggcagagatggtgctgtcagatgacaactttgcctccatcgtggctgcggtggaggagggccgggccatctacagcaacatgaagcaattcatccgctacctcatctcctccaatgttggcgaggtcgtctgcatcttcctcacggcaattctgggcctgcccgaagccctgatccctgtgcagctgctctgggtgaacctggtgacagacggcctacctgccacggctctgggcttcaacccgccagacctggacatcatggagaagctgccccggagcccccgagaagccctcatcagtggctggctcttcttccgatacctggctatcggagtgtacgtaggcctggccacagtggctgccgccacctggtggtttgtgtatgacgccgagggacctcacatcaacttctaccagctgaggaacttcctgaagtgctccgaagacaacccgctctttgccggcatcgactgtgaggtgttcgagtcacgcttccccaccaccatggccttgtccgtgctcgtgaccattgaaatgtgcaatgccctcaacagcgtctcggagaaccagtcgctgctgcggatgccgccctggatgaacccctggctgctggtggctgtggccatgtccatggccctgcacttcctcatcctgctcgtgccgcccctgcctctcattttccaggtgaccccactgagcgggcgccagtgggtggtggtgctccagatatctctgcctgtcatcctgctggatgaggccctcaagtacctgtcccggaaccacatgcacgcctgtctttatccaggccttctcaggacagtctcgcaggcctggagtaggcagccgctgaccacctcttggaccccagaccacaccgggttggcctctttgaagaaatgagccagaagtgagcgctgggaacagagtggagtctccgggcccgggcgggtgaagggtcagagagacggacacaaggagccggcaggagggcggagcgaggatgtcctttcccgggagacaagtcgggaaagcctggctggactgcctcagccccgcgcgcctcctggactcagggttccccgtcctgagctcgggagatgttcagagtcacactgccgcccggtctgccacgcagaggtccaacttgccacccgcgtccctggtacctgagaccaccgacatcctcaggttcctgaccgtggcgcccttctacccagcccagtgtgcggccgccgcgctgtctgcacagctgggggcctctgagcctggtgggcttcctggactcttggcctcactccttgccccctccccacgacacccatgagccgaaaggatgtcactaaggatggctgattccccaagggcacccgctctccctccctccctgctggaggaacacgtcatatcagatgagaggaagatggcctctgatggacagaatttttctcttaactcagcttttgctactttggcaaaaactagcgaggggtagcagaaacctgcaccaaggattgtccctatgtcttggccactcctagagcgtgtgcagactgatgattttatatgtaaatcaagactcacatccctttcctagtcccccacatccaaagcccctcagcctgccttgcagaccaatgggctccatgttctgtagccccctcccctacgcctcacccctcctccctctcacaggttctgggcggccagtgagagaaacgcagtgggggaggcagggagtctggtgcctgcagagattctctgcttctttcctggggggaggtggggaggtcttagcaggagcgggccctgtacccacctgctgacctgctgtttggtagagaaataaaggttgtgtgactggggg

SEQ ID NO: 632 - DNA, 1493 bp, Homo sapiens
cggccgccggcccagtgaggctgggttcgaggagctggagcgggaaactggagcttaaattctggcggcgagatggacattctgaaatcagagatccttcggaagcggcagctggtggaggacaggaacctgctggtggaaaataaaaaatatttcaagcgtagtgagctcgccaaaaaagaagaggaagcatattttgaaagatgtggctacaagatacagccaaaagaggaggaccagaaaccattaacttcatcgaatccagtgttagaacttgaactggcagaggaaaaattacctatgacgctttctaggcaagaggtcatcagaagattgagagaaagaggagaaccaatcagactatttggagagactgattatgatgcttttcaacgtttaaggaaaatagagatcctcacaccagaagttaacaagggattgaggaatgatttgaaagcagccttggataagattgatcagcagtacctcaatgaaatcgtcggcggtcaggagcctggagaggaagacacacagaatgatctgaaagttcatgaggaaaacaccacaattgaagagttagaggcgcttggagagtccttagggaaaggcgatgatcataaagacatggacatcatcaccaaattcctgaagtttcttcttggcgtttgggctaaagaattgaatgccagagaagattatgtgaaacgcagtgtgcagggtaaactgaacagtgcgacccagaaacagaccgagtcctacctaagaccactttttagaaagctacggaaaaggaatcttcctgctgatattaaagaatcaataacggatattattaaattcatgttgcagagagaatacgtgaaggcaaatgatgcttatcttcagatggccattggaaatgcgccttggcccatcggtgtcactatggttggtatccatgccagaactggcagagaaaagattttttccaagcatgttgcacatgttttaaatgacgaaactcagcggaaatatattcagggattgaagaggttaatgaccatttgccagaaacactttcctacagacccatccaaatgtgtggagtacaatgcactgtgagatctgtgtatggtgtgttaataacaataagaaacttagggaagcaggctgtggacttctggaattaccaacaggaatgaggaaagaagaaaactggagtttccagtctctgagttctacctgatgtaactcttgattggttttaagaactttgttggccttcatttcatatctgactgcaagctgatttttctttcttgctttcattttaattagtccaaaattaagttttaaagatttttcctcacaatttaaatccatagacaacagaagggggtttaaaatgacctttttttcagttgacccgaaagttgtggttagatgattaaaaagaaacatttgaggatggacttaattatttcagtaaaatattataatttgcaaaaaaaaaa

SEQ ID NO: 633 - DNA, 4817 bp, Homo sapiens
gtttgaggccggccagtcgtgactgggcggcaatgaggtcagtgactgccgggagtcctgcaggggcggggcggcgccaagcgcagggagcccggctgagtggcagcccagattgaagatggatacgtgacaatcccagggaccgctgcactgacttcatttccttagacaagacacagtgtagggcccggcccgtgttggccccaggactcctttggaatatagctgtggacaatgaatcctgcgagcgatgggggcacatcagagagcatttttgacctggactatgcatcctgggggatccgctccacgctgatggtcgctggctttgtcttctacttgggcgtctttgtggtctgccaccagctgtcctcttccctgaatgccacttaccgttctttggtggccagagagaaggtcttctgggacctggcggccacgcgtgcagtctttggtgttcagagcacagccgcaggcctgtgggctctgctgggggaccctgtgctgcatgccgacaaggcgcgtggccagcagaactggtgctggtttcacatcacgacagcaacgggattcttttgctttgaaaatgttgcagtccacctgtccaacttgatcttccggacatttgacttgtttctggttatccaccatctctttgcctttcttgggtttcttggctgcttggtcaatctccaagctggccactatctagctatgaccacgttgctcctggagatgagcacgccctttacctgcgtttcctggatgctcttaaaggcgggctggtccgagtctctgttttggaagctcaaccagtggctgatgattcacatgtttcactgccgcatggttctaacctaccacatgtggtgggtgtgtttctggcactgggacggcctggtcagcagcctgtatctgcctcatttgacactgttccttgtcggactggctctgcttacgctaatcattaatccatattggacccataagaagactcagcagcttctcaatccggtggactggaacttcgcacagccagaagccaagagcaggccagaaggcaacgggcagctgctgcggaagaagaggccatagctgctccagccggggctccggggcggcagcagagctggcacaccgattctgggaagccccgcgaatgatggcttttgaattaatgaggcagtgaatgttttgtgtttacttctaagggaaatactaactttctttcgcattagtattaattttgaagtagctacaaagtatttttaagaaattataattttatgactgtctggcaggctctgtcagtttagccgcgccggaccgtgtcaagcatctaggagaggagtccatggtgtccaggcatcggggcgtcacacctgttgaggagtggggtggctttgaatgctggaaatggcttcatagtgaagtgcctcccacagggcgggtgggtcagcgttgactctttccagctgcacactcatatgccgtgtgtcttattcagaagtcacattcttttcagttggagagaattgggctaagatagaaaataacatgatttgttccttattaaagcttcccagcgtatgaaattctaagctgggtggggtggctcacacccgacgtaatcccagcacgttgggaggccgaggcaggtggatcacttgaggccaggagttcgagaccagcctggtcaagatggtgaaaccccatctctactaaaattacaaaaattagccgggtgtcgtggcacacacctgtaatcccagctatttgggaggccaaggcaggagaattgcctgaacccgggaggcggaggttgcagtgagctgagatcgcaccactgcactccagcactccagcctgggtgacagagcaagactctctctcaaaaaaaaaaaaaaaaaaaaattctagaccgaagtgtacggcagtgccatctggtggcaagtggtacaaagacaacgctgaggggtagtgactcctgtagcagcagagacgccttggagtttaacccccaccaaccagagcgtgggctggtaaagatgaaatcttgcaagttttttttttttttaaatcatggtacctgttttaaaatgagaagttattattcatactgtgttgctcatttgacaaaataaggtaaggatttcataatcaggttgtctgggtttcagagctgtttttaattgactgagttacctacaggcacccaatctagaccctaattctgtggttggtgttcctctgtagatttcaagacaagtagtgatgtcattttctccctgagctgtagggtggacctggacccctcagagatgctcgactgcagggtcctggggtccctagagtggtcctgcagcagcccctggcaatgagctgcctgatgatgagtcccaaggtacattgttctactgttttatacccaggtagaagttacacagcaatttagcaatgttgttaacagacatacagaattgtgtgtgtgtgtgtgtgtgtgtgtgtgagtgttttgatataaacgtgcaattaaaattcaaagtttattttttatcacaagcacctttgaaatgtacgtggaaaacgtcggctgctcgtgagaatcatgtgtgacttacgttccttatgttttatggaactctcggaacagtgttttgtttttgtttagtttttgttttcgtttttttgagacggagcctggctttggctcccaggctggagtccagtggtgtgatctcggctcactgcaacctccacctcccgggttccagggattctcctgcctcaccctttcaagtagctgggattacaggtacctctaccatgcctggctgattttttgtatttttagtagagacagggtttcaccatgttggccaggctggtctctgactcctgactaaaagtgatctgcccacctcggcctcccaaagttctgggattacgggcgtgagccacttcacccggcccggagcggtgtattttgattgctggtgctttaactatattgaccaaggtgtatagtaacctatttatcacattttacgaagcaattttaatcttaaacacatccagcaaatggtgtccctgctgaaacttttaactggaaacctcacacctggcaggcagcactctctgcagccgtgcccttgtggagtcagcaggagctggtgtttttcagccagacagaggcataataaagtgactgatgtttacagaacccaaatgatgtcttcctctctctcaaaataaactaacctattcatattgctgtgaatgctttatcttggagatagaaaatataatgataaattcatcatgtgttcagaattcgatttggagttggaagtggacagcctaatttttatctcacctccactaggactttgaccttcccaggggtccacactttacctcctgtatcttcatacgcgtgtgtggatgcatagagatggaggtgctgtagagaagcacaggctcacccgctccgtccagtgtcacccacacattggtccggggacccctcagtgcagagcctgaagttgggggtttaggggtggaaaaggcttcgtgaaatgttaatgatgcgtacaccttccagatggcacagcactttcccatggtcctcactggcctcagtctccctgaccggcagtgtgaggggatgtagctatagtggagcatggtacaagcgacattcatgagctctgacttcttggtgccaggttggtgtgagcctgggcccggcccactcagcggcccacattggccagcattcagctgcacgtgtgtgctgcgtgcttcacatcctctattgagagttacagcaagtgttaaacgaggtgagttcacataacaggaattctggaactgcttgaaaactaggacgattgggcaatatcggccttaactccacctgatggcaggtgacccggatagaaaatggccctgcgtttagccaggatgtggctctccagcttggcttcagtgtgatcacttgtcagtgcgctttctctttcgatagtgaaatccttctctatacctatgttttgttttgtttcttaagttgggaaacagaatgggccagggaggttgagtgactgaagaccaagggttggtgcagcctcctcgccgcgctgcgggggctgggccgcacaggcttctgcccttctcggtgtccaggctccttgggtgatgctggagttgtcatggccgcagttcagtgtgagattttttaccaggtattgcgcttaagggacatgattttccattttcttcgcccggacaacttgaatgaaatgggcactgttgattccacttctgtcgaggagcttcggggctcagagaggtgatgacgtgcccaaggtgacgcaactcgtgaacagccgtgcctgccttgggcgcagcctccggcgccagagctgggctcttcaacacggcatttagcgcagaaagtcgtggttcaggcagtatgggccgctgtgacaaaacacctaagactgggtagtttataaagaacagacattcaggccaggcacggtgactcacgcctgtaatcccagcactttgggaggccgaggcgggtggatcatttgaggtcaggagtttgaaaccagcctggccaacatggtgaaaccccatctctactaaaaaaacaaaactagctgggggtggtggtgcatgcctgtggtcccagctacttgggaggctaaggtagaagaattgcttgaacctgggaggcagagattgcagtgagccgagatcacgccattgcactccagcctgggtgacacagtgagactccatctcaaaaa

SEQ ID NO: 634 - DNA, 2762 bp, Homo sapiens
gtggggtcgtatcccgcgggtggaggccggggtggcgccggccggggcgggggagcccaaaagaccggctgccgcctgctccccggaaaagggcactcgtctccgtgggtgtggcggagcgcgcggtgcatggaatgggctatgtgaatgaaaaaaggtatccgttatgaaacttccagaaaaacgagctacatttttcagcagccgcagcacggtccttggcaaacaaggatgagaaaaatatccaaccacgggagcctgcgggtggcgaaggtggcataccccctggggctgtgtgtgggcgtgttcatctatgttgcctacatcaagtggcaccgggccaccgccacccaggccttcttcagcatcaccagggcagccccgggggcccggtggggtcagcaggcccacagccccctggggacagctgcagacgggcacgaggtcttctacgggatcatgtttgatgcaggaagcactggcacccgagtacacgtcttccagttcacccggccccccagagaaactcccacgttaacccacgaaaccttcaaagcagtgaagccaggtctttctgcctatgctgatgatgttgaaaagagcgctcagggaatccgggaactactggatgttgctaaacaggacattccgttcgacttctggaaggccacccctctggtcctcaaggccacagctggcttacgcctgttacctggagaaaaggcccagaagttactgcagaaggtgaaagaagtatttaaagcatcgcctttccttgtaggggatgactgtgtttccatcatgaacggaacagatgaaggcgtttcggcgtggatcaccatcaacttcctgacaggcagcttgaaaactccaggagggagcagcgtgggcatgctggacttgggcggaggatccactcagatcgccttcctgccacgcgtggagggcaccctgcaggcctccccacccggctacctgacggcactgcggatgtttaacaggacctacaagctctattcctacagctacctcgggctcgggctgatgtcggcacgcctggcgatcctgggcggcgtggaggggcagcctgctaaggatggaaaggagttggtcagcccttgcttgtctcccagtttcaaaggagagtgggaacacgcagaagtcacgtacagggtttcagggcagaaagcagcggcaagcctgcacgagctgtgtgctgccagagtgtcagaggtccttcaaaacagagtgcacaggacggaggaagtgaagcatgtggacttctatgctttctcctactattacgaccttgcagctggtgtgggcctcatagatgcggagaagggaggcagcctggtggtgggggacttcgagatcgcagccaagtacgtgtgtcggaccctggagacacagccgcagagcagccccttctcatgcatggacctcacctacgtcagcctgctactccaggagttcggctttcccaggagcaaagtgctgaagctcactcggaaaattgacaatgttgagaccagctgggctctgggggccatttttcattacatcgactccctgaacagacagaagagtccagcctcatagtggccgagccatccctgtccccgtcagcagtgtctgtgtgtctgcataaaccctcctgtcctggacgtgacttcatcctgaggagccacagcacaggccgtgctggcactttctgcacactggctctgggacttgcagaaggcctggtgctgccctggcatcagcctcttccagtcacatctggccagagggctgtctggacctgggccctgctcaatgccacctgtctgcctgggctccaagtgggcaggaccaggacagaaccacaggcacacactgagggggcagtgtggctccctgcctgtcccatccccatgccccgtccgcggggctgtggctgctgctgtgcatgtccctgcgatgggagtcttgtctcccagcctgtcagtttcctccccagggcagagctccccttcctgcaagagtctgggaggcggtgcaggctgtcctggctgctctggggaagccgagggacagccataacacccccgggacagtaggtctgggcggcaccactgggaactctggacttgagtgtgtttgctcttccttgggtatgaatgtgtgagttcacccagaggcctgctctcctcacacattgtgtggtttggggttaatgatggagggagacacctcttcatagacggcaggtgcccacctttcagggagtctcccagcatgggcggatgccgggcatgagctgctgtaaactatttgtggctgtgctgcttgagtgacgtctctgtcgtgtgggtgccaagtgcttgtgtagaaactgtgttctgagcccccttttctggacaccaactgtgtcctgtgaatgtatcgctactgtgagctgttcccgcctagccagggccatgtcttaggtgcagctgtgccacgggtcagctgagccacagtcccagaaccaagctctcggtgtctcgggccaccatccgcccacctcgggctgaccccacctcctccatggacagtgtgagccccgggccgtgcatcctgctcagtgtggcgtcagtgtcggggctgagccccttgagctgcttcagtgaatgtacagtgcccggcacgagctgaacctcatgtgttccactcccaataaaaggttgacaggggcttctccttcaaaaaaaaaaaaaaaaaaaaaaaaaaaaaaaaaa

SEQ ID NO: 635 - DNA, 2733 bp, Homo sapiens
tcatggctgcgcgtgcagacgtgcgtcatcgccgcgcgccgcgccgagcgaatctcggagtcggtgggtgcagatggcggcggcagttgtggtggcggagggggacagcgactcccggcccggacaggagttgttagtggcctggaacaccgtgagcaccggcctggtgccgccggctgcgctggggctggtgtcttcccggaccagcggtgcagtcccgccaaaggaagaggagctccgggcggcggtggaggttctgaggggccacgggctacactcggtcctggaggagtggttcgtggaggtgctgcagaacgatctgcaggccaacatctcccctgagttctggaatgccatctcccaatgcgagaactctgcggatgagccccagtgccttttgctactccttgacgcttttggcctgctggagagccgcctggatccctacctgcgtagcctagagctgctggagaaatggactcgcctgggcttgctgatgggcactggtgctcaggggctgcgagaagaagtccacactatgttgcgcggagtcttgttctttagcacccccagaaccttccaagagatgatccagcgtctgtatgggtgcttcttgagagtctatatgcagagtaagaggaagggggaagggggcacagacccggaactggaaggggagctggacagccggtatgcccgtcgccggtactaccggctcctgcagagcccgctgtgtgcagggtgcagcagtgacaagcaacagtgctggtgtcgccaggctctggagcagttccatcagctcagccaggtcttacacaggctcagtctgctggagcgggtcagtgccgaggctgtgaccaccaccctgcaccaggtgacccgggagaggatggaggaccgttgccggggcgagtacgagcgctccttcctgcgtgagttccacaagtggatcgagcgggtggtcggctggctcggcaaggtgttcctgcaggacggccccgccaggcccgcatctcccgaggccggcaacaccctgcgccgctggcgctgccacgtgcaaaggttcttctaccgcatctacgccagcctgcgcatcgaggagctcttcagcatcgtccgagacttcccagactcccggccagccatcgaggacctcaagtactgcctggagaggacggaccagaggcagcagctgctcgtgtccctcaaggctgccctggagactcggctcctgcatccaggcgtcaacacgtgtgacatcatcaccctctatatctctgccatcaaggcgctgcgcgtgctggacccttccatggtcatcctggaggtggcctgtgagcctatccgccgctacctgaggacgcgggaggacacagtgcggcagattgtggctgggctgacgggggactcggacgggacaggggacctggctgttgagctgtccaagaccgacccggcgagcctggagacaggccaggacagtgaggatgactcaggcgagccagaggactgggtcccggaccctgtggatgccgatccagggaagtcgagctccaagcggcgttcatcggacatcatcagcctgctggtcagcatctacggcagcaaggacctcttcatcaatgagtaccgctcgctgctggccgaccgcctgctgcaccagttcagcttcagccccgagcgggagatccgcaacgtggagctgctgaagctgcgctttggcgaggccccaatgcacttctgtgaagtcatgctgaaggacatggcggactcccgccgcatcaatgccaacatccgggaggaggatgagaagcggccagcagaggagcagccaccgttcggggtctacgctgtcatcctgtccagtgagttctggccgcccttcaaggacgagaagctggaggtccccgaggatatcagggcagccctggaggcttactgcaagaagtatgagcagctcaaggccatgcggaccctcagttggaagcacaccctgggcctggtgaccatggacgtggagctggccgaccgcacgctgtctgtggcggtcaccccagtacaggcggtgatcttgctgtattttcaggaccaagccagctggaccctggaggaactgagcaaggcggtgaagatgcccgtggcgctgctgcggcggcggatgtccgtgtggctgcagcagggtgtgctgcgtgaggagccccccggcaccttctctgtcattgaggaggagcggcctcaggaccgggacaacatggtgctcattgacagtgacgacgagagcgactccggcatggcctcccaggccgaccagaaggaggaggagctgctgctcttctggacgtacatccaggccatgctgaccaacctggagagcctctcactggatcgtatctacaacatgctccgcatgtttgtggtgactgggcctgcactggccgagattgacctgcaggagctgcagggctacctgcagaagaaggtgcgggaccagcagctcgtctactcggccggcgtctaccgcctgcccaagaactgcagctgacacatcgcccgcccgcccgcccgcccgccaggcgctgccctgcaggtgctctcgtcctcccgtgccagcccccgcccgcccgtgtcccagaatgcactgctgaggagcatgcccacccccacccccgcagtgtgcagattaaagcaagtcagatcatcaaaaaaaaaaaaaaaaaaaaaaaaaaaaaaaaa

SEQ ID NO: 636 - DNA, 2719 bp, Homo sapiens
ccacgcgtccgggctcttctcccgccgcggcccggcgctctccgagtcgcccctgcggactggtctcgcacagtgcctgggcaccgggcgccagacagacactggccatgacgagcggcgcaaccaggtaccggctgagctgctcgctccggggccacgagctggacgtacggggcctggtgtgctgcgcctatccgccgggagcctttgtgtccgtgtcccgagaccgcaccacccgcctctgggccccagacagtccaaacaggagctttacagaaatgcactgtatgagtggccattccaattttgtatcttgtgtatgcatcataccctcaagtgacatctaccctcatggcctaattgccaccggtggaaatgaccacaatatatgcattttctcactggacagtccaatgccactttatattctaaaaggccacaaaaatactgtttgtagtctatcatctggaaaatttgggacattacttagtggttcatgggacaccactgctaaagtctggctgaatgacaagtgcatgatgaccttgcagggtcatacagctgcagtgtgggcggtaaagatcttacctgaacagggcttaatgttgactggatcagcagacaagactgttaaactgtggaaggctggaagatgtgagaggactttttcagggcatgaagactgtgtaagaggtttggcaattttgagtgaaacagaatttctttcctgtgcaaatgatgctagtattagaaggtggcaaatcactggcgagtgtcttgaagtatattatggacatacaaattatatttatagcatatccgtttttccaaattgtagagactttgtgacaacagcagaggacagatctctgagaatctggaaacatggggaatgtgctcaaactatccgacttccagctcagtctatatggtgctgctgtgtgctcgacaatggtgacattgtggttggtgcgagtgatggcattattagagtgtttacagaatcagaagatcgaacagcaagtgctgaagaaatcaaggcttttgaaaaagaactgtctcacgcaaccattgattctaaaactggcgatttaggggacatcaatgctgagcagcttcctgggagggaacatcttaatgaacctggtactagagaaggacagactcgtctaatcagagatggggagaaagtcgaagcctatcagtggagtgttagtgaagggaggtggataaaaattggtgatgttgttggctcatctggtgctaatcagcaaacatctggaaaagttttatatgaagggaaagaatttgattatgttttctcaattgatgtcaatgaaggtggaccatcatataaattgccatataataccagtgatgacccttggttaactgcatacaacttcttacagaagaatgatttgaatcctatgtttctggatcaagtagctaaatttattattgataacacaaaaggtcaaatgttgggacttgggaatcccagcttttcagatccatttacaggtggtggtcggtatgttccgggctcttcgggatcttctaacacactacccacagcagatccttttacaggtgctggtcgttatgtaccaggttctgcaagtatgggaactaccatggccggagttgatccatttacagggaatagtgcctaccgatcagctgcatctaaaacaatgaatatttatttccctaaaaaagaggctgtcacatttgaccaagcaaaccctacacaaatattaggtaaactgaaggaacttaatggaactgcacctgaagagaagaagttaactgaggatgacttgatacttcttgagaagatactgtctctaatatgtaatagttcttcagaaaaacccacagtccagcaacttcagattttgtggaaagctattaactgtcctgaagatattgtctttcctgcacttgacattcttcggttgtcaattaaacaccccagtgtgaatgagaacttctgcaatgaaaaggaaggggctcagttcagcagtcatcttatcaatcttctgaaccctaaaggaaagccagcaaaccagctgcttgctctcaggactttttgcaattgttttgttggccaggcaggacaaaaactcatgatgtcccagagggaatcactgatgtcccatgcaatagaactgaaatcagggagcaataagaacattcacattgctctggctacattggccctgaactattctgtttgttttcataaagaccataacattgaagggaaagcccaatgtttgtcactaattagcacaatcttggaagtagtacaagacctagaagccacttttagacttcttgtggctcttggaacacttatcagtgatgattcaaatgctgtacaattagccaagtctttaggtgttgattctcaaataaaaaagtattcctcagtatcagaaccagctaaagtaagtgaatgctgtagatttatcctaaatttgctgtagcagtggggaagagggacggatatttttaattgattagtgtttttttcctcacatttgacatgactgataacagataattaaaaaaagagaatacggtggattaagtaaaattttacatcttgtaaagtggtggggaggggaaacagaaataaaatttttgcactgctgaaaaaaaaaaaaaaaaaaaaaaaaaaaaaaaaaaaaaaaaaaaaaaaaaaaaaaaa

SEQ ID NO: 637 - DNA, 3240 bp, Homo sapiens
agacagtccaaacaggagctttacagaaatgcactgtatgagtggccattccaattttgtatcttgtgtatgcatcataccctcaagtgacatctaccctcatggcctaattgccaccggtggaaatgaccacaatatatgcattttctcactggacagtccaatgccactttatattctaaaaggccacaaaaatactgtttgtagtctatcatctggaaaatttgggacattacttagtggttcatgggacaccactgctaaagtctggctgaatgacaagtgcatgatgaccttgcagggtcatacagctgcagtgtgggcggtaaagatcttacctgaacagggcttaatgttgactggatcagcagacaagactgttaaactgtggaaggctggaagatgtgagaggactttttcagggcatgaagactgtgtaagaggtttggcaattttgagtgaaacagaatttctttcctgtgcaaatgatgctagtattagaaggtggcaaatcactggcgagtgtcttgaagtatattatggacatacaaattatatttatagcatatccgtttttccaaattgtagagactttgtgacaacagcagaggacagatctctgagaatctggaaacatggggaatgtgctcaaactatccgacttccagctcagtctatatggtgctgctgtgtgctcgacaatggtgacattgtggttggtgcgagtgatggcattattagagtgtttacagaatcagaagatcgaacagcaagtgctgaagaaatcaaggcttttgaaaaagaactgtctcacgcaaccattgattctaaaactggcgatttaggggacatcaatgctgagcagcttcctgggagggaacatcttaatgaacctggtactagagaaggacagactcgtctaatcagagatggggagaaagtcgaagcctatcagtggagtgttagtgaagggaggtggataaaaattggtgatgttgttggctcatctggtgctaatcagcaaacatctggaaaagttttatatgaagggaaagaatttgattatgttttctcaattgatgtcaatgaaggtggaccatcatataaattgccatataataccagtgatgacccttggttaactgcatacaacttcttacagaagaatgatttgaatcctatgtttctggatcaagtagctaaatttattattgataacacaaaaggtcaaatgttgggacttgggaatcccagcttttcagatccatttacaggtggtggtcggtatgttccgggctcttcgggatcttctaacacactacccacagcagatccttttacaggtgctggtcgttatgtaccaggttctgcaagtatgggaactaccatggccggagttgatccatttacagggaatagtgcctaccgatcagctgcatctaaaacaatgaatatttatttccctaaaaaagaggctgtcacatttgaccaagcaaaccctacacaaatattaggtaaactgaaggaacttaatggaactgcacctgaagagaagaagttaactgaggatgacttgatacttcttgagaagatactgtctctaatatgtaatagttcttcagaaaaacccacagtccagcaacttcagattttgtggaaagctattaactgtcctgaagatattgtctttcctgcacttgacattcttcggttgtcaattaaacaccccagtgtgaatgagaacttctgcaatgaaaaggaaggggctcagttcagcagtcatcttatcaatcttctgaaccctaaaggaaagccagcaaaccagctgcttgctctcaggactttttgcaattgttttgttggccaggcaggacaaaaactcatgatgtcccagagggaatcactgatgtcccatgcaatagaactgaaatcagggagcaataagaacattcacattgctctggctacattggccctgaactattctgtttgttttcataaagaccataacattgaagggaaagcccaatgtttgtcactaattagcacaatcttggaagtagtacaagacctagaagccacttttagacttcttgtggctcttggaacacttatcagtgatgattcaaatgctgtacaattagccaagtctttaggtgttgattctcaaataaaaaagtattcctcagtatcagaaccagctaaagtaagtgaatgctgtagatttatcctaaatttgctgtagcagtggggaagagggacggatatttttaattgattagtgtttttttcctcacatttgacatgactgataacagataattaaaaaaagagaatacggtggattaagtaaaattttacatcttgtaaagtggtggggaggggaaacagaaataaaatttttgcactgctgaactgtgagattttcctgtgtaatttgggtagattttcaagagtgtgaacacaaatttaaaataagctataatcagcaacaacacaatgacaatgacatcttccccttaccttagccactaagaagacaagggctgttactcatataacttgcttttcttacttaatgtacaccaaactgttgttgtcaattatcttttatttaacttctccaccttcattgctagatccttcgaacagcactgatacatttcaaggtcttgttttaggataactactttaaaattttttaaattatattaaatttataaaataatttataaattcatatattaaaacaatataagataatttcttgatttgtcatttataaatccctaaagtatatttgtttaatggcctatttttggatgaagaaaaagccagttggtaagctgtgttagtcatgtatcagttcagacagacggaggtctcaatttaactccaggcttagatcccagtttccttttgcccttcactatttgaggtaacttcatttttcattctagttttgatatttggctgtttatttttgtcattttccattatttcaaagggaatttggaacatgttgaattttatcaggtggttacataagcaagagtacatcaaactgtattatttgaaagtctagaacctgtcatgtgaaattactatttttgagccctctatgtggtccaggcagaatagtagacacactgatatttaatccttaaaacccctttaaatgagggccagtattatctctgctttcagaagtagacataataggatgaatcatataacaga

SEQ ID NO: 638 - DNA, 1868 bp, Homo sapiens
cgcacagggcgcacccggacgctctaccgctcccgccgcagtcgccgggccatgggcctcgagcccgccccgaacccccgcgagcccgccttgtctgcggcgtgactggaggcccagctgccgcccctccctgtgtccttccaagaagtgccacatgcactgatctcttgtgtccccagatggtcatcatgggccagtgctactacaacgagaccatcggcttcttctataacaacagtggcaaagagctcagctcccactggcggcccaaggatgtggtcgtggtggcactggggctgaccgtcagcgtgctggtgctgctgaccaatctgctggtcatagcagccatcgcctccaaccgccgcttccaccagcccatctactacctgctcggcaatctggccgcggctgacctcttcgcgggcgtggcctacctcttcctcatgttccacactggtccccgcacagcccgactttcacttgagggctggttcctgcggcagggcttgctggacacaagcctcactgcgtcggtggccacactgctggccatcgccgtggagcggcaccgcagtgtgatggccgtgcagctgcacagccgcctgccccgtggccgcgtggtcatgctcattgtgggcgtgtgggtggctgccctgggcctggggctgctgcctgcccactcctggcactgcctctgtgccctggaccgctgctcacgcatggcacccctgctcagccgctcctatttggccgtctgggctctgtcgagcctgcttgtcttcctgctcatggtggctgtgtacacccgcattttcttctacgtgcggcggcgagtgcagcgcatggcagagcatgtcagctgccacccccgctaccgagagaccacgctcagcctggtcaagactgttgtcatcatcctgggggcgttcgtggtctgctggacaccaggccaggtggtactgctcctggatggtttaggctgtgagtcctgcaatgtcctggctgtagaaaagtacttcctactgttggccgaggccaactcactggtcaatgctgctgtgtactcttgccgagatgctgagatgcgccgcaccttccgccgccttctctgctgcgcgtgcctccgccagtccacccgcgagtctgtccactatacatcctctgcccagggaggtgccagcactcgcatcatgcttcccgagaacggccacccactgatggactccaccctttagctaccttgaacttcagcggtacgcggcaagcaacaaatccacagcccctgatgacttgtgggtgctcctggctcaacccaaccaacaggactgactgactggcaggacaaggtctggcatggcacagcaccactgccaggcctccccaggcacaccactctgcccagggaatgggggctttgggtcatctcccactgcctgggggagtcagatggggtgcaggaatctggctcttcagccatctcaggtttagggggtttgtaacagacattattctgttttcactgcgtatccttggtaagccctgtggactggttcctgctgtgtgatgctgagggttttaaggtggggagagataagggctctctcgggccatgctacccggtatgactgggtaatgaggacagactgtggacaccccatctacctgagtctgattctttagcagcagagactgaggggtgcagagtgtgagctgggaaaggtttgtggctccttgcagcctccagggactggcctgtccccgatagaattgaagcagtccacggggaggggatgatacaaggagtaaacctttctttacactctaaaaaaaaaaaaaaaaaaaaaaaaaaaaaaaaaaaaaaaaaaaaa

SEQ ID NO: 639 - DNA, 1538 bp, Homo sapiens
ggacttccggcgggtgacgcgcccgggttcggctacaaaagaggacggctgcggcgcgccgggcggaactttccagaacgctcggtgagaggcggaggagcggtaactaccccggctgcgcacagctcggcgctccttcccgctccctcacacaccggcctcagcccgcaccggcagtagaagatggtgaaagaaacaacttactacgatgttttgggggtcaaacccaatgctactcaggaagaattgaaaaaggcttataggaaactggctttgaagtaccatcctgataagaacccaaatgaaggagagaagtttaaacagatttctcaagcttacgaagttctctctgatgcaaagaaaagggaattatatgacaaaggaggagaacaggcaattaaagagggtggagcaggtggcggttttggctcccccatggacatctttgatatgttttttggaggaggaggaaggatgcagagagaaaggagaggtaaaaatgttgtacatcagctctcagtaaccctagaagacttatataatggtgcaacaagaaaactggctctgcaaaagaatgtgatttgtgacaaatgtgaaggtagaggaggtaagaaaggagcagtagagtgctgtcccaattgccgaggtactggaatgcaaataagaattcatcagataggacctggaatggttcagcaaattcagtctgtgtgcatggagtgccagggccatggggagcggatcagtcctaaagatagatgtaaaagctgcaacggaaggaagatagttcgagagaagaaaattttagaagttcatattgacaaaggcatgaaagatggccagaagataacattccatggtgaaggagaccaagaaccaggactggagccaggcgatattatcattgtgttagatcagaaggaccatgctgtttttactcgacgaggagaagaccttttcatgtgtatggacatacagctcgttgaagcactgtgtggcttccagaagccaatatctactcttgacaaccgaaccatcgtcatcacctctcatccaggtcagattgtcaagcatggagatatcaagtgtgtactaaatgaaggcatgccaatttatcgtagaccatatgaaaagggtcgcctaatcatcgaatttaaggtaaactttcctgagaatggctttctctctcctgataaactgtctttgctggaaaaactcctacccgagaggaaggaagtggaagagactgatgagatggaccaagtagaactggtggactttgatccaaatcaggaaagacggcgccactacaatggagaagcatatgaggatgatgaacatcatcccagaggtggtgttcagtgtcagacctcttaatgggccagtgaataacactcactgctggcatttaatgtgcagtagtgaatgagtgaaggactgtaatcataatatgctcactacttgctcttgtttttgttttaataaactatagtagtgttttaaaaagttaaatgaagaataaacgcaaatataaaagc

SEQ ID NO: 640 - DNA, 8833 bp, Homo sapiens
cgccccccacgccctgggccccggagggccgcagccatgagtgaaatgtccagctttcttcacatcggggacatcgtctccctgtacgccgagggctccgtcaatggcttcatcagcactttggggctggtggatgaccgctgtgtggtggagcccgcggccggggacctggacaacccccctaagaagttccgtgactgcctcttcaaggtgtgccccatgaaccgctactcggcccagaagcagtactggaaggccaagcagactaagcaggacaaggagaagatcgctgatgtggtgttgctgcagaagctgcagcatgcggcgcagatggagcagaagcaaaatgacacggagaacaagaaggtgcatggggatgtcgtgaagtatggcagtgtgatccagctcctgcacatgaagagcaacaagtacctgacagtgaacaagcggcttccggccttgctggagaagaacgccatgcgggtgactctggatgccacaggcaacgagggttcctggctcttcatccagcccttctggaagctgcggagcaacggggacaacgtggtcgtgggggacaaggtgatcctgaatcctgtcaatgccgggcagcctctgcatgccagcaattacgagctcagcgacaacgccggctgcaaggaggtcaattctgtgaactgcaacaccagctggaagatcaacctgtttatgcagtttcgggaccacctggaggaggtgttgaaagggggagacgtggtgcggctgttccatgcggagcaggagaagttcctgacgtgtgacgagtacaagggcaagctgcaggtgttcctgcgaactacactgcgccagtctgccacctcggccaccagctccaatgctctctgggaggtggaggtggtccaccacgacccctgccgtggaggagctgggcactggaatggcttgtaccgcttcaagcacctggctacaggcaactacctggctgctgaggagaaccccagttacaaaggtgatgcctcagatcccaaggcagcaggaatgggggcacagggccgcacaggccgcaggaatgctggggagaagatcaagtactgcctggtggctgtgcctcatggcaatgacatcgcctctctctttgagctggaccccaccaccttgcagaaaaccgactctttcgtgccccggaactcgtacgtccggctgcggcacctctgcaccaacacgtggattcagagcaccaatgtgcccattgacatcgaggaggagcggcccatccggctcatgctgggcacctgccccaccaaggaggacaaggaggcctttgccatcgtgtcagtgcccgtgtctgagatccgagacctggactttgccaatgacgccagctccatgctggccagtgccgtggagaaactcaacgagggcttcatcagccagaatgaccgcaggtttgtcatccagctgctggaagacctggtgttctttgtcagcgatgtccccaacaatgggcagaatgtcctggacatcatggtcactaagcccaaccgggaacggcagaagctgatgagggagcagaacatcctcaaacaggtctttggcattctgaaggtcccgttccgtgagaaggggggtgaaggtcccctggtgcggctggaggagctgtcagaccagaagaacgccccctaccagcacatgttccgcctgtgctaccgtgtgttgcggtattcccaggaggactaccgcaagaaccaggagcacattgccaagcagtttgggatgatgcagtcccagattggctacgacatcctggccgaggacaccatcactgccctgctgcacaacaaccgcaagctcctggaaaagcacatcaccaagaccgaggtggagaccttcgtcagccttgtgcgcaagaaccgggagcccaggttcctggactacctctctgacctgtgtgtgtccaaccacatcgccatccccgtcacccaagagctcatctgcaagtgtgtgctggaccccaagaacagtgacattctcatccggaccgagcttcggcccgtgaaggagatggcccaatcccacgagtacctgagcatcgagtactcagaagaggaagtgtggctcacgtggactgacaagaataacgagcatcatgagaagagtgtgaggcagctggcccaggaggcgcgggccggcaacgcccacgacgagaatgtgctcagctactacaggtaccagctgaagctctttgcccgcatgtgcttggaccgccagtacttggccatcgacgagatctcccagcagctgggcgtggacctgattttcctgtgcatggcagacgagatgctgccctttgacctgcgcgcctccttctgccacctgatgctgcacgtgcacgtggaccgtgacccccaggagctggtcacgccggtcaagtttgcccgtctctggactgagatccccacagccatcaccatcaaggactatgattccaacctcaacgcgtcccgagatgacaagaagaacaagtttgccaacaccatggagttcgtggaggactacctcaacaatgtagtcagcgaggccgtgccctttgccaacgaggagaagaacaagctcacttttgaggtggtcagcctggcgcacaatctcatctacttcggcttctacagcttcagcgagctgctgcggctcactcgcacactgctgggcatcatcgactgtgtgcaggggcccccggccatgctgcaggcctatgaggaccccggtggcaagaatgtgcggcggtccatccagggcgtggggcacatgatgtccaccatggtgctgagccgcaagcagtccgtcttcagtgcccccagcctgtctgctggggccagtgctgctgagccgctggacagaagcaagtttgaggagaatgaggacattgtggtgatggagaccaagctgaagatcctggaaatccttcagttcatcctcaacgtccgcctggattaccgcatatcctacctgctgtctgtcttcaagaaggagtttgtggaggtgtttcccatgcaggacagtggggctgatggcacagcccctgccttcgactctaccactgccaacatgaacctggatcgcatcggggagcaggcggaggccatgtttggagtggggaagacaagcagcatgctggaggtggatgacgagggcggccgcatgttcctgcgcgtgctcatccacctcaccatgcacgactatgcgccactggtctcgggtgccctgcagctgctcttcaagcacttcagccagcgccaggaggccatgcacaccttcaagcaggttcagctgctgatctcagcgcaggacgtggagaactacaaggtgatcaagtcggagctggaccggctgcggaccatggtggagaagtcagagctgtgggtggacaagaagggcagtggcaagggtgaggaggtggaggcaggcaccgccaaggacaagaaagagcgtcccacggacgaggagggctttctgcacccaccaggggagaaaagcagtgagaactaccagatcgtcaagggcatcctggaaaggctgaacaagatgtgcggggttggggagcaaatgaggaagaagcagcaacggctgctgaagaacatggatgcccacaaggtcatgctggacctgctgcagatcccctatgacaagggtgatgccaagatgatggagatcctgcgctacacgcaccagttcctgcagaagttctgtgcagggaaccccggcaaccaggccctgctgcacaaacacctgcacctcttcctcacgccagggctcctggaggcagagaccatgcagcacatcttcctgaacaactatcagctctgctccgagatcagcgagcctgtgttgcagcacttcgtgcacctgctggccacgcacgggcgccatgtgcagtacctggacttcctgcacaccgtcattaaggccgagggcaagtacgtcaagaagtgccaggacatgatcatgactgagctgaccaatgcaggtgacgatgtggtcgtgttctacaatgataaggcatcgctggcccacctgctggacatgatgaaggccgcccgcgacggcgtggaggaccacagccccctcatgtaccacatttccctggtggacctgctggccgcctgtgccgagggcaaaaacgtctacactgagatcaagtgcacctccctcgtgccgctggaggacgtggtgtctgtggtgacgcatgaggactgcatcactgaggtgaaaatggcctatgtgaacttcgtgaaccactgctacgtggacacggaggtggagatgaaggagatctacaccagcaaccacatctggacgctctttgagaacttcaccctggacatggctcgggtctgcagcaagcgtgagaagcgcgtggctgaccccaccttggagaagtacgtgctgagcgttgtgctggacaccatcaacgccttcttcagctccccattctctgagaacagcacttccctgcagacacaccagccggttgtggtgcagctgctgcagtctaccacacgcctcctcgagtgtccgtggctacagcagcagcacaagggctccgtggaggcctgcatccggaccctcgccatggtggccaagggccgggccatcttgctgcccatggacctggatgcccacatcagctcgatgctcagcagtggagccagctgtgcagctgccgcccagcggaacgcctccagctacaaggcaaccacgcgggccttcccccgcgtcacccccaccgccaaccagtgggactacaagaacatcattgagaagctgcaggacatcatcacagccctggaggagcggctgaagcccctggtacaggctgagctgtccgtgctggtggatgtcctgcactggcctgagctgctcttcctggagggcagtgaggcctaccagcgctgcgagagtgggggcttcctgtccaagctgatccagcacaccaaggacctcatggagtcggaggagaagctgtgcatcaaggtgctgcggaccctgcagcagatgctcgtcaagaagaccaagtacggggaccggggcaaccagctgcgcaagatgctgctgcaaaactacctccagaaccggaagtccacctcgcggggggaccttcccgaccccataggcactggcctggacccagactggtcggcaatcgcagccacccagtgccggctggacaaggagggggccaccaagttggtatgcgacctcatcaccagcaccaagaacgagaagatcttccaggagagcatcggcctggccatccacctgctggatggtggcaacacagagatccagaaatccttccacaacctgatgatgagtgacaagaagtcagagcgcttcttcaaggtgctgcacgaccgcatgaagcgggcccagcaggagaccaagtccacggtggcagtcaacatgaatgacctgggcagccagccacatgaggaccgcgagccagtcgaccccaccaccaaaggccgcgtggcctccttctcgatacctggctcctcatcccgctactcgctgggccccagcctgcgccgggggcacgaggtgagcgaacgtgtgcagagcagtgagatgggcacatccgtgctcatcatgcagcccatcctgcgctttctgcagctgctgtgtgagaaccacaaccgggacctgcagaacttcctgcgctgtcagaacaacaaaaccaactacaacttggtatgcgagacgctgcagttcctggacatcatgtgcggcagcaccacgggcggcctggggctgctggggctctacatcaatgaggacaacgtgggcctcgtcatccagaccttggagaccctcactgagtactgccagggcccctgccatgagaaccagacttgcattgtgactcacgagtccaatggcatagacatcatcaccgcactgatcctcaatgacatcagccccctgtgcaagtaccgcatggatctggtgctgcagctcaaggacaatgcctccaagctgctcctggctctgatggagagccggcatgacagtgaaaatgctgagcgaatcctcatcagcctgcggccccaggagctggtggacgtcatcaagaaggcctacctgcaggaggaagagcgtgagaactcggaggtgagcccacgtgaagtgggccataacatctatatcctggcgctgcagctctccaggcacaataaacagctgcagcacctgctgaagccggtgaagcgcattcaagaggaggaggccgagggtatctcttccatgctcagcctcaacaacaagcagctgtcacagatgctcaagtcctcagcgccagcacaggaggaggaggaagaccccctggcctactatgagaaccacacgtcccagatcgagattgtgcggcaggaccgcagcatggagcagatcgtgttcccagtgcccggcatctgccagttcctgacggaggaaaccaagcaccggctcttcaccactactgagcaggacgagcagggcagcaaagtgagcgacttcttcgaccagtcctccttcctgcacaacgagatggagtggcagcgcaacgtccgcagcatgccgctgatctactggttctcccgccgcatgaccctgtggggcagcatctccttcaacctggccgtgtttatcaacatcatcattgccttcttctacccttacatggagggcgcgtccacaggcgtgctggactcccctctcatctcattgctcttctggatcctcatctgcttctccatcgcggccctgttcaccaagcgctacagcatccgccccctcatcgtggcgctcatcctgcgctccatctactatctgggcatcgggcccacactcaacatcctgggtgccctcaatctgaccaacaagatcgtgtttgtggtgagcttcgtgggcaaccgtggcaccttcatccggggctataaggccatggtcatggacatggaattcctctaccacgtgggctacatcctgaccagtgtcctgggcctctttgctcatgagctgttctacagcatcctgctctttgacctcatctaccgcgaggagacgctgttcaacgtcatcaagagtgtgacccgcaatggccgctccatcctgctgacagccctgctggccctcatcctggtctacctcttctccatcgtcggcttcctcttcctcaaggatgacttcattctcgaggtcgaccggctgcccaacaaccactccacagccagccccctggggatgccacatggagctgctgcatttgtggacacctgcagtggggacaagatggactgtgtctcagggctctcggtgcctgaggtcctggaagaggacagggagctggacagcacagagcgggcctgtgacactctgttgatgtgcatcgtcactgtcatgaaccatgggctacgcaacggtggtggcgtgggcgacattctccgcaagccctccaaagatgagtctctcttcccagcccgagtggtctatgacctcctgttcttcttcatcgtcatcatcattgtgctgaacctcatctttggggtaatcatcgacaccttcgctgacctgcgtagtgagaagcagaagaaggaggagattcttaagacgacatgcttcatctgtggtctggagagggacaagtttgataacaagacagtgtcatttgaggaacacatcaagctggagcacaacatgtggaactacttgtacttcattgtgctggtccgcgtgaagaacaagaccgactacacgggccctgagagctacgtggcccagatgatcaagaacaagaacctggactggttcccccggatgcgggccatgtcccttgtcagcaatgagggcgagggggagcagaatgagattcggattctccaggacaagctcaactccaccatgaagctggtgtcccacctcactgcccagctcaacgagctcaaggagcagatgacggagcagcggaaacgcaggcaacgcctaggctttgtggatgtccagaactgcattagccgctgaggagagccaccgaaggccccaacaggggatgctcatcactggagactgcgactgggaagaacactgccccctccctcgggttgggtggcccagccagctggccagcctccactcccactctgccagacaccctgacacccacccaggctttgaagagcatggagggggagcctcagagctgacagtcctgcttagagcccttaaaaagacttgaaagttcactgggactcagtttaccttaatgccttagcagaagataaatcctacctagagacctttgttccttaaagcaataactgacaactctttgtagtcctccttgtgggtagttaagagtggggtcacccctttaactccaagcactacattttggcggctgcggcctctgggggaggtggcagttatgctgttactagtgattttagggctttgttatttaacttatttcaagggtgctgtgctcagccctgcccatggctgtgcagctccctccgtgcctcagatctgctgtagccagtgcagacctcactgtcgtgtccatgccacccccggcatggctccaggtggcctggtgactccatgatggacgatcttgctcccaggacctgcctcttcccaggcttcctggggaagagttgtacgcccaggcaacaagggctgagctgcgcttgcgtggctgtttcatgaccgcttgtttttctccttttggtgtaatgttttacaaatcctttggcctgagaactaatatgttaattgccttaaataaattaatagaaatcta

SEQ ID NO: 641 - DNA, 1763 bp, Homo sapiens
tagctggattccagccattgctgcagctgctccacagcccttttcaggacccaaacaaccgcagccgctgttcccaggatggtgatccgtgtatatattgcatcttcctctggctctacagcgattaagaagaaacaacaagatgtgcttggtttcctagaagccaacaaaataggatttgaagaaaaagatattgcagccaatgaagagaatcggaagtggatgagagaaaatgtacctgaaaatagtcgaccagccacaggttaccccctgccacctcagattttcaatgaaagccagtatcgcggggactatgatgccttctttgaagccagagaaaataatgcagtgtatgccttcttaggcttgacagccccacctggttcaaaggaagcagaagtgcaagcaaagcagcaagcatgaaccttaagcactgtgctttaagcatcctgaaaaatgagtctccattgcttttataaaatagcagaattagctttgcttcaaaagaaataggcttaatgttgaaataatagattagttgggttttcacatgcaaacattcaaaatgaatacaaaattaaaatttgaacattatggtgattatggtgaggagaatgggatattaacataaaattatattaataagtagatatcgtagaaatagtgttgttacctgccaagccatcctgtatacaccaatgattttacaaagaaaacacccttccctccttctgccattactatggcaacttaagtgtatctgcagctctacattaaaaaggagaaagagaaataacctgtctctcattcctaagttgcctcattaattttcatgaacaagaatatgtacctttttgatgctatattactgcgattaaaaaagttcttgcaggtaatgtttatgtatagttaaacgttgtaatttcttatcgtaattataacattcccattctttgtagatgaaactctacatatgaaccacagattttctgagcttctaaatgtagcctttcattgcacatttcagtgatcagaatagatatccttttacacgcacaaaagcaatagattcattcagtggacaagttccttgtttaactacacagctatgatggaatcatatatccaagttccttgcctcagtgaaatatgcatatgtatatcatgaagtgggatgccaagtaagcttaaaatgcattctctagcaaagagattagacttttaaataactcttataaaacaggttggcgatcatttcccaagattggtttcccttgagtttttgttaaaacaaatcttagtagttttgcccgtttaaaacaactcacaatcgtaaatgctactattcctaagatatcttacctttttatttcagtttagccatgtattgtatgagtgtattagtctaagcagtgagaatcttttctatgcctctattccagcaaaaagtagaagtatcaaataaaaagggcaacttttaaaatattaagcctgaagacttctaaaaagacaagaaacatggcctaaataaccaacatagatttacatagtaagtttcacactaccttattaccaaaagcaaacacctcttactttaaactacattatcatgtatatctattgtatgctggtctttactttttgccaaaatcaacatataatgaagagatgcctttgtttgatgagattcaaacttgatgctatgctttaaaataaactcagtacttttagaaacataaaaaaaaaaaaaaaaaaaaaaaaaa

SEQ ID NO: 642 - DNA, 3504 bp, Homo sapiens
ctcccacggtctctagttcgcgttatggccgctgccgcggctgtggaggcggcggcgcctatgggtgccctatggggcctcgtgcacgacttcgtcgtgggtcagcaagagggccccgctgaccaggtggctgcagatgtgaaatctggcaactatacagtgttacaagttgtggaagcccttgggtcctctctagagaatccagaaccccgaactcgggcacgaggaatccagcttttgtcacaggtgctactccactgtcacaccttgctcctggagaaggaagtggtacacctgatactgttctatgagaaccggctgaaggaccatcatcttgtgatcccatctgtcctgcagggtttgaaggcacttagcctgtgtgtggccctgcccccagggctggctgtttctgtgcttaaagccatcttccaggaagtgcatgtacagtccctgccacaggtggaccgacacacagtctacaatatcatcaccaattttatgcgaacccgggaagaagagctaaagagcctaggagctgacttcacctttggcttcatccatgtgatggatggggaaaaggatccccgtaatcttctggtggccttccgcatcgtccatgacctcatctccagggactatagcctgggaccctttgtggaggagttgtttgaagtgacatcctgttatttccctatcgattttacccctccacctaatgatccccatggtatccagagagaagacctcatcctgagtcttcgcgctgtgctggcttctacaccacgatttgctgagtttctgctgcccctgttgattgagaaagtggattctgaggttctgagtgccaagttggattctctacagactctgaatgcttgctgtgctgtgtatggacagaaggaactgaaggacttcctccccagcctttgggcttctatccgcagagaggtgttccagacggcaagtgagcgggtggaggcagagggcctggcggccctccactccctgactgcgtgtttgtctcgctctgtgctgagggctgatgctgaggacctccttgactccttccttagcaacattctacaggactgcagacaccacctgtgtgaaccggacatgaaactggtgtggcctagtgccaagctgttgcaggcagctgcaggtgcatctgcccgggcctgtgactctgacaccagcaatgtaccgcctttactgctggaacagttccacaagcacagtcagagcagccagcggcggacaatccttgaaatgctcctgggtttcttgaagctgcagcagaaatggagctatgaagacaaagatcaaaggcctctgaatggcttcaaggaccagctgtgctcactggtattcatggctctaacagaccccagcacccagcttcagcttgttggcatccgtacactgacagtcttgggtgcccagccagatctcctatcttatgaggacttggagctggcagtgggtcacctgtacagactgagcttcctgaaggaggattcccagagttgcagggtggcagcactggaagcatcaggaaccctggctgctctctaccctgtggccttcagcagccacctcgtacccaagctcgctgaggagctgcgtgtaggggagtcaaatttgactaacggagatgagcccacccaatgctcccggcatctgtgctgtctgcaagccttgtcagctgtatcaacacatcccagcatcgtcaaggagacactgcctctgctgctgcagcatctctggcaagtgaacagagggaatatggttgcacaatccagtgacgttattgctgtctgtcagagcctcagacagatggcagaaaaatgtcagcaggaccctgagagttgctggtatttccaccagacagctataccttgcctgcttgccttggctgtgcaggcctctatgccagagaaggagccctcagttctgagaaaagtactattggaggatgaggtgttggctgccatggtgtctgtcattggcactgctacaacccacctgagccctgagttagctgcccagagtgtgacacacattgtgcccctcttcttggatggcaacgtgtcctttctgcctgaaaacagcttcccgagcagattccagccattccaggatggctcctcagggcagaggcggctgattgcactgcttatggcctttgtctgctccctgcctcgaaatgtggaaatccctcagctgaaccaactcatgcgggagtttttggaactgagctgctgccacagctgccccttttcttccaccgctgctgccaagtgctttgcaggactcctcaacaagcaccctgcagggcagcagctggatgaattcctacagctagctgtggacaaagtggaggctggcctgggctctgggccttgtcgtagtcaggccttcactcttcttctctgggtaacaaaggccctagtgctcagataccatcctctcagctcctgccttacagcccggctcatgggcctcctgagtgacccagaattaggtccagcagcagctgatggcttctctctgctcatgtctgactgcactgatgtgctgactcgtgctggccatgccgaagtgcggatcatgttccgccagcggttcttcacagataatgtgcctgctttggtccagggcttccatgctgctccccaagatgtgaagccaaactacttgaagggtctttctcatgtacttaacaggctgcccaagcctgtactcttgccagagctgcccacgcttctttccttgctgctggaggccctgtcctgccctgactgtgtggtgcagctctccaccctcagctgccttcagcctcttctactggaagcaccccaagtcatgagtcttcacgtggacaccctcgtcaccaagtttctgaacctcagctctagcccttccatggctgtccggatcgccgcactgcagtgcatgcatgctctcactcgcctgcccacccctgtgctgctgccgtacaaaccacaggtgattcgggccttagccaaacccctggatgacaagaagagactggtgcgcaaggaagcagtgtcagccagaggggagtggtttctgttggggagccctggcagctgagccctcagtcctggcctagactgttctgacaatctaacctgggattactaactgttgagccatcttccccaaagcagggaaaccactggtctctgactgcctttcccacagacacagcacaaatgctaggcctctgttgcatggctgtacaaagaacataagagtccatatttctagtggatttgtaaaataagtgtgtgtgagacacttgcgtttgaagaaagatctagggtcctgggtctcttgcatttatatgtcagaaaaggggcgatatgctgctgaggggtgagtgcatatgagtgtggccctgaggaccagggctggcagatgttgtctacctgctgaagaataaagatttcttttggtaaaaaaaaaaaaaaaaaaaaa

SEQ ID NO: 643 - DNA, 3389 bp, Homo sapiens
agcgggcgtgcggagcgggcgacagtggcgtgggatctgcctctctgcgagcagctgggagcggcggcggcggcgccatgagcgggggcaccccttacatcggcagcaagatcagcctcatctccaaggcggagatccgctacgagggcatcctctacaccatcgacaccgaaaactccaccgtagcccttgccaaagttcgatcctttggtacagaagacagaccgacagatcgtccaataccacctcgagatgaagtctttgaatacattatattccgtgggagtgacattaaagaccttactgtttgtgagccaccaaaaccacagtgttctttgcctcaagacccagctattgttcagtcctcactaggctcatcgacttcttcattccagtccatgggttcttatggacctttcggcaggatgcccacatacagtcagttcagtccgagttccttagttgggcagcagtttggtgctgttggtgttgctggaagctctttgacatcctttggaacagaaacatcaaacagtggtaccttaccccaaagtagtgcggttggttctgcctttacacaggatacaagatctctaaaaacacagttatctcaaggtcgctcaagccctcagttagaccctttgagaaaaagcccaaccatggaacaagcagtgcagaccgcctcagcccacttacctgctccagcagctgttgggagaaggagtcctgtatcaaccaggcctttgccatctgccagccaaaaggcaggagagaatcaggagcacaggcaagctgaagtacacaaagtttcaaggccagaaaatgagcaactcagaaatgataacaagagacaagtagctccaggtgctccttcagctccaaggagagggcgtgggggtcatcggggtggcaggggaagatttggtattcggcgagatgggccaatgaaatttgagaaagactttgactttgaaagtgcaaatgcacaattcaacaaggaagagattgacagagagtttcataataaacttaaattaaaagaagataaacttgagaaacaggagaagcctgtaaatggtgaagataaaggagactcaggagttgatacccaaaacagtgaaggaaatgccgatgaagaagatccacttggacctaattgctattatgacaaaactaaatccttctttgataatatttcttgtgatgacaatagagaacggagaccaacctgggctgaagaaagaagattaaatgctgaaacatttggaatcccacttcgtccaaaccgtggccgtgggggatacagaggcagaggaggtcttggtttccgtggtggcagagggcgtggtggtggcagaggtggtaccttcactgcccctcgaggatttcgcggtggattcagaggaggtcgtgggggccgggagtttgcggattttgaatataggaaagacaacaaagttgctgcatagtctacaaacaagtctctgaaaataggtgaatttctagctcttcatggtcctgaacattgatttcagtctttgcaaagaatgaagaagtgaattcgctgtacatttgtcaccagcactgggtttttgttttttgtttgtttttccgcttaatttcaaagataaaatgcagttacttttgggggtggaaggctcatcttaaaacatgagcattaaatatatttggaatagcagaaggttaagtaatttcttatgtatagttaaactaaagcagtacttcagtgggacttaacaagtattttttcatcactgaaaggtttttttttttttatcactaaattgtatttggcaattgcaagttgcctgcagatagggccgtgatactgtgttttgagccacagaaggttgtgtgtgtgtgtgtgtgtgtgtgtgtgtgtgtgtgtgtgtgtatgtgtgtgtctttttcctcctttcttttggggaatcctgtaatatgaggtagcttatttcgtcaattaattagggtgctggatggtagagaattttgtcagtcaactatgtacacacagtaaatactgtttcttaggcaaaggtaacttttttatatagttgtaaaattccattatattccattgccaaagaaacattaagaactttgtatagctgtataaaaagcaactaattttttaaagaataaacattttaaagtcagcaaacatactgtgtccttgcagaagttgatgtgctgagcagcagccttatgggtgggtctttttttcttagttttccaggcttaacatttttgattttgttttttaatgtttggaacataaatgaagatttgatacattatttcattatctaaaaaggattaattattcatgctcattgtaagaacttcattttgtagcaaatggcatatcacaggatctgtccagataatcgatattttcagtatacaaatgtaaataatcacagatgagaatgtacttagctgtattttcaaataagtaatcttccccccttttgtaggactttaaaactaggcatcaatgaacctgtttttcctattatgcctggaatttagtcatgataccttgactcattccatcatatttcaagaggattcagagtgctagaaattattttggtagcctgtaacacacggcaacactggtccttgggcctatgatgacccacagatgactcagtatagagttcattgctaattataaattactagtgaatctttttgatattttaagctctagtgggaaaaatctggccacttttgtgtttttatgaaggccatggaataaaagggtccaaagatttaaatatttttatctaatattttgattgttttcttaactttctccttaaaacattcagtagtgataaagatatagaaactgcactgtaggagaattggaatatttaaggctggttgacattttttattttcattttatatcttttgtatagctctacaaggcagtgttttgtaatttggtttcattatgaagatccagtacttggcagccatagtttagacaatattgttcagtgctgtttgcttgcatgttaacaacaaaaccttttagaggacccacaaatcatgatattgaacacagttccgaggcattcagagcatcagagcaagtaccatggcaatacatgtgtagactgttggagatgtcccgggccaatttcaagaaagaaaactgtaaatactagttctacttgctctgaaattatgagtttatgcgttttcccagccctccgaatcactgactggggcgttttgtgccccagcaataactggcagcatggcatacctgcagtaccccttacaatattaaagcaaagtttttattctaaaacagaataaaactgttcaataaaaaatgctcgtcaaagttc

SEQ ID NO: 644 - DNA, 2831 bp, Homo sapiens
aaaccccagctggaactccggccacagccagcatgcagggcgaagagagcctccggatcctggtggagcccgaaggggacagcttcccgctgatggagatcagcacctgtgagaccgaggcctccgagcagtgggactatgtcctcgtggcccaacgtcacacccagagagacccccggcaggcgcggcagcaacagttcctggaggagctcaggagaaagggcttccacattaaggtgatccgggaccagaaacaggtcttctttgggatccgtgctgacaacagtgtctttggcctgtaccgcactctcctcctggagcctgaggggcctgccccccacgccgagctggccgcgccgaccaccatcccggtcaccacgagtctcagaatccgaatcgtgaacttcgttgtcatgaacaacaagacctcggctggtgagaccttcgaggatctgatgaaggacggggtctttgaggccaggttccccctgcacaagggggagggacgcctgaagaagacgtgggcgcggtggagacacatgttccgggagcagccagttgatgaaatcaggaactactttggggaaaaggtggccctgtacttcgtctggctgggctggtacacctacatgctggtgccggccgccctgacgggcctcttagtctttctgagcggattctcgctgtttgaggccagccagatcagcaaggagatctgtgaggcccacgacatcctcatgtgtcccctcggcgaccacagccgcaggtaccagcggctctcggaaacctgcacttttgccaagctcacccacctctttgacaatgatggcacggtggtgttcgccatcttcatggctctctgggccacggtgttcctggagatctggaagcggcagcgcgcccgcgtggtcctgcactgggacctgtacgtgtgggacgaggaacaggaggaaatggcacttcagctcattaactgccccgactacaagctccggccataccagcactcctacctacgcagcaccgtcatcctcgtcctgaccctgctcatgatctgcctcatgatcggcatggcccacgtcctggtggtctaccgcgtcctggcctccgcgctcttcagcagctcggccgtgcccttcctggaggagcaggtgaccacggccgtggtggtgaccggggctctggtgcactatgtgaccatcgtcatcatgaccaagatcaacaggcgcgtggccctgaagctttgtgacttcgagatgcccaggaccttctcggagcgagagagcaggttcaccatccgcttcttcacactgcagttcttcacccatttctcgtctctcatctacatcgccttcatcctgggcaggatcaacggccaccccgggaagtccacgcgcctggcgggcttgtggaagctggaagagtgccacgccagcggctgcatgatggacctcttcgtgcagatggccatcatcatgggcctgaagcagacgctcagcaactgcgtcgagtacctggtcccgtgggtgacccacaagtgccgctctctgcgggcctccgagtccgggcacctgccccgggaccccgagctcagggactggcggcgcaactaccttctgaacccggtcaacaccttcagcctgttcgacgagttcatggagatgatgatccagtacggcttcaccaccatcttcgtggccgccttcccgctggcgccgctgctcgcgctcttcagcaacctcgtggagatccgcctggacgccatcaagatggtctggttgcagcggcgcctggtgccgcgcaaggccaaggacatcgggacctggctgcaggtgctggagaccatcggtgtgctggcggtcattgccaatgggatggtcattgccttcacatctgagttcatcccccgagtggtctacaagtaccgctatagcccatgcctgaaagaaggcaactctactgtcgactgcctcaagggctacgtcaaccacagcctgtccgtcttccacaccaaggacttccaggaccctgatgggattgagggctcagaaaacgtgactctgtgcagatacagggactaccgcaatccccccgattacaacttctccgagcagttctggttcctcctggccatccgcctggccttcgtcatcctctttgagcacgtggccttgtgcatcaagctcatcgccgcctggttcgtgcccgacatccctcagtcggtgaagaacaaggttctggaggtgaagtaccagaggctgcgtgagaagatgtggcatggaaggcagaggctgggtggggtgggggcaggctctcggcccccaatgcctgcccatcccaccccagcatccatcttcagtgccaggagcacagacgtgtagggccagagcccgtccagaggccaccaggagctgagacagtgccaccaccagcacctcccacaagcccaccgctgtgcgtgttgaggggtgctgtgagaaggctgtgcccatgtggggccgcaggaatcccctgtatgttcagggctgtgagctgccaccctattccgcctgctccgtctttgtgggggctctcaggcttggcacagccctgacttgaactctgggtgaccctgggcacccacagaactgggagtgagggctcctcaggcagccacaaggcaggaaaactggcgcaaatttcctgggcctccctctgacttctgggcgccagatcctgccgtgcccccatcctggctgttgggggtgtcctgagcccacctcgctggcctgttcccttcagccaacccgtttctgcagtaaaattaagcctgtcaaaaaaaaaaaaaaaaa

SEQ ID NO: 645 - DNA, 2756 bp, Homo sapiens
gttgctagagataccgcctggaggccactgatctgtaaaagggatctctacagaagatagggatttttgatcgccagagaagaagggatatgtgagatccaaacgccgaaggaggaaagcaggctccgtggtctcttccagccctgatggaagaaactaccgagccttattatactaggtgctttccacatgcctattcatttaatcctccagcaaccttgtaagaagggccatcccattttatatttaaacaaaccttaactactgacgcaaggagtcaaggatctaatcccaaagcctctgcctggttcgctgcagatggatgtccgcgaggacgccagccctccgcctcccgccgggtccctgaacgccggcccggccggtccaacctcattccgcttcccgccatcgaaacgcgaagcccccgccttcccccaaacgtctcagcgccgctggggcctttctggctgcgccgcctccgaccccaggccccggtccgcgcccgccgctcgctagtcctgggagtgaggagaacgcgtgctgaggacccggccagagggacagcggggaccgccctcccgctgcgtctctgaaagcgaggccgttcctcccgcgtccgacccccgcggggccgtcaggttcggggcggcccaggctgcgggtccgcagggcgcttcgggccgagccggcgcggcgcgtgaagggcaggggacgccccgaaagaccgctggggtgggaccccaagctccaggggtctttggaaataagaatgcggcgtgacgttggctgtgcgggcgcggggctgacgcggaccctataacccatcgccgaaaccgggcggccgcgcccctattcctcggcatttctctctgtccgcggccctgctcagccaatcagcgagtgggctcctaggcaggtcctgagtgacagcgcggcgggctggatcaggagatgcgcgtgcgcggcccggcccggctgatcgcttcgggtgctcgactcctgttgcgcatgctcagcgcgctgcccggctggggacccgcgcacctgcagcgcccgctgctcggccctgcatcctgcctgggcatcctgcgcccggccatgacggcgcactcattcgccctcccggtcatcatcttcaccacgttctggggcctcgtcggcatcgccgggccctggttcgtgccgaagggacccaaccgcggagtgatcatcaccatgctggtcgccaccgccgtctgctgttacctcttctggctcatcgccatcctggcgcagctgaaccccctgttcgggccccagctgaagaatgagaccatctggtacgtgcgcttcctgtgggagtgacccgccgcccccgacccaggtgcccagctctcggaatgactgtggctccactgtccctgacaaccccttcgtccggaccctcccccacacaactatgtctggtcaccagctccctcctgctggcacccagagacccggacccgcagggcctgcctggttcctggaagtcttcccagtcttcccagccagcccgggccctggggagccctgggcacagcagcggccgaggggatgtcctgctccaatacccgcactgctctggagtttgccctctttcccaaggagatgctgctggggagctggtatgggtggggtctttccctttacagacggggcagatgccaggactcagcccatcctgaggaggacacgtgtcctcatggagagggtgctccggcccaggcgggggagtcagtgcccagtcagcagctctgccaccatcctgctgggaactgggggggcctctattgggttataggcaaggccttttctctggcatggaattgttaattttctgacacgtctagatgtgaaatttctgaaaatgttgaagcagagaaacattcacacacaaaaagcaacatagtcatgtgggtccagatggcctcagtcctagatgttggcaccctttgctgtgtctcctcagagtatcctgttccgcctcctgccacctggacctccctcagtggatgtcttccctcccccgaccccagcctgtcagtccgagcacagtgcaggtttggctctgacttgggcttttggctgcagtgggggtggatttcagagcctctcatggcagcatctaagtgaccagagctgggatgagagaggggaaggggcaatgtgagtggcgctatgggacgggccagccctgctcctgagccagccccgccctctgccccctggccctgggctctgtgctagggatggtgaagaatgggggcgtgccagcctggcaggagtgggaagcaacacgcaggggtcccggacctctccagccttgccctcacgcttacccgagctcccagtgtggttagcacagagctcacccaccttgcctggctcccagctggggcctgtcctcactggtgctccaggggaagaaacgacagcctcacttctgtatggactgctgatgtggcctgccatcctgttcagcgggcattgtctttggagcagcaggagaataggatgcctctcactcacatgccagttcctggctggccagctgctcagggctcaggctggggcctcccattgacatcctccccctacactccctctctgagcctccgtcgcccctcctgttgggtaagggtgttgagtgtgacttgtgctgaaaacctggttcatatataataaataatggtgatgaaaagattaaaaaaaaaaaaaaaaaaaaaaaaaaaaaa

SEQ ID NO: 646 - DNA, 1433 bp, Homo sapiens
gtaaactgaactggggctgggcaacaggaaaaaagaagaaaccacagattagagaaatctcggcggtcaggaggcccggggtctaagatgtaaagaggtaaacagatttagggattgattgtctgctggggtgggttgagaggagaaaagggaagaaaagtcgggggactacgtcctcagacctgacctgagtggtgagaggtggacccaggaggagtggcaggtggtggcggggttttgcagagctcagttggaggccctctccgaggcagcttgatggaacgtgggagagccgggctggagtcacagtttttattttgctagggaggtagtcagtggcgcacaaagggtaacaagcagtgatagtggggatgctttccattttaggaaacttttcctaaaaggaagtggcaattttaactaatctcccctccgccgctcccagctgccgctccagatgctgctgctgccgccgcggccaccccaccctcggtcctcctctccggaggccatggacccaccgccccccaaggctccccctttccccaaggcggaaggcccctcctccactccttcctcggcggcggggccccgacccccgcggctgggccgccacctcctcatcgacgccaatggggtcccctacacatacacggtgcagctggaggaggagccccggggcccgccccagcgcgaggcgcccccaggagagcccggccctcgcaagggctacagctgcccggagtgcgcccgtgtctttgccagccctctgcggctgcagagccaccgcgtgtcgcactcggacctcaagcccttcacgtgcggcgcctgcggcaaggccttcaagcgctccagccacctgtcgcggcatcgcgccacgcaccgcgcccgcgccgggccgccgcacacctgcccgctctgcccacgccgcttccaggacgccgcggagctggcgcagcacgtgcgcctccactaagctcgagacccggcctgtgctgccctgcccgtctcagggccaccaagtctgacccacacagcgtcactcactcccacacacaccccctggctctgctgaggttactgccttaccctgggcctcagtttccccaccttccaaagggaggagcatcattccttccttaccccctttctagctgtgtgatgtagaccaaagtcgttgcccctccctgggcctgggaaccagtcggaactgggttccagtccagctgtgctgtgtgagcctgtgcaagtgacatgacctctctaaaccttggttttctgctctctggagcggtgaaccggtggttgtctgcggggaagagatgataaagagcacgggcacggtctggttcatttctgtatctaccccccttccgcccacgcccccgaccctttgctcaataaacattccgcactccaaaaaaaaaaaaaaa

SEQ ID NO: 647 - DNA, 1152 bp, Homo sapiens
cccctcgcacccccgcgcccccagtccccgcgtccccggcgccgccggcccggagctgcccggaagtctcggttccgccgccggcgctcgccaggggaagcccggggccgcccgggacctcggcccgttcctccggacccgagaggccgccgcacgggctgccgctccagatgctgctgctgccgccgcggccaccccaccctcggtcctcctctccggaggccatggacccaccgccccccaaggctccccctttccccaaggcggaaggcccctcctccactccttcctcggcggcggggccccgacccccgcggctgggccgccacctcctcatcgacgccaatggggtcccctacacatacacggtgcagctggaggaggagccccggggcccgccccagcgcgaggcgcccccaggagagcccggccctcgcaagggctacagctgcccggagtgcgcccgtgtctttgccagccctctgcggctgcagagccaccgcgtgtcgcactcggacctcaagcccttcacgtgcggcgcctgcggcaaggccttcaagcgctccagccacctgtcgcggcatcgcgccacgcaccgcgcccgcgccgggccgccgcacacctgcccgctctgcccacgccgcttccaggacgccgcggagctggcgcagcacgtgcgcctccactaagctcgagacccggcctgtgctgccctgcccgtctcagggccaccaagtctgacccacacagcgtcactcactcccacacacaccccctggctctgctgaggttactgccttaccctgggcctcagtttccccaccttccaaagggaggagcatcattccttccttaccccctttctagctgtgtgatgtagaccaaagtcgttgcccctccctgggcctgggaaccagtcggaactgggttccagtccagctgtgctgtgtgagcctgtgcaagtgacatgacctctctaaaccttggttttctgctctctggagcggtgaaccggtggttgtctgcggggaagagatgataaagagcacgggcacggtctggttcatttctgtatctaccccccttccgcccacgcccccgaccctttgctcaataaacattccgcactccaaaaaaaaaaaaaaaaaaaaa

SEQ ID NO: 648 - DNA, 2531 bp, Homo sapiens
cgaagcctctccctcttcctctgctcccgcggggtctgtgctgagaataatggcccggttggcccgggacgagtggaatgattaatgatgttttgcagcagttttctacgtctgaaattttttatgtctctggaacccagaatttgctaagagatggaggaacctcagaaaagctatgtgaacacaatggaccttgagagagatgaacctctcaaaagcaccggccctcagatttctgttagtgaattttcttgccactgctgctacgacatcctggttaaccccaccaccttgaactgtgggcacagcttctgccgtcactgccttgctttatggtgggcatcttcaaagaaaacagaatgtccagaatgcagagaaaaatgggaaggtttccccaaagtcagtattctcctcagggatgccattgaaaagttatttcctgatgccattagactgagatttgaagacattcagcagaataatgacatagtccaaagtcttgcagcctttcagaaatatgggaatgatcagattcctttagctcctaacacaggccgagcgaatcagcagatgggagggggattcttttccggtgtgctcacagctttaactggagtggcagtggtcctgctcgtctatcactggagcagcagggaatctgaacacgacctcctggtccacaaggctgtggccaaatggacggcggaagaagttgtcctctggctggagcagctgggcccttgggcatctctttacagggaaaggtttttatctgaacgagtaaatggaaggttgcttttaactttgacagaggaagaattttccaagacgccctataccatagaaaacagcagccacaggagagccatcctcatggagctagaacgtgtcaaagcattaggcgtgaagcccccccagaatctctgggaatataaggctgtgaacccaggcaggtccctgttcctgctatacgccctcaagagctcccccaggctgagtctgctctacctgtacctgtttgactacaccgacaccttcctacctttcatccacaccatctgccctctgcaagaagacagctctggggaggacatcgtcaccaagcttctggatcttaaggagcctacgtggaagcagtggagagagttcctggtcaaatactccttccttccataccagctgattgctgagtttgcttgggactggttggaggtccattactggacatcacggtttctcatcatcaatgctatgttactctcagttctggaattattctccttttggagaatctggtcgagaagtgaactgaagaccgtgcctcagaggatgtggagccatttctggaaagtatcaacgcagggactttttgtggccatgttctggcccctcatccctcagtttgtttgcaactgtttgttttactgggccctgtactttaacccaattattaacattgatcttgtggtcaaggaactccggcggctggaaacccaggtgttgtgactggcactgcccaggctgagactcttcaagtcccgctgacgtctgagctttgatgcttaagaagggtgaggcagggagcggacttcttattttcaaccttcagtaaaacaaggtgttgctttgtatatcaaaagctccaaccatgtcttttccccttcagcctgtgggtggcacgagcaaggactgacatccgcacagggaggattgtctgtttggctgacacagcagcagcctttcccacccagccactttcttcacagggattaggaggctcagtccccaacggctggcaagactcagggtcctcagtggacatggtgtgggtgacatcagaagggtgccacatcagtcccctccccaacctcagtgactgacagaggatccggatctcagagcctgagaccaggtttattggggcctggcctgtcctctaagtcaagtttaggaaaacaaggataagattctgtcataggcatagagagttgcacataaaaaataccgaagaaaacccaaaattcaatcaacaattctgtcttattgaagagttgctaggattcagagtaaaactcaaaggattcagtttgagcctagaatgatggttagacttgtagtcactgggcttttgttttgctttatggaaatcattgaaggtctggatccctttctctgaatggagagattgagagggatgtcgggcagttcccattagatttagtggccttcatgttattcagaattgttttggtgatacctcacccctgtaatcccagcactttgggtgggtgaggcaggcggatcacttgaagccaggacttcaagaccagcttggccaacatggtgaaacctcatctctactaaaaatacaaaaattagccaagtgtgatggcacatacctgtaatcccagctacttggaattggaaatcgcctgaacccaggaggcggaggttgcagggagggagactgcaccactgcacttcagcctgggtgacagagggagactctgtcttaaaaaaaaaaaaaaaaa

SEQ ID NO: 649 - DNA, 3085 bp, Homo sapiens
ctcacgctctctttccctgccgcctgcctttcttttttcctttttttgtattggcgtcttggggctgttacacacacgcgcgctgtccattgcagcttacataaaggcgggcgcgattatgcaattatattgttagcgatatttcaagagcaatggctcgttttcttaggatttcaacacgaaggcatcatgcatttttgaaaaactagtattgagaataataccttgcaacgtaaagaatgttttttggtatttttacacaatctctactttgaccaaacgagtctggacagttttcttttaatggaaaataggagaaatggaggaaagaatggaaatgatttctgaaaggccaaaagagagtatgtattcctggaacaaaactgcagagaaaagtgattttgaagctgtagaagcacttatgtcaatgagctgcagttggaagtctgattttaagaaatacgttgaaaacagacctgttacaccagtatctgatttgtcagaggaagagaatctgcttccgggaacacctgattttcatacaatcccagcattttgtttgactccaccttacagtccttctgactttgaaccctctcaagtgtcaaatctgatggcaccagcgccatctactgtacacttcaagtcactctcagatactgccaaacctcacattgccgcacctttcaaagaggaagaaaagagcccagtatctgcccccaaactccccaaagctcaggcaacaagtgtgattcgtcatacagctgatgcccagctatgtaaccaccagacctgcccaatgaaagcagccagcatcctcaactatcagaacaattcttttagaagaagaacccacctaaatgttgaggctgcaagaaagaacataccatgtgccgctgtgtcaccaaacagatccaaatgtgagagaaacacagtggcagatgttgatgagaaagcaagtgctgcactttatgacttttctgtgccttcctcagagacggtcatctgcaggtctcagccagcccctgtgtccccacaacagaagtcagtgttggtctctccacctgcagtatctgcagggggagtgccacctatgccggtcatctgccagatggttccccttcctgccaacaaccctgttgtgacaacagtcgttcccagcactcctcccagccagccaccagccgtttgcccccctgttgtgttcatgggcacacaagtccccaaaggcgctgtcatgtttgtggtaccccagcccgttgtgcagagttcaaagcctccggtggtgagcccgaatggcaccagactctctcccattgcccctgctcctgggttttccccttcagcagcaaaagtcactcctcagattgattcatcaaggataaggagtcacatctgtagccacccaggatgtggcaagacatactttaaaagttcccatctgaaggcccacacgaggacgcacacaggagaaaagcctttcagctgtagctggaaaggttgtgaaaggaggtttgcccgttctgatgaactgtccagacacaggcgaacccacacgggtgagaagaaatttgcgtgccccatgtgtgaccggcggttcatgaggagtgaccatttgaccaagcatgcccggcgccatctatcagccaagaagctaccaaactggcagatggaagtgagcaagctaaatgacattgctctacctccaacccctgctcccacacagtgacagaccggaaagtgaagagtcagaactaactttggtctcagcgggagccagtggtgatgtaaaaatgcttccactgcaagtctgtggccccacaacgtgggcttaaagcagaagccccacagcctggcacgaaggccccgtctgggttaggtgactaaaagggcttcggccacaggcaggtcacagaaaggcaggtttcatttcttatcacataagagagatgagaaagcttttattcctttgaatattttttgaaggtttcagatgaggtcaacacaggtagcacagattttgaatctgtgtgcatatttgttactttacttttgctgtttatacttgagaccaacttttcaatgtgattcttctaaagcactggtttcaagaatatggaggctggaaggaaataaacattacggtacagacatggagatgtaaaatgagtttgtattattacaaatattgtcatctttttctagagttatcttctttattattcctagtctttccagtcaacatcgtggatgtagtgattaaatatatctagaactatcatttttacactattgtgaatatttggaattgaacgactgtatattgctaagagggcccaaagaattggaatcctccttaatttaattgctttgaagcatagctacaatttgtttttgcatttttgttttgaaagtttaacaaatgactgtatctaggcatttcattatgctttgaactttagtttgcctgcagtttcttgtgtagatttgaaaattgtataccaatgtgttttctgtagactctaagatacactgcactttgtttagaaaaaaaactgaagatgaaatatatattgtaaagaagggatattaagaatcttagataacttcttgaaaaagatggcttatgtcatcagtaaagtacctttatgttatgaggatataatgtgtgctttattgaattagaaaattagtgaccattattcacaggtggacaaatgttgtcctgttaatttataggagttttttggggatgtggaggtagttgggtagaaaaattattagaacattcacttttgttaacagtatttctcttttattctgttatatagtggatgatatacacagtggcaaaacaaaagtacattgcttaaaatatatagtgaaaaatgtcactatatcttcccatttaacattgtttttgtatattgggtgtagatttctgacatcaaaacttggacccttggaaaacaaaagttttaattaaaaaaaatccttgtgacttacaatttgcacaatatttcttttgttgtactttatatcttgtttacaataaagaattccctttggtaaaaaaaaaaaaaaa

SEQ ID NO: 650 - DNA, 2899 bp, Homo sapiens
cagacggcgctgagcgcggcggcggcgggagcggcgtcgagtgtctccgtgcgcccgtctgtggccaagcagccagcagcctagcagccagtcagcttgccgccggcggccaagcagccaaccatgctcaacttcggtgcctctctccagcagactgcggaggaaagaatggaaatgatttctgaaaggccaaaagagagtatgtattcctggaacaaaactgcagagaaaagtgattttgaagctgtagaagcacttatgtcaatgagctgcagttggaagtctgattttaagaaatacgttgaaaacagacctgttacaccagtatctgatttgtcagaggaagagaatctgcttccgggaacacctgattttcatacaatcccagcattttgtttgactccaccttacagtccttctgactttgaaccctctcaagtgtcaaatctgatggcaccagcgccatctactgtacacttcaagtcactctcagatactgccaaacctcacattgccgcacctttcaaagaggaagaaaagagcccagtatctgcccccaaactccccaaagctcaggcaacaagtgtgattcgtcatacagctgatgcccagctatgtaaccaccagacctgcccaatgaaagcagccagcatcctcaactatcagaacaattcttttagaagaagaacccacctaaatgttgaggctgcaagaaagaacataccatgtgccgctgtgtcaccaaacagatccaaatgtgagagaaacacagtggcagatgttgatgagaaagcaagtgctgcactttatgacttttctgtgccttcctcagagacggtcatctgcaggtctcagccagcccctgtgtccccacaacagaagtcagtgttggtctctccacctgcagtatctgcagggggagtgccacctatgccggtcatctgccagatggttccccttcctgccaacaaccctgttgtgacaacagtcgttcccagcactcctcccagccagccaccagccgtttgcccccctgttgtgttcatgggcacacaagtccccaaaggcgctgtcatgtttgtggtaccccagcccgttgtgcagagttcaaagcctccggtggtgagcccgaatggcaccagactctctcccattgcccctgctcctgggttttccccttcagcagcaaaagtcactcctcagattgattcatcaaggataaggagtcacatctgtagccacccaggatgtggcaagacatactttaaaagttcccatctgaaggcccacacgaggacgcacacaggagaaaagcctttcagctgtagctggaaaggttgtgaaaggaggtttgcccgttctgatgaactgtccagacacaggcgaacccacacgggtgagaagaaatttgcgtgccccatgtgtgaccggcggttcatgaggagtgaccatttgaccaagcatgcccggcgccatctatcagccaagaagctaccaaactggcagatggaagtgagcaagctaaatgacattgctctacctccaacccctgctcccacacagtgacagaccggaaagtgaagagtcagaactaactttggtctcagcgggagccagtggtgatgtaaaaatgcttccactgcaagtctgtggccccacaacgtgggcttaaagcagaagccccacagcctggcacgaaggccccgcctgggttaggtgactaaaagggcttcggccacaggcaggtcacagaaaggcaggtttcatttcttatcacataagagagatgagaaagcttttattcctttgaatattttttgaaggtttcagatgaggtcaacacaggtagcacagattttgaatctgtgtgcatatttgttactttacttttgctgtttatacttgagaccaacttttcaatgtgattcttctaaagcactggtttcaagaatatggaggctggaaggaaataaacattacggtacagacatggagatgtaaaatgagtttgtattattacaaatattgtcatctttttctagagttatcttctttattattcctagtctttccagtcaacatcgtggatgtagtgattaaatatatctagaactatcatttttacactattgtgaatatttggaattgaacgactgtatattgctaagagggcccaaagaattggaatcctccttaatttaattgctttgaagcatagctacaatttgtttttgcatttttgttttgaaagtttaacaaatgactgtatctaggcatttcattatgctttgaactttagtttgcctgcagtttcttgtgtagatttgaaaattgtataccaatgtgttttctgtagactctaagatacactgcactttgtttagaaaaaaaactgaagatgaaatatatattgtaaagaagggatattaagaatcttagataacttcttgaaaaagatggcttatgtcatcagtaaagtacctttatgttatgaggatataatgtgtgctttattgaattagaaaattagtgaccattattcacaggtggacaaatgttgtcctgttaatttataggagttttttggggatgtggaggtagttgggtagaaaaattattagaacattcacttttgttaacagtatttctcttttattctgttatatagtggatgatatacacagtggcaaaacaaaagtacattgcttaaaatatatagtgaaaaatgtcactatatcttcccatttaacattgtttttgtatattgggtgtagatttctgacatcaaaacttggacccttggaaaacaaaagttttaattaaaaaaaatccttgtgacttacaatttgcacaatatttcttttgttgtactttatatcttgtttacaataaagaattc

SEQ ID NO: 651 - DNA, 1044 bp, Homo sapiens
caaccctgccaggctctccaatcgcatgtggaattatcgctctacccaggcggtggtgtcgatctacgttccaattggggccgtaccatggcggagaagactcaaaagagtgtgaagattgctcctggagcagttgtatgtgtagaaagtgaaatcagaggagatgtaactatcggacctcggacagtgatccaccctaaagcaagaattattgcggaagccgggccaatagtgattggcgaagggaacctaatagaagaacaggcccttatcataaatgcttacccagataatatcactcctgacactgaagatccagaaccaaaacctatgatcattggcaccaataatgtgtttgaagttggctgttattcccaagccatgaagatgggagataataatgtcattgaatcaaaagcatatgtaggcagaaatgtaatattgacaagtggctgcatcattggggcttgttgcaacctaaatacatttgaagtcatccctgagaatacggtgatctatggtgcagactgccttcgtcgggtgcagactgagcgaccgcagccccagacactacagctggatttcttgatgaaaatcttgccaaattaccaccacctaaagaagactatgaaaggaagctcaactccagtaaagaactaagaacagtgtataacatgaagataacattttgtctttgaccactgtcttttgaatgggcccacagtgtttatgtactcttaacaactcacagaataatacatgttcactttattttgtaaaattgggttgagaggaaactaatggagtttcattgtaactgtcctttgtaatttatataaatgtattattttcctatatccttggttcttttctgataatttacagatttagcttttcttttgttatataaactgctagccacaaattttagttatgtaaaaggctacccttgacaagaaaagacatactgtcatgtatttatattctagcatagactaaactgaataaaaatgctgataacaggacctttaaaaaaaaaaaaaa

SEQ ID NO: 652 - DNA, 878 bp, Homo sapiens
aggaagtgtcggcgccgccactgtccggccacagcctaacgctcttcgctgtcgtttgcggtctcggcagggcgcccccgttctggtgtttggcgtcggaattaaacaaccaccatgtcgagcaaaaaggcaaagaccaagaccaccaagaagcgccctcagcgtgcaacatccaatgtgtttgccatgtttgaccagtcacagattcaggagttcaaagaggccttcaacatgattgatcagaacagagatggcttcatcgacaaggaagatttgcatgatatgcttgcttctctagggaagaatcccactgatgcataccttgatgccatgatgaatgaggccccagggccaatcaatttcaccatgttcctgaccatgtttggtgagaagttaaatggcacagatcctgaagatgtcatcagaaacgcctttgcttgctttgatgaagaagcaacaggtaccattcaggaagattacctaagagagctgctgacaaccatgggggatcggtttacagatgaggaagtggatgagctgtacagagaagcacctattgacaaaaaggggaatttcaattacatcgagttcacacgcatcctgaaacatggagccaaagacaaagatgactgaaagaactttagctaaaatcttccagttacattgtcttactctcttttacttctcagacacttcccccaccctcatagaacctgttgcatgcaacttagtttcacagctttgcctcttctttttgatgtatttattccagacctttctgccacttagcacttgtataatcagactggaaatggggatgagggtgtaaattgtattgaaaaagatcgcgaataaaaatcaacaaagtgtgaaagccc

SEQ ID NO: 653 - DNA, 3828 bp, Homo sapiens
cagtgccaggctggaggcggcagcggttggaggcttcgcccggctttgcagcggggacttcggcggcggcgcctcaggcacctcggcccggacacgatgaggcgagtggtacgacagagcaagtttcggcatgtatttgggcaagcggtgaaaaatgaccagtgctatgatgacatccgggtttctcgtgtgacctgggatagttccttttgtgctgtcaatcccagatttgttgccataatcatagaggcaagtgggggaggagcgttccttgtcctccctctgcacaagactggtcgaattgacaaatcttaccctacagtatgtggccacacaggaccagtgctggacatagactggtgcccacataacgatcaggtcattgccagcggttcagaggactgcacggtcatggtatggcagatcccagaaaatggactcaccctttccctgactgaacctgtggtgattttggaaggccactcaaagagagtcggcatcgtggcttggcatccaacggcccgcaatgtgcttcttagtgcaggctgtgataatgccattatcatctggaatgtgggaacaggggaagcccttataaacttggacgatatgcattcagacatgatttacaatgtgagctggaaccggaatggcagtctgatctgcacagcttccaaagacaagaaagtgagagtcattgatcccaggaaacaagagattgttgctgagaaggagaaagcacatgaaggagcaagacccatgagagccatcttcctggccgatggcaatgtcttcaccactgggttcagccgcatgagcgagcggcagctggctctctggaatccgaaaaatatgcaggaaccaattgctcttcatgagatggacactagcaatggggtgttgctgcctttctatgaccctgacaccagcatcatttacttatgtggaaagggtgacagcagtattcgctattttgagatcacggatgaatccccgtacgtccactacctcaacacattcagcagcaaggagcctcagagagggatgggttacatgcccaagaggggacttgatgttaacaaatgtgagattgccagattcttcaaacttcatgagagaaagtgtgaacctattattatgactgttcccaggaagtctgaccttttccaagatgacctgtatcctgacacagcggggccagaggccgcgctggaggcagaagagtggttcgaaggcaagaatgcagacccaatcctcatctccttgaagcacgggtacattccaggcaaaaacagggatctcaaggtggtcaagaagaacattctggatagcaagcccactgcaaacaagaagtgcgacctgatcagcatccccaagaaaaccacagacacggccagtgtgcaaaatgaagccaagttggatgagattttaaaagagatcaaatctataaaagacacaatctgcaatcaagatgagcgtatttccaagttagaacagcagatggcaaagatagcagcctgaaggtcccacccccacccctacagaaaaaatgggagcaagaacttgtgcttgggagctggttattggtgtggtcctagggagggcggaaagggaggcactgccatttggagacattccatttcagatttgtcaaccagcgataggccacattccagtaagaactcaatttgtctcccaaatttgcagaaacaaaacgtgatttaaaagctgagctttttatcagaaagcttttttgatgttttaagtgttatgtgacttgttgaactttttaaaaagtgctacttttaaaatcccagatactctgaattttagaaaacaaactaattctgattgtgtcgtgcccaagtacccttttttttttaatgaatagggaccaatgccacattgctttttatatttctttcttttttaatgttgccaaaaccaaaagtagctttgttttcctttgtattttgctactttgcagtatttgtgtgtgtggttttttttccttaatttgaaagggacagcactgtgtatgtttataaactaaatgaagataagatattattttgtataaacattcatctgagaacaatcaaagcagtagccacatggtgctggctcctttgcagcacaaacctggtcattttgatgactgtacaacaggaagacttgaaaaatcacgtggattcatattaccaccgctctcatttcatggagtcttctgatcaaaaaagctcacgtcgtatttcttcttttcctttctcttttctagaaattgggtgtttgtaccagaatggaattttgcttctcggttatcctgtgcttcagatgattataatctaacccaaactagcatgtgtttctgcagtttgttacacacctaggatcatattgcattcatcactttaaacatcatgtttcaggttttggtcaatacttgacaagggtgcccaggacaggaagacgtgtactgctgagtgttccttcttgcccttttcagcagcttgcccagctcttgagtacagtggtggggactaaaaatgtgggcatgtggagaggggtatttgccctgggtgatcctgtttccctgtgctgtccccatgctgtgttggaggaggaagtggctctccttccaccaacaaagctcctgctctaccctcttcctcacatgtgctgcgacctctctcagggctcccccagccattccttctttccttcctgccttttagctctaaccacattaagctaagacaaggccagagggtgcgattgaatgagtattgagactgaggagaatgatagagagtgaagcagaaacaggagcacagacctctgctgtagctttaatgcatacaaacatgtccctccgcacaactaacctgccctgcctctccatctctcaccaaggctgcgtcaaagcacagaggctccccggactcggagggggccagagactgagctctggtcacctgttcattcctcggttagctggaactttgccccgtttccagtttcttatagtgcatgcttgggaaacaagatttaaggagcctctgttttggaagggctgtctgtgattgaacgtgaaatgtgtagtgccattgggaccacgaagggaattcttgcacatgctcgtgctggtgtgggcatgggactggctggaaacgtctgtatgcagggagccagggtgagggcagagtgtggtgacagccgaacttggagtaatgtccgtgtagaaaaaggaccatgttcttatccagccaatactgggagtgctgtctccacaatttcagggcatctgaatgtttgatgtggttttgtgtgtgtgtatgtatgtgtttaatattgaagtggatcatgagatgtaaagaaaacaataatggcaatgacttatattcaaatctgtatttgtttctttatcaatgtaatctgctgaggaccttttgtctaagattcagtagtgttttaaggttctgatatcgaattaatgaagtaaagttgttgatggtggtgaaacaccgtagggcatgtggttcaaagagaagcaggagggcaagggaaagttaccctgatcttagtttgtagcttatgacttatttaatgaatggatgcccagccaagctcagagtaggcgcccaaagcattgtggattattttcctgttttgtctttttttttttttttttttaagccatgacatcccagaagaggacagtgaattactcctaggtcggctcttatagagtggccatagtgttctgtcaaaacacttgcttccattttcagagataaaaatcattgattacaaaaaaaaaaaaaaaaa

SEQ ID NO: 654 - DNA, 1155 bp, Homo sapiens
tgataatcatggcgcccctcggaacaactgtattgctgtggagcctcttgaggagttctccgggcgtggaacgggtctgtttccgggctcgaatccagccctggcacggtggcctgctccaaccgctaccttgctctttcgagatggggctgccacgccgccggttcagctccgaggccgcagaatctggtagcccagagaccaagaaacctacatttatggatgaggaagttcaaagcatactcacgaaaatgacaggcttgaacttgcagaagacttttaagccagctatacaagaactgaagccaccaacctataagctaatgactcaggcacagttggaagaggctacaagacaggcagttgaggcagctaaagtacgattaaaaatgccaccagttctggaagagcgagtaccaataaatgatgtgttagctgaagataagattttggaaggaacagaaacaaccaaatatgtgtttactgatatatcatatagcataccacaccgggagcgttttattgtcgtcagagaaccaagtggcacactacgcaaagcctcttgggaagaacgggaccgaatgatacaagtttatttcccaaaagaaggtcgtaaaattttgacaccaataattttcaaggaagaaaatcttaggactatgtatagccaggacaggcatgttgatgtcctcaatctctgctttgcccagtttgagccagattccacagagtatatcaaggttcatcacaagacctatgaagatatagataaacgtggaaaatatgaccttttacgttcaacaagatactttggtggaatggtgtggtattttgtaaataataaaaagattgatggtttgctgattgaccagattcagagagatttaatcgatgatgcaaccaacttggtccagctgtatcacgtgctccatccagatggccagtcggctcaaggggccaaggatcaggctgctgagggaataaatttaatcaaggtctttgcaaaaacagaagcacagaagggagcctatatagaactaacactgcagacttatcaagaagcactcagtcgccattctgcagcttcctaaaaatattttaaaaatacatttattttactaaaaaaaaaaaaaaaaaaaaaaaaaaaaaaaaaaa

SEQ ID NO: 655 - DNA, 2387 bp, Homo sapiens
cggggctcgtggcgtcgggcctggcgggctccccgttgggcgggggcggcggtccgagcggctgcggcagcggaagcgggtccgggtcgcgcagggcgggggcggcgcagcgggcggaggcggccgtgggccgcctgggcagaatgtcacgatggacgagggcggcacgcccctgctccccgacagcctggtctaccagatcttcctgagcctgggcccggccgacgtgctggccgccgggctggtgtgccgccaatggcaggccgtgtcgcgggacgagttcctgtggagggagcagttctaccgctactaccaggtggcccgcgacgtgccccgacacccagcggccatgtcctggtacgaggagttccagcggctgtatgacacggtgccctgcgtggaggtgcagacgctgcgggaacacacagaccaggtcctgcacctcagcttctcccattccgggtaccagttcgcgtcctgctccaaggactgcactgtgaagatctggagcaacgacctgaccatctcgctgctgcacagcgcggacatgcggccctacaactggagctacacccagttctcccagttcaacaaggacgactcgctactgctggcctcgggggtgttcctggggccgcacaactcctcatccggcgagattgctgtcatcagcctagactccttcgcgctgctgtcccgcgtgcggaacaagccctatgacgtgtttggctgttggctcaccgagaccagcctcatctcggggaacctgcaccgcatcggagatatcacctcctgctcggtgctgtggctcaacaatgccttccaggatgtggagtcagagaacgtcaacgtggtgaagcggctgttcaagatccagaacctcaatgccagcaccgtccgcacggtgatggtggccgactgcagccgcttcgacagccctgacctgctgctggaagccggtgacccggccacgtccccctgccgcatctttgacctgggcagcgacaacgaggaggtggtggctggcccggcccccgcccacgccaaggagggcttgcggcactttctggaccgcgtgctggaggggcgggcgcagccacagctgtcggagcgcatgctagagaccaaggtggccgagctgctggcccagggccacaccaagccacccgagcgcagtgccacaggcgccaagagcaagtacctcatcttcaccactggctgcctcacctactccccacaccagatcggcatcaagcagatcctgccacaccagatgaccacggcagggcccgtgctgggtgagggccggggctccgatgccttcttcgacgcgctggaccacgtcatagacatacacggacacatcatcggcatgggcctgtcgcccgacaacaggtacctgtacgtgaacagccgcgcctggcccaacggtgcggtggtggccgaccccatgcagccgccaccaatcgcggaggagattgacctgctggtgttcgacctcaagaccatgcgggaggtgaggcgggctctgcgtgcgcaccgcgcctacacgcccaacgacgagtgcttcttcatcttcctggacgtcagcagggacttcgtggccagcggggcggaggaccggcacggctacatctgggaccgccactacaacatctgtctggccaggctgcggcacgaggatgtggtcaactcagtggtcttcagtccccaggagcaggagctgctgctcacggccagcgacgacgccaccatcaaagcctggcgctccccacgcaccatgcgcgtcctccaggcacctcgcccacggcctcgcaccttcttctcctggcttgccagccagaggcgctgaggtgtgctgggtgcactggagccaccgggaccccttgaggacatcgccaggctctgtggctttttcccgagcgggagaggtggagatgcttatagcagttacgccttaggaaggggacaaccaggccccgccacacgctcacacacaaacctgctcacgcagctgtgatgcttggcacggggtggccagtgcagatggagcccaaggccccctcggcctcctgggcaacttggggtacacaggatactgggggtgccgctcctcactcaaccccaggctaggggtacacctgacccagctggcctcggcccggggcaccttcggctggtcctgtggggccctggacggtggcccagtggtggcaggggctgctcctggctgtggttgtgcgcccggggcttgggagcggccggtcacgctgctgtgggcccgagtgtgttgcatgtccacgcaccacccgttcagggccctgaataaacagttggcaacagcaaaaaaaaaaaaaaaaaaaaaaaaaaaaaaaaaaaaaaaaaaa

SEQ ID NO: 656 - DNA, 4435 bp, Homo sapiens
ggcgatccgctggcgctagtctgaccctccgccaggcaaaaggaagattgtctttggctatagagtttttttttttaaagattactaaacatacaggaagtgataagaagtatcattcatcagaagcatcattcatcaatcaacttgaagaaaaaggtgatatattatttctttaaggtgctgtgtgatgtgttaagagcatattagaaggaatggttttgtctaattttcttcatgagttatggtggctgagacatcgagtctatattttggggcaaaaactaaacggcagcacaaaaggaaatctatattaatagaatattttgttgaacaaaggaggttagataagaactgcaaaccaacagactcagcaaacaaggaaagaaacgtgttagccataagacatgtttcaagtgaatcgaagtccaataactgtagacttcagaagaaaaaagttttcaaaaattttatcaaaacaggtcactgataaataactcctccagtaatagagctaggcctgaaaccaaaattaattaaaaaattaacaaaacagattgaacctgaattaaatttcttttgataaaaaaacttattaaaaataatcaaaattttcctcaaatttttattaccttgtccaaagtaaagcaagtgtcttttagcattcatgccagcttttctcatgttctaggaatgacagaaaccttacttgaagcaaactagtatttttgttgaaaatgtatatcagcatcagttaaagttgatttttcagacctgctcctcagtaataatactagctagtcagcattcacgcctaccaggacacaaaaatcctcttcaaaactactcagaaaagaaagtcattactcaggaatgatgtccattcaggagaaatcaaaagagaattcctccaaagttactaaaaaaagtgacgataagaattcagaaacagaaattcaggattctcaaaagaatctagcaaaaaaatcaggtccaaaggagactataaaatcacaggctaaatcttccagtgaaagtaaaataaatcagccagaattggaaacacgcatgagtacaaggtcatcaaaggcagcatctaatgataaagctactaaatccattaataaaaatacggtgactgtgaggggatattcacaagaatctacaaaaaagaaattatctcagaaaaaattagtacatgaaaaccctaaagcaaatgaacagcttaaccggagatcacaaaggctacaacaattaacagaggtttcaagaaggtcgttacgcagtagagaaattcagggtcaagttcaagcagttaaacagagtttgccaccaactaaaaaagagcagtgtagcagtactcagagtaaatctaataaaacaagtcaaaaacatgtgaagagaaaagtactggaagtaaagtctgactctaaagaagatgaaaatctagtaattaatgaagtaataaattctcccaaagggaaaaaacgcaaggtagaacatcagacagcttgtgcttgtagttctcaatgcacgcaaggatctgaaaagtgtcctcagaagactactagaagagacgaaacgaaacctgtgcctgtaacttctgaggtgaaaagatcaaaaatggctacttcagtggtcccgaaaaagaatgagatgaagaagtcggttcatacacaagtgaatactaacacaacactcccaaaaagtccacagccatcagtgcctgaacaaagtgataatgagctggagcaagcaggaaagagcaaacgaggtagtattctccagctctgtgaagaaattgctggtgaaattgagtcagataatgtagaggtaaaaaaggaatcttcacaaatggaaagtgtaaaggaagaaaagcccacagaaataaaattggaagagaccagtgttgaaagacaaatacttcatcagaaggaaacaaatcaggatgtgcaatgtaatcgttttttcccaagtagaaaaacaaagcctgtgaaatgtatactaaatggaataaacagcttagccaagaagaactccaactggactaaaattaaactctcaaaatttaactctgtgcagcacaataagttggactctcaagtttcccctaaattaggcttattacgaaccagtttttcaccaccagctttagaaatgcatcatccagtgactcaaagtacatttttagggacaaagctacatgatagaaatataacttgccagcaggaaaaaatgaaagaaattaattctgaagaagtgaaaattaatgatattacagtagaaattaataaaaccacagaaagggctcctgaaaattgtcatttggccaatgagataaaaccttctgacccaccattggataatcagatgaaacattcttttgattcagcatcaaataagaatttcagccaatgtttggaatccaagctagaaaacagtccagtggaaaatgttactgctgcttcgactctgctcagtcaagcaaaaattgatacaggagagaataaatttccaggttcagctccccaacagcatagtattctcagtaaccagacatctaaaagcagtgataacagggagacaccacgaaatcattctttgcctaagtgtaattcccatttggagataacaattccaaaggacttgaaactaaaagaagcagagaaaactgatgaaaaacagttgattatagatgcaggacaaaaaagatttggagcagtttcttgtaatgtttgtggaatgctgtatacagcttcaaatccagaagatgaaacacagcatctgcttttccacaaccagtttataagtgctgttaaatatgtgggctggaagaaagaaagaattctggctgaataccctgatggcaggataataatggttcttcctgaagacccaaagtatgccctgaaaaaggttgacgagattagagagatggttgacaatgatttaggttttcaacaggctccactaatgtgctattccagaactaaaacacttctcttcatttccaatgacaaaaaagtagttggctgcctaattgcggaacatatccaatggggctacagagttatagaagagaaacttccagttatcaggtcagaagaagaaaaagtcagatttgaaaggcaaaaagcctggtgctgctcaacattaccagagcctgcaatctgcgggatcagtcgaatatgggtattcagcatgatgcgtcggaagaaaattgcttctcgcatgattgaatgcctaaggagtaactttatatatggctcatatttgagcaaagaagaaattgctttctcagatcccactcctgatggaaagctgtttgcaacacagtactgtggcactggtcaatttctggtatataattttattaatggacagaatagcacgtaaaacaaattcttgcctacaccactagaagacatctattgaagagaatggattggttgctgactttaaccaggaactagggccatttttattacaatgaactcaggactggcaacaaccatatggttgttccattttcataaaattggaaacaatgcagtaatagcttattgttttgttttttaaagaagatattttattatcttttacagaaatttatgattgatgtattttatctatagttatttagacatgtttacatgcagcagataattgttcatagtggactgaaaactaatgcaaggactatggtctcagtgataagtatattttgaagttcttaatatggaaatataccagtgtagcttggtactgtatttttttatattgatctgctgataccagtgataggcttaaagattgtattttcacagagtggaaaccaatttttttagttattgttcaaggagggtgcaatattaagtgttttggaatttgaagctaatttttaaaaggcctgaactatactttgaagaaacccctatagaaaaggaaagctccagctaaataggaagaattagaatattgagcttttttttcctgatttttctctttcctatctttgatggaaggaggaagtagaaagtggtaaagaattgaggctttccttcttggagagctgtaaatgacaagcattaggaaaggtaccctcctagattcattattctttcattctggtttcacttttaaaataaatggcaacttggcacacctaggctgttaacaaatctcaaagaggtttataaaaacgtatagaatacttggaagcaaagtatggatgactcggtatctgctttgttattcctcagaaatactgcactgagtatatgccctcattactggacttcattttgatacttgtctatccttcatagtgccctctacttttaaagggtttatatgttgaaaaactgctgtggccttttatgacctgtatataatgtagaataaaaataataaaatacttgatagctttttctaagtg

SEQ ID NO: 657 - DNA, 1655 bp, Homo sapiens
ctccgaggccgtgagcgcaaagcctcaggccccggctccctcctgagctgcgccgtgccaggccgcccgccgggatgcagtgggccgtgggccggcggtgggcgtgggccgcgctgctcctggctgtcgcagcggtgctgacccaggtcgtctggctctggctgggtacgcagagcttcgtcttccagcgcgaagagatagcgcagttggcgcggcagtacgctgggctggaccacgagctggccttctctcgtctgatcgtggagctgcggcggctgcacccaggccacgtgctgcccgacgaggagctgcagtgggtgttcgtgaatgcgggtggctggatgggcgccatgtgccttctgcacgcctcgctgtccgagtatgtgctgctcttcggcaccgccttgggctcccgcggccactcggggcgctactgggctgagatctcggataccatcatctctggcaccttccaccagtggagagagggcaccaccaaaagtgaggtcttctacccaggggagacggtagtacacgggcctggtgaggcaacagctgtggagtgggggccaaacacatggatggtggagtacggccggggcgtcatcccatccaccctggccttcgcgctggccgacactgtcttcagcacccaggacttcctcaccctcttctatactcttcgctcctatgctcggggcctccggcttgagctcaccacctacctctttggccaggacccttgaccagccaggcctgaaggaagacctgcggatggacaggagcgggcaggcccgcacatatccacttgctggagcccatgtttacagacagggacatacaccatgcagatcctgagttcctgctgtatgagcagggatatccatgcttatgtatccaaacacagagacccatgggaacaaatgagacacatatagatactgagacctgtgtgtacagtaggaccatgcactcacacccatctggagagggagcccccggtataccaagggagccagttgtgttcagacacacacatcacagcttgactcactaactgaggcctttccatagctccacagcttcccacctcctccccaccaaaccggggttctagagttaaggatgggggagggtattatactgcctcagtctgactcctcaacccagcagcaatttgaggggatgagggggaagaggagctgccttttggaggcccccttcacctgcagctatgatgcccttccccttctcccctgtcctcaccatatgccttatccccattctactcccctgctatgcaagtgcccctgtggcttgtccccaaccccctcagcaacaaagctcagctggggaacgagagtaatttgaagaatgcttgaagtcagcgtcttccattccagaaagacccccattcttcctttgggggtatgatgtggaagctggtttcagcccaggacccaccactgaggagaggatctagacaggtgggcctaattccaaggggcccttcctggcctggagaaggccttttacacacacacaacacatacacacacacacacacacacacatatcacagttttcacacagcccctgctgcattctctgtccatctgtctgtttctattaataaagatttgttgatctgttcc

SEQ ID NO: 658 - DNA, 1580 bp, Homo sapiens
ctccgaggccgtgagcgcaaagcctcaggccccggctccctcctgagctgcgccgtgccaggccgcccgccgggatgcagtgggccgtgggccggcggtgggcgtgggccgcgctgctcctggctgtcgcagcggtgctgacccaggtcgtctggctctggctgggtacgcagagcttcgtcttccagcgcgaagagatagcgcagttggcgcggcagtacgctgggctggaccacgagctggccttctctcgtctgatcgtggagctgcggcggctgcacccaggccacgtgctgcccgacgaggagctgcagtgggtgttcgtgaatgcgggtggctggatgggcgccatgtgccttctgcacgcctcgctgtccgagtatgtgctgctcttcggcaccgccttgggctcccgcggccactcgggggagacggtagtacacgggcctggtgaggcaacagctgtggagtgggggccaaacacatggatggtggagtacggccggggcgtcatcccatccaccctggccttcgcgctggccgacactgtcttcagcacccaggacttcctcaccctcttctatactcttcgctcctatgctcggggcctccggcttgagctcaccacctacctctttggccaggacccttgaccagccaggcctgaaggaagacctgcggatggacaggagcgggcaggcccgcacatatccacttgctggagcccatgtttacagacagggacatacaccatgcagatcctgagttcctgctgtatgagcagggatatccatgcttatgtatccaaacacagagacccatgggaacaaatgagacacatatagatactgagacctgtgtgtacagtaggaccatgcactcacacccatctggagagggagcccccggtataccaagggagccagttgtgttcagacacacacatcacagcttgactcactaactgaggcctttccatagctccacagcttcccacctcctccccaccaaaccggggttctagagttaaggatgggggagggtattatactgcctcagtctgactcctcaacccagcagcaatttgaggggatgagggggaagaggagctgccttttggaggcccccttcacctgcagctatgatgcccttccccttctcccctgtcctcaccatatgccttatccccattctactcccctgctatgcaagtgcccctgtggcttgtccccaaccccctcagcaacaaagctcagctggggaacgagagtaatttgaagaatgcttgaagtcagcgtcttccattccagaaagacccccattcttcctttgggggtatgatgtggaagctggtttcagcccaggacccaccactgaggagaggatctagacaggtgggcctaattccaaggggcccttcctggcctggagaaggccttttacacacacacaacacatacacacacacacacacacacacatatcacagttttcacacagcccctgctgcattctctgtccatctgtctgtttctattaataaagatttgttgatctgttccaaaaaaaaaaaaaaaaaa

SEQ ID NO: 659 - DNA, 1547 bp, Homo sapiens
ctccgaggccgtgagcgcaaagcctcaggccccggctccctcctgagctgcgccgtgccaggccgcccgccgggatgcagtgggccgtgggccggcggtgggcgtgggccgcgctgctcctggctgtcgcagcggtgctgacccaggtcgtctggctctggctggaccacgagctggccttctctcgtctgatcgaggagctgcagtgggtgttcgtgaatgcgggtggctggatgggcgccatgtgccttctgcacgcctcgctgtccgagtatgtgctgctcttcggcaccgccttgggctcccgcggccactcggggcgctactgggctgagatctcggataccatcatctctggcaccttccaccagtggagagagggcaccaccaaaagtgaggtcttctacccaggggagacggtagtacacgggcctggtgaggcaacagctgtggagtgggggccaaacacatggatggtggagtacggccggggcgtcatcccatccaccctggccttcgcgctggccgacactgtcttcagcacccaggacttcctcaccctcttctatactcttcgctcctatgctcggggcctccggcttgagctcaccacctacctctttggccaggacccttgaccagccaggcctgaaggaagacctgcggatggacaggagcgggcaggcccgcacatatccacttgctggagcccatgtttacagacagggacatacaccatgcagatcctgagttcctgctgtatgagcagggatatccatgcttatgtatccaaacacagagacccatgggaacaaatgagacacatatagatactgagacctgtgtgtacagtaggaccatgcactcacacccatctggagagggagcccccggtataccaagggagccagttgtgttcagacacacacatcacagcttgactcactaactgaggcctttccatagctccacagcttcccacctcctccccaccaaaccggggttctagagttaaggatgggggagggtattatactgcctcagtctgactcctcaacccagcagcaatttgaggggatgagggggaagaggagctgccttttggaggcccccttcacctgcagctatgatgcccttccccttctcccctgtcctcaccatatgccttatccccattctactcccctgctatgcaagtgcccctgtggcttgtccccaaccccctcagcaacaaagctcagctggggaacgagagtaatttgaagaatgcttgaagtcagcgtcttccattccagaaagacccccattcttcctttgggggtatgatgtggaagctggtttcagcccaggacccaccactgaggagaggatctagacaggtgggcctaattccaaggggcccttcctggcctggagaaggccttttacacacacacaacacatacacacacacacacacacacacatatcacagttttcacacagcccctgctgcattctctgtccatctgtctgtttctattaataaagatttgttgatctgttcc

SEQ ID NO: 660 - DNA, 1262 bp, Homo sapiens
actctcgcgagatccctactggctataaaggcagcgccccggagagctcttgcgcgtcttgttcttgcctggtgtcggtggttagtttctgcgacttgtgttgggactggtgagtgtgggcagtgcggcccctgcggagtgaggcgcggcgcgcccttcttgcctgttgcctcttcctcctcctgtccggggcccgcccgcgctcgggtgggggtgctgtgatgcgtgaggcagccgggggaggcccggagtccgagactgcttgagcgctgcgcacacccctctcgtgggccccccacgtaggtgcgggaacctggttgaaccccaagctgataggaagatgtcttcaggaaatgctaaaattgggcaccctgcccccaacttcaaagccacagctgttatgccagatggtcagtttaaagatatcagcctgtctgactacaaaggaaaatatgttgtgttcttcttttaccctcttgacttcacctttgtgtgccccacggagatcattgctttcagtgatagggcagaagaatttaagaaactcaactgccaagtgattggtgcttctgtggattctcacttctgtcatctagcatgggtcaatacacctaagaaacaaggaggactgggacccatgaacattcctttggtatcagacccgaagcgcaccattgctcaggattatggggtcttaaaggctgatgaaggcatctcgttcaggggcctttttatcattgatgataagggtattcttcggcagatcactgtaaatgacctccctgttggccgctctgtggatgagactttgagactagttcaggccttccagttcactgacaaacatggggaagtgtgcccagctggctggaaacctggcagtgataccatcaagcctgatgtccaaaagagcaaagaatatttctccaagcagaagtgagcgctgggctgttttagtgccaggctgcggtgggcagccatgagaacaaaacctcttctgtattttttttttccattagtaaaacacaagacttcagattcagccgaattgtggtgtcttacaaggcaggcctttcctacagggggtggagagaccagcctttcttcctttggtaggaatggcctgagttggcgttgtgggcaggctactggtttgtatgatgtattagtagagcaacccattaatcttttgtagtttgtattaaacttgaactgagaccttgatgagtctttaaaaaaaaaaaaaaaaaaaaaaaaaaaaa

SEQ ID NO: 661 - DNA, 1236 bp, Homo sapiens
actctcgcgagatccctactggctataaaggcagcgccccggagagctcttgcgcgtcttgttcttgcctggtgtcggtggttagtttctgcgacttgtgttgggactggtgagtgtgggcagtgcggcccctgcggagtgaggcgcggcgcgcccttcttgcctgttgcctcttcctcctcctgtccggggcccgcccgcgctcgggtgggggtgctgtgatgcgtgaggcagccgggggaggcccggagtccgagactgcttgagcgctgcgcacacccctctcgtgggccccccacgtagctgataggaagatgtcttcaggaaatgctaaaattgggcaccctgcccccaacttcaaagccacagctgttatgccagatggtcagtttaaagatatcagcctgtctgactacaaaggaaaatatgttgtgttcttcttttaccctcttgacttcacctttgtgtgccccacggagatcattgctttcagtgatagggcagaagaatttaagaaactcaactgccaagtgattggtgcttctgtggattctcacttctgtcatctagcatgggtcaatacacctaagaaacaaggaggactgggacccatgaacattcctttggtatcagacccgaagcgcaccattgctcaggattatggggtcttaaaggctgatgaaggcatctcgttcaggggcctttttatcattgatgataagggtattcttcggcagatcactgtaaatgacctccctgttggccgctctgtggatgagactttgagactagttcaggccttccagttcactgacaaacatggggaagtgtgcccagctggctggaaacctggcagtgataccatcaagcctgatgtccaaaagagcaaagaatatttctccaagcagaagtgagcgctgggctgttttagtgccaggctgcggtgggcagccatgagaacaaaacctcttctgtattttttttttccattagtaaaacacaagacttcagattcagccgaattgtggtgtcttacaaggcaggcctttcctacagggggtggagagaccagcctttcttcctttggtaggaatggcctgagttggcgttgtgggcaggctactggtttgtatgatgtattagtagagcaacccattaatcttttgtagtttgtattaaacttgaactgagaccttgatgagtctttaaaaaaaaaaaaaaaaaaaaaaaaaaaaa

SEQ ID NO: 662 - DNA, 1042 bp, Homo sapiens
actctcgcgagatccctactggctataaaggcagcgccccggagagctcttgcgcgtcttgttcttgcctggtgtcggtggttagtttctgcgacttgtgttgggactgctgataggaagatgtcttcaggaaatgctaaaattgggcaccctgcccccaacttcaaagccacagctgttatgccagatggtcagtttaaagatatcagcctgtctgactacaaaggaaaatatgttgtgttcttcttttaccctcttgacttcacctttgtgtgccccacggagatcattgctttcagtgatagggcagaagaatttaagaaactcaactgccaagtgattggtgcttctgtggattctcacttctgtcatctagcatgggtcaatacacctaagaaacaaggaggactgggacccatgaacattcctttggtatcagacccgaagcgcaccattgctcaggattatggggtcttaaaggctgatgaaggcatctcgttcaggggcctttttatcattgatgataagggtattcttcggcagatcactgtaaatgacctccctgttggccgctctgtggatgagactttgagactagttcaggccttccagttcactgacaaacatggggaagtgtgcccagctggctggaaacctggcagtgataccatcaagcctgatgtccaaaagagcaaagaatatttctccaagcagaagtgagcgctgggctgttttagtgccaggctgcggtgggcagccatgagaacaaaacctcttctgtattttttttttccattagtaaaacacaagacttcagattcagccgaattgtggtgtcttacaaggcaggcctttcctacagggggtggagagaccagcctttcttcctttggtaggaatggcctgagttggcgttgtgggcaggctactggtttgtatgatgtattagtagagcaacccattaatcttttgtagtttgtattaaacttgaactgagaccttgatgagtctttaaaaaaaaaaaaaaaaaaaaaaaaaaaaa

SEQ ID NO: 663 - DNA, 2941 bp, Homo sapiens
cggcagagaggatatcttgggcgggggatgtgagcgctgagcccttggcagaagtcaatgtgattttaatttgaagcaaaactgaaatgggttcttcttcctcattctattcatgttgctttttgatggccatggcataaggaactctatcccaggaatacagctttgcattagcaccgaacaagatttgtgatgaaatggagcctggaacaaactcttttcgggtagaatttcctgatttttccagcaccattctacagaaactgaaccagcagcgccagcaaggacaattatgtgacgtctccattgttgtccaaggccacattttccgggcacacaaagccgttcttgctgccagttcaccctacttttgtgaccaggtactcctgaaaaacagcaggagaattgttttgcctgatgtgatgaacccaagagtgtttgagaacattctcctatctagttatacaggacgtctagtaatgcccgctccagaaattgttagttacttgacagcggcaagcttcctccagatgtggcatgtggtagacaaatgcactgaagttttagagggaaaccctacagtcctttgtcagaagctaaatcatggcagtgaccaccagtcaccaagcagcagtagttataatggcctggtagagagctttgagctgggctctgggggtcatactgattttcccaaagcccaagaactgagagatggtgaaaatgaagaggagagcaccaaagacgagctgtcatcccagctcaccgagcacgaatacctgcccagcaactcgtccacagagcatgaccgcctgagcacggaaatggcaagccaggatggggaggagggcgccagcgacagcgccgagttccactacacccggcccatgtacagcaagcccagcatcatggctcacaaacgctggatccacgtgaagcccgagcgcttagaacaggcttgcgagggcatggatgtgcacgcgacctacgacgagcaccaggtcacagagtccatcaacaccgtgcagacagagcacacggtgcagccttcgggagtggaggaggacttccacatcggggagaagaaagtggaagctgagtttgatgaacaggctgatgaaagcaattatgatgagcaggtggatttctatggctcttccatggaagagttttccggagagaggtcagatgggaatctaattgggcacagacaggaggctgccctcgcagcaggttacagtgagaatattgaaatggtaacagggattaaagaagaagcttcccacttaggattctcagccaccgacaagctgtatccttgtcagtgtgggaaaagtttcactcacaagagtcagagagatcggcacatgagcatgcacctcggtcttcggccttacggctgtggggtctgcggtaagaaattcaaaatgaagcaccatctcgtgggccacatgaaaattcacacaggcataaagccgtatgagtgtaatatctgtgcaaagaggtttatgtggagggacagtttccaccggcatgtgacttcttgtactaagtcctacgaagctgcaaaggctgagcagaatacaactgaggctaactaaaaataggatctggcccttgagtggcatgcacaaaaataaactatggtaattaatgcaaatctgggcacagatgatgcgtgctacttgctattatgagagaagcttaaaaaaaaaaaggaagatatttctgaaagaccagctaagtaggccaattaaaaaaatctaattcctcaaatttgtgtgttccagtcctggcctggaatgggtaatggggtgagttaacccaccgcccagctggcaagggaaaccttctgactggttgtgatcgaaacaggtggacagagacacctgcacttggaactggactccacccaccagttccattttgggtggcagcagctttggatcactcattattacaaggtcatgctgaaattttattttgctcttgctatagatacttaggtaatgtggatttgttttggtagctatttcactgaaggaagtgctacttatataaaagctagaaataatgtgattcctaggatgagaaattggttaacagagctctgttgtctggttttagtctttctaaaggatattttaactaaaactatggagatgctaagagagtgactttctaaatatgaaacagataatttacggtacaaggctgacatagtgcccttgtcagtttctgtaagatgccactactgtcacaaggtgtttcagactcttgataaggcagtgttttgtattttagttctaacattgagtttggacaattttatctaattgtaattctctagggtgccagagataggtatttctcattggtttgctttcccaaatcctgtttggttaattgtagcctccatacagtggggtcttctctgtggctggtagacaccaagctgctgtgactgaccacggtaccacgggctgccacagcccctgctctgtcttagattatggtgctttacaaagagagtggtccatgaccacacttagtgagaaggagccacaagttgtggctgagagttccctgtgaacttgagtagttcatagagtgctaaggtgacactccaccaaccagagtgagagggcagataggcaggattctatgagtggttatacttaagggggacaaaactgcccaagaagaatcttgagaatacactctttcaaggtgggggagatactctttagagggtacactgagctaatactaccagttctttatgagcactggaatgtgtttgtaaaaggagtcctaagtttagcaaggtagtctacagaaccatgctcccacattatagataaagctgcttaaacttaaaagtccacaaagctacgccgaccaaaaaaaaaaaaaaaaaaaaaaaaaaaaaaaaaaaaaa

SEQ ID NO: 664 - DNA, 2103 bp, Homo sapiens
tctccatctggtcaactgcgggagaaaaattttcgagaatttccagcaggcaaggcagtggccgctttgactgcttgcttcggagatccgagacgacggagaaggcactcttatttaccgaccaagaaagctcctcccccgtcctccgttagctaattaaaacatttttcagggacgtagccatccagagacattccattattgttccattgacctttccctcatcactgagtcctttggagctgagttatgtcaacagctgccttaattactttggtcagaagtggtgggaaccaggtgagaaggagagtgctgctaagctcccgcctgctgcaggacgacaggcgggtgacacccacgtgccacagctccacttcagagcctaggtgttctcggtttgacccagatggtagtgggagtccagctacctgggacaattttgggatctgggataaccgcattgatgagccaattctgctgccacccagcattaagtatggcaagccaattcccaaaatcagcttggaaaaggtggggtgcgcctcacagattggcaaacggaaagagaatgaagatcggtttgacttcgctcagctgacagatgaggtcctgtactttgcagtgtatgatggacacggtggacctgcagcagctgatttctgtcatacccacatggagaaatgtattatggatttgcttcctaaggagaagaacttggaaactctgttgaccttggcttttctagaaatagataaagccttttcgagtcatgcccgcctgtctgctgatgcaactcttctgacctctgggactactgcaacagtagccctattgcgagatggtattgaactggttgtagccagtgttggggacagccgggctattttgtgtagaaaaggaaaacccatgaagctgaccattgaccatactccagaaagaaaagatgaaaaagaaaggatcaagaaatgtggtggttttgtagcttggaatagtttggggcagcctcacgtaaatggcaggcttgcaatgacaagaagtattggagatttggaccttaagaccagtggtgtcatagcagaacctgaaactaagaggattaagttacatcatgctgatgacagcttcctggtcctcaccacagatggaattaacttcatggtgaatagtcaagagatttgtgactttgtcaatcagtgccatgatcccaacgaagcagcccatgcggtgactgaacaggcaatacagtacggtactgaggataacagtactgcagtagtagtgccttttggtgcctggggaaaatataagaactctgaaatcaacttctcattcagcagaagctttgcctccagtggacgatgggcctgattaccagctgggacttagagtttctgtgcaacagtttttcactgagcatgtcaagaaactgataagatcaaaaaggtctcctaactcactagatcagcgcacaagtcagtgtaaaccacttagatagtagttttttcataaatgctcatcatatttatgttccgctgtacatgttcagtataaatatatgtgtagtgaagctactgtgagtctttaaatggaaagagcaaatgagaagtggtttggatacacttgatgagagatgagagtgtcacattaataatttttaagactcttaggcagctatgggtttcttcttaatcatttttgttctttattcatttgaacacgtttttgaagttcttcaaaactagtcagtttgaattttgacagctattcaatatgtgatctccaagtttaaaaaaatttttttccagacttccctaatcctaaaatgcgagtttttatttttaataactgtaccaaggaataagtatgaaaacagttctctgttaccatattttgtattctggaccacttactggtgaaagcaaccatgcaaaagaaattaatttggccaggcacagtggctcatgcctgtaatcccagcactttgggaggccaaggtgggtagatcatctgaggtcaggaattcaagaccagcctggccaacatggtgaaaccctgtctctagtaaaaatccaaaaaaaaaaaaaaaaaaaaaaaaaaaaaaaa

SEQ ID NO: 665 - DNA, 3931 bp, Homo sapiens
gagagtgagagaaaggctggaagacgagacctgctcactctgtcaccgaggctagagtacagtggcacaatcacagctcattgcagcctcaacctcccaggctcaatcgatccttccaactgagcctccctagcagctgggactattagtgcacaccaccacacctagcctgcaggatgtttcctcaatgaggggaaggctgctgcacaatggcagtttttgatactcctgaggaggcctttggtgtcttacgtccagtctgtgttcagctcacaaagacccagacagtggagaatgtggagcatctgcagacacgactacaagctgtgagtgacagtgcccttcaggaacttcagcagtacatcctcttccctctgcgatttaccctgaagaccccaggtcccaaaagagagcgtttgatccaaagtgtggtggaatgcctcacatttgtcctttcttcaacatgtgtgaaagaacaggagcttctccaggaactcttttcagaactctctgcttgtctgtattcacccagctcccaaaaacctgcggctgtgtccgaggagttgaaattggctgtgatccagggacttagcacattaatgcactcagcttatggggacatcattctgactttttatgagccctccattctgccacgtttaggatttgctgtatctttactgttaggccttgcagaacaggagaaatcaaagcaaattaaaattgctgccttaaaatgtttacaggttctactcttgcagtgtgattgtcaggaccatccaaggtcattggatgaacttgaacaaaagcagctgggggatttgtttgcctcttttttacctggaatctcaactgcactgaccaggcttatcacaggagactttaaacaaggtcacagcattgtcgtatcttccctaaagatcttttacaagacagtgagcttcattatggctgatgaacagctcaaaagaatctcaaaggtccaagcaaaacctgcagttgagcacagagtagcagagctgatggtttacagggaagcagattgggtaaaaaagactggcgacaagttgactatccttattaaaaagataattgagtgtgtttctgttcacccacactggaaggtgagactggaactggtagaacttgtggaggaccttcttttgaagtgcagtcaatcattggtcgaatgtgctggtccccttctgaaggccttagtgggactagtaaatgatgagagtcctgaaatccaagcccagtgcaataaagttctgagacattttgcagatcaaaaagtagtggtgggcaacaaagccctcgctgacatcttgtcagaaagcctgcattcccttgccacatctcttcctcgcctaatgaactcccaagatgaccagggcaaattctctactctttccttgttacttggttatctgaaactcttgggcccaaaaataaactttgtcctcaactctgtggcccatctccagcggctttccaaagcactcatccaagttctagagctagacgtggctgacatcaagattgttgaggaacggcgttggaactctgatgatctgaatgcttctccaaagacctcagccacacagccttggaaccgcatccagaggagatatttccgcttcttcactgatgagagaatcttcatgctcttgaggcaggtttgtcagctacttggttattatgggaatctttatttgcttgtggatcactttatggaactttaccatcaatctgtggtttaccggaagcaagctgccatgatccttaatgaactggttacaggggctgctgggctggaggttgaggatcttcacgaaaaacatattaaaacaaacccagaagaactgagagagattgtgacatctatacttgaagaatacacaagtcaagaaaattggtatttggttacctgtcttgaaactgaggaaatgggagaggagctgatgatggagcacccaggcctccaagccatcacgtctggtgaacacacctgccaagttacatcttttctagccttctcaaagccaagtcccactatttgctccatgaacagtaacatctggcaaatatgcattcagttggaaggaattggccagtttgcatatgcactaggaaaagacttctgtttgctcttgatgtcagccctttatccagtactggagaaggctggagaccaaaccctactcattagtcaggtggctaccagcaccatgatggacgtttgccgtgcttgtggctacgactccctgcagcacctgatcaatcaaaattcagactatttagtgaatgggatctctttaaatctgcgtcatctggctctgcatcctcataccccaaaggtcctggaagtcatgctgcggaactcagatgctaacctgcttcctttggtggcagatgtggttcaagatgtcttggccaccctggaccaattttacgataagagagctgcttcctttgtcagcgttctgcatgctctgatggcagcattagcccagtggttcccagacacaggtaatcttgggcacctccaagagcaaagtttaggagaagagggaagtcatttgaaccaaagaccagcagctcttgagaagagcaccaccacagctgaagacatcgaacagtttttgctgaactacctcaaagagaaggatgtggcagatggaaatgtctcggattttgataatgaagaagaggaacagtcagtccctcccaaagtggatgagaatgacacccgtccagatgtggagccaccactgccattgcagatccaaatagccatggacgtgatggaacgctgcatccacttgttgtcagataaaaatctgcaaatccgcctgaaggtcttggatgtgctggatctgtgtgtggttgttcttcagtcccacaaaaaccagctgcttcccttggctcatcaggcctggccctcgctcgttcaccgactcacacgggacgcccccctggcagtgcttagagccttcaaggttttacgtaccctgggaagcaagtgtggtgactttcttcgcagccggttctgcaaagatgtcctgccaaagctggctggctccctagtcacccaggcccccatcagtgccagggctggaccagtttactcgcacacgctggccttcaagttgcagctggctgtcttacagggcctgggccccctctgtgagagactggacctaggtgagggtgacctgaataaagtggctgatgcctgcttgatttacctcagtgtcaaacagcccgtgaaattacaagaggctgccaggagcgtcttcctccacttgatgaaggtggacccagactccacctggttcctcctgaacgagctttactgccccgtgcagttcacacctccccaccccagcctccaccctgtgcagctgcacggggccagcgggcagcagaacccctacacgaccaacgtgctccagctgctcaaggagctgcagtgaccctgctcccccaccacagaggccaccgatccctcccctactgccagccagaagctgggctgaccccaccccggccataggcggtggcagcggcagcagagaaggtgaattagttagccaatcgatttataaattgatcgatcacacaactgcttagaaatggattgaaggaaagtagctgactattatttatatttcataccttgtgttttcaagtgacattgtctggtggctctaagggtttaaccccttagcctaccatctctatagccccagctccctcacaggccacacacacacacacacaagaggtcagttcccctccatctgcatacacctccctgtcttcaaataatgagatggaactaatttgttttacctaacctgatctttgggaaacaaacggaaataaagacacttcttggatgaaaagtaaaaaaaaaaaaaaaaaa

SEQ ID NO: 666 - DNA, 1999 bp, Homo sapiens
gtcacgtggcgaggccgccgccgcggccatcaccactgtgggcagcctcacttggctgccgccccgagaccccagcccgtacctgggcttcgcgcccgccaagtgggcccagccctggctcctgcgccctgtggcggccacctccatcgccttgctttcccttcgggcactgggggtcgctcagggcgggacatgggtgaacggaagtggaagctgtgagcgtcgcagcccgaggcgccgaggcctgaggcgccgtcggggccaccgcgacgctcgcatggagagcgctgggcgctgggctgtgcaccgacggctaacctggacccacggtctctgcggggcgggagctttgcagaaccgactggccgactggggcgcgggaacatgaggcttggctaggagcccgctgcgggccaggcgcgcggtgcgcaggcatacccgggtcgcgggtgaacaccgcggagccccgggacttgcctgtcgttgctggtggcggcatggtcttctgtctgtcgagcgaggagccgcgccgcccgctgcgaagcgacatggtccacttccaggcctcggaagtccagcagctgctacacaacaagttcgtggtcatcttgggggactccattcagagggctgtgtacaaggacctggtgctcttgctccagaaagactcactgctcacagctgcccagctgaaagccaagggggagctgagctttgaacaggaccagctggtggctgggggccagctgggcgagctgcacaacgggacacagtatcgtgaggtccgccagttctgctcgggctctggccaccaccttgtgcgcttctacttcctcactcgtgtttactccgagtaccttgaggatgttctggaagagctgacatatggacctgccccggacctggtgatcatcaactcctgcctctgggatctctccagatatggtcgctgctcaatggagagctaccgggagaacctggagcgggtgtttgtgcgcatggaccaagtattgccagactcctgcctgctggtgtggaacatggcgatgcccctcggggaacgtatcactgggggtttcctcctgccagagctccagcccctggcaggctccctgcggcgggatgtggttgaagggaacttctacagtgctacgctggccggggaccactgctttgatgtcctagacctccactttcacttccggcatgcagtacagcaccgtcatcgggatggtgtccactgggaccagcatgcacaccgccacctctcacacctgcttctgacccatgtggctgacgcctggggcgtggagctgcccaagcgtggctatccccctgacccgtggattgaggactgggcagagatgaatcatccattccagggaagccataggcagaccccagacttcggggagcacctggccttgctcccacccccaccttcttctttgcctcctcccatgccttttccctacccgcttcctcagccctcgccacctcccctcttcccacccctgccccaggataccccttttttcccaggccagcccttcccaccccatgaattcttcaactataatccagtggaggacttctcgatgccaccccacttaggatgtggccctggagtgaactttgtgcctggccctctgccacctccaatccctggccctaatccccatggtcagcactggggcccagtggtccaccgggggatgccacgctatgttcctaacagcccctaccatgtgcggagaatgggggggccctgcaggcagcggctcagacactcagagagactgatccacacatacaaactggacagacggcctcctgcccattcggggacatggcctgggtagactggatcttgggctgggactggatgtgccaatggcccttcagggcctgcctggcacctcaggtactgggctagggtgtctgctatgcctggtattgttcttgtccattgctgtcaccaataaaggcatggaagaac

SEQ ID NO: 667 - DNA, 2976 bp, Homo sapiens
ggaagaagtaggggcggggggaagtttaggagttgaggaaagaagattaaagagcgcgaggagacaaataaaaagaagtgttaagaattgcctttgggactctgaaggctgaagaattgatgaattgcaagtttgtgccccatagctgcacagactgcctgaagttacatttagagactgaaatcactgcaccttaaaaacaaaagattgagctgcactgtattcctaatgtttcatcattactaacaggatattcctcatgacattgctgtctgatctttgaccatcagtctgtgacctgccccttctctttacatgcagccgctctctgctccctgccccaatgaacatctgcactaggcccaagccttggagtaatttacctgaagagtgacaccattgattttgaaactactgaagaaacccaagacagctgaaaaccagaaggcatctgaggagaatgagattactcagccgggtggatccagcgccaagccgggccttccctgcctgaactttgaagctgttttgtctccagacccagccctcatccactcaacacattcactgacaaactctcacgctcacaccgggtcatctgattgtgacatcagttgcaaggggatgaccgagcgcattcacagcatcaaccttcacaacttcagcaattccgtgctcgagaccctcaacgagcagcgcaaccgtggccacttctgtgacgtaacggtgcgcatccacgggagcatgctgcgcgcacaccgctgcgtgctggcagccggcagccccttcttccaggacaaactgctgcttggctacagcgacatcgagatcccgtcggtggtgtcagtgcagtcagtgcaaaagctcattgacttcatgtacagcggcgtgctacgggtctcgcagtcggaagctctgcagatcctcacggccgccagcatcctgcagatcaaaacagtcatcgacgagtgcacgcgcatcgtgtcacagaacgtgggcgatgtgttcccggggatccaggactcgggccaggacacgccgcggggcactcccgagtcaggcacgtcaggccagagcagcgacacggagtcgggctacctgcagagccacccacagcacagcgtggacaggatctactcggcactctacgcgtgctccatgcagaatggcagcggcgagcgctctttttacagcggcgcagtggtcagccaccacgagactgcgctcggcctgccccgcgaccaccacatggaagaccccagctggatcacacgcatccatgagcgctcgcagcagatggagcgctacctgtccaccacccccgagaccacgcactgccgcaagcagccccggcctgtgcgtatccagaccctagtgggcaacatccacatcaagcaggggatggaggacgattacgactactacgggcagcaaagggtgcagatcctggaacgcaacgaatccgaggagtgcacggaagacacagaccaggccgagggcaccgagagtgagcccaaaggtgaaagcttcgactcgggcgtcagctcctccataggcaccgagcctgactcggtggagcagcagtttgggcctggggcggcgcgggacagccaggctgaacccacccaacccgagcaggctgcagaagcccccgctgagggtggtccgcagacaaaccagctagaaacaggtgcttcctctccggagagaagcaatgaagtggagatggacagcactgttatcactgtcagcaacagctccgacaagagcgtcctacaacagccttcggtcaacacgtccatcgggcagccattgccaagtacccagctctacttacgccagacagaaaccctcaccagcaacctgaggatgcctctgaccttgaccagcaacacgcaggtcattggcacagctggcaacacctacctgccagccctcttcactacccagcccgcgggcagtggccccaagcctttcctcttcagcctgccacagcccctggcaggccagcagacccagtttgtgacagtgtcccagcccggtctgtcgacctttactgcacagctgccagcgccacagcccctggcctcatccgcaggccacagcacagccagtgggcaaggcgaaaaaaagccttatgagtgcactctctgcaacaagactttcaccgccaaacagaactacgtcaagcacatgttcgtacacacaggtgagaagccccaccaatgcagcatctgttggcgctccttctccttaaaggattaccttatcaagcacatggtgacacacacaggagtgagggcataccagtgtagtatctgcaacaagcgcttcacccagaagagctccctcaacgtgcacatgcgcctccaccggggagagaagtcctacgagtgctacatctgcaaaaagaagttctctcacaagaccctcctggagcgacacgtggccctgcacagtgccagcaatgggaccccccctgcaggcacacccccaggtgcccgcgctggccccccaggcgtggtggcctgcacggaggggaccacttacgtctgctccgtctgcccagcaaagtttgaccaaatcgagcagttcaacgaccacatgaggatgcatgtgtctgacggataagtagtatctttctctctttcttatgaacaaaacaaaacaacaacaaaaaacaaacaaacaaaaaagctatggcactagaatttaagaaatgttttggtttcatttttactttctgtttttgtttttgtttcgtttcattttgtactacatgaagaactgttttttgcctgctggtacattacatttccggaggcttgggtgaataatagttttcccagtctccctcggatggtggccttaaggcctggtagtgcttcaagaggtccactggttggatctctagctactggcctctaaatacaacccttctttacaaaaaaatcttttaaaaaaaaaaaaaaaaaa

SEQ ID NO: 668 - DNA, 4130 bp, Homo sapiens
gggggcacgtctcggcgagtcacgatgatggcggccaccatcctgtggtgagctagcggattccctgcttgtctcgccgaccccctcgcgccttctgcagactccgtggctggcgctcggcgcgtgaggaagcacggcggcccgagttcgcggggaaggccgcagtcgcggaggcagcggcgcggtccggggcacgggctgggggagaggccgctccgctgggcgaatgtgacaagcccccacccccaccgccttcctccccagagcgcgaggagcgcgggcgaccccggggccccgccaggccacagaccccgcccagcggccagcacccggcgcaggcccggcagccgagctgcgcggcggcaccatgcaggtcaccctgaagaccctccagcagcagaccttcaagatagacattgaccccgaggagacggtgaaagcactgaaagagaagattgaatctgaaaaggggaaagatgcctttccagtagcaggtcaaaaattaatttatgcaggcaaaatcctcaatgatgatactgctctcaaagaatataaaattgatgagaaaaactttgtggtggttatggtgaccaaacccaaagcagtgtccacaccagcaccagctacaactcagcagtcagctcctgccagcactacagcagttacttcctccaccaccacaactgtggctcaggctccaacccctgtccctgccttggcccccacttccacacctgcatccatcactccagcatcagcgacagcatcttctgaacctgcacctgctagtgcagctaaacaagagaagcctgcagaaaagccagcagagacaccagtggctactagcccaacagcaactgacagtacatcgggtgattcttctcggtcaaacctttttgaagatgcaacgagtgcacttgtgacgggtcagtcttacgagaatatggtaactgagatcatgtcaatgggctatgaacgagagcaagtaattgcagccctgagagccagtttcaacaaccctgacagagcagtggagtatcttttaatgggaatccctggagatagagaaagtcaggctgtggttgacccccctcaagcagctagtactggggctcctcagtcttcagcagtggctgcagctgcagcaactacgacagcaacaactacaacaacaagttctggaggacatccccttgaatttttacggaatcagcctcagtttcaacagatgagacaaattattcagcagaatccttccttgcttccagcgttactacagcagataggtcgagagaatcctcaattacttcagcaaattagccaacaccaggagcattttattcagatgttaaatgaaccagttcaagaagctggtggtcaaggaggaggaggtggaggtggcagtggaggaattgcagaagctggaagtggtcatatgaactacattcaagtaacacctcaggaaaaagaagctatagaaaggttaaaggcattaggatttcctgaaggacttgtgatacaagcgtattttgcttgtgagaagaatgagaatttggctgccaattttcttctacagcagaactttgatgaagattgaaagggacttttttatatctcacacttcacaccagtgcattacactaacttgttcactggattgtctgggatgacttgggctcatatccacaatacttggtataaggtagtagattgttgggggtggggagggagggatctaggatacagggcagggataaatacagtgcatgtctgcttcaattagcagatgccgcaactccacacagtgtgtaaaatatatacaaccaaaaatcagcttttgcaggtctttatttcttctgtaaaacagtaggtaacttttcctaggtttcactctttttagtgtactagatccagaaacttagtgtaatgccctgctttatatttctttgacttaacattggtttcagaaagaatcttagctacctagaatttacagtctctgtttcatggcaacactggataatggctttgtgaaatttaaaaaatttttgtagcgactgtaaacagaaatgccaaattgatggttaattgttgctgcttcaaaaataagtataaaattaatatgtaaggaagcccattctttcatgttaaatacttggggtgggaggggagaaagggaaccttttcttaaaatgaaaataattactgctattttaaaatttcttgatcattgaatgtgagacccttctaacatgatttgagaagctgtacaagtataggcagagttattttcctgtttacattttttttttgttttggggaaaaaattggtaggtgtctaattactgtttacttcattgttatattgcagtaaaagttttaaaacaaccattgcatgtttgcttttgatgtatccctttgtgaaattagcacttttggggccaatggagaaatgcagcattcactctccctgtcttttccccttccctcagcagaaacgtgtttatcagcaagtcgtgagtcaaactgctgccttttaaaaaacccacaaaatgctgattcagttcaaaattaatgcaaatgtttcaaaactgggtttctgatatttgtaaatgtgtttctttattagataagagtgtattaccattaaagtcattagtataatattgctttcaaaaagaaatggtagacaaaactataatccagcatcttttattgcattggaaagactggcaaagtcttttggatgggttgggagatgtggctggaaagtactttggaaaatatacaatcaagatatctcatggcatattaaaagaaaaatcttaatagcagtgttggcttttatttggattttttcatctcagttttttctgtggaatctccttcattggcattgttatttaatcataaacggggcagatgtctacttgttcagtttttcaaatctgttttcctgagtataaataagagtatttaaagaaataatttggattgcttttgttttttgtttccttttttttaaccatctgatactaagaagatgaatttgcacagatttctctgcataatttctcaatatctttagcacagtatggtgatgatgacttttaagcatttacatcacgtactcataacctattatgaaaataaatgaaactggctgggtatggtggctcatgcctataatcccagcactttgggaggccgaggtgggcagatcacttgaggccaggagattgagaccagcctgaccgtcatggcgaaaccccgtctatactaaaaatacaaaaaatagccaggcatggtggcgcacgcctgtggtcccagctacttgggaggctgaggcatgagaattgcttgaacccgggaagtgaaggttgccgtgagctgagatcacaccactgccataaacatgacaggcttttggactttgtattacctgtatgttttataatggatcatgcataatttctcaggagaataaaatgagaattcatatatacgttcatctttcaagtcagagcaatgagttgggaaaagaggtggcatttctgatcggataatggaatactctcatttattttatgacattctctgtctactcagatcatagtgaaaactggaaacaaaaaaaaaaaacagcctcttcttggaaagtgacagcagaaggtggcatggagcttgtgtccttggacaacaaatctggatatactaggattaattatcagaagacagctcaggccaagttttgatcgttccatacagtaccttgtttatctgcttcttaaagaatcagccgagacaccataaaagaaataggctttttgtgccttttgctgttaatgtttaatttacaaactgttttggtaaatctcttaatgtaagtagctatttgactttggaattttgcattcgaggtatactgtcatttcttgaaatctttttctcgtttagttgctctgtgggaaatgtgaggaagcctaagtttgtatttgtaaatttcttatgccatcctctagtcaaattttttttcattgtttaaaaatacggaagtgttccaatataattttttcctgtactggatggctaggattctagagaattgattataaaatattttcaataca

SEQ ID NO: 669 - DNA, 1907 bp, Homo sapiens
caggatggtctcgatctcctgacttcgtgatccacccgccttggcctcccaaagtgctgggattcccggcgtgagccaccgcgcccagccctcaatctgggttttaaacccaagcagagtccggaatcggagctcgcaccccttctcccaaccaggcctgcgtccctggggaaatcaggacgcagcgtccaggggttggaggagggccccggcggccgaccccggtctgtgccgccccctggtggccagccatgggcgagcatatgactgctctcggctccgccccgccgtccaacgggcacttccggagccgggcgtctacagaccgcggccaccttccacctgcgcccgaggcagacggtgcaggggcctccgggacaggcgtctgaggcctgctccgcagcgcgggcccgggggcgggcctaggggcggggcctgctgtggtgcgctcaggcaccgcgctggccacctgtgcccgggtcctagtggcggccgcagtgtcgcaggccggagggaagatggcggcgccctggtggcgagccgcgctgtgcgagtgtcggagatggcggggcttcagcacctcggccgtcctgggccgccggacacccccgctggggccgatgcccaacagtgacatcgacttgagcaacctggagcggctggagaagtaccggagcttcgaccgctaccggcgccgagcagagcaggaggcgcaggccccgcactggtggcggacctaccgagagtatttcggggagaagacagatcccaaagagaagattgatattgggctgcctccacccaaagtctcccggacccaacagctactggaacggaaacaggccatccaggagcttcgggccaatgtggaagaggagcgggctgcccgcctccgcacagccagtgtcccgctggatgccgtgcgggccgagtgggagaggacctgtggcccctaccacaagcagcgtctggctgagtattacggcctctaccgagacctgttccacggtgccacctttgtgccccgagtccccctgcacgtggcctacgctgtgggtgaggatgacctgatgcctgtgtactgtggcaatgaggtgactccaaccgaggctgcccaagcgccagaggtgacctatgaggcagaagagggctccttgtggacgttgctactcactagcttggatgggcacctgctggagccagatgctgagtacctccactggctgctaaccaacatcccgggtaaccgggtggctgaaggacaggtgacgtgtccctacctcccccccttccctgcccgaggctccggcatccaccgtcttgccttcctgctcttcaagcaggaccagccgattgacttctctgaggacgcacgcccctcaccctgctatcagctggcccagcggaccttccgcacttttgatttctacaagaaacaccaagaaaccatgactccagccggcttgtccttcttccagtgccgctgggatgactccgtcacctacatcttccaccagcttctggacatgcgggagccggtgtttgagttcgtgcggccgcccccttaccaccccaagcagaagcgcttcccccaccggcagcccctgcgctacctggaccggtacagggacagtcatgagcccacctatggcatctactaaggagccagagtgtgcgcatttcagagcatgggattgatcggcagcaagagtaaagacacagctccagaggcccacactgtggggtctgggccctgccttaggcagcccccctctttggccccctcccgtcaggcccagggcttggagtgaaagtgactctcaggtggtggggtggggaatgtgaataaacatgatttcttgccgggcaaaaaaaaaaaaaaaaaaaaaaaaaaaaaaaaaaaaaaa

SEQ ID NO: 670 - DNA, 3221 bp, Homo sapiens
tgtcaaaagcctgcacacgagacccccgtgggccaggactgacttcctccccacacagggctgggcggggcaagcaggaaggagcctgttacagtcaaggtgacgcatccttgccgggccagcccgaacagcagctgggtcggcaagcgacaggagcacgggtcatcttttccccagaggcgtcggaatggacctgtgccacccagagcccgcggagctgagcagcggggagacggaagagttacagaggatcaagtggcaccgaaagcagctcctggaggacatccagaagctgaaggatgagattgcagatgtgtttgcccaaatcgactgcttcgagagtgcggaggagagccggatggcccagaaggagaaggagctgtgtattgggcgcaagaagttcaacatggaccccgccaagggtatccagtatttcattgagcacaagctgctgacccctgacgtccaggacattgcacggttcctgtataaaggcgagggcctcaacaagacagccattggtacctacctgggggagagggatcccatcaacctgcaggtcctccaggccttcgtggactgccacgagttcgccaacctcaacctcgtccaggccctcaggcagttcctgtggagcttccggctgccgggcgaggcccagaagatagaccggatgatggaggcctttgccactcgatactgcctctgcaacccaggcgtcttccagtccacagacacctgctacgtgttgtccttctccatcatcatgctcaacaccagcctccacaatcccaacgtccgggacaggccgcctttcgagcgctttgtgtccatgaaccgcggcatcaacaatggtagcgacctgcccgaggaccagctgcggaacctcttcgacagcatcaagagtgagccattctccatccctgaggacgacggcaatgacctcactcacaccttcttcaatccagaccgggagggttggctgctcaagctagggggccgcgtgaagacgtggaaacggcgctggttcatcctgaccgacaactgcctctactacttcgagttcaccactgacaaggagccacggggaattatacctcttgagaacctctcggtgcagaaggtggatgaccccaagaagccattctgcctggagctctacaaccctagctgccgaggccagaaaatcaaggcctgcaagaccgatggcgacggcagggtggtggagggcaagcacgaatcgtaccgcatctcagccaccagtgccgaggaacgtgaccagtggatcgagtccatccgagccagcatcacccgtgtccccttctacgacctggtctctactcggaagaagaagattgccagcaagcagtgagattcctggaggtggcactgggggctggtcaccctgagagtcccatcgcctgcagcacctggagacccacctcccaccccagtgcactcttttgggccacagacatcattgctgttccccgttacctcgagctgactctagaggggaaggcagagctcaggagggtgggtgggagctgcagtgggctcagagtccagcaatgaggccccctggcctgggcacccagctgcaggcccctgccctacgtgcactacaggaaggggtgaggagagcagccagaggaaaaccagccccagaatgctgcaacttctcttctctctggacttcggtgtcctcggctctgaaggcgctctctgcacttagatgctgtcagccctcaacgtaggaggggccgtggggtccctaagtgattcttctccctggcaaggctcttccttttcagggatatctctgccaacccttcccctgtcctcgggttgggcttggccctctctgcctgagagagctcagcacacacacagctcagacccacggacaggaccccgggacagaaccccgggagcactgccctaggagcctggaccccacgagctcagtcccagctctgcctctgactcgctgtgtaccctctgccaagtcatgcccattctctagttcttgcaaaactgcagtgtttggactagaaacgtattggcccctgctagccctgtgctccagcttccagctggagatggcagccgttatttgcggagcccaggctgactccggattcaacgttgctggggagagaaaagcagtatagactccaccttccaggatgtccatttcggggagaggagcaggtgggaccctcaagaaaatgacggagaacatcccagacagatgggactcaagcaggatgggtgctatatccaagaagccaagaagggagagtttcgtgcactgtggttaacaggagggccgcctggaggcagtggctgagccagaaagtaacacagagctcatgcttggagagatagagtcttggccatggctttcctgcaagaccactgacgagcagtcccatggtgataaagggcagcccggcgggtcccagcatctcgagaccctctgcagaagtattatcagagtagagctgacttccagtacccgggcagccagctctgtctccagggaggcctggcctggaggaggagtccactaacaggaaacacttctcaccccctcacacaggcccaggggagcccctggagggaaattccttggcaggggaacaggaaatgtggtcgcctctgccccactgccagcctgagtgggcaaggaagcaggtggatcccccagaaggaaccgcagctcgcgaggcacctctcctcgtccccacccacccccacatttgcacaccttccacagggtcaggatggagtagctgccttgcgaggtggtgagactcctgtctctggaggtctgcaagcactggtagtgatattgcagcagacaaggtctgggttgggcgtctgcaggaggagaccttgtgggacatctgaggacatccgcagattcttgtcagcctgtgaactaggccctgcctctgtcacctcattggtccatgaaggagcagccaggggtggtggaaggagcactgggctaggggtcaggggtcagagattctgtcctgctcctgggatgcactggctactcccttagtctactcccttcccctctctggtcctcagcttcctccatcatggaggagatgggatcatggattttctgggcataagtggctgttctgggagtcattccaaagagagaataaaactcctgatccaaaaaaaaaaaaaaaaaaaaa

SEQ ID NO: 671 - DNA, 1451 bp, Homo sapiens
gaagagcaagcgccatgttgaagccatcattaccattcacatccctcttattcctgcagctgcccctgctgggagtggggctgaacacgacaattctgacgcccaatgggaatgaagacaccacagctgatttcttcctgaccactatgcccactgactccctcagtgtttccactctgcccctcccagaggttcagtgttttgtgttcaatgtcgagtacatgaattgcacttggaacagcagctctgagccccagcctaccaacctcactctgcattattggtacaagaactcggataatgataaagtccagaagtgcagccactatctattctctgaagaaatcacttctggctgtcagttgcaaaaaaaggagatccacctctaccaaacatttgttgttcagctccaggacccacgggaacccaggagacaggccacacagatgctaaaactgcagaatctggtgatcccctgggctccagagaacctaacacttcacaaactgagtgaatcccagctagaactgaactggaacaacagattcttgaaccactgtttggagcacttggtgcagtaccggactgactgggaccacagctggactgaacaatcagtggattatagacataagttctccttgcctagtgtggatgggcagaaacgctacacgtttcgtgttcggagccgctttaacccactctgtggaagtgctcagcattggagtgaatggagccacccaatccactgggggagcaatacttcaaaagagaatcctttcctgtttgcattggaagccgtggttatctctgttggctccatgggattgattatcagccttctctgtgtgtatttctggctggaacggacgatgccccgaattcccaccctgaagaacctagaggatcttgttactgaataccacgggaacttttcggcctggagtggtgtgtctaagggactggctgagagtctgcagccagactacagtgaacgactctgcctcgtcagtgagattcccccaaaaggaggggcccttggggaggggcctggggcctccccatgcaaccagcatagcccctactgggcccccccatgttacaccctaaagcctgaaacctgaaccccaatcctctgacagaagaaccccagggtcctgtagccctaagtggtactaactttccttcattcaacccacctgcgtctcatactcacctcaccccactgtggctgatttggaattttgtgcccccatgtaagcaccccttcatttggcattccccacttgagaattacccttttgccccgaacatgtttttcttctccctcagtctggcccttccttttcgcaggattcttcctccctccctctttccctcccttcctctttccatctaccctccgattgttcctgaaccgatgagaaataaagtttctgttgataatcatc

SEQ ID NO: 672 - DNA, 4555 bp, Homo sapiens
gcagttcccgcctcctcaggtccgggcgggtccctggccggggtagcacggaagggtctcccaggcggcgtagtagggcttccgtgttactggaaacctacttccggctgcaaatgggaaaaggagcctctaccttaaccaatccccgggaacctcaggcccgcggatgggagaaaccagagatgccaacttcctgcttccgaagtagtggctgggtcttaaagcaccgatgtttctgcattgaatagccctggaagacagaattcttgtctctccaaagatctggcagacttattcccaattataagagatccttgcaaaggaggtgtcttgcttcaccttcaccttccactgtgattgtaagttttctgaggcctcgccagccatgcagaactgaataggactagcaacttcatagacggttgtgaagacaagctagacggcagatgaaagttcttggcacagagtgaacacttgataaactatatggcagccacagcctccggagccgttgcacacctacctgcccggccgacttacctgtacttgccgccgtcccggctcacctggcggtgcccgaggagtagtcgctggagtccgcgcctccctgggactgcaatgtgccgatcttagctgctgcctgagaggatgtctggggtgtccgagcccctgagtcgagtaaagttgggcacgttacgccggcctgaaggccctgcagagcccatggtggtggtaccagtagatgtggaaaaggaggacgtgcgtatcctcaaggtctgcttctatagcaacagcttcaatcctgggaaaaacttcaaactggtcaaatgcactgtccagacggagatccgggagatcatcacctccatcctgctgagcgggcggatcgggcccaacatccggttggctgagtgctatgggctgaggctgaagcacatgaagtccgatgagatccactggctgcacccacagatgacggtgggtgaggtgcaggacaagtatgagtgtctgcacgtggaagccgagtggaggtatgaccttcaaatccgctacttgccagaagacttcatggagagcctgaaggaggacaggaccacgctgctctatttttaccaacagctccggaacgactacatgcagcgctacgccagcaaggtcagcgagggcatggccctgcagctgggctgcctggagctcaggcggttcttcaaggatatgccccacaatgcacttgacaagaagtccaacttcgagctcctagaaaaggaagtggggctggacttgtttttcccaaagcagatgcaggagaacttaaagcccaaacagttccggaagatgatccagcagaccttccagcagtacgcctcgctcagggaggaggagtgcgtcatgaagttcttcaacactctcgccggcttcgccaacatcgaccaggagacctaccgctgtgaactcattcaaggatggaacattactgtggacctggtcattggccctaaagggatccgccagctgactagtcaggacgcaaagcccacctgcctggccgagttcaagcagatcaggtccatcaggtgcctcccgctggaggagggccaggcagtacttcagctgggcattgaaggtgccccccaggccttgtccatcaaaacctcatccctagcagaggctgagaacatggctgacctcatagacggctactgccggctgcagggtgagcaccaaggctctctcatcatccatcctaggaaagatggtgagaagcggaacagcctgccccagatccccatgctaaacctggaggcccggcggtcccacctctcagagagctgcagcatagagtcagacatctacgcagagattcccgacgaaaccctgcgaaggcccggaggtccacagtatggcattgcccgtgaagatgtggtcctgaatcgtattcttggggaaggcttttttggggaggtctatgaaggtgtctacacaaatcacaaaggggagaaaatcaatgtagctgtcaagacctgcaagaaagactgcactctggacaacaaggagaagttcatgagcgaggcagtgatcatgaagaacctcgaccacccgcacatcgtgaagctgatcggcatcattgaagaggagcccacctggatcatcatggaattgtatccctatggggagctgggccactacctggagcggaacaagaactccctgaaggtgctcaccctcgtgctgtactcactgcagatatgcaaagccatggcctacctggagagcatcaactgcgtgcacagggacattgctgtccggaacatcctggtggcctcccctgagtgtgtgaagctgggggactttggtctttcccggtacattgaggacgaggactattacaaagcctctgtgactcgtctccccatcaaatggatgtccccagagtccattaacttccgacgcttcacgacagccagtgacgtctggatgttcgccgtgtgcatgtgggagatcctgagctttgggaagcagcccttcttctggctggagaacaaggatgtcatcggggtgctggagaaaggagaccggctgcccaagcctgatctctgtccaccggtcctttataccctcatgacccgctgctgggactacgaccccagtgaccggccccgcttcaccgagctggtgtgcagcctcagtgacgtttatcagatggagaaggacattgccatggagcaagagaggaatgctcgctaccgaacccccaaaatcttggagcccacagccttccaggaacccccacccaagcccagccgacctaagtacagaccccctccgcaaaccaacctcctggctccaaagctgcagttccaggttcctgagggtctgtgtgccagctctcctacgctcaccagccctatggagtatccatctcccgttaactcactgcacaccccacctctccaccggcacaatgtcttcaaacgccacagcatgcgggaggaggacttcatccaacccagcagccgagaagaggcccagcagctgtgggaggctgaaaaggtcaaaatgcggcaaatcctggacaaacagcagaagcagatggtggaggactaccagtggctcaggcaggaggagaagtccctggaccccatggtttatatgaatgataagtccccattgacgccagagaaggaggtcggctacctggagttcacagggcccccacagaagcccccgaggctgggcgcacagtccatccagcccacagctaacctggaccggactgatgacctggtgtacctcaatgtcatggagctggtgcgggccgtgctggagctcaagaatgagctctgtcagctgccccccgagggctacgtggtggtggtgaagaatgtggggctgaccctgcggaagctcatcgggagcgtggatgatctcctgccttccttgccgtcatcttcacggacagagatcgagggcacccagaaactgctcaacaaagacctggcagagctcatcaacaagatgcggctggcacagcagaacgccgtgacctccctaagtgaggagtgcaagaggcagatgctgacggcttcacacaccctggctgtggacgccaagaacctgctcgacgctgtggaccaggccaaggttctggccaatctggcccacccacctgcagagtgacggagggtgggggccacctgcctgcgtcttccgcccctgcctgccatgtacctcccctgccttgctgttggtcatgtgggtcttccagggggaaggccaaggggagtcaccttcccttgccactttgcacgacgccctctccccacccctacccctggctgtactgctcaggctgcagctggacagaggggactctgggctatggacacagggtgacggtgacaaagatggctcagagggggactgctgctgcctggccactgctccctaagccagcctggtccatgcagggggctcctgggggtggggaggtgtcacatggtgcccctagctttatatatggacatggcaggccgatttgggaaccaagctattcctttcccttcctcttcggccctcagatgtcccttgatgcacagagaagctggggaggagctttgttttgggggtcaggcagccagtgagatgagggatgggcctggcattcttgtacagtgtatattgaaatttatttaatgtgagtttggtctggactgacagcatgtgccctcctgagggaggacctggggcacagtccaggaacaagctaattgggagtccaggcacaggatgctgtgttgtcaacaaaccaagcatcagggggaagaagcagagagatgcggccaagataggaccttgggccaaatccgctctcttcctgcccctctttctctttcttcctttactttcccttgcttttccctcttttcttactcctcctctttctctccccaacccccattctcatctgcacccttcttttctcatgtgtttgcataaacattcttttaacttctttctatttgacttgtggttgaattaaaattgtcccatttgc

SEQ ID NO: 673 - DNA, 4715 bp, Homo sapiens
gcagttcccgcctcctcaggtccgggcgggtccctggccggggtagcacggaagggtctcccaggcggcgtagtagggcttccgtgttactggaaacctacttccggctgcaaatgggaaaaggagcctctaccttaaccaatccccgggaacctcaggcccgcggatgggagaaaccagagatgccaacttcctgcttccgaagtagtggctgggtcttaaagcaccgatgtttctgcattgaatagccctggaagacagaattcttgtctctccaaagatctggcagacttattcccaattataagagatccttgcaaaggaggtgtcttgcttcaccttcaccttccactgtgattgtaagttttctgaggcctcgccagccatgcagaactgaataggactagcaacttcatagacggttgtgaagacaagctagacggcagatgaaagttcttggcacagagtgaacacttgataaactatatggcagggagggctggaacggggcttgtttgaagagcaatatgagccagggttatagacctgagtttggggtaagagtggaacatccaaatggaagagtccagcagctgaaaggacatttgttcaaaggcctttttcattacagttttctccttcttctgatccagccacagcctccggagccgttgcacacctacctgcccggccgacttacctgtacttgccgccgtcccggctcacctggcggtgcccgaggagtagtcgctggagtccgcgcctccctgggactgcaatgtgccgatcttagctgctgcctgagaggatgtctggggtgtccgagcccctgagtcgagtaaagttgggcacgttacgccggcctgaaggccctgcagagcccatggtggtggtaccagtagatgtggaaaaggaggacgtgcgtatcctcaaggtctgcttctatagcaacagcttcaatcctgggaaaaacttcaaactggtcaaatgcactgtccagacggagatccgggagatcatcacctccatcctgctgagcgggcggatcgggcccaacatccggttggctgagtgctatgggctgaggctgaagcacatgaagtccgatgagatccactggctgcacccacagatgacggtgggtgaggtgcaggacaagtatgagtgtctgcacgtggaagccgagtggaggtatgaccttcaaatccgctacttgccagaagacttcatggagagcctgaaggaggacaggaccacgctgctctatttttaccaacagctccggaacgactacatgcagcgctacgccagcaaggtcagcgagggcatggccctgcagctgggctgcctggagctcaggcggttcttcaaggatatgccccacaatgcacttgacaagaagtccaacttcgagctcctagaaaaggaagtggggctggacttgtttttcccaaagcagatgcaggagaacttaaagcccaaacagttccggaagatgatccagcagaccttccagcagtacgcctcgctcagggaggaggagtgcgtcatgaagttcttcaacactctcgccggcttcgccaacatcgaccaggagacctaccgctgtgaactcattcaaggatggaacattactgtggacctggtcattggccctaaagggatccgccagctgactagtcaggacgcaaagcccacctgcctggccgagttcaagcagatcaggtccatcaggtgcctcccgctggaggagggccaggcagtacttcagctgggcattgaaggtgccccccaggccttgtccatcaaaacctcatccctagcagaggctgagaacatggctgacctcatagacggctactgccggctgcagggtgagcaccaaggctctctcatcatccatcctaggaaagatggtgagaagcggaacagcctgccccagatccccatgctaaacctggaggcccggcggtcccacctctcagagagctgcagcatagagtcagacatctacgcagagattcccgacgaaaccctgcgaaggcccggaggtccacagtatggcattgcccgtgaagatgtggtcctgaatcgtattcttggggaaggcttttttggggaggtctatgaaggtgtctacacaaatcacaaaggggagaaaatcaatgtagctgtcaagacctgcaagaaagactgcactctggacaacaaggagaagttcatgagcgaggcagtgatcatgaagaacctcgaccacccgcacatcgtgaagctgatcggcatcattgaagaggagcccacctggatcatcatggaattgtatccctatggggagctgggccactacctggagcggaacaagaactccctgaaggtgctcaccctcgtgctgtactcactgcagatatgcaaagccatggcctacctggagagcatcaactgcgtgcacagggacattgctgtccggaacatcctggtggcctcccctgagtgtgtgaagctgggggactttggtctttcccggtacattgaggacgaggactattacaaagcctctgtgactcgtctccccatcaaatggatgtccccagagtccattaacttccgacgcttcacgacagccagtgacgtctggatgttcgccgtgtgcatgtgggagatcctgagctttgggaagcagcccttcttctggctggagaacaaggatgtcatcggggtgctggagaaaggagaccggctgcccaagcctgatctctgtccaccggtcctttataccctcatgacccgctgctgggactacgaccccagtgaccggccccgcttcaccgagctggtgtgcagcctcagtgacgtttatcagatggagaaggacattgccatggagcaagagaggaatgctcgctaccgaacccccaaaatcttggagcccacagccttccaggaacccccacccaagcccagccgacctaagtacagaccccctccgcaaaccaacctcctggctccaaagctgcagttccaggttcctgagggtctgtgtgccagctctcctacgctcaccagccctatggagtatccatctcccgttaactcactgcacaccccacctctccaccggcacaatgtcttcaaacgccacagcatgcgggaggaggacttcatccaacccagcagccgagaagaggcccagcagctgtgggaggctgaaaaggtcaaaatgcggcaaatcctggacaaacagcagaagcagatggtggaggactaccagtggctcaggcaggaggagaagtccctggaccccatggtttatatgaatgataagtccccattgacgccagagaaggaggtcggctacctggagttcacagggcccccacagaagcccccgaggctgggcgcacagtccatccagcccacagctaacctggaccggactgatgacctggtgtacctcaatgtcatggagctggtgcgggccgtgctggagctcaagaatgagctctgtcagctgccccccgagggctacgtggtggtggtgaagaatgtggggctgaccctgcggaagctcatcgggagcgtggatgatctcctgccttccttgccgtcatcttcacggacagagatcgagggcacccagaaactgctcaacaaagacctggcagagctcatcaacaagatgcggctggcacagcagaacgccgtgacctccctaagtgaggagtgcaagaggcagatgctgacggcttcacacaccctggctgtggacgccaagaacctgctcgacgctgtggaccaggccaaggttctggccaatctggcccacccacctgcagagtgacggagggtgggggccacctgcctgcgtcttccgcccctgcctgccatgtacctcccctgccttgctgttggtcatgtgggtcttccagggggaaggccaaggggagtcaccttcccttgccactttgcacgacgccctctccccacccctacccctggctgtactgctcaggctgcagctggacagaggggactctgggctatggacacagggtgacggtgacaaagatggctcagagggggactgctgctgcctggccactgctccctaagccagcctggtccatgcagggggctcctgggggtggggaggtgtcacatggtgcccctagctttatatatggacatggcaggccgatttgggaaccaagctattcctttcccttcctcttcggccctcagatgtcccttgatgcacagagaagctggggaggagctttgttttgggggtcaggcagccagtgagatgagggatgggcctggcattcttgtacagtgtatattgaaatttatttaatgtgagtttggtctggactgacagcatgtgccctcctgagggaggacctggggcacagtccaggaacaagctaattgggagtccaggcacaggatgctgtgttgtcaacaaaccaagcatcagggggaagaagcagagagatgcggccaagataggaccttgggccaaatccgctctcttcctgcccctctttctctttcttcctttactttcccttgcttttccctcttttcttactcctcctctttctctccccaacccccattctcatctgcacccttcttttctcatgtgtttgcataaacattcttttaacttctttctatttgacttgtggttgaattaaaattgtcccatttgc

SEQ ID NO: 674 - DNA, 3936 bp, Homo sapiens
ccacagcctccggagccgttgcacacctacctgcccggccgacttacctgtacttgccgccgtcccggctcacctggcggtgcccgaggagtagtcgctggagtccgcgcctccctgggactgcaatgtgccgatcttagctgctgcctgagaggatgtctggggtgtccgagcccctgagtcgagtaaagttgggcacgttacgccggcctgaaggccctgcagagcccatggtggtggtaccagtagatgtggaaaaggaggacgtgcgtatcctcaaggtctgcttctatagcaacagcttcaatcctgggaaaaacttcaaactggtcaaatgcactgtccagacggagatccgggagatcatcacctccatcctgctgagcgggcggatcgggcccaacatccggttggctgagtgctatgggctgaggctgaagcacatgaagtccgatgagatccactggctgcacccacagatgacggtgggtgaggtgcaggacaagtatgagtgtctgcacgtggaagccgagtggaggtatgaccttcaaatccgctacttgccagaagacttcatggagagcctgaaggaggacaggaccacgctgctctatttttaccaacagctccggaacgactacatgcagcgctacgccagcaaggtcagcgagggcatggccctgcagctgggctgcctggagctcaggcggttcttcaaggatatgccccacaatgcacttgacaagaagtccaacttcgagctcctagaaaaggaagtggggctggacttgtttttcccaaagcagatgcaggagaacttaaagcccaaacagttccggaagatgatccagcagaccttccagcagtacgcctcgctcagggaggaggagtgcgtcatgaagttcttcaacactctcgccggcttcgccaacatcgaccaggagacctaccgctgtgaactcattcaaggatggaacattactgtggacctggtcattggccctaaagggatccgccagctgactagtcaggacgcaaagcccacctgcctggccgagttcaagcagatcaggtccatcaggtgcctcccgctggaggagggccaggcagtacttcagctgggcattgaaggtgccccccaggccttgtccatcaaaacctcatccctagcagaggctgagaacatggctgacctcatagacggctactgccggctgcagggtgagcaccaaggctctctcatcatccatcctaggaaagatggtgagaagcggaacagcctgccccagatccccatgctaaacctggaggcccggcggtcccacctctcagagagctgcagcatagagtcagacatctacgcagagattcccgacgaaaccctgcgaaggcccggaggtccacagtatggcattgcccgtgaagatgtggtcctgaatcgtattcttggggaaggcttttttggggaggtctatgaaggtgtctacacaaatcacaaaggggagaaaatcaatgtagctgtcaagacctgcaagaaagactgcactctggacaacaaggagaagttcatgagcgaggcagtgatcatgaagaacctcgaccacccgcacatcgtgaagctgatcggcatcattgaagaggagcccacctggatcatcatggaattgtatccctatggggagctgggccactacctggagcggaacaagaactccctgaaggtgctcaccctcgtgctgtactcactgcagatatgcaaagccatggcctacctggagagcatcaactgcgtgcacagggacattgctgtccggaacatcctggtggcctcccctgagtgtgtgaagctgggggactttggtctttcccggtacattgaggacgaggactattacaaagcctctgtgactcgtctccccatcaaatggatgtccccagagtccattaacttccgacgcttcacgacagccagtgacgtctggatgttcgccgtgtgcatgtgggagatcctgagctttgggaagcagcccttcttctggctggagaacaaggatgtcatcggggtgctggagaaaggagaccggctgcccaagcctgatctctgtccaccggtcctttataccctcatgacccgctgctgggactacgaccccagtgaccggccccgcttcaccgagctggtgtgcagcctcagtgacgtttatcagatggagaaggacattgccatggagcaagagaggaatgctcgctaccgaacccccaaaatcttggagcccacagccttccaggaacccccacccaagcccagccgacctaagtacagaccccctccgcaaaccaacctcctggctccaaagctgcagttccaggaggaggacttcatccaacccagcagccgagaagaggcccagcagctgtgggaggctgaaaaggtcaaaatgcggcaaatcctggacaaacagcagaagcagatggtggaggactaccagtggctcaggcaggaggagaagtccctggaccccatggtttatatgaatgataagtccccattgacgccagagaaggaggtcggctacctggagttcacagggcccccacagaagcccccgaggctgggcgcacagtccatccagcccacagctaacctggaccggactgatgacctggtgtacctcaatgtcatggagctggtgcgggccgtgctggagctcaagaatgagctctgtcagctgccccccgagggctacgtggtggtggtgaagaatgtggggctgaccctgcggaagctcatcgggagcgtggatgatctcctgccttccttgccgtcatcttcacggacagagatcgagggcacccagaaactgctcaacaaagacctggcagagctcatcaacaagatgcggctggcacagcagaacgccgtgacctccctaagtgaggagtgcaagaggcagatgctgacggcttcacacaccctggctgtggacgccaagaacctgctcgacgctgtggaccaggccaaggttctggccaatctggcccacccacctgcagagtgacggagggtgggggccacctgcctgcgtcttccgcccctgcctgccatgtacctcccctgccttgctgttggtcatgtgggtcttccagggggaaggccaaggggagtcaccttcccttgccactttgcacgacgccctctccccacccctacccctggctgtactgctcaggctgcagctggacagaggggactctgggctatggacacagggtgacggtgacaaagatggctcagagggggactgctgctgcctggccactgctccctaagccagcctggtccatgcagggggctcctgggggtggggaggtgtcacatggtgcccctagctttatatatggacatggcaggccgatttgggaaccaagctattcctttcccttcctcttcggccctcagatgtcccttgatgcacagagaagctggggaggagctttgttttgggggtcaggcagccagtgagatgagggatgggcctggcattcttgtacagtgtatattgaaatttatttaatgtgagtttggtctggactgacagcatgtgccctcctgagggaggacctggggcacagtccaggaacaagctaattgggagtccaggcacaggatgctgtgttgtcaacaaaccaagcatcagggggaagaagcagagagatgcggccaagataggaccttgggccaaatccgctctcttcctgcccctctttctctttcttcctttactttcccttgcttttccctcttttcttactcctcctctttctctccccaacccccattctcatctgcacccttcttttctcatgtgtttgcataaacattcttttaacttctttctatttgacttgtggttgaattaaaattgtcccatttgc

SEQ ID NO: 675 - DNA, 4089 bp, Homo sapiens
atctaacctgtcagcccttttactcagccacagcctccggagccgttgcacacctacctgcccggccgacttacctgtacttgccgccgtcccggctcacctggcggtgcccgaggagtagtcgctggagtccgcgcctccctgggactgcaatgtgccgatcttagctgctgcctgagaggatgtctggggtgtccgagcccctgagtcgagtaaagttgggcacgttacgccggcctgaaggccctgcagagcccatggtggtggtaccagtagatgtggaaaaggaggacgtgcgtatcctcaaggtctgcttctatagcaacagcttcaatcctgggaaaaacttcaaactggtcaaatgcactgtccagacggagatccgggagatcatcacctccatcctgctgagcgggcggatcgggcccaacatccggttggctgagtgctatgggctgaggctgaagcacatgaagtccgatgagatccactggctgcacccacagatgacggtgggtgaggtgcaggacaagtatgagtgtctgcacgtggaagccgagtggaggtatgaccttcaaatccgctacttgccagaagacttcatggagagcctgaaggaggacaggaccacgctgctctatttttaccaacagctccggaacgactacatgcagcgctacgccagcaaggtcagcgagggcatggccctgcagctgggctgcctggagctcaggcggttcttcaaggatatgccccacaatgcacttgacaagaagtccaacttcgagctcctagaaaaggaagtggggctggacttgtttttcccaaagcagatgcaggagaacttaaagcccaaacagttccggaagatgatccagcagaccttccagcagtacgcctcgctcagggaggaggagtgcgtcatgaagttcttcaacactctcgccggcttcgccaacatcgaccaggagacctaccgctgtgaactcattcaaggatggaacattactgtggacctggtcattggccctaaagggatccgccagctgactagtcaggacgcaaagcccacctgcctggccgagttcaagcagatcaggtccatcaggtgcctcccgctggaggagggccaggcagtacttcagctgggcattgaaggtgccccccaggccttgtccatcaaaacctcatccctagcagaggctgagaacatggctgacctcatagacggctactgccggctgcagggtgagcaccaaggctctctcatcatccatcctaggaaagatggtgagaagcggaacagcctgccccagatccccatgctaaacctggaggcccggcggtcccacctctcagagagctgcagcatagagtcagacatctacgcagagattcccgacgaaaccctgcgaaggcccggaggtccacagtatggcattgcccgtgaagatgtggtcctgaatcgtattcttggggaaggcttttttggggaggtctatgaaggtgtctacacaaatcacaaaggggagaaaatcaatgtagctgtcaagacctgcaagaaagactgcactctggacaacaaggagaagttcatgagcgaggcagtgatcatgaagaacctcgaccacccgcacatcgtgaagctgatcggcatcattgaagaggagcccacctggatcatcatggaattgtatccctatggggagctgggccactacctggagcggaacaagaactccctgaaggtgctcaccctcgtgctgtactcactgcagatatgcaaagccatggcctacctggagagcatcaactgcgtgcacagggacattgctgtccggaacatcctggtggcctcccctgagtgtgtgaagctgggggactttggtctttcccggtacattgaggacgaggactattacaaagcctctgtgactcgtctccccatcaaatggatgtccccagagtccattaacttccgacgcttcacgacagccagtgacgtctggatgttcgccgtgtgcatgtgggagatcctgagctttgggaagcagcccttcttctggctggagaacaaggatgtcatcggggtgctggagaaaggagaccggctgcccaagcctgatctctgtccaccggtcctttataccctcatgacccgctgctgggactacgaccccagtgaccggccccgcttcaccgagctggtgtgcagcctcagtgacgtttatcagatggagaaggacattgccatggagcaagagaggaatgctcgctaccgaacccccaaaatcttggagcccacagccttccaggaacccccacccaagcccagccgacctaagtacagaccccctccgcaaaccaacctcctggctccaaagctgcagttccaggttcctgagggtctgtgtgccagctctcctacgctcaccagccctatggagtatccatctcccgttaactcactgcacaccccacctctccaccggcacaatgtcttcaaacgccacagcatgcgggaggaggacttcatccaacccagcagccgagaagaggcccagcagctgtgggaggctgaaaaggtcaaaatgcggcaaatcctggacaaacagcagaagcagatggtggaggactaccagtggctcaggcaggaggagaagtccctggaccccatggtttatatgaatgataagtccccattgacgccagagaaggaggtcggctacctggagttcacagggcccccacagaagcccccgaggctgggcgcacagtccatccagcccacagctaacctggaccggactgatgacctggtgtacctcaatgtcatggagctggtgcgggccgtgctggagctcaagaatgagctctgtcagctgccccccgagggctacgtggtggtggtgaagaatgtggggctgaccctgcggaagctcatcgggagcgtggatgatctcctgccttccttgccgtcatcttcacggacagagatcgagggcacccagaaactgctcaacaaagacctggcagagctcatcaacaagatgcggctggcacagcagaacgccgtgacctccctaagtgaggagtgcaagaggcagatgctgacggcttcacacaccctggctgtggacgccaagaacctgctcgacgctgtggaccaggccaaggttctggccaatctggcccacccacctgcagagtgacggagggtgggggccacctgcctgcgtcttccgcccctgcctgccatgtacctcccctgccttgctgttggtcatgtgggtcttccagggggaaggccaaggggagtcaccttcccttgccactttgcacgacgccctctccccacccctacccctggctgtactgctcaggctgcagctggacagaggggactctgggctatggacacagggtgacggtgacaaagatggctcagagggggactgctgctgcctggccactgctccctaagccagcctggtccatgcagggggctcctgggggtggggaggtgtcacatggtgcccctagctttatatatggacatggcaggccgatttgggaaccaagctattcctttcccttcctcttcggccctcagatgtcccttgatgcacagagaagctggggaggagctttgttttgggggtcaggcagccagtgagatgagggatgggcctggcattcttgtacagtgtatattgaaatttatttaatgtgagtttggtctggactgacagcatgtgccctcctgagggaggacctggggcacagtccaggaacaagctaattgggagtccaggcacaggatgctgtgttgtcaacaaaccaagcatcagggggaagaagcagagagatgcggccaagataggaccttgggccaaatccgctctcttcctgcccctctttctctttcttcctttactttcccttgcttttccctcttttcttactcctcctctttctctccccaacccccattctcatctgcacccttcttttctcatgtgtttgcataaacattcttttaacttctttctatttgacttgtggttgaattaaaattgtcccatttgc

SEQ ID NO: 676 - DNA, 3511 bp, Homo sapiens
cgggagagcggcagcgggaccccagcgcgggcggcggcggctgggcgggagccccagagggcaggaactgctgccacaacctcaggctgggcaccaaacacccgtgcccgccaatgcggcccagcccccggagagtcaggcccacagagcatgcccatgtgggccggcggtgtggggagccctcggcggggcatggcccctgcgtccacagatgacctctttgcccgcaagctgcgccagccagcaaggcccccgctgacaccgcacaccttcgagccgaggccagtccggggcccactcctgcgcagcggcagcgatgcaggcgaggccaggccccccacgccagccagcccccgtgcccgtgcccacagccacgaagaggccagccgacctgcagccacttccacccggctcttcactgacccgctggcactgctggggctgccagcagaggaaccagagcctgccttcccaccagtgcttgagcctcgatggtttgcccactatgacgtgcaaagcctgctctttgattgggctccgaggtctcaggggatggggagccactcagaggccagctctgggaccctggcttcagccgaggaccaggctgccagctcggacctgctgcatggggcacctggctttgtgtgtgagctcgggggtgagggtgagctaggcctgggtggaccagcatccccacctgtgccccctgcactgcccaacgcggccgtgtccatcctggaggagccacagaaccgaacctcggcctacagcctggagcacgcagacctgggtgctggctactaccgcaaatacttctatggcaaagaacatcagaacttcttcgggatggacgagtcgctgggcccggtggcagtgagcctgcggcgggaggagaaggagggcagcggagggggcaccctgcacagctaccgcgtcatcgtgcggaccacgcagctccggacactccgtggcaccatctcggaggacgcgctgccgccggggcccccacggggtctgtccccaaggaaacttctggagcacgtggcgccgcagctgagccccagctgcctgcgcctgggctcagcttcacccaaggtaccacggacgctgctcacactggatgagcaagtggtgagcttccaacgcaaggtgggcatcctgtactgccgggcgggccagggctcggaggaggagatgtacaacaaccaggaggcgggaccggccttcatgcagtttctcaccttgctgggcgatgtggtgcggctcaaaggctttgagagttaccgggcccagctagacaccaaaacggattccacaggcacgcactccctctacaccacataccaggaccacgagatcatgttccacgtgtccacgatgctgccttacacccctaataaccagcagcagctcctccggaagcgccacattggcaacgacattgtgaccatcgtgttccaggagcctggcagcaagcccttctgccccaccaccatccgctcgcacttccagcacgtgttcctagtggtgcgggcacacacaccctgcacgccacacaccacctacagggtggccgtgagccgcacccaggacacccctgccttcgggccagctctgcctgctggcggaggccccttcgcagccaacgccgacttccgggccttcctgctggccaaagcgctgaatggtgagcaggcggccggccacgcgcgccagttccacgccatggccacgcgcacccgccagcagtacctgcaagacctggccaccaacgaggtgaccactacgtcgctggactcggcttcacgcttcggcctgccctccctgggtgggaggcgccgggcggcccctcggggcccaggcgccgagctgcaggcagcgggctcactggtgtggggagtgcgcgcggcgcccggggcgcgggtcgccgccggggctcaggcgagcggccccgaaggcatcgaggtgccctgcctgctgggcatctcggccgaggctctggtgctggtggcgccgcgcgacggccgcgtagtgttcaattgcgcctgtcgcgacgtgctggcctggaccttctccgagcagcagctggacctgtaccacggccgcggggaggcgatcacgctgcgcttcgacgggtcccccggccaagccgtgggcgaggtggtggcgcgcctgcagctggtgagccgtggctgcgagacccgcgagctggcgctgccccgcgacggtcaaggccgcctgggcttcgaggtggacgccgagggattcgtcacgcacgtggagcgcttcacattcgccgagacggcggggctgcggcccggggcgcgcctcctgcgcgtgtgcggccagactctgcccagcctccggcccgaggccgctgcccagctcctgcgctcggcgcccaaggtctgcgtcaccgtcctgccccccgacgagagcggccggccccacaggagtttttcggagctgtacacgctgtcgctgcaggagcctagccggcggggggccccagatcctgtgcaggatgaggtccagggggtgaccctgctgcccaccacaaagcagctgctgcacctgtgcctgcaagatggtggcagtcctccagggcctggggatctggccgaggagaggactgagttcctgcacagccagaactcgctgtcaccacgcagctctctgtcggatgaggccccagtcctgcccaacaccaccccggacctcctcctggccaccacagccaagccatcagtacccagtgctgacagtgagacacccctgacccaggacaggccaggcagtcccagtggctctgaggacaagggcaacccggcgccggagctgagggcctcctttctgccacgtaccttgtctctgcggaactccatcagcaggatcatgtcggaggcgggcagtgggaccctggaggacgagtggcaggccatctcggagattgcctctacttgcaacaccattctggagtcgctgtcccgagagggacagcccatcccagagagtggagaccctaagggaactccaaaatctgatgctgagccagagcctgggaacctctcagagaaggtctctcacttggagtccatgctcaggaagctgcaggaggacctgcagaaggagaaggcggacagggcggccctggaggaggaggtgcggagcctgagacacaacaaccggcggctgcaggcggagtctgagagtgcagccacacgcctcctcctggcctccaagcagctgggctcacccaccgccgacctggcctgagccgtctggaaccacctgggcccctgagggcactgtggtcacactgggccctcctcaggaactctccctgcgcagaggcgtgtcttagcactgcccccctccctagccccttatttggtggcggaagtggcctccaccccttccctgtttgtaaatattctgtggagaaaagaggacttcagggagtaaaaaagccactgatgaaaaaaaaaaaaaaaaaaaaaaaaaaaaa

SEQ ID NO: 677 - DNA, 3657 bp, Homo sapiens
ggcagggtgactggggtcccatgacagctgctgtgaccccagcaccttcctcaggatgtgggggcctggcagagggctgggcccacagttggggctacttcctgtgctgaaggaagtcctcttgccattcctgctgccctgccgctgcctccctgggaacccatgtgtccttgtggcccctctgagcagccccctcctccttcagggcaggaactgctgccacaacctcaggctgggcaccaaacacccgtgcccgccaatgcggcccagcccccggagagtcaggcccacagagcatgcccatgtgggccggcggtgtggggagccctcggcggggcatggcccctgcgtccacagatgacctctttgcccgcaagctgcgccagccagcaaggcccccgctgacaccgcacaccttcgagccgaggccagtccggggcccactcctgcgcagcggcagcgatgcaggcgaggccaggccccccacgccagccagcccccgtgcccgtgcccacagccacgaagaggccagccgacctgcagccacttccacccggctcttcactgacccgctggcactgctggggctgccagcagaggaaccagagcctgccttcccaccagtgcttgagcctcgatggtttgcccactatgacgtgcaaagcctgctctttgattgggctccgaggtctcaggggatggggagccactcagaggccagctctgggaccctggcttcagccgaggaccaggctgccagctcggacctgctgcatggggcacctggctttgtgtgtgagctcgggggtgagggtgagctaggcctgggtggaccagcatccccacctgtgccccctgcactgcccaacgcggccgtgtccatcctggaggagccacagaaccgaacctcggcctacagcctggagcacgcagacctgggtgctggctactaccgcaaatacttctatggcaaagaacatcagaacttcttcgggatggacgagtcgctgggcccggtggcagtgagcctgcggcgggaggagaaggagggcagcggagggggcaccctgcacagctaccgcgtcatcgtgcggaccacgcagctccggacactccgtggcaccatctcggaggacgcgctgccgccggggcccccacggggtctgtccccaaggaaacttctggagcacgtggcgccgcagctgagccccagctgcctgcgcctgggctcagcttcacccaaggtaccacggacgctgctcacactggatgagcaagtggtgagcttccaacgcaaggtgggcatcctgtactgccgggcgggccagggctcggaggaggagatgtacaacaaccaggaggcgggaccggccttcatgcagtttctcaccttgctgggcgatgtggtgcggctcaaaggctttgagagttaccgggcccagctagacaccaaaacggattccacaggcacgcactccctctacaccacataccaggaccacgagatcatgttccacgtgtccacgatgctgccttacacccctaataaccagcagcagctcctccggaagcgccacattggcaacgacattgtgaccatcgtgttccaggagcctggcagcaagcccttctgccccaccaccatccgctcgcacttccagcacgtgttcctagtggtgcgggcacacacaccctgcacgccacacaccacctacagggtggccgtgagccgcacccaggacacccctgccttcgggccagctctgcctgctggcggaggccccttcgcagccaacgccgacttccgggccttcctgctggccaaagcgctgaatggtgagcaggcggccggccacgcgcgccagttccacgccatggccacgcgcacccgccagcagtacctgcaagacctggccaccaacgaggtgaccactacgtcgctggactcggcttcacgcttcggcctgccctccctgggtgggaggcgccgggcggcccctcggggcccaggcgccgagctgcaggcagcgggctcactggtgtggggagtgcgcgcggcgcccggggcgcgggtcgccgccggggctcaggcgagcggccccgaaggcatcgaggtgccctgcctgctgggcatctcggccgaggctctggtgctggtggcgccgcgcgacggccgcgtagtgttcaattgcgcctgtcgcgacgtgctggcctggaccttctccgagcagcagctggacctgtaccacggccgcggggaggcgatcacgctgcgcttcgacgggtcccccggccaagccgtgggcgaggtggtggcgcgcctgcagctggtgagccgtggctgcgagacccgcgagctggcgctgccccgcgacggtcaaggccgcctgggcttcgaggtggacgccgagggattcgtcacgcacgtggagcgcttcacattcgccgagacggcggggctgcggcccggggcgcgcctcctgcgcgtgtgcggccagactctgcccagcctccggcccgaggccgctgcccagctcctgcgctcggcgcccaaggtctgcgtcaccgtcctgccccccgacgagagcggccggccccacaggagtttttcggagctgtacacgctgtcgctgcaggagcctagccggcggggggccccagatcctgtgcaggatgaggtccagggggtgaccctgctgcccaccacaaagcagctgctgcacctgtgcctgcaagatggtggcagtcctccagggcctggggatctggccgaggagaggactgagttcctgcacagccagaactcgctgtcaccacgcagctctctgtcggatgaggccccagtcctgcccaacaccaccccggacctcctcctggccaccacagccaagccatcagtacccagtgctgacagtgagacacccctgacccaggacaggccaggcagtcccagtggctctgaggacaagggcaacccggcgccggagctgagggcctcctttctgccacgtaccttgtctctgcggaactccatcagcaggatcatgtcggaggcgggcagtgggaccctggaggacgagtggcaggccatctcggagattgcctctacttgcaacaccattctggagtcgctgtcccgagagggacagcccatcccagagagtggagaccctaagggaactccaaaatctgatgctgagccagagcctgggaacctctcagagaaggtctctcacttggagtccatgctcaggaagctgcaggaggacctgcagaaggagaaggcggacagggcggccctggaggaggaggtgcggagcctgagacacaacaaccggcggctgcaggcggagtctgagagtgcagccacacgcctcctcctggcctccaagcagctgggctcacccaccgccgacctggcctgagccgtctggaaccacctgggcccctgagggcactgtggtcacactgggccctcctcaggaactctccctgcgcagaggcgtgtcttagcactgcccccctccctagccccttatttggtggcggaagtggcctccaccccttccctgtttgtaaatattctgtggagaaaagaggacttcagggagtaaaaaagccactgatgaaaaaaaaaaaaaaaaaaaaaaaaaaaaa

SEQ ID NO: 678 - DNA, 2004 bp, Homo sapiens
cggactcctctttctcccggaagcggagcaccgagccggcaaaggcttgggtgtgagacagcagcggtggcagacaccgcagaagcaaagagcagtgaggctcctgcattcgggtggagcaccatggacgaagctggcagctctgcgagcggcgggggcttccgcccgggcgtggacagcctggacgaaccgcccaacagccgcatcttccttgtgatcagcaagtacacacctgagtcggtgctgagggagcgcttctcgccttttggcgacatccaggacatctgggtggtgcgggacaagcacaccaaggagtccaagggcattgctttcgtcaagttcgcccgcagctcacaggcctgcagggccatggaggagatgcatggccagtgcctcggccccaacgacaccaagcccatcaaggttttcattgctcagtcccgatcatctggaagtcaccgagatgttgaagatgaagaacttacaagaatctttgttatgataccaaagtcctacacagaagaagatctgcgggaaaaatttaaggtgtatggagatatcgagtattgcagcattattaagaataaagtgactggagaaagtaaaggtttgggctacgtacgatacttaaaaccatcacaagctgcccaagcaatagaaaactgtgatcgaagttttagagcaatcttggctgaacctaaaaataaagcatctgaatcctctgaacaagattattatagtaatatgaggcaagaagctttgggacatgaacctagagtaaatatgtttccatttgaacaacaatctgaattttcaagttttgacaagaatgatagccgaggccaggaagcaatctccaaacgcttgtcagttgtatcaagagttcctttcactgaagaacagcttttcagcatttttgatatagtaccaggattggaatattgtgaagttcaacgagatccttattcaaattatggtcatggagtggttcagtattttaatgtagcatcagctatttatgcaaaatacaaattacatggatttcagtaccctcctgggaaccgaataggtgtttccttcattgatgatggaagtaatgcaacagagtaagtaccattccaggagtgtctaaagccgagctttgagtgtacatgattgataggacttgaagaataaaaatagaaacaattgacctctcaggtgagaaagtcacacaaaacaagctactgttaaaagactgaatatttttagttttctgtaaattatcagttattttttccagtctccttagaaaaatggcaacacagatggtagctgcacagcttgcatcaatggtgtggaataacccaagtcagcaacaatttatgcaatttggaggaagctctggatcacagttgcctcaaatccagacagatgttgtacttccatcatgcaaaaaaaaagctcctgctgaaactcctgtgaaagaaagactttttattgtgtttaatcctcatcctttacctttagacgtattagaagatatattctgtcgttttggtaacctgatcgaagtttaccttgtgtcaggaaaaaatgtggggtatgccaagtatgccgatagaataagtgctaatgatgccattgccactctacatggaaagattctgaatggggtgagacttaaagttatgctggcagattcgccaagagaagaatctaacaaacggcaaagaacttactgattcttgagaacaaagactaaataatgacataatcctcagctgactgactgaaaatgtgactggacgcattccctgtggacagttgacagctttttttttttccatatacctgatagtctgtgtacagcattgttttgtctgggaagcagggattgctgacatgtatttttgaatccatacattaatgctaaaacgaatatagtagttgttccttagagcaatatgttgttacgtgtagcagaaataaagttttctttgcttaactaaaaaaaaaaaaaaa

SEQ ID NO: 679 - DNA, 894 bp, Homo sapiens
cagtctcaatgggggcactggggctggagggcaggggtgggaggctccaggggaggggttccctcctgctagctgtggcaggagccacttctctggtgaccttgttgctggcggtgcctatcactgtcctggctgtgctggccttagtgccccaggatcagggaggactggtaacggagacggccgaccccggggcacaggcccagcaaggactggggtttcagaagctgccagaggaggagccagaaacagatctcagccccgggctcccagctgcccacctcataggcgctccgctgaaggggcaggggctaggctgggagacgacgaaggaacaggcgtttctgacgagcgggacgcagttctcggacgccgaggggctggcgctcccgcaggacggcctctattacctctactgtctcgtcggctaccggggccgggcgccccctggcggcggggacccccagggccgctcggtcacgctgcgcagctctctgtaccgggcggggggcgcctacgggccgggcactcccgagctgctgctcgagggcgccgagacggtgactccagtgctggacccggccaggagacaagggtacgggcctctctggtacacgagcgtggggttcggcggcctggtgcagctccggaggggcgagagggtgtacgtcaacatcagtcaccccgatatggtggacttcgcgagagggaagaccttctttggggccgtgatggtggggtgagggaatatgagtgcgtggtgcgagtgcgtgaatattgggggcccggacgcccaggaccccatggcagtgggaaaaatgtaggagactgtttggaaattgattttgaacctgatgaaaataaagaatggaaagcttcagtgctgccgataaa

SEQ ID NO: 680 - DNA, 848 bp, Homo sapiens
cagtctcaatgggggcactggggctggagggcaggggtgggaggctccaggggaggggttccctcctgctagctgtggcaggagccacttctctggtgaccttgttgctggcggtgcctatcactgtcctggctgtgctggccttagtgccccaggatcagggaggactgggtttcagaagctgccagaggaggagccagaaacagatctcagccccgggctcccagctgcccacctcataggcgctccgctgaaggggcaggggctaggctgggagacgacgaaggaacaggcgtttctgacgagcgggacgcagttctcggacgccgaggggctggcgctcccgcaggacggcctctattacctctactgtctcgtcggctaccggggccgggcgccccctggcggcggggacccccagggccgctcggtcacgctgcgcagctctctgtaccgggcggggggcgcctacgggccgggcactcccgagctgctgctcgagggcgccgagacggtgactccagtgctggacccggccaggagacaagggtacgggcctctctggtacacgagcgtggggttcggcggcctggtgcagctccggaggggcgagagggtgtacgtcaacatcagtcaccccgatatggtggacttcgcgagagggaagaccttctttggggccgtgatggtggggtgagggaatatgagtgcgtggtgcgagtgcgtgaatattgggggcccggacgcccaggaccccatggcagtgggaaaaatgtaggagactgtttggaaattgattttgaacctgatgaaaataaagaatggaaagcttcagtgctgccgataaa

SEQ ID NO: 681 - DNA, 2123 bp, Homo sapiens
tcgctttgtgattcttgatccggaacttgtcacccaggaaccccggaagaggtagctcacgcgatagaaacgtgttcgctgcccagaagaagggaaggcgcgagtgaggaaaggaggtactgtagctacacttctggaaaattcagtatggacagtctccgacttaggatttttcaactttaggatggtgtgaaagagacacccattcagtagaaactgtacttcgagttttgcattttgatcttttcctggcctagtgataatgtggtacagtacactcttgtgatgctgggcagcggcagcgagccacagctcccagtcacccatgtgatcacgggaatcaacaacccatcctctaccgtgtactgtgttgtcagcttttttggatattgtgttttgtgttttcacattccatcatgtctacaaaatgtccatcagtgtctcctgtttctggtgagatgaagaagaggaaggcaattactcttgaaatgaaactcaagataattgcccagcatgaaggtggcaagccagtaatggccattgcacgtgagttaggactttggcaatccacgatttcaaccatcttaagggataagaagcaaatcagtgatgcagcgaaatcgtcagcatcagttaaatccactgtcatcacaaagaaaagggctggaccaattgatgatatggaaaaattacttgttatgtggatggaagaccagatacagaagcgtataccacttagcctactgatgatccaggctaaggcaagaagtctttttaatatgctaaaagaccgtgccagtgatcctacatatacacaaatgtttaaagcaagtcatggatggttccagcgcttcaaaaggcgtcataattttcacaatgtaaagatcactggtgaggcagcacgtgctggtaatgaaggtgccatagcttttaaggaacagctgcataggataattatggctaaagatctttgcaataaggagctgattgcactggaggaagaaagaggtaaaggcgttgaggcagtggaagaagttacacccacggcacctagaaagttcacagcaaagaaactggcagaggcatttgctgctatcagcagtggcctacacgttagaagaaatggacgtcaattacgagagattcgccacagttgacaggcgcagatacaggatgctcttgcttgctacagagaaatatatagtgaaaagaagaaacaagctgtacggtcaaaacttggtatcttcctgaagaacaacactatgcttgctaaaccatcaactagtgttgatgtcccaatgccttctaccacctattctcgatgttcatcagaagagagagaaattgaggaccctgttgcatccccatcatccagcaattaattctatttcagtgcttcaaacatttttcaggaccactgtgctttcagctgtgtaaattaatgatgccctccaaatccttggttatggaatatttggctcatcccagtacactcggcttggctgttggagttgcttgtggcatgtgcctgggctggagccttcgagtatgctttgggatgctccccaaaagcaagacgagcaagacacacacagatactgaaagtgaagcaagcatcttgggagacagcggggagtacaagatgattcttgtggttcgaaatgacttaaagatgggaaaagggaaagtggctgcccagtgctctcatgctgctgtttcagcctacaagcagattcaaagaagaaatcctgaaatgctcaaacaatgggaatactgtggccagcccaaggtggtggtcaaagctcctgatgaagaaaccctgattgcattattggcccatgcaaaaatgctgggactgactgtaagtttaattcaagatgctggacgtactcagattgcaccaggctctcaaactgtcctagggattgggccaggaccagcagacctaattgacaaagtcactggtcacctaaaactttactaggtggactttgatatgacaacaacccctccatcacaagtgtttgaagcctgtcagattctaacaacaaaagctgaatttcttcacccaacttaaatgttcttgagatgaaaataaaacctattcccatgttctaaaaaaa

SEQ ID NO: 682 - DNA, 804 bp, Homo sapiens
tcgctttgtgattcttgatccggaacttgtcacccaggaaccccggaagaggtagctcacgcgatagaaacgtgttcgctgcccagaagaagggaaggcgcgagtgaggaaaggaggtactgtagatgccctccaaatccttggttatggaatatttggctcatcccagtacactcggcttggctgttggagttgcttgtggcatgtgcctgggctggagccttcgagtatgctttgggatgctccccaaaagcaagacgagcaagacacacacagatactgaaagtgaagcaagcatcttgggagacagcggggagtacaagatgattcttgtggttcgaaatgacttaaagatgggaaaagggaaagtggctgcccagtgctctcatgctgctgtttcagcctacaagcagattcaaagaagaaatcctgaaatgctcaaacaatgggaatactgtggccagcccaaggtggtggtcaaagctcctgatgaagaaaccctgattgcattattggcccatgcaaaaatgctgggactgactgtaagtttaattcaagatgctggacgtactcagattgcaccaggctctcaaactgtcctagggattgggccaggaccagcagacctaattgacaaagtcactggtcacctaaaactttactaggtggactttgatatgacaacaacccctccatcacaagtgtttgaagcctgtcagattctaacaacaaaagctgaatttcttcacccaacttaaatgttcttgagatgaaaataaaacctattcccatgttctaaaaaaa

SEQ ID NO: 683 - DNA, 2650 bp, Homo sapiens
gccgcgctggtggcggcggcgcgtcgttgcagttgcgccatctgtcaggagcggagccggcgaggagggggctgccgcgggcgaggaggaggggtcgccgcgagccgaaggccttcgagacccgcccgccgcccggcggcgagagtagaggcgaggttgttgtgcgagcggcgcgtcctctcccgcccgggcgcgccgcgcttctcccagcgcaccgaggaccgcccgggcgcacacaaagccgccgcccgcgccgcaccgcccggcggccgccgcccgcgccagggagggattcggccgccgggccggggacaccccggcgccgccccctcggtgctctcggaaggcccaccggctcccgggcccgccggggaccccccggagccgcctcggccgcgccggaggagggcggggagaggaccatgtgagtgggctccggagcctcagcgccgcgcagtttttttgaagaagcaggatgctgatctaaacgtggaaaaagaccagtcctgcctctgttgtagaagacatgtggtgtatataaagtttgtgatcgttggcggacattttggaatttagataatgggctgtgtgcaatgtaaggataaagaagcaacaaaactgacggaggagagggacggcagcctgaaccagagctctgggtaccgctatggcacagaccccacccctcagcactaccccagcttcggtgtgacctccatccccaactacaacaacttccacgcagccgggggccaaggactcaccgtctttggaggtgtgaactcttcgtctcatacggggaccttgcgtacgagaggaggaacaggagtgacactctttgtggccctttatgactatgaagcacggacagaagatgacctgagttttcacaaaggagaaaaatttcaaatattgaacagctcggaaggagattggtgggaagcccgctccttgacaactggagagacaggttacattcccagcaattatgtggctccagttgactctatccaggcagaagagtggtactttggaaaacttggccgaaaagatgctgagcgacagctattgtcctttggaaacccaagaggtacctttcttatccgcgagagtgaaaccaccaaaggtgcctattcactttctatccgtgattgggatgatatgaaaggagaccatgtcaaacattataaaattcgcaaacttgacaatggtggatactacattaccacccgggcccagtttgaaacacttcagcagcttgtacaacattactcagagagagctgcaggtctctgctgccgcctagtagttccctgtcacaaagggatgccaaggcttaccgatctgtctgtcaaaaccaaagatgtctgggaaatccctcgagaatccctgcagttgatcaagagactgggaaatgggcagtttggggaagtatggatgggtacctggaatggaaacacaaaagtagccataaagactcttaaaccaggcacaatgtcccccgaatcattccttgaggaagcgcagatcatgaagaagctgaagcacgacaagctggtccagctctatgcagtggtgtctgaggagcccatctacatcgtcaccgagtatatgaacaaaggaagtttactggatttcttaaaagatggagaaggaagagctctgaaattaccaaatcttgtggacatggcagcacaggtggctgcaggaatggcttacatcgagcgcatgaattatatccatagagatctgcgatcagcaaacattctagtggggaatggactcatatgcaagattgctgacttcggattggcccgattgatagaagacaatgagtacacagcaagacaaggtgcaaagttccccatcaagtggacggcccccgaggcagccctgtacgggaggttcacaatcaagtctgacgtgtggtcttttggaatcttactcacagagctggtcaccaaaggaagagtgccatacccaggcatgaacaaccgggaggtgctggagcaggtggagcgaggctacaggatgccctgcccgcaggactgccccatctctctgcatgagctcatgatccactgctggaaaaaggaccctgaagaacgccccacttttgagtacttgcagagcttcctggaagactactttaccgcgacagagccccagtaccaacctggtgaaaacctgtaaggcccgggtctgcggagagaggccttgtcccagaggctgccccacccctccccattagctttcaattccgtagccagctgctccccagcagcggaaccgcccaggatcagattgcatgtgactctgaagctgacgaacttccatggccctcattaatgacacttgtccccaaatccgaacctcctctgtgaagcattcgagacagaaccttgttatttctcagactttggaaaatgcattgtatcgatgttatgtaaaaggccaaacctctgttcagtgtaaatagttactccagtgccaacaatcctagtgctttccttttttaaaaatgcaaatcctatgtgattttaactctgtcttcacctgattcaactaaaaaaaaaaaagtattattttccaaaagtggcctctttgtctaaaacaataaaattttttttcatgttttaacaaaaaccaa

SEQ ID NO: 684 - DNA, 2073 bp, Homo sapiens
gaatttagataatgggctgtgtgcaatgtaaggataaagaagcaacaaaactgacggaggagagggacggcagcctgaaccagagctctgggtaccgctatggcacagaccccacccctcagcactaccccagcttcggtgtgacctccatccccaactacaacaacttccacgcagccgggggccaaggactcaccgtctttggaggtgtgaactcttcgtctcatacggggaccttgcgtacgagaggaggaacaggagtgacactctttgtggccctttatgactatgaagcacggacagaagatgacctgagttttcacaaaggagaaaaatttcaaatattgaacagctcggaaggagattggtgggaagcccgctccttgacaactggagagacaggttacattcccagcaattatgtggctccagttgactctatccaggcagaagagtggtactttggaaaacttggccgaaaagatgctgagcgacagctattgtcctttggaaacccaagaggtacctttcttatccgcgagagtgaaaccaccaaaggtgcctattcactttctatccgtgattgggatgatatgaaaggagaccatgtcaaacattataaaattcgcaaacttgacaatggtggatactacattaccacccgggcccagtttgaaacacttcagcagcttgtacaacattactcagagaaagctgatggtttgtgttttaacttaactgtgattgcatcgagttgtaccccacaaacttctggattggctaaagatgcttgggaagttgcacgtcgttcgttgtgtctggagaagaagctgggtcaggggtgtttcgctgaagtgtggcttggtacctggaatggaaacacaaaagtagccataaagactcttaaaccaggcacaatgtcccccgaatcattccttgaggaagcgcagatcatgaagaagctgaagcacgacaagctggtccagctctatgcagtggtgtctgaggagcccatctacatcgtcaccgagtatatgaacaaaggaagtttactggatttcttaaaagatggagaaggaagagctctgaaattaccaaatcttgtggacatggcagcacaggtggctgcaggaatggcttacatcgagcgcatgaattatatccatagagatctgcgatcagcaaacattctagtggggaatggactcatatgcaagattgctgacttcggattggcccgattgatagaagacaatgagtacacagcaagacaaggtgcaaagttccccatcaagtggacggcccccgaggcagccctgtacgggaggttcacaatcaagtctgacgtgtggtcttttggaatcttactcacagagctggtcaccaaaggaagagtgccatacccaggcatgaacaaccgggaggtgctggagcaggtggagcgaggctacaggatgccctgcccgcaggactgccccatctctctgcatgagctcatgatccactgctggaaaaaggaccctgaagaacgccccacttttgagtacttgcagagcttcctggaagactactttaccgcgacagagccccagtaccaacctggtgaaaacctgtaaggcccgggtctgcggagagaggccttgtcccagaggctgccccacccctccccattagctttcaattccgtagccagctgctccccagcagcggaaccgcccaggatcagattgcatgtgactctgaagctgacgaacttccatggccctcattaatgacacttgtccccaaatccgaacctcctctgtgaagcattcgagacagaaccttgttatttctcagactttggaaaatgcattgtatcgatgttatgtaaaaggccaaacctctgttcagtgtaaatagttactccagtgccaacaatcctagtgctttccttttttaaaaatgcaaatcctatgtgattttaactctgtcttcacctgattcaactaaaaaaaaaaaagtattattttccaaaagtggcctctttgtctaaaacaataaaattttttttcatgttttaacaaaaaccaa

SEQ ID NO: 685 - DNA, 2000 bp, Homo sapiens
cagcgcaggtctgaggagctgagaagggaggcttacgtgaagggaatttagataatgggctgtgtgcaatgtaaggataaagaagcaacaaaactgacggaggagagggacggcagcctgaaccagagctctgggtaccgctatggcacagaccccacccctcagcactaccccagcttcggtgtgacctccatccccaactacaacaacttccacgcagccgggggccaaggactcaccgtctttggaggtgtgaactcttcgtctcatacggggaccttgcgtacgagaggaggaacaggagtgacactctttgtggccctttatgactatgaagcacggacagaagatgacctgagttttcacaaaggagaaaaatttcaaatattgaacagctcggaaggagattggtgggaagcccgctccttgacaactggagagacaggttacattcccagcaattatgtggctccagttgactctatccaggcagaagagtggtactttggaaaacttggccgaaaagatgctgagcgacagctattgtcctttggaaacccaagaggtacctttcttatccgcgagagtgaaaccaccaaaggtgcctattcactttctatccgtgattgggatgatatgaaaggagaccatgtcaaacattataaaattcgcaaacttgacaatggtggatactacattaccacccgggcccagtttgaaacacttcagcagcttgtacaacattactcaggtacctggaatggaaacacaaaagtagccataaagactcttaaaccaggcacaatgtcccccgaatcattccttgaggaagcgcagatcatgaagaagctgaagcacgacaagctggtccagctctatgcagtggtgtctgaggagcccatctacatcgtcaccgagtatatgaacaaaggaagtttactggatttcttaaaagatggagaaggaagagctctgaaattaccaaatcttgtggacatggcagcacaggtggctgcaggaatggcttacatcgagcgcatgaattatatccatagagatctgcgatcagcaaacattctagtggggaatggactcatatgcaagattgctgacttcggattggcccgattgatagaagacaatgagtacacagcaagacaaggtgcaaagttccccatcaagtggacggcccccgaggcagccctgtacgggaggttcacaatcaagtctgacgtgtggtcttttggaatcttactcacagagctggtcaccaaaggaagagtgccatacccaggcatgaacaaccgggaggtgctggagcaggtggagcgaggctacaggatgccctgcccgcaggactgccccatctctctgcatgagctcatgatccactgctggaaaaaggaccctgaagaacgccccacttttgagtacttgcagagcttcctggaagactactttaccgcgacagagccccagtaccaacctggtgaaaacctgtaaggcccgggtctgcggagagaggccttgtcccagaggctgccccacccctccccattagctttcaattccgtagccagctgctccccagcagcggaaccgcccaggatcagattgcatgtgactctgaagctgacgaacttccatggccctcattaatgacacttgtccccaaatccgaacctcctctgtgaagcattcgagacagaaccttgttatttctcagactttggaaaatgcattgtatcgatgttatgtaaaaggccaaacctctgttcagtgtaaatagttactccagtgccaacaatcctagtgctttccttttttaaaaatgcaaatcctatgtgattttaactctgtcttcacctgattcaactaaaaaaaaaaaagtattattttccaaaagtggcctctttgtctaaaacaataaaattttttttcatgttttaacaaaaaccaaaaaaaaaaaaaaaaaaaaaaaaaaaaaaaaaaaaaaaaaa

SEQ ID NO: 686 - DNA, 2164 bp, Homo sapiens
cttccagctggtgggagttgacgacgtggtgctgggcgttgggaccctactttatctagttcgggaagttgggttgtggggtcatacctgtctgtctgctcccagctttcttgggtttcttccgacggcgtggggcctcgctaaggaattcccggcccctcagggccacggctttagcggtgtcttttgcgagttcttcgtaagtacatcttaaagctgtcaagatggttctagcagaccttggaagaaaaataacatcagcattacgctcattgagcaatgccaccattatcaatgaagaggtattgaatgctatgctaaaagaagtctgtaccgctttgttggaagcagatgttaatattaaactagtgaagcaactaagagaaaatgttaagtctgctattgatcttgaagagatggcatctggtcttaacaaaagaaaaatgattcagcatgctgtatttaaagaacttgtgaagcttgtagaccctggagttaaggcatggacacccactaaaggaaaacaaaatgtgattatgtttgttggattgcaagggagtggtaaaacaacaacatgttcaaagctagcatattattaccagaggaaaggttggaagacctgtttaatatgtgcagacacattcagagcaggggcttttgaccaactaaaacagaatgctaccaaagcaagaattccattttatggaagctatacagaaatggatcctgtcatcattgcttctgaaggagtagagaaatttaaaaatgaaaattttgaaattattattgttgatacaagtggccgccacaaacaagaagactctttgtttgaagaaatgcttcaagttgctaatgctatacaacctgataacattgtttatgtgatggatgcctccattgggcaggcttgtgaagcccaggctaaggcttttaaagataaagtagatgtagcctcagtaatagtgacaaaacttgatggccatgcaaaaggaggtggtgcactcagtgcagtcgctgccacaaaaagtccgattattttcattggtacaggggaacatatagatgactttgaacctttcaaaacacagccttttattagcaaacttcttggtatgggcgacattgaaggactgatagataaagtcaacgagttgaagttggatgacaatgaagcacttatagagaagttgaaacatggtcagtttacgttgcgagacatgtatgagcaatttcaaaatatcatgaaaatgggccccttcagtcagatcttggggatgatccctggttttgggacagattttatgagcaaaggaaatgaacaggagtcaatggcaaggctaaagaaattaatgacaataatggatagtatgaatgatcaagaactagacagtacggatggtgccaaagtttttagtaaacaaccaggaagaatccaaagagtagcaagaggatcgggtgtatcaacaagagatgttcaagaacttttgacacaatataccaagtttgcacagatggtaaaaaagatgggaggtatcaaaggacttttcaaaggtggcgacatgtctaagaatgtgagccagtcacagatggcaaaattgaaccaacaaatggccaaaatgatggatcctagggttcttcatcacatgggtggtatggcaggacttcagtcaatgatgaggcagtttcaacagggtgctgctggcaacatgaaaggcatgatgggattcaataatatgtaaagaaaatgccttaatataaactgactcagttgaatacctaatttgctgagacctcagcgtttcccttctttttgcgaattggggggaaagtgtatttttcttgcttatcatgcactctttccttttcttctcgcccgcttttcccctccttttctttttccttccttctttcctccctttaatataagggagaaatacatggtttttgtggaaatcattatatgtttgctttagattttcttctgttttcaccatcataacacttaagttaaatcatgatgtaaaattttagtacttaaaggtttttaattatctcgaaggccaagcattgcatttgtaaacagtcctggtcagtagttaaataatgtttcaattaaagtgctgtaaaataaacttcaaagtggttataaaaaaaaaaaaaaaaa

SEQ ID NO: 687 - DNA, 1478 bp, Homo sapiens
agcggctgggcggcgggccgggcccggggccgcttggaatggcgcctcctccgccttcgccccaactgcttctcctggcagccctcgcgaggctcctgggtcccagcgaggtgatggctggaccggcggaggaggcgggagcccattgtcccgagagcctgtggcctctgcctccgcaggtgtcaccaagagtgacctacacacgagtgagcccagggcaggctgaggatgtcaccttcctctaccacccctgtgcccatccctggctgaagctccagcttgccctcctggcctatgcttgtatggctaacccttccctcacccctgacttcagcctcacgcaggatcggcccctggtgctgactgcatgggggctggcgctggagatggcctgggtagagccagcctgggctgcccactggctgatgaggaggcggaggaggaagcagaggaagaagaaggcatggatctactgtgaaagcctttcagggcctgctccctccgagccaactcccggtagagggaggctgtgccgaagagggtgtgtgcaggccctggctctggcctttgctctgcggagctggcggccccctggcacagaggtgacatctcaagggcccaggcagccctcttctagtggtgccaagaggcggaggctgcgggctgcccttggtccccagcccactcgctcagccctgaggtttccctctgcttccccagggagcttgaaggccaagcagtccatggcgggaatccctggtagggagagtaatgccccatctgtgcccactgtctccctgctgccgggggcgcctggaggcaatgccagctccaggacagaggctcaggtgcccaacgggcaaggcagcccagggggctgtgtctgttcaagtcaggcttccccggcccctcgcgcagcagcgcctccacgggcagcccggggccccaccccacgcactgaagaggccgcctgggctgccatggccctgaccttcctgctggtgctgctcaccctggccacgctctgcacacggctgcacagaaacttccgacgcggggagagcatctactgggggcccacagcggacagccaggacacagtggctgctgtgctgaagcggaggctgctgcagccctcgcgccgggtcaagcgctcgcgccggagacccctcctcccgcccacgccggacagcggcccggaaggcgagagctcggagtgacggcctgggacctgccactgtggcgtgcggctcctccccgcgccgcgaggccgcgacctctgccacgtggaccgcgcgcggggcgctccctggtggcgatggcgcggcactggccgagcactgcgggggctttcctccttgttggttgctgagtgggcggccaaggggagaaaaggagccgcttctgcctcccttgccaaaactccgtttctaattaaattatttttagtagaaaaaaaaaaaaaaaaaaaaaaaaaa

SEQ ID NO: 688 - DNA, 2792 bp, Homo sapiens
caccctcaggcactacagctagactccgagcttactgggcagtcatctgattcgaccaacatcagttcgcagggcttaagcccagtcccttacggcggcctggggagggaccaggcccaagtatataaagctccctgagggtccgcgttggctttgcgcctgtgagtgtgattcaagaacgtcccagtgcccttggctcctttcggagtgtgaccccgtgcttgcacgggacacgttacccagctcgggtgagaagggtatcttccgggaacctcgcctttaatagcacaacgagcgcagagtccactggatctgcgagaagaaaccgcgctaactagtttgtccctacggccgcctcgtagtcactgccgcggcgccttgagtctccgggccgccttgccatggctgcccgtggtgtcatcgctccagttggcgagagtttgcgctacgctgagtacttgcagccctcggccaaacggccagacgccgacgtcgaccagcagagactggtaagaagtttgatagctgtaggactgggtgttgcagctcttgcatttgcaggtcgctacgcatttcggatctggaaacctctagaacaagttatcacagaaactgcaaagaagatttcaactcctagcttttcatcctactataaaggaggatttgaacagaaaatgagtaggcgagaagctggtcttattttaggtgtaagcccatctgctggcaaggctaagattagaacagctcataggagagtcatgattttgaatcacccagataaaggtggatctccttacgtagcagccaaaataaatgaagcaaaagacttgctagaaacaaccaccaaacattgatgcttaaggaccacactgaaggaaaaaaaaagaggggacttcgaaaaaaaaaaaagccctgcaaaatattctaaaacatggtcttcttaattttctatatggattgaccacagtcttatcttccaccattaagctgtataacaataaaatgttaatagtcttgctttttattatcttttaaagatctccttaaattctataactgatcttttttcttattttgtttgtgacattcatacatttttaagatttttgttatgttctgaattcccccctacacacacacacacacacacacacacacacacgtgcaaaaaatatgatcaagaatgcaattgggatttgtgagcaatgagtagacctcttattgtttatatttgtaccctcattgtcaatttttttttagggaatttgggactctgcctatataaggtgttttaaatgtcttgagaacaagcactggctgatacctcttggagatatgatctgaaatgtaatggaatttattaaatggtgtttagtaaagtaggggttaaggacttgttaaagaaccccactatctctgagaccctatagccaaagcatgaggacttggagagctactaaaatgattcaggtttacaaaatgagccctgtgaggaaaggttgagagaagtctgaggagtttgtatttaattatagtcttccagtactgtatattcattcattactcattctacaaatatttattgaccccttttgatgtgcaaggcactatcgtgcgtcccctgagagttgcaagtatgaagcagtcatggatcatgaaccaaaggaacttatatgtagaggaaggataaatcacaaatagtgaatactgttagatacagatgatatattttaaaagttcaaaggaagaaaagaatgtgttaaacactgcatgagaggaggaataagtggcatagagctaggctttagaaaagaaaaatattccgataccatatgattggtgaggtaagtgttattctgagatgagaattagcagaaatagatatatcaatcggagtgattagagtgcagggtttctggaaagcaaggtttggacagagtggtcatcaaaggccagccctgtgacttacactgcattaaattaatttcttagaacatagtccctgatcattatcactttactattccaaaggtgagagaacagattcagatagagtgccagcattgtttcccagtattcctttacaaatcttgggttcattccaggtaaactgaactactgcattgtttctatcttaaaatactttttagatatcctagatgcatctttcaacttctaacattctgtagtttaggagttctcaaccttggcattattgacatgttaggccaaataattttttttgtgggaggtctcttgtgcgttttagatgattagcaataatccctgacctgttatctactaaagactagtcgtttctcatcagttgtgacaacaaaaatggttccagatattgccaaatgccctttagaggacagtaatcgcccccagttgagaaccatttcagtaaaactttaattactattttttcttttggtttataaaataatgatcctgaattaaattgatggaaccttgaagtcgataaaatatatttcttgctttaaagtccccatacgtgtcctactaattttctcatgctttagtgttttcacttttctcctgttatccttgtacctaagaatgccatcccaatccccagatgtccacctgcccaaagtctaggcatagctgaaggccaagctaaaatgtatccctctttttctggtacatgcagcaaaagtaatatgaattatcagctttctgagagcaggcattgtatctgtcttgtttggtgttacattggcacccaataaatatttgttgagtgaatgaaaaaaaaaaaaaaaaaa

SEQ ID NO: 689 - DNA, 1273 bp, Homo sapiens
aagtagttgcgcagctggggttggtaaggtcgggccatggtggggcagaggttgggaagatggcgtggcgaggctgggcgcagagaggctggggctgcggccaggcgtggggtgcgtcggtgggcggccgcagctgcgaggagctcactgcggtcctaaccccgccgcagctcctcggacgcaggtttaacttctttattcaacaaaaatgcggattcagaaaagcacccaggaaggttgaacctcgaagatcagacccagggacaagtggtgaagcatacaagagaagtgctttgattcctcctgtggaagaaacagtcttttatccttctccctatcctataaggagtctcataaaacctttattttttactgttgggtttacaggctgtgcatttggatcagctgctatttggcaatatgaatcactgaaatccagggtccagagttattttgatggtataaaagctgattggttggatagcataagaccacaaaaagaaggagacttcagaaaggagattaacaagtggtggaataacctaagtgatggccagcggactgtgacaggtattatagctgcaaatgtccttgtattctgtttatggagagtaccttctctgcagcggacaatgatcagatatttcacatcgaatccagcctcaagtgttatttccaattttgtcagttacgtgggtaaagttgccacaggaagatatggaccatcacttggtgcatctggtgccatcatgacagtcctcgcagctgtctgcactaagatcccagaagggaggcttgccattattttccttccgatgttcacgttcacagcagggaatgccctgaaagccattatcgccatggatacagcaggaatgatcctgggatggaaattttttgatcatgcggcacatcttgggggagctctttttggaatatggtatgttacttacggtcatgaactgatttggaagaacagggagccgctagtgaaaatctggcatgaaataaggactaatggccccaaaaaaggaggtggctctaagtaaaactgggattggacagtagtggtgcatctggtccttgccgcctgagagccccaggagacatcggctagagtgaccatggctatgctcccgtctggaagatgccagcatctggcctcccactgttttcagctgtgtcccccagtccgtgtctttttagaatgtgaatgatgataaagttgtgaaataaaggtttctatctagtttgtaagcagaaaaaaaaaaaa

SEQ ID NO: 690 - DNA, 1423 bp, Homo sapiens
aagtagttgcgcagctggggttggtaaggtcgggccatggtggggcagaggttgggaagatggcgtggcgaggctgggcgcagagaggctggggctgcggccaggcgtggggtgcgtcggtgggcggccgcagctgcgaggagctcactgcggtcctaaccccgccgcagctcctcggacgcaggtttaacttctttattcaacaaaaatgcggattcagaaaagcacccaggaaggttgaacctcgaagatcagacccagggacaagtggtgaagcatacaagagaagtgctttgattcctcctgtggaagaaacagtcttttatccttctccctatcctataaggagtctcataaaacctttattttttactgttgggtttacaggctgtgcatttggatcagctgctatttggcaatatgaatcactgaaatccagggtccagagttattttgatggtataaaagctgattggttggatagcataagaccacaaaaagaaggagacttcagaaaggagattaacaagtggtggaataacctaagtgatggccagcggactgtgacaggtattatagctgcaaatgtccttgtattctgtttatggagagtaccttctctgcagcggacaatgatcagatatttcacatcgaatccagcctcaaaggtcctttgttctccaatgttgctgtcaacattcagtcatttctccttatttcacatggcagcaaatatgtatgttttgtggagcttctcttccagcatagtgaacattctgggtcaagagcagttcatggcagtgtacctatctgcaggtgttatttccaattttgtcagttacgtgggtaaagttgccacaggaagatatggaccatcacttggtgcatctggtgccatcatgacagtcctcgcagctgtctgcactaagatcccagaagggaggcttgccattattttccttccgatgttcacgttcacagcagggaatgccctgaaagccattatcgccatggatacagcaggaatgatcctgggatggaaattttttgatcatgcggcacatcttgggggagctctttttggaatatggtatgttacttacggtcatgaactgatttggaagaacagggagccgctagtgaaaatctggcatgaaataaggactaatggccccaaaaaaggaggtggctctaagtaaaactgggattggacagtagtggtgcatctggtccttgccgcctgagagccccaggagacatcggctagagtgaccatggctatgctcccgtctggaagatgccagcatctggcctcccactgttttcagctgtgtcccccagtccgtgtctttttagaatgtgaatgatgataaagttgtgaaataaaggtttctatctagtttgtaagcagaaaaaaaaaaaa

SEQ ID NO: 691 - DNA, 3268 bp, Homo sapiens
cggtctcgggagatggaggaaaaggagatgttacggcggcagatccgcctactgcagggtctgattgatgactacaaaaccctccacggcaatgccccggcccctggtaccccagcagcttctgggtggcagccacccacttaccacagtggcagagcctttagtgcccgctaccctcgtccaagccggaggggctactcttcccaccatgggccttcgtggcgcaagaaatactccctcgtgaatcggcccccgggaccctcagaccctcctgccgaccatgctgtgcggccgttgcacggggcccgggggggccggcctcctgtcccgcagcagcatgtccttgagagacaggtccagctcagtcagggtcagaacgtggtcatcaaagttaaaccgccatcaaagtctggctctgccagtgcctcaggggcccagcggggctctttggaagaatttgaggaaaccccctggagtgaccaaaggccccgggaaggtgaaggtaagccccctcggggacagctgcagccctcgaggccaacaagagccagggggacctgcagtgtggaagatcctcttctggtctgccagaaggagcctggtaagcccaggatggtgaagtcagtgggcagtgtgggcgacagcccccgggagccccgccggacagtcagtgagagtgtgattgccgtcaaggcgagcttcgcatcctccgctctgcccccacgcactggcgtggccctgggccggaagctgggttctcattccgtggccagctgtgctccacagctccttggggacaggagagtagatgctggccacacagatcagccagttccgtctggctcagtggggggccccgccagaccggcctcaggacccaggcaggcccgggaggcctcgctggttgtgacctgtcgaactaacaagttccggaaaaacaactacaaatgggtggctgcctcctcgaagagtccccgggttgctcggagggccctcagtcccagagtggctgcagagaatgtgtgcaaggcctctgctggcatggcaaacaaggtggagaagccgcagctcatagctgacccagagcccaagcccaggaagccagccacgtcctccaagccagggtctgcccccagcaagtacaagtggaaggcctccagcccctctgcctcctcctcttcctccttccgttggcagtcggaggccagcagcaaggaccatgcctcccagctctccccagtcctgtctaggtccccgtcgggggacagaccagcagtaggacacagtggcttgaagcccctctctggggagaccccgctctcggcttacaaagtgaagagccgcaccaagatcatccggagacgcggcagcacaagccttcctggagacaagaaaagcggcacctcacctgccgccaccgccaagagccacctcagcctccggcggagacaggccctcagggggaagagcagccctgtcctgaagaagacccccaacaagggcctggtacaggtcaccacgcaccgactatgtcgcctgccaccgagccgggcccacctccccaccaaggaagcgtccagcctgcatgccgtgcggactgcacccaccagcaaggtgatcaagacccgctaccgcattgtcaagaagacgccggcctcgcctctcagcgccccgcccttccccctgtctctgccctcctggcgggcccggcggctctcactatccgggtccctggtgctgaaccacctgcgtccagttgccagcgggggtgggaaagcccaaccgggctccccttggtggcggagcaaaggctaccgctgcatcggaggggtcctctacaaagtatctgccaacaagctctccaagacctccggccagcccagtgatgcgggcagcaggcccctcctgcgcacaggctggctggatcctgcaggcagctgtagccgttccctggccagccgggcagtgcagcgcagcctggccatcatccggcaggcgcggcagcgcagggagaagaggaaggagtactgcatgtactacaaccgcttcggcaggtgcaaccgtggcgagcgctgcccctacatccacgatcccgagaaggtggccgtgtgcaccaggtttgtccggggcacctgcaagaaaacggatgggacctgccccttctcccaccatgtgtccaaggagaagatgcgggtgtgctcctacttcctgaagggcatctgcagcaacagcaactgtccctatagccacgtgtacgtgtcccgcaaggccgaggtctgcagcgacttcctcaaaggctactgccccctgggtgcaaagtgcaagaagaaacacacgctgctgtgccccgactttgcccgcaggggggcgtgtccccgcggcgcccagtgccagctgctccaccgtacccagaaacgccacagtcggcgggcagccacgtcccccgccccagggcccagcgacgcaaccgccaggagcagggtctcggccagccacgggcccaggaagccttcagcatcccagcgccccaccaggcagacgcccagctcggctgccctcactgcggctgccgtggctgcacctccccactgcccaggggggtcagcctctccctcatcctcgaaggcttcgtcctcctcctcctcctcctcatcccctcccgcttccttggaccacgaggcaccatctctccaggaggctgccttagcagcagcgtgctccaacaggctctgcaagctgccttccttcatctccctgcagtcctcgccgagcccaggagcccagcccagggtccgggcccctagggcccccctcaccaaggactcagggaagcctctgcacatcaaaccacgtctgtgaggaccccagggaccggcctgcacctacctcagaccctcatccttggagaggaaagaggctctgtccaccactctaccccacaggagggccgcccgccaccaagcctcacctgggggccacagggacactgctctgcctgcctggccctcaaccttccatgaccagcgtgtgcgcagggcctggtcttcctcccccaagccaggcccctgtccccaccccaccaccttccagggtgccaggcagggctggcctccaggcctgtccccgactgccattggcaacagtggccctgcagcccccagccctccccacccaggttttcggcccagtgaagaggccactggccaggcctcccaggcaggtgttttatgttcagcaataaaggttctatccgaaaaaaaaaaaaaaa

SEQ ID NO: 692 - DNA, 2623 bp, Homo sapiens
ttctcggcaaaatggaccccgcgtctggggagggggaggggagagggtggggagggaggcggcggagacggggtttatttttcatcctggcttccccattcccgccgcatctgcgggcggccgcggcgaggagagcaggtccggggtgcggcggggagagctcggggcaggcgagtcgccccggccccgttcccgctcccgctcccgctccgagcccgcggcggcggcgcgcacctgccgcgggactgccccttcccagccgcctcgctgccttttcgaagcaccgccgaggatccgcggccgcgtccggccgagcccccagccgcgcggaggaccggcggcccagccgggcgtctcctgcgaggcccgcgctgttcgccgcgccggccagaagagatgtgcggctgggacggcgcatttttggccgagtgcgcgcgggcgttatgctgttcgcgcccccccgagtcgccccaaatgcgggatattgggtgggggggtgcggttggaaggcgctaagatggcgctgggcctggcctgtcgccagggctggtggcgcagttgctcggcgggcgccatctttctcgcggcgcgggcggcgccctccgaggacatctcgatgaccagggcgccgcgaggcccggggctagcgggagccgagagcagggtgctgaattctggagatgggactggggtcgcgcggccttctccttccccacgcccccagacccaaaagacgaggccgccggctcggagcgggaagggctggggccagcttcttcttcctaaccacttgtttgtgatggaagaagggggctgggggtcgagcctcgcggctgatgggttccctccctgaccccgcacccccactcctcccagtcgaaattggaggtgaggcgctcctgccattttctctcctgcggtctgagagtggacgtctttgtcttctctggcccggcgtgggggcagggcattgagccttttccttaattcttcagttattgaaagtagagtccaaccaggttacaaaactaaaaaaaggagtccaggacattgtctgtctgccttccggtagcatggttctctgtgggtaccctacgcttcgtttcttagttttactctaaaacaaccctgaggagacatttactagttgtcagattacgggaaggtgatgggttccagttttttgaaactttttttgttggctttcatattacttcaaatggcagtgaattaaaacagtttcttagaactctaatctgaaaagttaaatacgctttaaaacagtctgaaactcttctaaaaagcaaaactgcattattaaaagcatccatgtaagtatctgttggtagtatctattagagatgggggaggggtttaacttttacattattattgaaaagaggaggggaaaggtctataaagctctgatctctctagaagtccacatacatggaaagtaaatagttaatttctagtgtagaaaaataacaccgtggtgccagtaggtgtgtccttgtgtttataaatatacatagtggatgttttagaccatttaatgagacctattatatattgaatacctgctgtatgccaggaactgtgcctgatgctttgtataatttctattatatcagcccagaaatagtgattttatgatctgtctaccggggaatgaactaacgttcatagaagtatagtaattgttcgaggtcttgcagttttaagtagtaaagttgccattggatcacaaaagctgtattcttccccctacacctatggtttccaaatgtgagcatcagaattaatttgggagatgtttttaaatagagatttgtaacatcacctcttccaccatcatttgctagggccaactgggtcttttaataatgtgtcaggcactccaacttcttgatgttcaatattgacattctggcccaccctgcacccgctatatccaaagatctagtattccaaagctctccaggtgattccagtgacacagacacacgtttggactgtcttgtactatgctatgcactgttctgctcttttttgaattggaacatgagaattgaggtccatgtaattttgagtttcagtagttttttgctcacattagtctcatttttgtttttcctcttgtagctgccatttatcaaatcgaaattatttcctcagagaaaaaggtttaggtatcctaagactttaaaatctcagtacgtttttttttaaagtatgttgtctcattctattgagaagttatacaacatacaggcttctaggtctagccaggccatctagtttagtcaagacagctgtgtaacaaacgtagccttgaggcctggcacggtggctcatgcctgtaatcccagcacttttgaggctgaggcgggcggattgcctgaggtcgggagttagagaccagcctgtccagcgtggtgaaaccccgtctgtactaaaaatacaaaaaagctagccgagtgtggtggcaggtgcctgtggtcccagctacttgggaggctgaggcgagagaatcacttgagctggggaggcagaggttgcaggggcccgagaccccaccattgcactccagtccgggaaacaagaacgaaactcccatctc

SEQ ID NO: 693 - DNA, 3932 bp, Homo sapiens
gggtgctgggttttcacggagtatgcctgccctgccccgggaggactgtgtttgagcttggactcgctcgctgctgaattcctgtttgttattcttttttcttccaggctagctggaaggaccagctagcctggactttggcttctttgcccgggagccctggcatgatggggtgagggctcttggtgggttagtggagagctgggggctggcccttccccatcttcttttctacccaccccctccccgccccccgccaggcccagccaccatcagtcacgtcactcctgggactgaggaggcaggggagggataaggggcagagatggaggccccactccccgaggttgcctagacaacatgagaaatcgtggccagggcctcttccgcctgcggagccgctgcttcctgcatcagtcactcccgctgggggcggggcggaggaaggggttggatgtggcagagccaggccccagccggtgccgctcagactcccccgctgtcgccgccgtggtcccagccatggcatcctatccatctggctctggcaagcccaaggccaaatatccctttaagaagcgggccagcctgcaggcctccactgcagctccagaggctcggggtggtctgggggcccctccgctgcagtctgcccgatccctgccgggccccgccccctgcctcaagcacttcccgctcgacctgcgcacgtctatggatggcaaatgcaaggagatcgccgaggagctgttcacccgctcactggctgagagcgagctccgtagtgccccgtatgagttccccgaggagagccccattgaacagctggaggagcggcggcagcggctggagcggcagatcagccaggatgtcaagctggagccagacatcctgcttcgggccaagcaagatttcctgaagacggacagtgactcggacctacagctctacaaggaacagggtgaggggcagggtgaccggagcctgcgggagcgtgatgtgctggaacgggagtttcagcgggtcaccatctctggggaggagaagtgtggggtgccgttcacagacctgctggatgcagccaagagtgtggtgcgggcgctcttcatccgggagaagtacatggccctgtccctgcagagcttctgccccaccacccgccgctacctgcagcagctggctgaaaagcctctggagacccggacctatgaacagggccccgacacccctgtgtctgctgatgccccggtgcacccccctgcgctggagcagcacccgtatgagcactgtgagccaagcaccatgcctggggacctgggcttgggtctgcgcatggtgcggggtgtggtgcacgtctacacccgcagggaacccgacgagcattgctcagaggtggagctgccataccctgacctgcaggaatttgtggctgacgtcaatgtgctgatggccctgattatcaatggccccataaagtcattctgctaccgccggctgcagtacctgagctccaagttccagatgcatgtgctactcaatgagatgaaggagctggccgcccagaagaaagtgccacaccgagatttctacaacatccgcaaggtggacacccacatccatgcctcgtcctgcatgaaccagaagcatctgctgcgcttcatcaagcgggcaatgaagcggcacctggaggagatcgtgcacgtggagcagggccgtgaacagacgctgcgggaggtctttgagagcatgaatctcacggcctacgacctgagtgtggacacgctggatgtgcatgcggacaggaacactttccatcgctttgacaagtttaatgccaaatacaaccctattggggagtccgtcctccgagagatcttcatcaagacggacaacagggtatctgggaagtactttgctcacatcatcaaggaggtgatgtcagacctggaggagagcaaataccagaatgcagagctgcggctctccatttacgggcgctcgagggatgagtgggacaagctggcgcgctgggccgtcatgcaccgcgtgcactcccccaacgtgcgctggctggtgcaggtgccccgcctctttgatgtgtaccgtaccaagggccagctggccaacttccaggagatgctggagaacatcttcctgccactgttcgaggccactgtgcaccctgccagccacccggaactgcatctcttcttagagcacgtggatggttttgacagcgtggatgatgagtccaagcctgaaaaccatgtcttcaacctggagagccccctgcctgaggcgtgggtggaggaggacaacccaccctatgcctactacctgtactacacctttgccaacatggccatgttgaaccacctgcgcaggcagaggggcttccacacgtttgtgctgaggccacactgtggggaggctgggcccatccaccacctggtgtcagccttcatgctggctgagaacatttcccacgggctccttctgcgcaaggcccccgtcctgcagtacctgtactacctggcccagatcggcatcgccatgtctccgctcagcaacaacagcctcttcctcagctatcaccggaatccgctaccggagtacctgtcccgcggcctcatggtctccctgtccactgatgatcccttgcagttccacttcaccaaggagccgctgatggaggagtacagcatcgccacccaggtgtggaagctcagctcctgcgatatgtgtgagctggcccgcaacagcgtgctcatgagcggcttctcgcacaaggtaaagagccactggctgggacccaactataccaaggaaggccctgaggggaatgacatccgccggaccaatgtgccagacatccgcgtgggctaccgctacgagaccctgtgccaggagctggcgctcatcacgcaggcagtccagagtgagatgctggagaccattccagaggaggcgggtatcaccatgagcccagggcctcaatgagcctggtccatgaagtgcccaccacatcgcagcacttttaccacgttttgtcctcagaccccgcccatgctgtgtggtctctgcatgtctccattcttctctgtctctgtcttgcatgtctcctaccatgtcactgtccctgggccacccagtgaaagcaaagcctgggaatctgctcattgttgtttgggctcaggtattgagcctgatggcccaggtattgagggcctcccctgctggtggccctgtcctgggatcctcagaagcctgactgtcctatgggcttctccagtgtccacaggggcttgggatggttgtggggggctggcccctctagcctttccggtccttcctgggcaaatctaagccttggccagggccgaagtttaggcccctgtcttgttcatgtagccgaggggcaggcgggggacctctacacctctgctgtgggcacggggctgctgagggtctgtggaactccagcagctctgcactgggtagagctgggcctagagctcagtcacaggcctgggcttcctggcctgagtgggtagacgcaggcggcagaggtgctggaccacatctccgccaagtcactgcccagcagccttctccgtcctgtccccagcccacgtgctccttgggtgtcagcttcctgtgcctctgtgggagagggcagctgccttgtgttatgtctggggccacagttgctgcaaagtcctggatctgccactcaaccccgggagtggtgttcccagtgtggctcccagagctttgaccagattgtgatcccagctggcccctatgttgtgttctggactgaggcctttgctgtgaactgcagtgtttcatacgaaccatctttcctagtgcatgagaaataaagattatttaagtaatgagaaaaaaaaaaaaaaaaaaaaaaaaaaaaa

SEQ ID NO: 694 - DNA, 3761 bp, Homo sapiens
aagggccgcagagcctggcgcggagccggcgagattttggtggggtctcacctgttgcgtgactcccccacagtccggccgcgggagtccgaccctgaatgcccagggagtgttgagagaaatctggacgagtttcgggtcccgctcccttgggagcacgtggcctaccagcctctcgattgcagggttgggtggtcgcgacaccggggtcgccttgaggccagtccggctgccgaggtctgcgggagtccacctccggccagctggcaattttgaaagactgccttactttccccatctcagtgccagggcaggggcccttggagtgacttggctggggtctgtggcccgatccccctgccgtccctcaggacccgggctttctgctgtacagacttctcgtgggcagcctcccctcggaactcgggcatcatggcctcagaggctcggggtggtctgggggcccctccgctgcagtctgcccgatccctgccgggccccgccccctgcctcaagcacttcccgctcgacctgcgcacgtctatggatggcaaatgcaaggagatcgccgaggagctgttcacccgctcactggctgagagcgagctccgtagtgccccgtatgagttccccgaggagagccccattgaacagctggaggagcggcggcagcggctggagcggcagatcagccaggatgtcaagctggagccagacatcctgcttcgggccaagcaagatttcctgaagacggacagtgactcggacctacagctctacaaggaacagggtgaggggcagggtgaccggagcctgcgggagcgtgatgtgctggaacgggagtttcagcgggtcaccatctctggggaggagaagtgtggggtgccgttcacagacctgctggatgcagccaagagtgtggtgcgggcgctcttcatccgggagaagtacatggccctgtccctgcagagcttctgccccaccacccgccgctacctgcagcagctggctgaaaagcctctggagacccggacctatgaacagggccccgacacccctgtgtctgctgatgccccggtgcacccccctgcgctggagcagcacccgtatgagcactgtgagccaagcaccatgcctggggacctgggcttgggtctgcgcatggtgcggggtgtggtgcacgtctacacccgcagggaacccgacgagcattgctcagaggtggagctgccataccctgacctgcaggaatttgtggctgacgtcaatgtgctgatggccctgattatcaatggccccataaagtcattctgctaccgccggctgcagtacctgagctccaagttccagatgcatgtgctactcaatgagatgaaggagctggccgcccagaagaaagtgccacaccgagatttctacaacatccgcaaggtggacacccacatccatgcctcgtcctgcatgaaccagaagcatctgctgcgcttcatcaagcgggcaatgaagcggcacctggaggagatcgtgcacgtggagcagggccgtgaacagacgctgcgggaggtctttgagagcatgaatctcacggcctacgacctgagtgtggacacgctggatgtgcatgcggacaggaacactttccatcgctttgacaagtttaatgccaaatacaaccctattggggagtccgtcctccgagagatcttcatcaagacggacaacagggtatctgggaagtactttgctcacatcatcaaggaggtgatgtcagacctggaggagagcaaataccagaatgcagagctgcggctctccatttacgggcgctcgagggatgagtgggacaagctggcgcgctgggccgtcatgcaccgcgtgcactcccccaacgtgcgctggctggtgcaggtgccccgcctctttgatgtgtaccgtaccaagggccagctggccaacttccaggagatgctggagaacatcttcctgccactgttcgaggccactgtgcaccctgccagccacccggaactgcatctcttcttagagcacgtggatggttttgacagcgtggatgatgagtccaagcctgaaaaccatgtcttcaacctggagagccccctgcctgaggcgtgggtggaggaggacaacccaccctatgcctactacctgtactacacctttgccaacatggccatgttgaaccacctgcgcaggcagaggggcttccacacgtttgtgctgaggccacactgtggggaggctgggcccatccaccacctggtgtcagccttcatgctggctgagaacatttcccacgggctccttctgcgcaaggcccccgtcctgcagtacctgtactacctggcccagatcggcatcgccatgtctccgctcagcaacaacagcctcttcctcagctatcaccggaatccgctaccggagtacctgtcccgcggcctcatggtctccctgtccactgatgatcccttgcagttccacttcaccaaggagccgctgatggaggagtacagcatcgccacccaggtgtggaagctcagctcctgcgatatgtgtgagctggcccgcaacagcgtgctcatgagcggcttctcgcacaaggtaaagagccactggctgggacccaactataccaaggaaggccctgaggggaatgacatccgccggaccaatgtgccagacatccgcgtgggctaccgctacgagaccctgtgccaggagctggcgctcatcacgcaggcagtccagagtgagatgctggagaccattccagaggaggcgggtatcaccatgagcccagggcctcaatgagcctggtccatgaagtgcccaccacatcgcagcacttttaccacgttttgtcctcagaccccgcccatgctgtgtggtctctgcatgtctccattcttctctgtctctgtcttgcatgtctcctaccatgtcactgtccctgggccacccagtgaaagcaaagcctgggaatctgctcattgttgtttgggctcaggtattgagcctgatggcccaggtattgagggcctcccctgctggtggccctgtcctgggatcctcagaagcctgactgtcctatgggcttctccagtgtccacaggggcttgggatggttgtggggggctggcccctctagcctttccggtccttcctgggcaaatctaagccttggccagggccgaagtttaggcccctgtcttgttcatgtagccgaggggcaggcgggggacctctacacctctgctgtgggcacggggctgctgagggtctgtggaactccagcagctctgcactgggtagagctgggcctagagctcagtcacaggcctgggcttcctggcctgagtgggtagacgcaggcggcagaggtgctggaccacatctccgccaagtcactgcccagcagccttctccgtcctgtccccagcccacgtgctccttgggtgtcagcttcctgtgcctctgtgggagagggcagctgccttgtgttatgtctggggccacagttgctgcaaagtcctggatctgccactcaaccccgggagtggtgttcccagtgtggctcccagagctttgaccagattgtgatcccagctggcccctatgttgtgttctggactgaggcctttgctgtgaactgcagtgtttcatacgaaccatctttcctagtgcatgagaaataaagattatttaagtaatgagaaaaaaaaaaaaaaaaaaaaaaaaaaaaa

SEQ ID NO: 695 - DNA, 3423 bp, Homo sapiens
cgccgaggtatcacctggcaccacccgcaccctcaccccgtgtctccatgccctgcctctgctccccacacccctcacctcaagctgtcccctcacctcacgcttggctgtctcctgatcctcagcctctcccaggtacccctggtcctgctgccctcaccccatccccagactctgtaggagagtgcccgagggcggagggccagccatgctgaccttccttccctccccccaggagctgttcacccgctcactggctgagagcgagctccgtagtgccccgtatgagttccccgaggagagccccattgaacagctggaggagcggcggcagcggctggagcggcagatcagccaggatgtcaagctggagccagacatcctgcttcgggccaagcaagatttcctgaagacggacagtgactcggacctacagctctacaaggaacagggtgaggggcagggtgaccggagcctgcgggagcgtgatgtgctggaacgggagtttcagcgggtcaccatctctggggaggagaagtgtggggtgccgttcacagacctgctggatgcagccaagagtgtggtgcgggcgctcttcatccgggagaagtacatggccctgtccctgcagagcttctgccccaccacccgccgctacctgcagcagctggctgaaaagcctctggagacccggacctatgaacagggccccgacacccctgtgtctgctgatgccccggtgcacccccctgcgctggagcagcacccgtatgagcactgtgagccaagcaccatgcctggggacctgggcttgggtctgcgcatggtgcggggtgtggtgcacgtctacacccgcagggaacccgacgagcattgctcagaggtggagctgccataccctgacctgcaggaatttgtggctgacgtcaatgtgctgatggccctgattatcaatggccccataaagtcattctgctaccgccggctgcagtacctgagctccaagttccagatgcatgtgctactcaatgagatgaaggagctggccgcccagaagaaagtgccacaccgagatttctacaacatccgcaaggtggacacccacatccatgcctcgtcctgcatgaaccagaagcatctgctgcgcttcatcaagcgggcaatgaagcggcacctggaggagatcgtgcacgtggagcagggccgtgaacagacgctgcgggaggtctttgagagcatgaatctcacggcctacgacctgagtgtggacacgctggatgtgcatgcggacaggaacactttccatcgctttgacaagtttaatgccaaatacaaccctattggggagtccgtcctccgagagatcttcatcaagacggacaacagggtatctgggaagtactttgctcacatcatcaaggaggtgatgtcagacctggaggagagcaaataccagaatgcagagctgcggctctccatttacgggcgctcgagggatgagtgggacaagctggcgcgctgggccgtcatgcaccgcgtgcactcccccaacgtgcgctggctggtgcaggtgccccgcctctttgatgtgtaccgtaccaagggccagctggccaacttccaggagatgctggagaacatcttcctgccactgttcgaggccactgtgcaccctgccagccacccggaactgcatctcttcttagagcacgtggatggttttgacagcgtggatgatgagtccaagcctgaaaaccatgtcttcaacctggagagccccctgcctgaggcgtgggtggaggaggacaacccaccctatgcctactacctgtactacacctttgccaacatggccatgttgaaccacctgcgcaggcagaggggcttccacacgtttgtgctgaggccacactgtggggaggctgggcccatccaccacctggtgtcagccttcatgctggctgagaacatttcccacgggctccttctgcgcaaggcccccgtcctgcagtacctgtactacctggcccagatcggcatcgccatgtctccgctcagcaacaacagcctcttcctcagctatcaccggaatccgctaccggagtacctgtcccgcggcctcatggtctccctgtccactgatgatcccttgcagttccacttcaccaaggagccgctgatggaggagtacagcatcgccacccaggtgtggaagctcagctcctgcgatatgtgtgagctggcccgcaacagcgtgctcatgagcggcttctcgcacaaggtaaagagccactggctgggacccaactataccaaggaaggccctgaggggaatgacatccgccggaccaatgtgccagacatccgcgtgggctaccgctacgagaccctgtgccaggagctggcgctcatcacgcaggcagtccagagtgagatgctggagaccattccagaggaggcgggtatcaccatgagcccagggcctcaatgagcctggtccatgaagtgcccaccacatcgcagcacttttaccacgttttgtcctcagaccccgcccatgctgtgtggtctctgcatgtctccattcttctctgtctctgtcttgcatgtctcctaccatgtcactgtccctgggccacccagtgaaagcaaagcctgggaatctgctcattgttgtttgggctcaggtattgagcctgatggcccaggtattgagggcctcccctgctggtggccctgtcctgggatcctcagaagcctgactgtcctatgggcttctccagtgtccacaggggcttgggatggttgtggggggctggcccctctagcctttccggtccttcctgggcaaatctaagccttggccagggccgaagtttaggcccctgtcttgttcatgtagccgaggggcaggcgggggacctctacacctctgctgtgggcacggggctgctgagggtctgtggaactccagcagctctgcactgggtagagctgggcctagagctcagtcacaggcctgggcttcctggcctgagtgggtagacgcaggcggcagaggtgctggaccacatctccgccaagtcactgcccagcagccttctccgtcctgtccccagcccacgtgctccttgggtgtcagcttcctgtgcctctgtgggagagggcagctgccttgtgttatgtctggggccacagttgctgcaaagtcctggatctgccactcaaccccgggagtggtgttcccagtgtggctcccagagctttgaccagattgtgatcccagctggcccctatgttgtgttctggactgaggcctttgctgtgaactgcagtgtttcatacgaaccatctttcctagtgcatgagaaataaagattatttaagtaatgagaaaaaaaaaaaaaaaaaaaaaaaaaaaaa

SEQ ID NO: 696 - DNA, 4669 bp, Homo sapiens
tttttattattgctgttattgaggttgagggagaagagatcggtctaaattctggctgggtaagtggggggattctcggcgatgagaaacgggggacttagaagccggaggaaaatcagcagccccacatctccacttctccagtccgccctactctccacccgtgacctccagtggagaccccaggcggcagcatcagtatttgatcggcccttcgtcagcacgctgccagccctggccggctgggttcgccaggcatcacccgctcggctctgaagcggacgcctggccctgcaccgggctttggaaggaccctctctgcgctcgccccctccccagggtggctccgctttcgagcccgggcgcggcgcccaccatgcgcggctgcctgcggctcgcgctgctctgcgcgctgccctggctcctgctggcggcgtcgcccgggcacccggcgaaatcccccaggcagcccccggcaccgcgccgcgaccccttcgacgctgccaggggcgccgatttcgatcatgtctacagcggggtggtgaacctcagcaccgagaacatctactctttcaactacaccagccagcccgaccaggtgacagccgtgagggtgtatgtgaacagttcctctgagaatctcaactacccggtccttgttgtggttcgccagcagaaagaggtgctgtcctggcaggttcctctgctcttccaaggactataccagaggagctacaattatcaagaagtgagccgcaccttatgtccctcagaagcaaccaatgagacgggacccttgcagcaactgatatttgtagatgtcgcatccatggcacccctgggtgctcagtacaaactgctagttaccaagctgaagcacttccagctccggacaaatgttgcctttcactttactgccagcccctctcaacctcagtattttctatacaagtttcccaaagacgtggactcagttatcattaaagtggtgtctgaaatggcttatccatgttctgttgtctcagtccagaatatcatgtgcccggtgtatgatctcgaccacaatgtggaatttaatggtgtctatcagtccatgaccaagaaagctgccatcacgctacagaagaaggattttccaggcgagcagttcttcgtggtatttgtgataaagcctgaagattatgcctgtggaggatctttcttcatccaggaaaaggaaaaccagacctggaatctacagcgaaaaaagaaccttgaagtgaccattgtcccttccattaaagaatctgtttatgtgaaatccagtcttttcagtgtcttcatcttcctgtccttctacttgggatgccttcttgttgggtttgttcattatctgaggtttcagagaaaatccattgatggaagctttgggtccaatgatggctctggaaatatggtggcatctcatcccattgctgccagcacacccgaagggagcaattatgggacaatagatgagtcaagctccagtcctggaaggcagatgtcctcctccgatggtgggccaccgggccagtcagacacagacagctccgtggaggagagcgacttcgacaccatgccagacattgagagtgataaaaacatcatccggaccaagatgttcctttacctgtcagatttgtccaggaaggaccggagaattgtcagcaaaaaatataaaatttatttttggaacatcatcaccattgctgtgttttacgcgctgcccgtgatccagctggtcattacctatcagacagtggtaaatgtcactggcaaccaggacatctgttactacaacttcctctgtgctcaccccttgggcgtcctgagtgccttcaacaacattctcagcaatctgggccacgtgcttctgggcttcctcttcctgctgatagtcttgcgccgcgacatcctccatcggagagccctggaagccaaggacatctttgctgtggagtacgggattcccaaacactttggtctcttctacgctatgggcattgcattgatgatggaaggggtgctcagtgcttgctaccatgtctgccctaattattccaacttccgattcgacacctccttcatgtacatgatcgctggcctgtgcatgctgaagctctatcagacccgccacccagacatcaatgccagcgcctactctgcctatgcctcctttgctgtggtcatcatggtcaccgtccttggagtggtgtttggaaaaaatgacgtatggttctgggtcatcttctctgcaatccacgttctggcctcgctagccctcagcacccagatatattatatgggtcgtttcaagatagatttgggaattttccggcgggctgccatggtgttctacacagactgtatccagcagtgtagccgacctctatatatggatagaatggtgttgctggttgtggggaatctggttaactggtccttcgccctctttggattgatataccgccccagggactttgcttcctacatgctgggcatcttcatctgtaaccttttgctgtacctggccttttacatcatcatgaagctccgcagctctgaaaaggtcctcccagtcccgctcttctgcatcgtggccaccgctgtgatgtgggctgccgccctatattttttcttccagaatctcagcagctgggagggaactccggccgaatcccgggagaagaaccgcgagtgcattctgctggatttcttcgatgaccatgacatctggcacttcctctctgctactgctctgtttttctcattcttggttttgttaactttggatgatgaccttgatgtggttcggagagaccagatccctgtcttctgaacctccaacattaagagaggggagggagcgatcaatcttggtgctgtttcacaaaaattacagtgaccacagcaaagtaaccactgccagatgctccactcaccctctgtagagccaactctgcattcacacaggaaggagaggggctgcgggagatttaaacctgcaagaaaggaggcagaaggggagccatgttttgaggacagacgcaaacctgaggagctgagaaacacttgctccttccatctgcagctttgggagtgcaacagggataggcactgcatccaagtcaactcaccatcttggggtccctcccaccctcacggagacttgccagcaatggcagaatgctgctgcacacttccctccagttgtcaccctgcccagaaaggccagcagcttggacttcctgcccagaaactgtgttggcccccttcacacctctgcaacacctgctgctccagcaagaggatgtgattctttagaatatggcggggaggtgaccccaggccctgccctactgggatagatgttttaatggcaccagctagtcacctcccagaagaaactctgtacatttcccccaggtttctgatgccatcagaagggctcaggagtggggtttgtcacacattcctcttaacaagtaactgtcactgggaccgagtcctgggtgcttacatattccttcgtgtcttcatctcactgacctgtgtggacctcatcactctgactctgccttcttggaaaggccctgtcactccacagatgtctggccagcttcaaggcagaaggaaaaacaggaaaagctcttttaacagcagcaggaacaagagaaatgactaaccatactaaaagactggtaacagcagcagcagccagacaggcctcaccttaaggacttgggctgccagagcaaattcagcagagcttatttggcctcccattcacacagctcagttctgtgcccacatcacctttggggaagaaatcagcattctaatcagggacactacttcaggagtcctccacagcgagtccgtcatctgtcactttatgtagatcagggttctagacttcttccctgaggttctcagaagcagctctcaggatgaacgtattgtcctcttcccctcttcttgcaaagtgcacagctaatctaatgttgtctctcggttgcacctgacattctctccccagtaaggtgttggcaagctcagcatctgggttccactctcacactgtctggcagctctgtgtctgagaagttctacattgaccaggcccccttgttgcctggagtatgacgtaatcagaaaatagacgtataaatgtgcacatgcgtatgtatttgcttgtgaaattaaagtcacctcttgcctctgctttcctgatcattcgttagagaaatggatcaggcatttttttaaattattattctttctctaaactatttgcattgtgttcaaaaacccattttagaagtttgaacagcaagcttttcctgattttaaaaacacaaagttgctttcaatgaaatattttgtgatttttttaaagtccccaaatgtgtacttagccttctgttattccttattctttaagcagtgttggcttccattgaccatatgaaggccaccaattaaatggttgtgttaatccaacatgtaaaaaactttttggcagggcacagtggctcacgcctgtaatcccaaagtgctggaatttacaggtaggaccaccacacttggtccacttacttataataaacattgatttggtcgttaaaaaaaaaaaaaaaaaaaaaaa

SEQ ID NO: 697 - DNA, 509 bp, Homo sapiens
attctttccccaagtctctatggtagcgtcagcgtcggaggcggtagtgacggtggcgtttccttgaggaagagtgagggttccaacttttctgcttatctgggaggtgttgggcgcggacagtcgagatgtcagagaaaaagcagccggtagacttaggtctgttagaggaagacgacgagtttgaagagttccctgccgaagactgggctggcttagatgaagatgaagatgcacatgtctgggaggataattgggatgatgacaatgtagaggatgacttctctaatcagttacgagctgaactagagaaacatggttataagatggagacttcatagcatccagaagaagtgttgaagtaacctaaacttgacctgcttaatacattctagggcagagaacccaggatgggacactaaaaaaatgtgtttatttcattatctgcttggatttatttgtgtttttgtaacacaaaaaataaatgttttgatataaaaaaaaaaaaa

SEQ ID NO: 698 - DNA, 2038 bp, Homo sapiens
cgcccccttgttcccgcaagcccggaactgcccaaatcccgcccctcccctcccaaaaaaacacccctcatccagtctcttccagcctagagatcctggcctacccctccgccaaagcgcgcactgagtgcaaaccccagagtcaatccctgtcccggctccgccccccgcgtccgaatcccgcccagccgggccctcaagcccagtcgggactcgagcctagggaggcgaggttcccgcaccggatagcatgtttttggcccagaggagcctctgctctcttagcggtagagcaaaattcctgaagacaatttcttcttccaaaatcctcggattctctacttctgctaaaatgtcactgaaattcacaaatgcaaaacggattgaaggacttgatagtaatgtgtggattgaatttaccaaattggctgcagacccttctgttgtgaatcttggccaaggctttccagatatatcccctcctacatatgtaaaagaagaattatcaaagattgcagcaatcgatagcctgaatcagtatacacgaggctttggccatccatcacttgtgaaagctctgtcctatctgtatgaaaagctttatcaaaagcaaattgattcaaataaagaaatccttgtgacagtaggagcatatggatctctttttaacaccattcaagcattaattgatgagggagatgaagtcatactaatagtgcctttctatgactgctatgagcccatggtgagaatggctggagcaacacctgtttttattcccctgagatctaaacctgtttatggaaaaagatggtctagttctgactggacattagatcctcaagaactggaaagtaaatttaattccaaaaccaaagctattatactaaatactccacataacccacttggcaaggtgtataacagagaggaactgcaagtaattgctgacctttgcatcaaatatgacacactctgcatcagcgatgaggtttatgaatggcttgtatattctggaaataagcacttaaaaatagctacttttccaggtatgtgggagagaacaataacaataggaagtgctggaaagactttcagtgtaactggctggaagcttggctggtccattggtccaaatcatttgataaaacatttacagacagttcaacaaaacacgatttatacttgtgcaactcctttacaggaagccttggctcaagctttctggattgacatcaagcgcatggatgacccagaatgttactttaattctttgccaaaagagttagaagtaaaaagagatcggatggtacgtttacttgaaagtgttggcctaaaacccatagttcctgatggaggatacttcatcatcgctgatgtgtctttgctagatccagacctctctgatatgaagaataatgagccttatgactataagtttgtgaaatggatgactaaacataagaaactatcagccatccccgtttcagcattctgtaactcagagactaaatcacagtttgagaagtttgtgcgtttttgcttcattaaaaaagacagcacactggatgctgctgaagaaatcatcaaggcatggagtgtacagaagtcttgatttgtgcagaatggattaatgtttctgttagatgacctagtatggaattgttacttagtgctgccacctgctggatgttaaaaggtatttcagtacaactggaatttaaatatttccattgtttttccaaagcagttaacccaactcctaacaacattttcgggggatctgaccttttttttccagttgaaatgtattaacacaccttccacaatcattttataagagtcagcataacatagtggataagaaatgtgagatgtttaacctctcagtaactcggttctctcattataaaataggaataaaatcagtacctgtttcatatgaaggtcgtttctgagaattaaatggactaatgtatgcaaaaagcctggcaaacaataaacactcatctgactttagccggtaaaaaaaaaaaaa

SEQ ID NO: 699 - DNA, 1938 bp, Homo sapiens
cgcccccttgttcccgcaagcccggaactgcccaaatcccgcccctcccctcccaaaaaaacacccctcatccagtctcttccagcctagagatcctggcctacccctccgccaaagcgcgcactgagtgcaaaccccagagtcaatccctgtcccggctccgccccccgcgtccgaatcccgcccagccgggccctcaagcccagtcgggactcgagcctagggaggcgaggttcccgcaccggatagaaaatgtcactgaaattcacaaatgcaaaacggattgaaggacttgatagtaatgtgtggattgaatttaccaaattggctgcagacccttctgttgtgaatcttggccaaggctttccagatatatcccctcctacatatgtaaaagaagaattatcaaagattgcagcaatcgatagcctgaatcagtatacacgaggctttggccatccatcacttgtgaaagctctgtcctatctgtatgaaaagctttatcaaaagcaaattgattcaaataaagaaatccttgtgacagtaggagcatatggatctctttttaacaccattcaagcattaattgatgagggagatgaagtcatactaatagtgcctttctatgactgctatgagcccatggtgagaatggctggagcaacacctgtttttattcccctgagatctaaacctgtttatggaaaaagatggtctagttctgactggacattagatcctcaagaactggaaagtaaatttaattccaaaaccaaagctattatactaaatactccacataacccacttggcaaggtgtataacagagaggaactgcaagtaattgctgacctttgcatcaaatatgacacactctgcatcagcgatgaggtttatgaatggcttgtatattctggaaataagcacttaaaaatagctacttttccaggtatgtgggagagaacaataacaataggaagtgctggaaagactttcagtgtaactggctggaagcttggctggtccattggtccaaatcatttgataaaacatttacagacagttcaacaaaacacgatttatacttgtgcaactcctttacaggaagccttggctcaagctttctggattgacatcaagcgcatggatgacccagaatgttactttaattctttgccaaaagagttagaagtaaaaagagatcggatggtacgtttacttgaaagtgttggcctaaaacccatagttcctgatggaggatacttcatcatcgctgatgtgtctttgctagatccagacctctctgatatgaagaataatgagccttatgactataagtttgtgaaatggatgactaaacataagaaactatcagccatccccgtttcagcattctgtaactcagagactaaatcacagtttgagaagtttgtgcgtttttgcttcattaaaaaagacagcacactggatgctgctgaagaaatcatcaaggcatggagtgtacagaagtcttgatttgtgcagaatggattaatgtttctgttagatgacctagtatggaattgttacttagtgctgccacctgctggatgttaaaaggtatttcagtacaactggaatttaaatatttccattgtttttccaaagcagttaacccaactcctaacaacattttcgggggatctgaccttttttttccagttgaaatgtattaacacaccttccacaatcattttataagagtcagcataacatagtggataagaaatgtgagatgtttaacctctcagtaactcggttctctcattataaaataggaataaaatcagtacctgtttcatatgaaggtcgtttctgagaattaaatggactaatgtatgcaaaaagcctggcaaacaataaacactcatctgactttagccggtaaaaaaaaaaaaa

SEQ ID NO: 700 - DNA, 2122 bp, Homo sapiens
ccgcaggcgggcctcgcgggtccgggagcgcggcggagacgatgcctgagatcagagtcacgcccttgggggccggccaggacgtgggccgaagctgcatcctggtctccattgcgggcaagaatgtcatgctggactgtggaatgcacatgggcttcaatgacgaccgacgcttccctgacttctcctacatcacccagaacggccgcctaacagacttcctggactgtgtgatcattagccacttccacctggaccactgcggggcactcccctacttcagcgagatggtgggctacgacggccccatctacatgactcaccccacccaggccatctgccccatcttgctggaggactaccgcaagatcgccgtagacaagaagggcgaggccaacttcttcacctcccagatgatcaaagactgcatgaagaaggtggtggctgtccacctccaccagacggtccaggtagatgatgagctggagatcaaggcctactatgcaggccacgtgctgggggcagccatgttccagattaaagtgggctcagagtctgtggtctacacgggtgattataacatgaccccagaccgacacttaggagctgcctggattgacaagtgccgccccaacctgctcatcacagagtccacgtacgccacgaccatccgtgactccaagcgctgccgggagcgagacttcctgaagaaagtccacgagaccgtggagcgtggtgggaaggtgctgatacctgtgttcgcgctgggccgcgcccaggagctctgcatcctcctggagaccttctgggagcgcatgaacctgaaggtgcccatctacttctccacggggctgaccgagaaggccaaccactactacaagctgttcatcccctggaccaaccagaagatccgcaagacttttgtgcagaggaacatgtttgagttcaagcacatcaaggccttcgaccgggcttttgctgacaacccaggaccgatggttgtgtttgccacgccaggaatgctgcacgctgggcagtccctgcagatcttccggaaatgggccggaaacgaaaagaacatggtcatcatgcccggctactgcgtgcagggcaccgtcggccacaagatcctcagcgggcagcggaagctcgagatggaggggcggcaggtgctggaggtcaagatgcaggtggagtacatgtcattcagcgcacacgcggacgccaagggcatcatgcagctggtgggccaggcagagccggagagcgtgctgctggtgcatggcgaggccaagaagatggagttcctgaagcagaagatcgagcaggagctccgggtcaactgctacatgccggccaatggcgagacggtgacgctgcccacaagccccagcatccccgtaggcatctcgctggggctgctgaagcgggagatggcgcaggggctgctccctgaggccaagaagcctcggctcctgcacggcaccctgatcatgaaggacagcaacttccggctggtgtcctcagagcaagccctcaaagagctgggtctggctgagcaccagctgcgcttcacctgccgcgtgcacctgcatgacacacgcaaggagcaggagacggcattgcgcgtctacagccacctcaagagcgtcctgaaggaccactgtgtgcagcacctcccggacggctctgtgactgtggagtccgtcctcctccaggccgccgccccttctgaggacccaggcaccaaggtgctgctggtctcctggacctaccaggacgaggagctggggagcttcctcacatctctgctgaagaagggcctcccccaggcccccagctgaggccggcaactcacccagccgccacctctgccctctcccagctggacagaccctgggcctgcacttcaggactgtgggtgccctgggtgaacagaccctgcaggtcccatccctggggacagaggccttgtgtcacctgcctgcccaggcagctgtttgcagctgaagaaacaaactggtctccaggctgtcttgcctttattcctggttagggcaggtggtcctagacagcagtttccagtaaaagctgaacaaaagacaaaaaaaaaaaaaaaaaa

SEQ ID NO: 701 - DNA, 1984 bp, Homo sapiens
ttgcgcctgcgcagtgcatcaccgcaggcgggcctcgcgggtccgggagcgcggcggagacgatgcctgagatcagagtcacgcccttgggggccggccaggacgtgggccgaagctgcatcctggtctccattgcgggcaagaatgtcatgctggactgtggaatgcacatgggcttcaatgacgaccgacgcttccctgacttctcctacatcacccagaacggccgcctaacagacttcctggactgtgtgatcattagccacttccacctggaccactgcggggcactcccctacttcagcgagatggtgggctacgacggccccatctacatgactcaccccacccaggccatctgccccatcttgctggaggactaccgcaagatcgccgtagacaagaagggcgaggccaacttcttcacctcccagatgatcaaagactgcatgaagaaggtggtggctgtccacctccaccagacggtccagattaaagtgggctcagagtctgtggtctacacgggtgattataacatgaccccagaccgacacttaggagctgcctggattgacaagtgccgccccaacctgctcatcacagagtccacgtacgccacgaccatccgtgactccaagcgctgccgggagcgagacttcctgaagaaagtccacgagaccgtggagcgtggtgggaaggtgctgatacctgtgttcgcgctgggccgcgcccaggagcatctgcatcctcctggagaccttctgggagcgcatgaacctgaaggtgcccatctacttctccacggggctgaccgagaaggccaaccactactacaagctgttcatcccctggaccaaccagaagatccgcaagactttcgtgcagaggaacatgtttgagttcaagcacatcaaggccttcgaccgggcttttgctgacaacccaggaccgatggttgtgtttgccacgccaggaatgctgcacgctgggcagtccctgcagatcttccggaaatgggccggaaacgaaaagaacatggtcatcatgcccggctactgcgtgcagggcaccgtcggccacaagatcctcagcgggcagcggaagctcgagatggaggggcggcaggtgctggaggtcaagatgcaggtggagtacatgtcattcagcgcacacgcggacgccaagggcatcatgcagctggtgggccaggcagagccggagagcgtgctgctggtgcatggcgaggccaagaagatggagttcctgaagcagaagatcgagcaggagctccgggtcaactgctacatgccggccaatggcgagacggtgacgctgcccacaagccccagcatccccgtaggcatctcgctggggctgctgaagcgggagatggcgcaggggctgctccctgaggccaagaagcctcggctcctgcacggcaccctgatcatgaaggacagcaacttccggctggtgtcctcagagcaagccctcaaagagctgggtctggctgagcaccagctgcgcttcacctgccgcgtgcacctgcatgacacacgcaaggagcaggagacggcattgcgcgtctacagccacctcaagagcgtcctgaaggaccactgtgtgcagcacctcccagacggctctgtgactgtggagtccgtcctcctccaggccgccgccccttctgaggacccaggcaccaaggtgctgctggtctcctggacctaccaggacgaggagctggggagcttcctcacatctctgctgaagaagggcctcccccaggcccccagctgaggccggcaactcacccagccgccacctctgccctctcccatccctggggacagaggccttgtgtcacctgcctgcccaggcagctgtttgcagctgaagaaacaaactggtctccaggctgtcttgcctttattcctggttagggcaggtggtcctagacagcagtttccagtaaaagctgaac

SEQ ID NO: 702 - DNA, 5002 bp, Homo sapiens
aggagggggttgggaggggagaggacgcgggcgaggaagaccagccccggggccccgatgttgtgactgtgacagactcactggggtttgtacatgctggggaggagccttcctttcaggggtgaccacattcatctgggcatgcctgcagtactcttggcccatggacctgaaggagaagcacctgggcgagcctccctcagccctgggcctgtccacgcggaaggccctcagcgtcctgaaggagcagctggaggcagtgctggaaggacatctcagggagcggaagaagtgtctgacgtggaaggaggtgtggagaagcagcttcctccaccacagtaaccgctgctcctgcttccactggccgggggcctcactcatgctactggccgtgctgctgctgctgggctgctgcgggggacagccagccgggagccgtggggtggggctggtgaatgcctcggccttgttcctgttactgcttctcaaccttgtgctcatcgggcggcaagaccggctgaagcgtcgggaggtagagcggaggctgcgagggatcattgaccaaatccaagatgccctcagggatggcagggagatccagtggcccagtgccatgtatccagacctccacatgccttttgcgccatcctggtccttgcactgggcctacagagacggacacctggtcaacctgccagtcagcctgctggttgaaggagacatcatagctttgaggcctggccaggaatcgtttgcttctctgagggggatgaaggatgacgagcacatcgtcctggagccgggagacctcttcccccccttctcccctccaccctcaccccggggagaagtggagagagggccacagagcccccagcagcaccggcttttccgtgtccttgagacccctgtgattgacaacatcagatggtgcctggacatggccctgtcccgaccagtcactgccctggacaatgagcggttcacagtgcagtcggtgatgctacactatgctgtgcccgtggtcctggccggcttcctcatcaccaatgccctgcgcttcatcttcagtgccccgggggtcacttcctggcagtacaccctcctccagctccaggtgaatggcgtcctgcccatcctccccctgctctttccagtcctctgggttctggcaactgcctgtggagaggcccgtgtcctggcccagatgagcaaggcctcacccagctccctgctggctaagttctcagaggatactctcagcagctatacggaggctgtctcctctcaggaaatgctgcgctgcatttggggccacttcctgagggtgctcggggggacatcgccaacgctgagccacagttccagcctgctgcacagcctgggctctgtcacggtcctgtgctgtgtggacaaacaggggatcctgtcatggccaaatcccagcccagagactgtactgttcttcagcgggaaggtggagccccctcacagcagccatgaggacctcaccgatggcctatccacccgctccttctgccatcccgagccccatgaacgagacgccctcttggctggctccctgaacaacaccctgcacctttccaatgagcaggagcgtggcgactggcctggcgaggctcccaagccccccgagccctattcacaccacaaagcgcatggccgcagcaaacacccatctggctccaacgtgagcttcagcagggacaccgagggtggtgaagaagagcccagcaagacccagcctgggatggagagcgacccctacgaagcagaggactttgtgtgtgactaccacctggagatgctgagcctgtcccaggaccagcagaacccctcctgcatccagtttgatgactccaactggcagctgcacctcacctccctcaaacccctgggcctcaatgtgctgctgaacctgtgtgatgccagcgtcaccgagcgcctgtgccgattctccgaccacctgtgcaacattgccctgcaagagagccacagcgccgtgctgcccgtccatgtgccctggggcctctgcgagcttgcccgcctcattggcttcactcctggggccaaggagcttttcaagcaggagaaccatctggcgctgtaccgcctccccagtgccgagacaatgaaggagacatcgctggggcggctctcctgtgtcaccaagcggcggcctcccctcagccacatgatcagcctcttcattaaagacaccaccaccagcacagagcagatgctgtcccatggcaccgctgatgtggtcttagaggcctgcacagacttctgggacggagctgacatctaccctctctcgggatctgacagaaagaaagtgctggacttctaccagcgagcctgcctgtctgggtattgctctgccttcgcctacaagcccatgaactgcgccctgtcctctcagctcaatggcaagtgcatcgagctggtacaggtgcccggccaaagcagcatcttcaccatgtgcgagctgcccagcaccatccccatcaagcagaacgcccgccgcagcagctggagctctgacgaagggatcggggaggtgctggagaaggaagactgcatgcaggccctgagcggccagatcttcatgggcatggtgtcctcccagtaccaggcccggctggacatcgtgcgcctcattgatgggcttgtcaacgcctgcatccgctttgtctacttctctttggaggatgagctcaaaagcaaggtgtttgcagaaaaaatgggcctggagacaggctggaactgccacatctccctcacacccaatggtgacatgcctggctccgagatccccccctccagccccagccacgcaggctccctgcatgatgacctgaatcaggtgtcccgagatgatgcagaagggctcctcctcatggaggaggagggccactcggacctcatcagcttccagcctacggacagcgacatccccagcttcctggaggactccaaccgggccaagctgccccggggtatccaccaagtgcggccccacctgcagaacattgacaacgtgcccctgctagtgccccttttcaccgactgcaccccagagaccatgtgtgagatgataaagatcatgctagagtacggggaggtgacctgctgcctgggcagctctgccaacctgcggaacagctgcctcttcctccagagcgacatcagcattgccctggatcccctgtacccatcccgttgctcctgggagacctttggctacgccaccagcatcagcatggcccaggcctcggatggcctttctcccctgcagctgtcagggcagctcaacagcctgccctgttccctgacctttcgccaggaggagaccatcagcatcatccggcttatcgaacaggctcggcatgccacctatggcatccgtaagtgcttcctcttcctgctgcagtgccagctgactcttgtggtcatccagttcctttcttgcctggtccagctgccgccactcctgagtaccaccgacatcctgtggctgtcctgcttttgctaccctctgctcagcatctctctgctcgggaagcccccccatagctccatcatgtctatggcaacggggaaaaacctccagtccattcccaagaagacccagcactacttcctgctctgcttcctgctcaagttcagcctcaccatcagctcctgcctcatctgctttggcttcacactgcagagcttctgtgacagctcccgggaccgcaacctcaccaactgctcctccgtcatgctgcccagcaacgacgacagggctccagcctggtttgaggactttgccaatggactgctgtcggctcagaagctcacggcagccctgattgtcctgcacactgtcttcatttccatcacccatgtgcatcgcaccaagcccctgtggagaaagagccccttgaccaacctctggtgggccgtgacagtgcctgtggtgctgctgggtcaggtggtccagacggctgtggacctgcagctgtggacacacagggacagccacgtccactttggcctggaggacgtgcccctgctgacatggctcctgggctgcctgtccctggtccttgtggtggtgaccaatgagatcgtgaagctacatgagattcgggtccgagtccgctaccagaagcgacagaagctgcagtttgaaactaagctgggcatgaactctcccttctgagccactggctgtggtggctgtagttgcccccgtccctggggctaaagccagacccatttctgaacaggggagtttgtatcatgaatgtttccaggtttgctcctgcacccgtggcactggaaacccagctccccgtgtcagaccccgctgtcttcctgagccctggggctcactgtggaggagctgacggcctgggcccttggccagtcctggctcttccctgggcctcaccagggacactcttgaatgtatggcctcaggcgctccctagagggggcctaaaccccctcacctgtgagctaccccctttagggatcccttgcccccttggagatcccttgccccccagtgcctctgctcgtgggtccctggacacggccttgaagccaaccttctttggaggagcaacagcagcagccttggccgacgcgtccaactcccaaggctgccgtggagggcaggggggtggtgcttgcctggatgtggccccgagtgcctcccctccctccctctgtgggggagtctcccgcctgaacctgaagatggagcagggcccccgcttcgccctggagcctcttcctgtgcctggctcaagctggctgcctgtcagtcttggggaatctggcccaggtctcctcagcctctgccccagttctgggagaagtttctactggtgtatattttttactggaaatgagccttttaggaatgaatgtagactggtttgtattaaaatgtgtcaattgctaaggaaaaaaaaaaaaaaaa

SEQ ID NO: 703 - DNA, 4450 bp, Homo sapiens
agccgatgggggcggggaaaagtccggctgggccgggacaaaagccggatcccgggaagctaccggctgctggggtgctccggattttgcggggttcgtcgggcctgtggaagaagcgccgcgcacggacttcggcagaggtagagcaggtctctctgcagccatgtcggccaaggcaatttcagagcagacgggcaaagaactcctttacaagttcatctgtaccacctcagccatccagaatcggttcaagtatgctcgggtcactcctgacacagactgggcccgcttgctgcaggaccacccctggctgctcagccagaacttggtagtcaagccagaccagctgatcaaacgtcgtggaaaacttggtctcgttggggtcaacctcactctggatggggtcaagtcctggctgaagccacggctgggacaggaagccacagttggcaaggccacaggcttcctcaagaactttctgatcgagcccttcgtcccccacagtcaggctgaggagttctatgtctgcatctatgccacccgagaaggggactacgtcctgttccaccacgaggggggtgtggacgtgggtgatgtggacgccaaggcccagaagctgcttgttggcgtggatgagaaactgaatcctgaggacatcaaaaaacacctgttggtccacgcccctgaagacaagaaagaaattctggccagttttatctccggcctcttcaatttctacgaggacttgtacttcacctacctcgagatcaatccccttgtagtgaccaaagatggagtctatgtccttgacttggcggccaaggtggacgccactgccgactacatctgcaaagtgaagtggggtgacatcgagttccctccccccttcgggcgggaggcatatccagaggaagcctacattgcagacctcgatgccaaaagtggggcaagcctgaagctgaccttgctgaaccccaaagggaggatctggaccatggtggccgggggtggcgcctctgtcgtgtacagcgataccatctgtgatctagggggtgtcaacgagctggcaaactatggggagtactcaggcgcccccagcgagcagcagacctatgactatgccaagactatcctctccctcatgacccgagagaagcacccagatggcaagatcctcatcattggaggcagcatcgcaaacttcaccaacgtggctgccacgttcaagggcatcgtgagagcaattcgagattaccagggccccctgaaggagcacgaagtcacaatctttgtccgaagaggtggccccaactatcaggagggcttacgggtgatgggagaagtcgggaagaccactgggatccccatccatgtctttggcacagagactcacatgacggccattgtgggcatggccctgggccaccggcccatccccaaccagccacccacagcggcccacactgcaaacttcctcctcaacgccagcgggagcacatcgacgccagcccccagcaggacagcatctttttctgagtccagggccgatgaggtggcgcctgcaaagaaggccaagcctgccatgccacaagattcagtcccaagtccaagatccctgcaaggaaagagcaccaccctcttcagccgccacaccaaggccattgtgtggggcatgcagacccgggccgtgcaaggcatgctggactttgactatgtctgctcccgagacgagccctcagtggctgccatggtctaccctttcactggggaccacaagcagaagttttactgggggcacaaagagatcctgatccctgtcttcaagaacatggctgatgccatgaggaagcatccggaggtagatgtgctcatcaactttgcctctctccgctctgcctatgacagcaccatggagaccatgaactatgcccagatccggaccatcgccatcatagctgaaggcatccctgaggccctcacgagaaagctgatcaagaaggcggaccagaagggagtgaccatcatcggacctgccactgttggaggcatcaagcctgggtgctttaagattggcaacacaggtgggatgctggacaacatcctggcctccaaactgtaccgcccaggcagcgtggcctatgtctcacgttccggaggcatgtccaacgagctcaacaatatcatctctcggaccacggatggcgtctatgagggcgtggccattggtggggacaggtacccgggctccacattcatggatcatgtgttacgctatcaggacactccaggagtcaaaatgattgtggttcttggagagattgggggcactgaggaatataagatttgccggggcatcaaggagggccgcctcactaagcccatcgtctgctggtgcatcgggacgtgtgccaccatgttctcctctgaggtccagtttggccatgctggagcttgtgccaaccaggcttctgaaactgcagtagccaagaaccaggctttgaaggaagcaggagtgtttgtgccccggagctttgatgagcttggagagatcatccagtctgtatacgaagatctcgtggccaatggagtcattgtacctgcccaggaggtgccgcccccaaccgtgcccatggactactcctgggccagggagcttggtttgatccgcaaacctgcctcgttcatgaccagcatctgcgatgagcgaggacaggagctcatctacgcgggcatgcccatcactgaggtcttcaaggaagagatgggcattggcggggtcctcggcctcctctggttccagaaaaggttgcctaagtactcttgccagttcattgagatgtgtctgatggtgacagctgatcacgggccagccgtctctggagcccacaacaccatcatttgtgcgcgagctgggaaagacctggtctccagcctcacctcggggctgctcaccatcggggatcggtttgggggtgccttggatgcagcagccaagatgttcagtaaagcctttgacagtggcattatccccatggagtttgtgaacaagatgaagaaggaagggaagctgatcatgggcattggtcaccgagtgaagtcgataaacaacccagacatgcgagtgcagatcctcaaagattacgtcaggcagcacttccctgccactcctctgctcgattatgcactggaagtagagaagattaccacctcgaagaagccaaatcttatcctgaatgtagatggtctcatcggagtcgcatttgtagacatgcttagaaactgtgggtcctttactcgggaggaagctgatgaatatattgacattggagccctcaatggcatctttgtgctgggaaggagtatggggttcattggacactatcttgatcagaagaggctgaagcaggggctgtatcgtcatccgtgggatgatatttcatatgttcttccggaacacatgagcatgtaacagagccaggaaccctactgcagtaaactgaagacaagatctcttcccccaagaaaaagtgtacagacagctggcagtggagcctgctttatttagcaggggcctggaatgtaaacagccactggggtacaggcaccgaagaccaacatccacaggctaacaccccttcagtccacacaaagaagcttcatattttttttataagcatagaaataaaaaccaagccaatatttgtgactttgctctgctacctgctgtatttattatatggaagcatctaagtactgtcaggatggggtcttcctcattgtagggcgttaggatgttgctttctttttccattagttaaacatttttttctcctttggaggaagggaatgaaacatttatggcctcaagatactatacatttaaagcaccccaatgtctctctttttttttttttacttccctttcttcttccttatataacatgaagaacattgtattaatctgatttttaaagatctttttgtatgttacgtgttaagggcttgtttggtatcccactgaaatgttctgtgttgcagaccagagtctgtttatgtcagggggatggggccattgcatccttagccattgtcacaaaatatgtggagtagtaacttaatatgtaaagttgtaacatacatacatttaaaatggaaatgcagaaagctgtgaaatgtcttgtgtcttatgttctctgtatttatgcagctgatttgtctgtctgtaactgaagtgtgggtccaaggactcctaactactttgcatctgtaatccacaaagattctgggcagctgccacctcagtctcttctctgtattatcatagtctggtttaaataaactatatagtaacaaaaaaaaaaaaaaaaaaaaaaaaaaaaaaaaaaaaaaaaaaaaaaaaaaaaaaaaaaaaaaaaaaaaaaaaaaaaaaaaaaaaaaaaaaaaaaaaaaa

SEQ ID NO: 704 - DNA, 4420 bp, Homo sapiens
agccgatgggggcggggaaaagtccggctgggccgggacaaaagccggatcccgggaagctaccggctgctggggtgctccggattttgcggggttcgtcgggcctgtggaagaagcgccgcgcacggacttcggcagaggtagagcaggtctctctgcagccatgtcggccaaggcaatttcagagcagacgggcaaagaactcctttacaagttcatctgtaccacctcagccatccagaatcggttcaagtatgctcgggtcactcctgacacagactgggcccgcttgctgcaggaccacccctggctgctcagccagaacttggtagtcaagccagaccagctgatcaaacgtcgtggaaaacttggtctcgttggggtcaacctcactctggatggggtcaagtcctggctgaagccacggctgggacaggaagccacagttggcaaggccacaggcttcctcaagaactttctgatcgagcccttcgtcccccacagtcaggctgaggagttctatgtctgcatctatgccacccgagaaggggactacgtcctgttccaccacgaggggggtgtggacgtgggtgatgtggacgccaaggcccagaagctgcttgttggcgtggatgagaaactgaatcctgaggacatcaaaaaacacctgttggtccacgcccctgaagacaagaaagaaattctggccagttttatctccggcctcttcaatttctacgaggacttgtacttcacctacctcgagatcaatccccttgtagtgaccaaagatggagtctatgtccttgacttggcggccaaggtggacgccactgccgactacatctgcaaagtgaagtggggtgacatcgagttccctccccccttcgggcgggaggcatatccagaggaagcctacattgcagacctcgatgccaaaagtggggcaagcctgaagctgaccttgctgaaccccaaagggaggatctggaccatggtggccgggggtggcgcctctgtcgtgtacagcgataccatctgtgatctagggggtgtcaacgagctggcaaactatggggagtactcaggcgcccccagcgagcagcagacctatgactatgccaagactatcctctccctcatgacccgagagaagcacccagatggcaagatcctcatcattggaggcagcatcgcaaacttcaccaacgtggctgccacgttcaagggcatcgtgagagcaattcgagattaccagggccccctgaaggagcacgaagtcacaatctttgtccgaagaggtggccccaactatcaggagggcttacgggtgatgggagaagtcgggaagaccactgggatccccatccatgtctttggcacagagactcacatgacggccattgtgggcatggccctgggccaccggcccatccccaaccagccacccacagcggcccacactgcaaacttcctcctcaacgccagcgggagcacatcgacgccagcccccagcaggacagcatctttttctgagtccagggccgatgaggtggcgcctgcaaagaaggccaagcctgccatgccacaaggaaagagcaccaccctcttcagccgccacaccaaggccattgtgtggggcatgcagacccgggccgtgcaaggcatgctggactttgactatgtctgctcccgagacgagccctcagtggctgccatggtctaccctttcactggggaccacaagcagaagttttactgggggcacaaagagatcctgatccctgtcttcaagaacatggctgatgccatgaggaagcatccggaggtagatgtgctcatcaactttgcctctctccgctctgcctatgacagcaccatggagaccatgaactatgcccagatccggaccatcgccatcatagctgaaggcatccctgaggccctcacgagaaagctgatcaagaaggcggaccagaagggagtgaccatcatcggacctgccactgttggaggcatcaagcctgggtgctttaagattggcaacacaggtgggatgctggacaacatcctggcctccaaactgtaccgcccaggcagcgtggcctatgtctcacgttccggaggcatgtccaacgagctcaacaatatcatctctcggaccacggatggcgtctatgagggcgtggccattggtggggacaggtacccgggctccacattcatggatcatgtgttacgctatcaggacactccaggagtcaaaatgattgtggttcttggagagattgggggcactgaggaatataagatttgccggggcatcaaggagggccgcctcactaagcccatcgtctgctggtgcatcgggacgtgtgccaccatgttctcctctgaggtccagtttggccatgctggagcttgtgccaaccaggcttctgaaactgcagtagccaagaaccaggctttgaaggaagcaggagtgtttgtgccccggagctttgatgagcttggagagatcatccagtctgtatacgaagatctcgtggccaatggagtcattgtacctgcccaggaggtgccgcccccaaccgtgcccatggactactcctgggccagggagcttggtttgatccgcaaacctgcctcgttcatgaccagcatctgcgatgagcgaggacaggagctcatctacgcgggcatgcccatcactgaggtcttcaaggaagagatgggcattggcggggtcctcggcctcctctggttccagaaaaggttgcctaagtactcttgccagttcattgagatgtgtctgatggtgacagctgatcacgggccagccgtctctggagcccacaacaccatcatttgtgcgcgagctgggaaagacctggtctccagcctcacctcggggctgctcaccatcggggatcggtttgggggtgccttggatgcagcagccaagatgttcagtaaagcctttgacagtggcattatccccatggagtttgtgaacaagatgaagaaggaagggaagctgatcatgggcattggtcaccgagtgaagtcgataaacaacccagacatgcgagtgcagatcctcaaagattacgtcaggcagcacttccctgccactcctctgctcgattatgcactggaagtagagaagattaccacctcgaagaagccaaatcttatcctgaatgtagatggtctcatcggagtcgcatttgtagacatgcttagaaactgtgggtcctttactcgggaggaagctgatgaatatattgacattggagccctcaatggcatctttgtgctgggaaggagtatggggttcattggacactatcttgatcagaagaggctgaagcaggggctgtatcgtcatccgtgggatgatatttcatatgttcttccggaacacatgagcatgtaacagagccaggaaccctactgcagtaaactgaagacaagatctcttcccccaagaaaaagtgtacagacagctggcagtggagcctgctttatttagcaggggcctggaatgtaaacagccactggggtacaggcaccgaagaccaacatccacaggctaacaccccttcagtccacacaaagaagcttcatattttttttataagcatagaaataaaaaccaagccaatatttgtgactttgctctgctacctgctgtatttattatatggaagcatctaagtactgtcaggatggggtcttcctcattgtagggcgttaggatgttgctttctttttccattagttaaacatttttttctcctttggaggaagggaatgaaacatttatggcctcaagatactatacatttaaagcaccccaatgtctctctttttttttttttacttccctttcttcttccttatataacatgaagaacattgtattaatctgatttttaaagatctttttgtatgttacgtgttaagggcttgtttggtatcccactgaaatgttctgtgttgcagaccagagtctgtttatgtcagggggatggggccattgcatccttagccattgtcacaaaatatgtggagtagtaacttaatatgtaaagttgtaacatacatacatttaaaatggaaatgcagaaagctgtgaaatgtcttgtgtcttatgttctctgtatttatgcagctgatttgtctgtctgtaactgaagtgtgggtccaaggactcctaactactttgcatctgtaatccacaaagattctgggcagctgccacctcagtctcttctctgtattatcatagtctggtttaaataaactatatagtaacaaaaaaaaaaaaaaaaaaaaaaaaaaaaaaaaaaaaaaaaaaaaaaaaaaaaaaaaaaaaaaaaaaaaaaaaaaaaaaaaaaaaaaaaaaaaaaaaaaa

SEQ ID NO: 705 - DNA, 1982 bp, Homo sapiens
gcagaggaggagcgcacgccggcctcgaagaacttctgcttgggtggctgaactctgatcttgacctagagtcatggccatggcaaccaaaggaggtactgtcaaagctgcttcaggattcaatgccatggaagatgcccagaccctgaggaaggccatgaaagggctcggcaccgatgaagacgccattattagcgtccttgcctaccgcaacaccgcccagcgccaggagatcaggacagcctacaagagcaccatcggcagggacttgatagacgacctgaagtcagaactgagtggcaacttcgagcaggtgattgtggggatgatgacgcccacggtgctgtatgacgtgcaagagctgcgaagggccatgaagggagccggcactgatgagggctgcctaattgagatcctggcctcccggacccctgaggagatccggcgcataagccaaacctaccagcagcaatatggacggagccttgaagatgacattcgctctgacacatcgttcatgttccagcgagtgctggtgtctctgtcagctggtgggagggatgaaggaaattatctggacgatgctctcgtgagacaggatgcccaggacctgtatgaggctggagagaagaaatgggggacagatgaggtgaaatttctaactgttctctgttcccggaaccgaaatcacctgttgcatgtgtttgatgaatacaaaaggatatcacagaaggatattgaacagagtattaaatctgaaacatctggtagctttgaagatgctctgctggctatagtaaagtgcatgaggaacaaatctgcatattttgctgaaaagctctataaatcgatgaagggcttgggcaccgatgataacaccctcatcagagtgatggtttctcgagcagaaattgacatgttggatatccgggcacacttcaagagactctatggaaagtctctgtactcgttcatcaagggtgacacatctggagactacaggaaagtactgcttgttctctgtggaggagatgattaaaataaaaatcccagaaggacaggaggattctcaacactttgaatttttttaacttcatttttctacactgctattatcattatctcagaatgcttatttccaattaaaacgcctacagctgcctcctagaatatagactgtctgtattattattcacctataattagtcattatgatgctttaaagctgtacttgcatttcaaagcttataagatataaatggagattttaaagtagaaataaatatgtattccatgtttttaaaagattactttctactttgtgtttcacagacattgaatatattaaattattccatattttcttttcagtgaaaaattttttaaatggaagactgttctaaaatcacttttttccctaatccaatttttagagtggctagtagtttcttcatttgaaattgtaagcatccggtcagtaagaatgcccatccagttttctatatttcatagtcaaagccttgaaagcatctacaaatctctttttttaggttttgtccatagcatcagttgatccttactaagtttttcatgggagacttccttcatcacatcttatgttgaaatcactttctgtagtcaaagtataccaaaaccaatttatctgaactaaattctaaagtatggttatacaaaccatatacatctggttaccaaacataaatgctgaacattccatattattatagttaatgtcttaatccagcttgcaagtgaatggaaaaaaaaataagcttcaaactaggtattctgggaatgatgtaatgctctgaatttagtatgatataaagaaaacttttttgtgctaaaaatactttttaaaatcaattttgttgattgtagtaatttctatttgcactgtgcctttcaactccagaaacattctaagatgtacttggatttaattaaaaagttcactttgt

SEQ ID NO: 706 - DNA, 993 bp, Homo sapiens
atgctgccggactggaagagctccttgatcctcatggcttacatcatcatcttcctcactggcctccctgccaacctcctggccctgcgggcctttgtggggcggatccgccagccccagcctgcacctgtgcacatcctcctgctgagcctgacgctggccgacctcctcctgctgctgctgctgcccttcaagatcatcgaggctgcgtcgaacttccgctggtacctgcccaaggtcgtctgcgccctcacgagttttggcttctacagcagcatctactgcagcacgtggctcctggcgggcatcagcatcgagcgctacctgggagtggctttccccgtgcagtacaagctctcccgccggcctctgtatggagtgattgcagctctggtggcctgggttatgtcctttggtcactgcaccatcgtgatcatcgttcaatacttgaacacgactgagcaggtcagaagtggcaatgaaattacctgctacgagaacttcaccgataaccagttggacgtggtgctgcccgtgcggctggagctgtgcctggtgctcttcttcatccccatggcagtcaccatcttctgctactggcgttttgtgtggatcatgctctcccagccccttgtgggggcccagaggcggcgccgagccgtggggctggctgtggtgacgctgctcaatttcctggtgtgcttcggaccttacaacgtgtcccacctggtggggtatcaccagagaaaaagcccctggtggcggtcaatagccgtggtgttcagttcactcaacgccagtctggaccccctgctcttctatttctcttcttcagtggtgcgcagggcatttgggagagggctgcaggtgctgcggaatcagggctcctccctgttgggacgcagaggcaaagacacagcagaggggacaaatgaggacaggggtgtgggtcaaggagaagggatgccaagttcggacttcactacagagtag

SEQ ID NO: 707 - DNA, 1679 bp, Homo sapiens
gccagaggcggagccgccgccctgccgcgactttcagactccgaccatggcctcgcgctggtggcggtggcggcgcggctgctcctggaagccggcggcgcggagccccgggcccggctcccccggccgtgcgggaccgttggggccgagcgccgctgccgaagtccgcgcgcaggttcataggcggaagggacttgacttgtctcagataccctatattaatcttgtgaagcatttaacatctgcctgtccaaatgtatgtcgtatatcacggtttcatcacacaaccccagacagtaaaacacacagtggtgaaaaatacaccgatcctttcaaactcggttggagagacttgaaaggtctgtatgaggacattagaaaggaactgcttatatcaacatcagaacttaaggaaatgtctgagtactactttgatgggaaagggaaagcctttcgaccaattattgtggcgctaatggcccgagcatgcaatattcatcataacaactcccgacatgtgcaagccagccagcgcgccatagccttaattgcagaaatgatccacactgctagtctggttcacgatgacgttattgacgatgcaagttctcgaagaggaaaacacacagttaataagatctggggtgaaaagaaggctgttcttgctggagatttaattctttctgcagcatctatagctctggcacgaattggaaatacaactgttatatctattttaacccaagttattgaagatttggtgcgtggtgaatttcttcagctcgggtcaaaagaaaatgagaatgaaagatttgcacactaccttgagaagacattcaagaagaccgccagcctgatagccaacagttgtaaagcagtctctgttctaggatgtcccgacccagtggtgcatgagatcgcctatcagtacggaaaaaatgtaggaatagcttttcagctaatagatgatgtattggacttcacctcgtgttctgaccagatgggcaaaccaacatcagctgatctgaagctcgggttagccactggtcctgtcctgtttgcctgtcagcagttcccagaaatgaatgctatgatcatgcgacggttcagtttgcctggagatgtagacagagctcgacagtatgtactacagagtgatggtgtgcaacaaacaacctacctcgcccagcagtactgccatgaagcaataagagagatcagtaaacttcgaccatccccagaaagagatgccctcattcagctttcagaaattgtactcacaagagataaatgacaactctttctgttctttctggcagctatcttaccagactgtgcctaaagaattttgtggaatacactttgtttgcttcatgtgcagataaccaaaaatcattttaaaagatatcaaacttattgatgggcaatttatttttttttattgcaaaagttttttcagaaaactttttaaatgtaattaataaaccacctgaatctgtcattctagtcctataaattataatcaaggtatcttgatggttatatgtggtattgtttacactgttaatatccacatgtaaggccattacacaaataaataaccaatgttaaaattcaaaaaaaaaaaaaaaaaaaaaaaaaaaaaaaaaaaaaaaaaaaaaaaaaaaaaaaaaaaaaaa

SEQ ID NO: 708 - DNA, 3308 bp, Homo sapiens
tcccggtagccgcagctgtcttttccggcccccgtgcactctccgcccgagcggagccccccggctcgcggggatcgcccccgagcgctgcgtcctgcgggtcacctaacccatttgtggcttcctctacctgtgctcagccatggccagcgagagctcacctctgctggcctaccggctcctgggggaggagggggttgccctccctgccaatggggccgggggtcctggaggggcgtctgcccggaagctgtccaccttcctgggtgtggtggtgcccactgtcctgtccatgttcagcatagttgtttttctgaggattgggttcgtggtgggtcatgctgggctactgcaggccctggccatgctgctggttgcctacttcatcctggcactcaccgtcctctctgtctgtgccatcgccaccaatggagccgtgcaggggggcggagcctacttcatgatcagccgcacactggggcccgaggtcgggggcagcattgggctcatgttctacctggctaacgtctgtggctgtgccgtctccctcctggggctggtggagtctgtgcttgatgtcttcggggccgatgccacagggcccagtgggctccgggtcctgccccagggctacggctggaacctgctgtatggctccctgctgctgggccttgtgggtggggtctgcaccctgggagccggcctctatgcccgggcctcattcctcacattcctgctggtctctggctccctggcctctgtgctcatcagttttgtggctgtggggccgagggacatccgcttgactcctaggcctggccccaatggctcctccctgccgccccggtttggccacttcaccggcttcaacagcagtaccctgaaggacaacttgggcgctggctatgctgaggactacaccacgggagccgtgatgaattttgccagcgtctttgctgtcctctttaacggctgtacaggcatcatggctggggccaacatgtcaggggagctgaaggaccccagccgggcgatccctctgggcacgatcgtcgccgtcgcctacaccttcttcgtctatgtcctgcttttctttctctccagcttcacttgtgacaggaccctgctgcaggaagactatgggttcttccgcgccatcagcctgtggcccccactggtgttgatcggaatctatgccacagcgctctcagcgtccatgagctcgctcattggtgcctcccgcatcctccatgccctggcccgggatgacctctttggcgtgatcttggcaccggccaaggttgtgtcccgagggggaaacccctgggcagctgtactttattcttggggcctggtgcagctggtgctcctggctgggaagctgaacacactggctgctgtggtcactgtcttctacctggtggcctatgctgccgtggacctgtcctgcctgagcctggagtgggcctcggcccccaacttccgccccaccttcagcctgttctcctggcacacctgcctgctgggggtggcctcctgcctgctcatgatgttcctcatcagtcctggcgcggctggtggctccctgctcctcatgggtctgctggctgccctgctcaccgcgcgaggaggccccagtagctggggctatgtcagccaggccttgcttttccaccaggtgcgtaagtatctgcttcggctggacgtccggaaggatcacgtgaagttctggcggccccagctgctgctcctggtggggaacccccggggcgccctgcctctgctgcggttggccaaccagcttaagaagggggggctgtatgtgctgggccacgtcaccctgggagacctcgactccctgccctcggaccctgtacagccgcagtatggggcatggctcagcctggtggaccgtgcccaggtgaaggcttttgtggatctaaccctctcaccctccgtgcgccagggggctcagcatctgctgcgaatctccggcctcggtggcatgaagcccaacacgttggtcctaggtttctacgatgacgctccaccgcaggaccatttcctgacggacccggctttctctgagcctgcagacagcaccagggagggcagttccccagctctgagcaccctgttccctcctccccgggctcctgggagcccccgggccctcaatccccaggactatgtggccacggtggccgacgccctcaagatgaacaagaatgtggtgctggcccgggccagcggggccttgccccctgagcggctgagccgggggtctgggggcacctctcagctgcaccatgtggacgtgtggcccctcaacctgctgcggccccggggtgggcccggctatgtggatgtctgcggcctcttcctgctgcagatggcaaccatcttgggcatggtgcccgcttggcatagcgcccggctccggatcttcctgtgcctggggcctcgggaggcgcctggggcggccgaggggcggctgcgggcactgctgagccaactgaggatccgggctgaggtgcaggaggtggtgtggggcgagggggccggggctggggaacccgaggcggaggaggaaggggactttgtgaacagtgggcggggagacgcagaggcagaggccctggcacgcagcgccaacgccctggttcgggcccagcaggggcgcggcacaggaggagggccgggtgggccggagggtggggatgctgagggccccatcacagccctcaccttcctgtacttgcctcggccgccagccgatcccgcccgatacccccgctacctggcgctactggagactctaacccgagacctgggccccacgctgctggttcatggggtcactccagtcacctgcactgatctgtgatgcccctgcctccagggctaggtagagagggcccaggcaggcggcctatcctgatccttggaggaggaggaagaggaggccactgtggcccgtggccctgcccttgggacgtggagcccaggggaggtttgaaggggatcctgggcttgggcatcacgcccacctcctttggcagagggaccccagcacactaactctgggtggctgtccccaccgtgcaggggagggagtccgcagcctcccttcactggtgccttgatgctaggggccaggcctcctctgtgactctgggctacctcagtttccccattttggccagactcaccggcccactggggtggtgatgttttcgttctgttttatttttctaactctgctgaccatgaataaaagaccaaaacactacaaaaaaaaaaaaaag

SEQ ID NO: 709 - DNA, 7014 bp, Homo sapiens
cggggaccgcgacgagcccgggtcgccgttggcagcagcagcagcaacaccagcagcagcagcagccccggcggcggcgcggaccccgagcgcccgggcgcaccccggcttcccggagcgcgacgcggcggcagcagccccggtgcggccgcgcgcgccttaggctcggccccgcggctcggggaccccgactcccggcccagcgagcgcgtcccccggcgccgcccgagagcccgaggaggcagcggccgcaggcagccggggaggggggcggccaccgcccgcgccgggcatcctcaggagccccagagcgcggagggcgcggcgccgccgagcggtgctggcccccgcgggcctccccggaccttccccaccgcctgggcccgagggacgcgtgatcgggcgggcggccgggcgcaagggtgggagggagccgcccccgcccgcgccccctccgcccctcgccccaacccctgggcgccgggcccgggccgcgcggcctgaagcgcccgcgatggcgagcccgccgcggcacgggccgcccgggccggcgagcggagacggccccaacctcaacaacaacaacaacaacaacaaccacagcgtgcgcaagtgcggctacctgcgcaagcagaagcatggccacaagcgcttcttcgtgctgcgcggacccggcgcgggcggcgacgaggcgacggcgggcggggggtcggcgccgcaaccgccgcggctcgagtactacgagagcgagaaaaagtggcggagcaaggcaggcgcgccgaaacgggtgatcgctctcgactgctgcctgaacatcaacaagcgcgccgacgccaagcacaagtacctgatcgccctctacaccaaggacgagtacttcgccgtggccgccgagaacgagcaggagcaggagggctggtaccgcgcgctcaccgacctggtcagcgagggccgcgcggccgccggagacgcgccccccgccgccgcgcccgccgcgtcctgcagcgcctccctgcccggcgccctgggcggctctgccggcgccgccggggccgaggacagctacgggctggtggctcccgccacggccgcctaccgtgaggtgtggcaggtgaacctgaagcccaagggtctgggccagagcaagaacctgacgggggtgtaccgtctgtgcctgtctgcgcgcaccatcggcttcgtgaagctcaactgcgagcagccgtcggtgacgctgcagctcatgaacatccgccgctgcggccactcggacagcttcttcttcatcgaggtgggccgctcggccgtcacaggccccggcgagctgtggatgcaggcggacgactcggtggtggcgcagaacatccacgagaccatcctggaggccatgaaggcgctcaaggagctcttcgagttccggccgcgcagtaagagccaatcgtcggggtcgtcggccacgcaccccatcagcgtccccggcgcgcgccgccaccaccacctggtcaacctgccccccagccagacgggcctggtgcgccgctcgcgcaccgacagcctggccgccaccccgccggcggccaagtgcagctcgtgccgggtgcgcaccgccagcgagggcgacggcggcgcggcggcgggagcggcggccgcgggcgccaggccggtgtcggtggctgggagccccctgagccccgggccggtgcgcgcgcccctgagccgctcgcacaccctgagcggcggctgcggcggccgcgggagcaaggtggcgctgctgccggcagggggcgcgctgcaacacagccgctccatgtccatgcccgtggcgcactcgccgcccgccgccaccagccccggctccctgtcgtccagcagcggccacggctcgggctcctacccgccgccgcccggcccgcacccgcctctgccgcatccgctgcaccacggccccggccagcggccctccagcggcagcgcctccgcctcgggctcccccagcgaccccggcttcatgtccctggacgagtacggctccagcccaggcgacctgcgcgccttctgcagccaccgaagcaacacgcccgagtccatcgcggagacgcccccggcccgagacggcggcggcggcggtgagttctacgggtacatgaccatggacaggcccctgagccactgtggccgctcctaccgccgggtctcgggggacgcggcccaggacctggaccgagggctgcgcaagaggacctactccctgaccacgccagcccggcagcggccggtgccccagccctcctctgcctcgctggatgaatacaccctgatgcgggccaccttctcgggcagcgcgggccgcctctgcccgtcctgccccgcgtcctctcccaaggtggcctaccacccctacccagaggactacggagacatcgagatcggctcccacaggagctccagcagcaacctgggggcagacgacggctacatgcccatgacgcccggcgcggccctcgcgggcagtgggagcggcagctgcaggagcgacgactacatgcccatgagccccgccagcgtgtccgcccccaagcagatcttgcagcccagggccgccgccgccgccgccgccgccgtgccttctgcggggcctgcggggccagcacccacctctgcggcgggcaggacattcccggcgagcgggggcggctacaaggccagctcgcccgccgagagctcccccgaggacagtgggtacatgcgcatgtggtgcggttccaagctgtccatggagcatgcagatggcaagctgctgcccaacggggactacctcaacgtgtcccccagcgacgcggtcaccacgggcaccccgcccgacttcttctccgcagccctgcaccccggcggggagccgctcaggggcgttcccggctgctgctacagctccttgccccgctcctacaaggccccctacacctgtggcggggacagcgaccagtacgtgctcatgagctcccccgtggggcgcatcctggaggaggagcgtctggagcctcaggccacgccagggcccagccaggcggccagcgccttcggggccggccccacgcagccccctcaccctgtagtgccttcgcccgtgcggcctagcggcggccgcccggagggcttcttgggccagcgcggccgggcggtgaggcccacgcgcctgtccctggaggggctgcccagcctgcccagcatgcacgagtacccactgccaccggagcccaagagccccggcgagtacatcaacatcgactttggcgagcccggggcccgcctgtcgccgcccgcgcctcccctgctggcgtcggcggcctcgtcctcctcgctcttgtccgccagcagcccggcctcgtcgctgggctcaggcaccccgggcaccagcagcgacagccggcagcggtctccgctctccgactacatgaacctcgacttcagctcccccaagtctcctaagccgggcgccccgagcggccaccccgtgggctccttggacggcctcctgtcccccgaggcctcctccccgtatccgccgttgcccccgcgtccgtccgcgtccccgtcgtcgtctctgcagccgccgccaccgccgccggccccgggggagctgtaccgcctgccccccgcctcggccgttgccaccgcccagggcccgggcgccgcctcatcgttgtcctcggacaccggggacaatggtgactacaccgagatggcttttggtgtggccgccaccccgccgcaacctatcgcggcccccccgaagccagaagctgcccgcgtggccagcccgacgtcgggcgtgaagaggctgagcctcatggagcaggtgtcgggagtcgaggccttcctgcaggccagccagcccccggacccccaccgcggcgccaaggtcatccgcgcagacccgcaggggggccgccgccgccacagttccgagaccttctcctccaccacgacggtcacccccgtgtccccgtccttcgcccacaaccccaagcgccacaactcggcctccgtggaaaatgtctctctcaggaaaagcagcgagggcggcgtgggtgtcggccctggagggggcgacgagccgcccacctccccacgacagttgcagccggcgccccctttggcaccgcagggccggccgtggaccccgggtcagcccgggggcttggtcggttgtcctgggagcggtggatcgcccatgcgcagagagacctctgccggcttccagaatggtctcaactacatcgccatcgacgtgagggaggagcccgggctgccaccccagccgcagccgccgccgccgccgcttcctcagccgggagacaagagctcctggggccggacccgaagcctcgggggtctcatcagcgctgtgggcgtcggcagcaccggcggcgggtgcggggggccgggtcccggtgccctgccccctgccaacacctacgccagcattgacttcttgtcccaccacttgaaggaggccaccatcgtgaaagagtgaagatctgtctggctttatcaccaggatgtcacatgtcagagagtatcattaaaagaagacgctcagcactgtttcagcccgaagctgcttgcagttttcttttggatctgagcaatgactgtgtttggaaacatctgtggactctgttagatgaggcaccaacaaggcaaggtcacctgcctctttcccttgttcccggatggggcattcatcattgtgctgtttgcgttttgttttgttttgttttaacaaaattagctgaagaagttattctcaagaaaattggatgttttcattggccttcttaaattgtggccagtgtcttttaatttcttcttcttttccttttggcaaagcagatataaccctcagcatgctaggagagtgcacccgtacctatggaagtggtaaaatctggtatttactggcttacactcaaaacgaccacagtcctacctcagttcaaggtaaagccggatttccgtggcgggggtcccacaggacctcctgtagtagcccctgcgctgtgtgtctggagcgcggtcctcggccttattgaaatggtccaagtagacagctgcttgttggattccagtgcaggtacctgcgatgtttacgtccacaccgagcccagtgtgggactgacatttctcaatggaagtgaaatttgggattggactttgaagacggattactaaataataattattatatgtaactgaagcaacctacttttgaaaatcaactgtattgggtagtgggaggtgggagggaagggctttgggaaggggatgaatatctctttttacctttaacagacttgtttaatcttctcgatgtagatgtttatgtaggtacttcacattgcaaacgccttttattctatttacaagctcagatgtctctgctctcctgaatcttgggcatgcctttctgtaaccaaaaatccctgtaggcgtgctagcaattccagggtggtccgggtttggcagatttgatttttaaaaaacgtattatctttaataaaatgttattatgtcaaccagtgaggctgccctgaacaaaaaaaacaaaaagaaaaaaaaaaaaggaaagaaagaaactgataaaaagaggcattccagcccctatgttattgatggaaaaagaaaaagaagaaaagcaatctcgcagtacatgttacttgtcgaaaaaattccggacaagactacccttgttttatgttttcagtattctgaaaataccagtgtgtggcagttctcgcagatgttacctaaaactgctgaacttgaccggcagaatgttctgccgttttctgctccctcgacacttgattggagggctgtcgacctctcctcccgtgggggcttccccagtgcctatcttctctgatagtcatggagaggttacactaattcattggagatgtaagttgttggttttgttttgttttgtttttagaaaaatatatataaatatataatagatatctatcgctatagaataatgcattaataaaatgaggcttttttagaggaagaccaaaaaattcaatgtcttaaaaatatatttaatggcaatgcaaaagtcttcctgcttccgtgctgaactttagaacagaggattgtattgcaagacaaagttgaatgtaaagtgatctccctgaacatttttaaggttttacttttctgaaattatacatcacagcagtgcataggccatataatgttagctggaaggtcaatttcagtgtatgatatactttattaagatgtataaaaatcctgaagtttttatttagttttgggaataggcatcaatgggtggtatttgctttgtaactccccccaggtacgatagggactgaatatggaccctgctgaaagcagtgtattgacgcatatttaactcgccctctatccgtagagtagtcatgacactatacagatggttcgtgttcatactgcagcttaaaacaagcaaaatacacagatgataatatgctaaattttcctctatcctgtacatttcacaaaaaggcatatgcaatatttacatttttaatttagtttacagaatggaaccaaaatgtataaatgttatgtttgctaaaacttcacaatgtatattgggtctttgtacattttgcctgacttaccttaaatttaaaatattttttgctatataaactttaacagttattaaacagtgttttctttttgggtacgtattgtttctggatatcaagatgttaaatatatttcttgctattgtgatatgacaagagacttaacttatcttgctctgtcttccactgtacacgctgtatataggggtcaatgtgatgctgctggagacgagaataaactggactagaatagtgcattgtatttagtctgtattgatcatggatgccctccttaatagccatatgcaataaaataaagtacattatttatgaaatgaaaaaaaaaaaaaaaaaa

SEQ ID NO: 710 - DNA, 1794 bp, Homo sapiens
cgttgaagagacattgccatctgaaccagaaaatggagctcttttgcgatcagagagataccaaggacctagaagacgcgcatgctcagagacccttgcagagtcccgcacagctgtcctccagcagagaagagctgctcagctacctggtggccctgctgcggcaggggagcagagggcgtcgccaagcaaagccaggctcaaggagttcctccagcagtgtgaccgggaggatctggtggaattggctctgcctcagctggctcaggttgtgaccgtgtatgagtttcttctgatgaaggttgaaaaagatcatctagcaaagccttttttcccagctatatataaggaatttgaagagttgcataaattggttaagaaaatgtgccaagattacctcagtagttctggtctgtgttcccaggagaccctggaaataaacaatgataaggttgctgagtcattaggaatcacagaattcctacggaagaaagaaatacacccagacaaccttggacccaagcacctcagccgagacatggatggggagcagctagagggagctagcagcgagaagagggaacgtgaggctgcggaggagggactggcctcagtgaaaaggcccagaagagaagccctgtccaacgataccactgaatctcttgctgccaacagcagaggccgggagaagcccaggcccttgcatgctttggccgctggtgagggtttttcccctccagtaaatgtgactgtctctccccgttctgaagaaagccatacaacgacggtttctggtggcaatgggagcgtgttccaggcgggcccgcagcttcaggcactggctaacttagaagccaggagggggtctataggtgctgctctctcatcccgggatgtcagtgggctgcctgtttatgctcagtcaggagagcctaggaggctgacccaggcacaggtggcagcgtttcctggagagaatgctttggaacactcttcagaccaggacacctgggacagcctgaggagcccgggtttctgcagccctttgtcatctggtggtggagcagagtccctgccgcctggggggcctggacatgcagaggcaggacacctcggcaaggtttgtgacttccacctgaaccaccagcagcccagccccaccagcgtcctgcctacagaggtggcagcccctccgcttgagaaaattttgtctgtggatagcgtggcagtggactgtgcctacaggactgtgcccaagccagggcctcagcctggcccacatggatcactattgactgaagggtgtctcagaagcctttcgggggacttgaaccggttcccctgtgggatggaggtgcactctggccagagagaactggagagcgtggttgctgtcggcgaagccatggcttttgaaatttccaatgggagccatgagttactgtctcagggacagaagcagatttttattcagacttccgatgggcttatcttgtcccctccaggtacaatagtgtctcaggaggaggacattgtcacagtgactgatgcagaggggcgtgcctgcggatgggcccgctagaaggagttcctctagaagctgtggagtcggtcgtcaccgtggagccagagccctcacagtgaagtggagtcagatcctagattcgtctgattttatccagagaaggtctatggcaagcaatgtatatttttctaatgtgaatattgcacagatgaaccttttatttataaagaataatgtctttctgcaaaaaaaaaaaaaaaaaaaaaaaa

SEQ ID NO: 711 - DNA, 2550 bp, Homo sapiens
cgtggatcccgagaaagaggcgcaggacgaggaggcagaacccgactggcgcgtagagcagcagcacgagcagtaggaagcagtcacccggaagcctgggggcgagaggcgaagtggtcaggcgccgaaggccgagagcacgcggggatcggtctcttcccgccgggtctcttaccggtgcgagtcaaagagccgctccggccccggccctgagggaagctccataactgctgcttcaggagcgcccggccgtcgccgccgccgccattttcgcgcccggccgcaggggctcttgggaaggcggagtctttgggcatccgcccggggtgaggggacccgaagtcctgaggcgcgccggaagggctagcggtcccagcataccccgcggccccttgggccgtctcacaactcgcgtccggcggagaccacaattcccggcattcgtggggcagggaggagtcggcctcccggaatcctggtcccggcgtgcacttctgaaggacttcaggtaccggcgtgccccgcgtcctactgtccgcctgctcgcgtcctgggtgccgcctctgagtagggcgggcgaggaggcagccaaggcggagctgatggctgcgccgagggcggggcggggtgcaggctggagccttcgggcatggcgggctttggggggcattcgctgggggaggagaccccgtttgacccctgacctccgggccctgctgacgtcaggaacttctgacccccgggcccgagtgacttatgggacccccagtctctgggcccggttgtctgttggggtcactgaaccccgagcatgcctgacgtctgggaccccgggtccccgggcacaactgactgcggtgaccccagataccaggacccgggaggcctcagagaactctggaacccgttcgcgcgcgtggctggcggtggcgctgggcgctgggggggcagtgctgttgttgttgtggggcgggggtcggggtcctccggccgtcctcgccgccgtccctagcccgccgcccgcttctccccggagtcagtacaacttcatcgcagatgtggtggagaagacagcacctgccgtggtctatatcgagatcctggaccggcaccctttcttgggccgcgaggtccctatctcgaacggctcaggattcgtggtggctgccgatgggctcattgtcaccaacgcccatgtggtggctgatcggcgcagagtccgtgtgagactgctaagcggcgacacgtatgaggccgtggtcacagctgtggatcccgtggcagacatcgcaacgctgaggattcagactaaggagcctctccccacgctgcctctgggacgctcagctgatgtccggcaaggggagtttgttgttgccatgggaagtccctttgcactgcagaacacgatcacatccggcattgttagctctgctcagcgtccagccagagacctgggactcccccaaaccaatgtggaatacattcaaactgatgcagctattgattttggaaactctggaggtcccctggttaacctggatggggaggtgattggagtgaacaccatgaaggtcacagctggaatctcctttgccatcccttctgatcgtcttcgagagtttctgcatcgtggggaaaagaagaattcctcctccggaatcagtgggtcccagcggcgctacattggggtgatgatgctgaccctgagtcccagcatccttgctgaactacagcttcgagaaccaagctttcccgatgttcagcatggtgtactcatccataaagtcatcctgggctcccctgcacaccgggctggtctgcggcctggtgatgtgattttggccattggggagcagatggtacaaaatgctgaagatgtttatgaagctgttcgaacccaatcccagttggcagtgcagatccggcggggacgagaaacactgaccttatatgtgacccctgaggtcacagaatgaatagatcaccaagagtatgaggctcctgctctgatttcctccttgcctttctggctgaggttctgagggcaccgagacagagggttaaatgaaccagtgggggcaggtccctccaaccaccagcactgactcctgggctctgaagaatcacagaaacactttttatataaaataaaattatacctagcaacatattatagtaaaaaatgaggtgggagggctggatcttttcccccaccaaaaggctagaggtaaagctgtatccccctaaacttaggggagatactggagctgaccatcctgacctcctattaaagaaaatgagctgctgccatcttttgtgggcagttagtcaggtgctgctctttgtggtgtggtgggctctggtctgttctgctcggtgctgggcctgggagcaaagattcccatgcttggctacagatactgacagctggcctctgaaggagggtgaaaacttctgcttgacagttccacatccatagtgcatggtctgatgagtgcggttgctgacatgggtttcttggtaagctcctgaggtaatggcagcctc

SEQ ID NO: 712 - DNA, 2259 bp, Homo sapiens
cgtggatcccgagaaagaggcgcaggacgaggaggcagaacccgactggcgcgtagagcagcagcacgagcagtaggaagcagtcacccggaagcctgggggcgagaggcgaagtggtcaggcgccgaaggccgagagcacgcggggatcggtctcttcccgccgggtctcttaccggtgcgagtcaaagagccgctccggccccggccctgagggaagctccataactgctgcttcaggagcgcccggccgtcgccgccgccgccattttcgcgcccggccgcaggggctcttgggaaggcggagtctttgggcatccgcccggggtgaggggacccgaagtcctgaggcgcgccggaagggctagcggtcccagcataccccgcggccccttgggccgtctcacaactcgcgtccggcggagaccacaattcccggcattcgtggggcagggaggagtcggcctcccggaatcctggtcccggcgtgcacttctgaaggacttcaggtaccggcgtgccccgcgtcctactgtccgcctgctcgcgtcctgggtgccgcctctgagtagggcgggcgaggaggcagccaaggcggagctgatggctgcgccgagggcggggcggggtgcaggctggagccttcgggcatggcgggctttggggggcattcgctgggggaggagaccccgtttgacccctgacctccgggccctgctgacgtcaggaacttctgacccccgggcccgagtgacttatgggacccccagtctctgggcccggttgtctgttggggtcactgaaccccgagcatgcctgacgtctgggaccccgggtccccgggcacaactgactgcggtgaccccagataccaggacccgggaggcctcagagaactctggaacccgttcgcgcgcgtggctggcggtggcgctgggcgctgggggggcagtgctgttgttgttgtggggcgggggtcggggtcctccggccgtcctcgccgccgtccctagcccgccgcccgcttctccccggagtcagtacaacttcatcgcagatgtggtggagaagacagcacctgccgtggtctatatcgagatcctggaccggcaccctttcttgggccgcgaggtccctatctcgaacggctcaggattcgtggtggctgccgatgggctcattgtcaccaacgcccatgtggtggctgatcggcgcagagtccgtgtgagactgctaagcggcgacacgtatgaggccgtggtcacagctgtggatcccgtggcagacatcgcaacgctgaggattcagactaagtttggaaactctggaggtcccctggttaacctggatggggaggtgattggagtgaacaccatgaaggtcacagctggaatctcctttgccatcccttctgatcgtcttcgagagtttctgcatcgtggggaaaagaagaattcctcctccggaatcagtgggtcccagcggcgctacattggggtgatgatgctgaccctgagtcccagggctggtctgcggcctggtgatgtgattttggccattggggagcagatggtacaaaatgctgaagatgtttatgaagctgttcgaacccaatcccagttggcagtgcagatccggcggggacgagaaacactgaccttatatgtgacccctgaggtcacagaatgaatagatcaccaagagtatgaggctcctgctctgatttcctccttgcctttctggctgaggttctgagggcaccgagacagagggttaaatgaaccagtgggggcaggtccctccaaccaccagcactgactcctgggctctgaagaatcacagaaacactttttatataaaataaaattatacctagcaacatattatagtaaaaaatgaggtgggagggctggatcttttcccccaccaaaaggctagaggtaaagctgtatccccctaaacttaggggagatactggagctgaccatcctgacctcctattaaagaaaatgagctgctgccatcttttgtgggcagttagtcaggtgctgctctttgtggtgtggtgggctctggtctgttctgctcggtgctgggcctgggagcaaagattcccatgcttggctacagatactgacagctggcctctgaaggagggtgaaaacttctgcttgacagttccacatccatagtgcatggtctgatgagtgcggttgctgacatgggtttcttggtaagctcctgaggtaatggcagcctc

SEQ ID NO: 713 - DNA, 2913 bp, Homo sapiens
gtcccagctagagctccagcgcccgctcaggccccactcgaccctctcgggcctcggctacttggactgcggcggaatatggcggctccgatgactcccgcggctcggcccgaggactacgaggcggcgctcaatgccgccctggctgacgtgcccgaactggccagactcctggagatcgacccgtacttgaagccctacgccgtggacttccagcgcaggtataagcagtttagccaaattttgaagaacattggagaaaatgaaggtggtattgataagttttccagaggctatgaatcatttggcgtccacagatgtgctgatggtggtttatactccaaagaatgggccccgggagcagaaggagtttttcttactggagattttaatggttggaatccattttcgtacccatacaaaaaactggattatggaaaatgggagctgtatatcccaccaaagcagaataaatctgtactcgtgcctcatggatccaaattaaaggtagttattactagtaaaagcggagagatcttgtatcgtatttcaccgtgggcaaagtatgtggttcgtgaaggtgataatgtgaattatgattggatacactgggatccagaacactcatatgagtttaagcattccagaccaaagaagccacggagtctaagaatttatgaatctcatgtgggaatttcttcccatgaaggaaaagtagcttcttataaacattttacatgcaatgtactaccaagaatcaaaggccttggatacaactgcattcagttgatggcaatcatggagcatgcttactatgccagctttggttaccaaatcacaagcttctttgcagcttccagccgttatggaacacctgaagagctacaagaactggtagacacagctcattccatgggtatcatagtcctcttagatgtggtacacagccatgcttcaaaaaattcagcagatggattgaatatgtttgatgggacagattcctgttattttcattctggacctagagggactcatgatctttgggatagcagattgtttgcctactccagctgggaagttttaagattccttctgtcaaacataagatggtggttggaagaatatcgctttgatggatttcgttttgatggtgttacgtccatgctttatcatcaccatggagtgggtcaaggtttctcaggtgattacagtgaatatttcggactacaagtagatgaagatgccttgacttacctcatgttggcaaatcatttggttcacacgctgtgtcccgattctataacaatagctgaggatgtatcaggaatgccagctctgtgctctccaatttcccagggagggggtggttttgactatcgactagccatggcaattccagataagtggattcagctacttaaagagtttaaagatgaagactggaacatgggcgatatagtatacacgctcacaaacaggcgctaccttgaaaagtgcattgcttatgcagagagccatgatcaggcattggttggggataagtcgctggcattttggttgatggatgccgaaatgtatacaaacatgagtgtcctgactccttttactccagttattgatcgtggaatacagcttcataaaatgattcgactcattacgcatgggcttggtggagaaggctatctcaatttcatgggtaatgaatttgggcatcctgaatggttagacttcccaagaaaaggaaataatgagagttaccattatgccaggcggcagtttcatttaactgacgacgaccttcttcgctacaagttcctaaataattttgacagggatatgaatagattggaagaaagatatggttggcttgcagctccacaggcctacgtgagtgaaaaacatgaaggcaataagatcattgcttttgaaagagcaggtcttcttttcattttcaacttccatccaagcaagagctacactgactaccgagttggaacagcattgccagggaaattcaaaattgtgctagattcagatgcagcggaatatggagggcatcagagactggaccacagcactgactttttttctgaggcttttgaacataatgggcgtccctattctcttttggtgtacattccaagcagagtggccctcatccttcagaatgtggatctgccgaattgaagaggcctgatttcagctccaccagatgcagatttgtgttttgttttcttgttatcactgtcacacagcttataacatgtatgcttttcagaatacagttgtctagccaagccatcaagtgtctgaaattcaatattggtttatgcaaatacagcaaacttttatttaagtagataggagaatatgtttaaaatattaggaatcctagaccatattttcaagtcatcttagcagctaggattctcaaatggaagtgttatatataatatgttaaaaacattttgctttcctggctaattatttgatccttttaaatccaaatttgaatcatttgtcatgtatgattatttctgttaaatgtacacagtatttaagatggatatttggtggctctatttgttctgatatcttttggtctaaattatgaggtaccaagattgtttctttgtttctttttttcaaattgtgtttagaaatactgtaataaatatgcagtagtgatataaagaattatatccaaggtaatataaaagccattacgtatgaactcatccgtgtctcattttgtgttttattttgtgatctcttgtccactaagtatcttgttaaatgccagtatctcagtctttctgaagccctgaaatggtaattgtagcatttcagaaaatgtctttcatttcaatcaataaaaagcttttgtaaaaaaaaaaaaaaaaaaaaaaaaaa

SEQ ID NO: 714 - DNA, 1424 bp, Homo sapiens
gctgtggtaagtgcatcctccttcagtctcagttctgaaaatagatcatcatggtggcaccaaagagtcacacagatgactgggctcctgggcctttctccagtaagccacagaggagtcagctgcaaatattctcttctgttctacagacctctctcctcttcctgctcatgggactaagagcctctggaaaggactcagccccaacagtggtgtcagggatcctagggggttccgtgactctccccctaaacatctcagtagacacagagattgagaacgtcatctggattggtcccaaaaatgctcttgctttcgcacgtcccaaagaaaatgtaaccattatggtcaaaagctacctgggccgactagacatcaccaagtggagttactccctgtgcatcagcaatctgactctgaatgatgcaggatcctacaaagcccagataaaccaaaggaattttgaagtcaccactgaggaggaattcaccctgttcgtctatgcaccatttattgaaaagttgtccgtccacgtcatcgagggtgaccaccgcacactcctggagggcagcggcctggagtccatcatcagcaccctggctgagccacgtgtgagcgtgcgggagggctaggccctcgcccccacctgccactggagaccgctccgccatccccacctcaccgccgcgcagcagagctggaagggtcctgccgatgggaccctgccaggcccagtgccactgccccccgaggctgctagacgtgggcgttaggcgtgtcccacccacccgccgcctcccatggcacgtcgggaacaccggagccgccaacttggagactcctggtctgtgaagagccgctgacgcccgcaggaaccgggctgggccttgtgtgccagtggggtttgtgcttggtctttctccgcttggatttgcttatttattgcattgctggtagagactcccaagcctgtccaccctgcaaagactcctcgggcagcatgcgggtcccgcacactgcacccatttcctggatgtcccctgcaggcgcgggaggccatccgggcctgctggctgcggccccctctcagccaggcctggctcagcccactgcgtgggaggtcaccggccactccccgaggagctgggatccccgggatgcaggcccacagtgcggggctgcacccatgatgcggagctggcctccaaccctgcgggccgcgccaggcaccaactcagtgtttgtcagtgtttgtttttccaagaaatggttcaaattgctgctcagatttttaaatttactgtagctgccagtgtacacgtgtggaccccattttatttttacaccaatttggtgaaaatgctgctttcctcagcctccccacaattaaactgcacatggtctctaaaaaaaaaaaaaaaaaa

SEQ ID NO: 715 - DNA, 2486 bp, Homo sapiens
gctgtggtaagtgcatcctccttcagtctcagttctgaaaatagatcatcatggtggcaccaaagagtcacacagatgactgggctcctgggcctttctccagtaagccacagaggagtcagctgcaaatattctcttctgttctacagacctctctcctcttcctgctcatgggactaagagcctctggaaaggactcagccccaacagtggtgtcagggatcctagggggttccgtgactctccccctaaacatctcagtagacacagagattgagaacgtcatctggattggtcccaaaaatgctcttgctttcgcacgtcccaaagaaaatgtaaccattatggtcaaaagctacctgggccgactagacatcaccaagtggagttactccctgtgcatcagcaatctgactctgaatgatgcaggatcctacaaagcccagataaaccaaaggaattttgaagtcaccactgaggaggaattcaccctgttcgtctatgagcagctgcaggagccccaagtcaccatgaagtctgtgaaggtgtctgagaacttctcctgtaacatcactctaatgtgctccgtgaagggggcagagaaaagtgttctgtacagctggaccccaagggaaccccatgcttctgagtccaatggaggctccattcttaccgtctcccgaacaccatgtgacccagacctgccatacatctgcacagcccagaaccccgtcagccagagaagctccctccctgtccatgttgggcagttctgtacagatccaggagcctccagaggaggaacaacgggggagactgtggtaggggtcctgggagagccagtcaccctgccacttgcactcccagcctgccgggacacagagaaggttgtctggttgtttaacacatccatcattagcaaagagagggaagaagcagcaacggcagatccactcattaaatccagggatccttacaagaacagggtgtgggtctccagccaggactgctccctgaagatcagccagctgaagatagaggacgccggcccctaccatgcctacgtgtgctcagaggcctccagcgtcaccagcatgacacatgtcaccctgctcatctaccgcaggctgaggaagcccaaaatcacgtggagcctcaggcacagtgaggatggcatctgcaggatcagcctgacctgctccgtggaggacgggggaaacactgtcatgtacacatggaccccgctgcagaaggaagctgttgtgtcccaaggggaatcacacctcaatgtctcatggagaagcagtgaaaatcaccccaacctcacatgcacagccagcaaccctgtcagcaggagttcccaccagtttctttctgagaacatctgttcaggacctgagagaaacacaaagctttggattgggttgttcctgatggtttgccttctgtgcgttgggatcttcagctggtgcatttggaagcgaaaaggacggtgttcagtcccagccttctgttccagccaagctgaggccccagcggatacaccagaacccacagctggccacacgctatactctgtgctctcccaaggatatgagaagctggacactcccctcaggcctgccaggcaacagcctacacccacctcagacagcagctctgacagcaacctcacaactgaggaggatgaggacaggcctgaggtgcacaagcccatcagtggaagatatgaggtatttgaccaggtcactcaggagggcgctggacatgacccagcccctgagggccaagcagactatgatcccgtcactccatatgtcacggaagttgagtctgtggttggagagaacaccatgtatgcacaagtgttcaacttacagggaaagaccccagtttctcagaaggaagagagctcagccacaatctactgctccatacggaaacctcaggtggtgccaccaccacaacagaatgatcttgagattcctgaaagtcctacctatgaaaatttcacctgaaaggaaaagcagctgctgcctctctcctgggaccgtggggttggaaagtcagctggacctcatggggcctggggctcacagacagaagcacctcagaatttccttcagtgcctcagagatgcctggatgtggcccctccccctccttctcacccttaaggactcccaaacccattaatagttcagacacaggctccttcttggagcctatgggcttcagatgtctttgccccatttgtcacctcgcacacttatagcgtttcctcctcgaaattctaccaagactggtcaaatgttgctgaggggcctggaccagctgtcctttacaccaccttctcaacactgctgaaaagaacccaagagaattgtcacacatgacacaagatgtacataatatcatgctcactgcagtgttatttaaaataaaaggcaggaaataaaaaaaaaaaaaaaaaaaaaaaaaaaaaaa

SEQ ID NO: 716 - DNA, 1717 bp, Homo sapiens
tcgctcgctcctccttcgcttcgcctcgccgccgccatgcaggaaatcatcgccagcgtggaccacatcaagtttgacttggagatcgcggtggagcagcagctgggggcgcagccgctgcccttccccggcatggacaagtcgggcgctgctgtctgtgaattctttttgaaagctgcctgcggcaaagggggcatgtgtccgtttcgccacatcagtggtgagaagacagttgtgtgcaaacactggctgcgtggcctatgcaagaaaggggaccagtgtgagttcctgcatgagtatgacatgaccaagatgcccgagtgctacttctactccaagttcggggagtgcagcaacaaggaatgtcccttcctgcacatcgaccccgagtccaagatcaaggactgtccttggtatgaccgcggcttctgcaagcacggtcccctctgcaggcaccggcacacacggagagtcatctgtgtgaattacctcgtgggattctgcccggaggggccctcgtgtaaattcatgcaccctcgatttgaactgcccatgggaaccaccgagcagcccccactgccacagcagacacagcctccagcaaagcaaagtaacaatccgccattacaaaggtcgtcctccttgatccagttaacgagtcagaactcttctcccaatcagcagagaaccccgcaggtcatcggggtcatgcagagtcaaaacagcagcgcgggcaaccggggaccccggccactggagcaggtcacctgttacaagtgtggcgagaaaggacactacgccaacagatgcaccaaagggcacttggcctttctcagtggacagtgacagcagctggagccagctccgagcagcccgggggccccgctgttgggagtgtgcatttaactgtttcatgcgcttgttggcgcgactgtggctcgagctggcccgcagacacgtgggtttcatcactctgaggggccacgtctgttagtttcctatcattttgccgtagtattttttgaaaaagggacatgtgtcctgtgggtccctgcagtcgacatcatgtttggctgggcatcgatgcctcctttctgggactcccggcacaactcccctcatccagggagggaggcagctgctggggaggggcttggctaggtagttctgtgtggcggtggtcattcccctcattaaacaccagttcttggtgacgccaggggctggtaggtcattcaaagctgtggccagctcacgcctgcttcctccctccctgccctgctgaatcctaaagctgtgcctatatctgtgatttgaatgagggagccctttggggcaaattcaggtgcccccattgcctcaggctggccctggtcccaggtggcagcggttgaggaggggtacagggctctcaagcctgaggttttcttctctgggcttaattttctcttggggtacgtgcctgacagtgtttaaggtgtccgttgaactggagttgcagacttttaaatagatgaccccttcagatcatctgtgcctacctcctgcccatcaggcgtctacactgtcactcagacacctgtggcatgtggaggagactgccctgtcctgagcctggaaaatgtgaaactgtctcctgcaacctgctgggcatgtgggcctggctgtgttcaattgcaagaacaatttttatgaaatggattaaagcttgtttttt

SEQ ID NO: 717 - DNA, 3429 bp, Homo sapiens
gcccggggcccgcctggctctcgccgccgccgggccatggccgcgcagctgctggaggagaagctgacctgcgccatctgcctggggctctaccaggacccagtgacgctgccctgcggccacaacttctgcggggcctgcatccgggactggtgggaccgctgcggaaaggcgtgccccgagtgccgggagccctttcccgacggcgccgagctgcgccgcaacgtggccctcagcggcgtgctggaggtggtgcgcgccgggcccgcccgggatcccggccccgatcccggccccggccccgaccctgccgcgcgctgcccccgccacgggcggccgctggagctcttctgccggaccgagggccgctgtgtgtgcagcgtgtgcaccgtgcgcgagtgtcgcctccacgagcgggcgctgctggatgccgagcgcctcaagcgcgaggcccagctgagagccagcctggaggttacccagcagcaggccacccaggccgaaggccagctactagagctgcgcaagcaaagcagccagatccagaactcggcctgcatcttggcctcctgggtctccggcaagttcagcagcctgctacaggccctggaaatacagcacacgacagcactgaggagcatcgaggtggccaagacgcaggcgctggcacaggctcgagacgaggagcagcggctgcgggtccatttggaggctgtggctcgccatggctgcaggatccgggagctcctggagcaggtggatgagcagaccttcctgcaggaatcgcagctcctccagcccccagggcctcttgggccactgacccctctgcagtgggatgaagaccaacagctgggtgacctgaagcagttgctaagccggctgtgtggcctcctcttggaagaggggagccaccctggggcaccagccaagcctgtggacttagcccccgtggaggccccaggtcccctggcaccggtcccaagcacagtttgtccactgaggaggaaactctggcagaattatcgcaatctgacctttgatccagtcagcgccaaccgtcacttctatctgtcgcgccaggaccagcaggtgaagcactgtcgtcagtcccggggcccaggcgggcccggcagctttgagctctggcaggtgcaatgtgcccagagcttccaggccgggcaccactactgggaggtgcgcgcgtcagaccactcggtgacactgggcgtctcctacccgcaactgccacggtgcaggctggggccccacacagacaacattggccggggaccctgctcctgggggctctgcgtccaggaggacagcctccaggcctggcacaacggggaagcccagcgcctcccaggggtgtcagggcggctcctgggcatggatttggacctggcctcaggctgcctcaccttctacagcctggagccccagacccagcccctgtacaccttccatgccctcttcaaccagcccctcacccccgtcttctggctcctcgagggtaggaccctgaccctgtgccatcagccaggggctgtgttccctctggggccccaggaagaggtgctcagctgaagaaggcatgggatggagccctggcatagctgccaccatgcctatgtgcccaagagctgcccagcttcagcttggggactggaggaccagctgttggcctctctgttaactcagaaagagatgggaggttgggggaggtgagcataaacgcagagttcactgttgcagcctttttgaaggggacacagtctaggagggggataaatgggatgcccttgccccagagagaacccagttctaggtactgtctgggcctgggaggcgagagcagtgcccaggggacttctgggcttacaggacagcgtgtgtgacaaaattcagatctacctgaacttgcctctggagatgataagggccaaaggagcagtcagggaggggcggtgagccagagtagtcccagggggagacagattcctccctcctccccgcctgcagctctctttaattttttgtaacatttggagagacgtccgtcctgtcttgtagtctttttattttgtgcatccttataattgtattctacaaacaattttgttttctgcatttaaacatttttgtgtttttaggagatggtcttgctctgtcactcaggctggagtacagtggcacaatcatggctcactgcagcctcgagctcctgagctcaaaggatcctcccacctcagcctccagagtagctcagattacagtgttttctgaagtttcctgacttaacataagcatttttcacatgattgaaaattttcactgattgctgtagtcattctaatgactatcaagtttatttatccattattggacatttaaatttctttctttttagctatacaaacattgatgtgttttttttgagacaggatctccatctgtcacccaggctggtgtgcaggggtgcggtcatgggctcatgggattctcctacctcagcctcctgagtagctgggattacaggtgtatgccaccacgcctggcttatgatgaatatttctgagtgggatgtttggccacatttatggtcatgtatgtaggctgttacctcaagtgagtcactcagggaacaatgagcacttgaagatttttttatacaaaaggccacagtgaggccaccttgagtcaagccgactaaggcccctcaaccctgtcactaagcagcacgtgacactggcaggaccttcatctccagcatcccacccctgggtgtgggactttggggcagccgtgtgtgcaggtgtcggcacaggctagctcctcctggtttggtgtggtgtttgccattgcagagcaagctgccacgaagacccctgggcatgattttgcttgtatttccggaagtggggttgctgggtcatagggcaggtgtaattttttttacttgaaatgttccacttcttgttctgggaggtggttccaagggtgtctgcttttggccaggcgcagtggctcacgcttgtaatcccagcactttgggaggccgaggcaggcggatcacaaggtcaggagttcgagaccagcctggccaacaaggcaaaaccccgtctctactaaaaatacaaaaattagccgggcatggtggtgtgcgcctgtaatcccagctactggggaggctgaggcagaagaatcgcttgaacccaggaggtgaggttgcagtgagctgagattgcaccactggactacagcctgggtgacagagcgagactctgtctcaaaaaaaaaaaaaaaaagggagggctgtctgctttttgtaacttgaaaaactggacatctatgttatatgtactcatggataaatatttcacaataaaactttttaaaaggataaaaaaaaaaaaaaaaaaaaaa

SEQ ID NO: 718 - DNA, 1377 bp, Homo sapiens
ctcctcccctcccagcctcaggtgcctgcttcagaaaatgaagtagtaagtctgctggcctccgccatcttagtaaagtaacagtcccatgaaacaaagatgcagtcgggcactcactggagagttctgggcctctgcctcttatcagttggcgtttgggggcaagatggtaatgaagaaatgggtggtattacacagacaccatataaagtctccatctctggaaccacagtaatattgacatgccctcagtatcctggatctgaaatactatggcaacacaatgataaaaacataggcggtgatgaggatgataaaaacataggcagtgatgaggatcacctgtcactgaaggaattttcagaattggagcaaagtggttattatgtctgctaccccagaggaagcaaaccagaagatgcgaacttttatctctacctgagggcaagagtgtgtgagaactgcatggagatggatgtgatgtcggtggccacaattgtcatagtggacatctgcatcactgggggcttgctgctgctggtttactactggagcaagaatagaaaggccaaggccaagcctgtgacacgaggagcgggtgctggcggcaggcaaaggggacaaaacaaggagaggccaccacctgttcccaacccagactatgagcccatccggaaaggccagcgggacctgtattctggcctgaatcagagacgcatctgaccctctggagaacactgcctcccgctggcccaggtctcctctccagtccccctgcgactccctgtttcctgggctagtcttggaccccacgagagagaatcgttcctcagcctcatggtgaactcgcgccctccagcctgatcccccgctccctcctccctgccttctctgctggtacccagtcctaaaatattgctgcttcctcttcctttgaagcatcatcagtagtcacaccctcacagctggcctgccctcttgccaggatatttatttgtgctattcactcccttccctttggatgtaacttctccgttcagttccctccttttcttgcatgtaagttgtcccccatcccaaagtattccatctacttttctatcgccgtccccttttgcagccctctctggggatggactgggtaaatgttgacagaggccctgccccgttcacagatcctggccctgagccagccctgtgctcctccctcccccaacactccctaccaaccccctaatcccctactccctccaccccccctccactgtaggccactggatggtcatttgcatctccgtaaatgtgctctgctcctcagctgagagagaaaaaaataaactgtatttggctgcaagaaaaaaaaaaaaaaaaaaaaaa

SEQ ID NO: 719 - DNA, 3966 bp, Homo sapiens
ccagccccagcatcgcgcgccgcagccgcggccccgcagctccgcccccggcccggcccggccccgggcccgctcgcccgccgccccgcatggagctgtcagccatcggcgagcaggtgttcgccgtggagagcatccggaagaagcgcgtgcggaagggtaaagtcgagtatctggtgaagtggaaaggatggcccccaaagtacagcacgtgggagccagaagagcacatcttggacccccgcctcgtcatggcctacgaggagaaggaggagagagaccgagcatcggggtataggaagagaggtccgaaacccaagcggcttctgctgcagcggctgtacagcatggacctgcggagctcccacaaggccaagggcaaggagaagctctgcttctccctgacgtgcccactcggcagcgggagccctgagggggtggtcaaggcgggggcacctgagctggtggacaagggccccttggtgcccaccctgcccttcccgctccgcaagccccgaaaggcccacaagtacctgcggctctcgcgcaagaagttcccgccccgcgggcccaacctggagagccacagccatcgacgggagctcttcctgcaggagccaccggccccagacgtcctgcaggcggctggcgagtgggagcctgctgcgcagccccctgaagaggaggcagatgccgacctggccgaggggccccctccctggacacctgcgctcccctcaagtgaggtgaccgtgaccgacatcaccgccaactccatcaccgtcaccttccgcgaggcccaggcagctgagggcttcttccgagaccgcagtgggaagttctgaatcaccgtttttactcttcttaaactgttttcttttgggcttggggtgggacttccagagatagggatgggttgggggcggggtaattattttatttaaaaaaataccgagcagcaaaaggggagaagatcccactactctcccaccacctgccctttctctgagggacgtttaccacgaggcctcaggctggggatggagagagttgctctgggagttggggtaccacccccagggcaggatggggacaggatcacctgcccgggacaccaccattatcattctcctctagtgacgcagcagctggttctgggagttaaaggagcattggaaggcccaaaccctctcccttgagtggccaccccagcctggttggctggttttccccttttctcttgtttcaattgggtctttaccttgaactctcctctctggctttgcggtgggctgtggaggctggttttgaccaaaagtgagtggggcgggaggaaggggcaggaggaagggttgaggttacttggggcgagtcccttccccttcagagaggcttctatccttcccagggaggaggcgccgctgagacccttctgctgagagctctgccctcccctcatcacctggcctgtgcagaaacgctcatgcacacctggctgcacaggtgtgcacgcattacccttcgcgtgtacgttcccatgtgccccgtgaaagcatgtgtggctgcagacgtgtccacatgggccttgcgaacctgggttagaaaccctggccaggcgaacgtggggtgattcacagcacaaaagacctcaccaccacacctgcactcaccccaccttgcatgcaccttgctacctgcttgcggctttcagtggagggcaggggtctggcacaggtgcgatggcaccccatgctccaggcatacagatgtggtttctcggctgcaccgggccaggctgcgggtgtgcaggcgtctgctaagttgtgtgatgtatcagcacaggctttgagacgtctggaccctgtccttcctcccgtgaggggttcttgttctttctgactcaggtgacttttcagcccttccaattcccctctttttctgccctcccctccaactcagccaacccaggtgtgggcagtcagggagggagggagtgtcccaccacgttctcagggcagcccttgactcctaagccccttcctccttccattctgcatcccctccccatccaacctaaatgccacagctggggctgagctgtattcctgtggagggacctctgccgtgcctctctgaggtcaggctgtgctgtgtgatgggcaggctttgccccagcccacccctggcaaggtgcacttgttttctggtttgtacaaggtgtcctgggggcccgtggcttccctgccagtgaggagtgacttctccctctcttccagtcctgtaggggagacaaaaccagattggggggcccaaggggagcatggaaaaggccggctcccctgtctttccttggctgtcagagtcagggtaacacacaccaagagtggagtgcggccagcaagtttgagacctgcccgccctcctcgcagctctgctctgtgtcctcaggaagtcacagagtctactgaggcaaggagagggtgattctttccccaaatcccttcttccctggttcccaaaccaaagacagcctgcagccctttctgcatggggtgctctgttgacaggcttcccagatccctgagtctctctttccttcctcctcgatctttagttgtccacggtcaattcagtgcttccattgggggacagtcccctccgggatgacctgattcacctccagcccagggaatggaatctagaggaatacgtggggtgggtctggacaaggagcggcaggaatcaccacccatctccagctgtggagccctgtggaggggaaggggaagcttggggttcagaggggactcttccaggagaggggtgcccagcggaggtaaagatgatagagggttgtggggggtctctagttgaatgttttggcccatgactttggaacatggctggcagcttccagcagaagtcacgctccccatcccccaggggacataggacctttttcctgcttcctggtcactttcaaagaactatttgcgcaatctgtgggtctgtggattcacggggctttctgtgtgggtgctgcagttgcttttgtctgcagcagcaggacacatctttcctcttactcagccctttatggcccatggggaactccgtggctcagggagagctgaactccaggggtgtgacctgggacgggtgggcctgaggtgcccagctcagggcagccaggtggctcatgggctgtagtgagccagctccctgggggaaaaggctgtgggccgttaggaccatcctccaggacaggtgacctctatgaggtcacctacggctgtggccgtgcaggcctccttccagcccagagtggcccagtagagcaaggcagacagtgacctccacccccgcagccctcttaaaaggccagtactcttgggggtggggggagggtttagaaagcatttgcccatctgcctttctttcccccagcccccacccgctttgaatgtagagacccgtgggcacttttccttttgtggtggggggtgcggaggaggtacccccacccctggcacagccgcctggaatgcaggactgtcactgctgttcgggtgatgacctcgttgccaagctcctcctgtccccttgttctgggggcaggcgctgtgcttctgtgaggtggtttagcttttgctttcgaagtggccagctgcggccaccaggtctcagcacaagagcgcttcctttgcacagaatgagcttcgagctttgttcagactaaatgaatgtatctgggaggggtcgggggcacgagttgattccaagcacatgcctttgctgagtgtgtgtgtgctgggagagtcagagtggatgtagagcgcggttttatttttgtactgacattggtaagagactgtatagcatctatttatttagatgatttatctggtaaatgaggcaaaaaaattattaaaaatacattaaagatgatttaaaaaaaagaaaaaa

SEQ ID NO: 720 - DNA, 731 bp, Homo sapiens
ggctggaggaaagggaactgaacgcggttctgggagcagcaagcccacgggtagcagccgaggccccagaatgagtacaaggaatgcttctccctgtatgacaagcagcagagggggaagataaaagccaccgacctcatggtggccatgaggtgcctgggggccagcccgacgccaggggaggtgcagcggcacctgcagacccacgggatagacggaaatggagagctggatttctccacttttctgaccattatgcacatgcaaataaaacaagaagacccaaagaaagaaattcttctagccatgttgatggtggacaaggagaagaaaggttacgtcatggcgtccgacctgcggtcaaaactcacgagtctgggggagaagctcacccacaaggaagtggatgatctcttcagggaagcagatatcgaacccaatggcaaagtgaagtatgatgaatttatccacaagatcacccttcctggacgggactattgaaggaggagaatgggagagcctcccctgggcctgaaaacttggagcaattaattttttttaaaaagtgttcttttcacttgggagagatggcaaacacagtggcaagacaacattacccaactatagaagagaggctaactagcaacaataatagatgatttcagccatggtatgagtagatctttaataaaagatttgtattgattttattaaaaaaaaaaaaaaaaaaa

SEQ ID NO: 721 - DNA, 3914 bp, Homo sapiens
gggggctgagggtggagagaggaagggaaggaagaaaaggggagccttcctggccagggtaaccggcactaagaggcctcactccaagcccccgaggagcctgtggtggggctggagacccggctcaggcccctccaccacccttaaagtcctcagaaggtgggaactgaactggcacaggctgggaaccggctgtgcgctggccacttgattttgccagctgccctgtaattcagctggtgaggaaactgaggcacagactgaggtagaatgattcgccagtcactcagcaagtcagcagacggggaggactgaatcccagcctgagagcaccgaagcttgtatccctgcaataccgagccccaagcctgcgagccccggtgcccatctctgagttgggccgtcttggaagggttcccttcctcctacaagatggtgtgtgaggagccttcaatacgacccggggtgtaaagtgtccaactctagtaggggcctgatggcatccccgccgagtcccaggagagagagagaagaccccttcctggagtccagggctcccgggaagaaacactggcatttgtccctttgcttcggcttctggaggcagagactctgagcccagggagagccttctgcagccccatttcctcaaaaatccaacctgcccaggtggcgggtcatgagctgtgctcaggaagctggaatctgaccctggtggcgtcgggcccagtctccatggcagccgagcatttattacccgggcctccacccagcttggcagactttagacttgaggctggaggaaagggaactgaacgcggttctgggagcagcaagcccacgggtagcagccgaggccccagaatgtggatgatctcttcagggaagcagatatcgaacccaatggcaaagtgaagtatgatgaatttatccacaagatcacccttcctggacgggactattgaaggaggagaatgggagagcctcccctgggcctgaaaacttggagcaattaattttttttaaaaagtgttcttttcacttgggagagatggcaaacacagtggcaagacaacattacccaactatagaagagaggctaactagcaacaataatagatgatttcagccatggtatgagtagatctttaataaaagatttgtattgattttattaactaccgtgagtccggccctttcaagcatggaaggagcctgcgatttggagtctggcctgggttccagtcctggctctgctgcttcccactgtgactttgggcaaatcatttcactcctcaaagcccccccacacaagctggattcccacttcttacctcatggagcctgttgaggaaggattgagctgatgacttaagggcaatctaccaagagacttattctgtatttgggggctagaaccatcttccatatttccaagattttccaagatgaagccagtgctagctgagaagcagcaatgaacagaaagctgtaacacttatgacaacaattcttgcagtgccagaggcccatttacaaattctcatttccatctcaacagatatagtgacatagctcaggctattcattcataaacacagagtgtagagtgaaaacactagagtgaaaacacatgctacaatgaggcagcatcagctgagagcaggaagagcgatctactttacaccccacaccaaaggaaaccagatgtgagctgctaaattgactggccttgcagagctcaagaagggggcttccaatgctgtgagaattccgagctgttccctgggctctgttaacaggcagagaggttccgggatggtctgctcaagtggcccacactggtcattgccttaagccacctccccaggacttacggagagaaataaggggatgtaaccagcaatggccagggtacaacagccctggaaaacagtagtaggagcactaggctttctgggagtccatccagctggagtggctttgagtgagttacacagctagaaggtgccaggttggtgctgccagagattcagaggtgccatacacttgtcaaatctggatcattcgtagtgccagcacagtcctaaaagggctggagtaccacaccaacacaggtaggggtgcagggcttcaagtacaaagatttgcatccatgtatgtatcaaaagtgggttctctgggctgtggctttgtctagtagtaccacagtggctaaagtagaagaaaaccaaatcaaatgggatgtgtcttttgggaggatgtacaagacacaaatctttcactaggcaccgggcacagggaaaactgcagggaacaagagttgtagtgttagtgcaactgtctcaacgatgctgtgtggcttcagacccaaacaaggccctgaggaaggagactctcatttccccaagcataactgcaaggagaggaggaattcctaggagccaaagagttttgtggggtgagggtaaataaatggcccaaatgccaactaggtgaagttgtgaccatctggctgggaagcccaggtccacacagtgtaggagcagatgttttgtggggtctgaggtttacgagatttggctgccttaagaatacaaaaacagaaatgcagaatttctggggctgctcctaggaccagaacaagtgaagggtcctggtgcttaaacttcattaccttcatggtaaatccaccagagggccggttagatgctggccccgccgagagaactgctgtcactttcaggcaaagctcaaaggtcctaggcccacagttcttttgagctccagtcatggacattaggaagtaaatcctgcacagccaacctggaataccaaagattagatgagagatagataccaatgatttagatggcacaggaagagcaagttctggatataataaatgagggtactttccgtcaaagcttttctatgtctatatttatcactgaatagtcccagtatggttttaaagcaagttttatgaatctcatttgcctaacaggaatctgaaatataacttgccaaaaacacacagttggtgtggaatggtcattagaacctggggctcctcttcacggactccctgctcattaagggattcagtggtccagagtctaagatcctattaagtgtttgattcaaacctctacccgaggaagggctgttaccttactcctggtcctggtttcaagctcattcctgaaattccagctggtttctctagcacctagtgttgtttacaagaaggccacggtgctcttagcattcaaactgcagatactaaacagatgctgtgatttattaaagagttagccatatttcaacaagaaagggaaatgatggctatattcattacttacctcaaagcatgctgcaagaaaattagttagttacttgtcatgctttgaaatctctggatgaaaggtgctttggaagcacaaaccattatcacttgtctcatagggattgtccccttgaacatccagcagtgttattttacagaagacaaattaactgaaggcttttcttttattacatctaaagagctctacataaacaggtaacattcaataggtaaacaatttttttccaatgcatgtaataaatattttcacttggtacttttatacaaactgacattgtctactatacatttttaaaagccattttactggtttggcatgcggtatggaaattctaagagagaaagttttaaggcaatgaatcacagatttaagttcatggaatttatggtaactttatctgtttatgtacattttcccctttgttaaacaattaacagcagcacactctgggaccaccagctattttccctctctttctgaaatctaagctttgtatttaattaaaaaacagaattcaacattaaaaaaaaaaaaaaaaaaaca

SEQ ID NO: 722 - DNA, 1823 bp, Homo sapiens
cctgggcgggccctgcgtcaggttgcagtttcacttttagctctgggcacctccagctcctgctcgccggacggctcccagggagagcagacgcgccagacgcgccaccctcggggcgccgacggtcacggagcatggggtcggcctttgagcgggtagtccggagagtggtccaggagctggaccatggtggggagttcatccctgtgaccagcctgcagagctccactggcttccagccctactgcctggtggttaggaagccctcaagctcatggttctggaaaccccgttataagtgtgtcaacctgtctatcaaggacatcctggagccggatgccgcggaaccagacgtgcagcgtggcaggagcttccacttctacgatgccatggatgggcagatacagggcagcgtggagctggcagccccaggacaggcaaagatcgcaggcggggccgcggtgtctgacagctccagcacctcaatgaatgtgtactcgctgagtgtggaccctaacacctggcagactctgctccatgagaggcacctgcggcagccagaacacaaagtcctgcagcagctgcgcagccgcggggacaacgtgtacgtggtgactgaggtgctacagacacagaaggaggtggaagtcacgcgcacccacaagcgggagggctcgggccggttttccctgcccggagccacgtgcttgcagggtgagggccagggccatctgagccagaagaagacggtcaccatcccctcaggcagcaccctcgcattccgggtggcccagctggttattgactctgacttggacgtccttctcttcccggataagaagcagaggaccttccagccacccgcgacaggccacaagcgttccacgagcgaaggcgcctggccacagctgccctctggcctctccatgatgaggtgcctccacaacttcctgacagatggggtccctgcggagggggcgttcactgaagacttccagggcctacgggcagaggtggagaccatctccaaggaactggagcttttggacagagagctgtgccagctgctgctggagggcctggagggggtgctgcgggaccagctggccctgcgagccttggaggaggcgctggagcagggccagagccttgggccggtggagcccctggacggtccagcaggtgctgtcctggagtgcctggtgttgtcctccggaatgctggtgccggaactcgctatccctgttgtctacctgctgggggcactgaccatgctgagtgaaacgcagcacaagctgctggcggaggcgctggagtcgcagaccctgttggggccgctcgagctggtgggcagcctcttggagcagagtgccccgtggcaggagcgcagcaccatgtccctgccccccgggctcctggggaacagctggggcgaaggagcaccggcctgggtcttgctggacgagtgtggcctagagctgggggaggacactccccacgtgtgctgggagccgcaggcccagggccgcatgtgtgcactctacgcctccctggcactgctatcaggactgagccaggagccccactagcctgtgcccgggcatggcctggcagctctccagcagggcagagtgtttgcccaccagctgctagccctaggaaggccaggagcccagtagccatgtggccagtctaccatggggcccaggagttggggaaacacaataaaggtggcatacgaaggaaaaaaaaaaaaaaaaaaaaaccaaaaaaaaaaaaaaaaaaaaaaaaaaaaaaaaaaaaaaaaaaaaaaaaaaaaaaaa

SEQ ID NO: 723 - DNA, 1457 bp, Homo sapiens
gccgtgcgtgagcgtgcgcgggcgcgtcggccggcgagggagcagcaaacggccggcggcgggtgccgcgcggggggcgggcggcgcggagtaggtggcggcggccatggccgaggcgtcgccgcatcccggacggtacttctgccactgctgctccgtggagatcgtcccgcgcctgccggattatatctgtccaagatgcgagtctggttttatcgaggagcttccggaagagaccaggagcacagaaaatggttctgccccctccacagctcccacagaccagagccggccaccgttggagcacgtggaccagcacctgttcacgctgccgcagggctacggacagtttgctttcggcatcttcgatgacagcttcgagatccccacgttccctcctggggcgcaggctgacgacggcagggaccctgagagccggcgggagagagaccatccgtcccggcaccggtacggcgcccgacagccccgcgcccgcctcaccacgcggcgggccaccggccggcacgaaggcgtccccacgctggaagggatcatccagcagctcgtcaacggcatcatcacgcccgccaccatccccagcctgggcccctggggagtcctgcactcaaaccctatggactacgcctggggggccaacggcctggatgccatcatcacacagctcctcaatcagtttgaaaacacaggccccccaccggcagataaagagaaaatccaggccctccccaccgtccccgtcactgaggagcacgtaggctccgggctcgagtgccctgtgtgcaaggacgactacgcgctgggtgagcgtgtgcggcagctgccctgcaaccacctgttccacgacggctgcatcgtgccctggctggagcagcacgacagctgccccgtctgccgaaaaagcctcacgggacagaacacggccacgaacccccctggcctcactggggtgagcttctcctcctcgtcgtcatcgtcctcctccagctcgcccagcaacgagaacgccacatggtcccctctggggcgtccccagcctccccgtcctctgtctaacctcaccctctaaacgttcagcggtggaaagatttttataattttaaattattactgctttgaaataaacggacgtttgagctcacgtggcggccatgcatggtttgtggcggaagacggggcccagcggctcccccagcgctgaagcacggggttcagcggctcccccagtgctgcaggtgccgccaggacgggccacgtgggcccccagcctccccctcggccgcctccacgacccggagtaggggggctcgggaccatgaggatgaccagcaaaattcaagaacaaaactgctccaacagacttttttaaaggaaaaaatatgtgtatcttgaaagctatttaaaatacactacttacaaagagaaaaaaaaaaaaaaaa

SEQ ID NO: 724 - DNA, 1658 bp, Homo sapiens
gccgtgcgtgagcgtgcgcgggcgcgtcggccggcgagggagcagcaaacggccggcggcgggtgccgcgcggggggcgggcggcgcggagtaggtggcggcggccatggccgaggcgtcgccgcatcccggacggtacttctgccactgctgctccgtggagatcgtcccgcgcctgccggattatatctgtccaagatgcgagtctggttttatcgaggagcttccggaagagaccaggagcacagaaaatggttctgccccctccacagctcccacagaccagagccggccaccgttggagcacgtggaccagcacctgttcacgctgccgcagggctacggacagtttgctttcggcatcttcgatgacagcttcgagatccccacgttccctcctggggcgcaggctgacgacggcagggaccctgagagccggcgggagagagaccatccgtcccggcaccggtacggcgcccgacagccccgcgcccgcctcaccacgcggcgggccaccggccggcacgaaggcgtccccacgctggaagggatcatccagcagctcgtcaacggcatcatcacgcccgccaccatccccagcctgggcccctggggagtcctgcactcaaaccctatggactacgcctggggggccaacggcctggatgccatcatcacacagctcctcaatcagtttgaaaacacaggccccccaccggcagataaagagaaaatccaggccctccccaccgtccccgtcactgaggagcacgtaggctccgggctcgagtgccctgtgtgcaaggacgactacgcgctgggtgagcgtgtgcggcagctgccctgcaaccacctgttccacgacggctgcatcgtgccctggctggagcagcacgacagctgccccgtctgccgaaaaagcctcacgggacagaacacggccacgaacccccctggcctcactggggtgagcttctcctcctcgtcgtcatcgtcctcctccagctcgcccagcaacgagaacgccacaagcaactcgtgagcccacgtcggccgtcgggaaagcacggggcctttcccacccaccctcagccagcgccacacggcacccacagactgggtgccccggcggcgccacgcttggctggtcagcgctgcaggtcccgcctgttccagggcaggacccgggcccggcccaccggccccctggcttgggaaggcgtgggccacatggtcccctctggggcgtccccagcctccccgtcctctgtctaacctcaccctctaaacgttcagcggtggaaagatttttataattttaaattattactgctttgaaataaacggacgtttgagctcacgtggcggccatgcatggtttgtggcggaagacggggcccagcggctcccccagcgctgaagcacggggttcagcggctcccccagtgctgcaggtgccgccaggacgggccacgtgggcccccagcctccccctcggccgcctccacgacccggagtaggggggctcgggaccatgaggatgaccagcaaaattcaagaacaaaactgctccaacagacttttttaaaggaaaaaatatgtgtatcttgaaagctatttaaaatacactacttacaaagagaaaaaaaaaaaaaaaa

SEQ ID NO: 725 - DNA, 787 bp, Homo sapiens
ggaagctctgagtcactgaatagcaaagaaaaatatgaaagcaagaggaattgctttcacatctagaaaatgttgcaagataatctgaaatcttctggtgctggtgaatgcatgaagaggttcacagtatcttttaaagtacttctgaaaagataaggagtttaaaaggtgggtgtgtacactggcactgagctgcagtaggatttttccttggatagtctggtctggagctgggacagcagctgctgctgtggaaaggccagctggcaagatgatggaagaaatctccattatggtagcctatgacgcccatgttttcagccagctgcacgatgaagacttcctcactagtctggtggccatcagcaagcccaggtctatggtaccaaccaagaagctgaagaaatatgagaaagaatatcagacaatgcgagagagtcagctgcaacaggaagacccaatggatagatacaagtttgtatatttgtaggtaactccagctgttgcatttatactgggaatcttcataagaagctgagagaaagagaggggaaaaagaaagtggctttctactttcaaaaatgaaacaaaaaggaaaaatggcaaagtactgttttagctgtgcatgtcatatccacaaagacttttagcaggtgaactgttccaagactgacacaaggatgtttcaaacttgcctctgtctgtagaaaatgttaaaaataccaactcacttggaaggaaaaataaaaatcacaaaggtatattgagcacagtaaaaaaaaaaaaa

SEQ ID NO: 726 - DNA, 2940 bp, Homo sapiens
gcggcccttctcccctcccctctcagttccctccgccctcctcgggctccagcggtggcggagcgaacgggaccggcccggcttcagagcgcgaggtggagggtggaacgcgggcgcctgaaggagttgttgtctcggcagcgcccgcggagacgtgaagaggtggttgtgggaagagaagtttgcagaactgaaatggaggtcagagcttcattacagaaggttagtggatcatctgattctgtggctacaatgaacagtgaagaatttgttttggttcctcagtatgcagatgataattctacaaaacatgaagaaaaacctcaactgaagatagtttctaatggtgatgaacaattggaaaaagccatggaagagattttgagagattccgagaaaaggccaagcagtcttcttgttgattgtcaaagttccagtgagatttcagaccattcgtttggagatattccagccagccaaacaaataagccatctcttcagttaattttggatccgtctaacacagaaatttctacacccagaccatcttctccaggtggactacctgaagaagatagtgttttatttaataaactgacctacttaggatgtatgaaggtttcttccccacgtaatgaagtagaggctttacgggcaatggcaaccatgaaatcttccagtcaatacccctttcctgttaccctgtatgtaccaaatgttccagaaggttctgtgagaattatagaccaatccagcaatgtggagatagcatcttttccaatctataaggtgttattctgtgcacgtggacatgacggaacaacagagagcaattgctttgcatttacagagagttcccatggttcggaagaatttcagatacatgttttctcctgtgaaattaaagaggcagtaagcagaattttgtacagtttctgtacagcattcaaacgttcttccagacaagtgtctgatgttaaagactcagttattcctacccccgacagtgatgtgtttaccttcagtgtctccttggaggtaaaagaagacgatggaaaaggaaactttagccctgtgcctaaggatagagataaattttatttcaaattaaagcaaggaatagagaagaaggttgtgattacagtgcagcaactttctaacaaagaattagctattgaaagatgttttggaatgttattaagcccaggtcgaaacgtgaagaacagtgacatgcatttactggatatggaatccatgggaaagagctatgatgggagagcttatgtcatcactggcatgtggaaccccaatgcaccagtatttctggcacttaacgaggaaaccccaaaagataagcaagtatacatgactgtggcagtggatatggtagtcacagaggtggtggagcctgttcgctttctcctggagacagtagtccgtgtgtaccctgcaaatgagcgattttggtatttcagcagaaagactttcacagagactttcttcatgagattgaaacagtctgagggaaaaggccataccaatgctggagatgcaatatatgaggtggtgagtctacagcgagagtctgacaaggaggaaccagtcactcctactagtggagggggtccaatgtcaccccaggatgatgaagcagaagaggagagtgataatgaactctcaagtggaacaggtgatgtgtctaaggattgtcctgagaagatcctgtattcttggggagagttgctaggaaaatggcacagtaaccttggtgcacgaccgaaagggctgtctactctggtgaagagtggtgtccctgaagcattgagggcagaggtatggcagttattggcaggctgccatgacaaccaggcaatgctggatagataccgaattcttatcacaaaggactcagcccaggagagtgttattactcgagatattcatcgtacatttcccgcacatgattactttaaagatactggaggagatggtcaagaatcgctctataagatctgcaaggcctactctgtgtatgatgaagacattgggtactgtcaagggcagtcttttcttgctgctgtattactgctgcatatgccagaggaacaagcattctgtgttttggtgaaaatcatgtacgactatggtttgagagacctctacagaaacaacttcgaagatcttcattgcaaattctaccagttggagagactaatgcaggaacagctaccggacctgcatagccatttttctgatctgaacctggaagctcatatgtatgcatcccagtggtttctcactctttttactgccaagttcccactctgcatggtgttccacatcattgacttactgctttgtgagggtttgaacataatctttcatgtagctttggctctcctaaagacctcaaaggaagaccttctgcaggctgattttgaaggtgctttaaagttctttagagttcagcttccaaagagatacagggcagaggaaaatgcaagaagactgatggagcaggcttgcaatattaaagtaccaaccaagaagctgaagaaatatgagaaagaatatcagacaatgcgagagagtcagctgcaacaggaagacccaatggatagatacaagtttgtatatttgtaggtaactccagctgttgcatttatactgggaatcttcataagaagctgagagaaagagaggggaaaaagaaagtggctttctactttcaaaaatgaaacaaaaaggaaaaatggcaaagtactgttttagctgtgcatgtcatatccacaaagacttttagcaggtgaactgttccaagactgacacaaggatgtttcaaacttgcctctgtctgtagaaaatgttaaaaataccaactcacttggaaggaaaaataaaaatcacaaaggtatattgagcacagtaaaaaaaaaaaaa

SEQ ID NO: 727 - DNA, 541 bp, Homo sapiens
agttgttgttggttgggggccttttggccggtgacggagactgcccaggtgtggtcaccatgttcctctccgcggtcttctttgccaagagcaagtcaaaaaacattctggtgagaatggtgagcgaagctgggacaggtttctgcttcaacaccaagagaaaccgactgcgggaaaaactgactcttttgcattatgatccagttgtgaaacaaagagtcctcttcgtggaaaagaaaaaaatacgctccctttaaacggtggattgaaaatgactttgatttataaagagaagactgagggcggggatactgattcagaaatcctgtagcgtgtaataaaagaagaggaaatggcatggaatcactgcctcctgtgatttgaaggccattgtgaaggaaaacaatgcagtgaaagaaagttcttcatattaggacagatatcattgcatcacatttatttatctttctgggtatttttatagcccttaataaaaaatattaaaatcgaaaaaaaaaaaaaaaaaaaaaaaaaaaaaaaa

SEQ ID NO: 728 - DNA, 434 bp, Homo sapiens
agttgttgttggttgggggccttttggccggtgacggagactgcccaggtgtggtcaccatgttcctctccgcggtcttctttgccaagagcaagtcaaatgaaacaaagagtcctcttcgtggaaaagaaaaaaatacgctccctttaaacggtggattgaaaatgactttgatttataaagagaagactgagggcggggatactgattcagaaatcctgtagcgtgtaataaaagaagaggaaatggcatggaatcactgcctcctgtgatttgaaggccattgtgaaggaaaacaatgcagtgaaagaaagttcttcatattaggacagatatcattgcatcacatttatttatctttctgggtatttttatagcccttaataaaaaatattaaaatcgaaaaaaaaaaaaaaaaaaaaaaaaaaaaaaaa

SEQ ID NO: 729 - DNA, 5494 bp, Homo sapiens
gtgactcattgtgtctgtgtcgaggcgtcgggagggcctaagtccgtgtgcggtgcccttcggccggcctgagccccagagtcagctcccctttctcgcccagcgcccccaggccgctcccggggctcacggaatagtaaagaaacacatcataaaacctcccaggacataaaggtgagcacagaccctgtttggatcaagtcagttcctggagcctgaatgatgactgctgaatcacgggaagccacgggtctgtccccacaggctgcacaggagaaggatggtatcgtaatagtgaaggtggaagaggaagatgaggaagaccacatgtgggggcaggattccaccctacaggacacgcctcctccagacccagagatattccgccaacgcttcaggcgcttctgttaccagaacacttttgggccccgagaggctctcagtcggctgaaggaactttgtcatcagtggctgcggccagaaataaacaccaaggaacagatcctggagcttctggtgctagagcagtttctttccatcctgcccaaggagctccaggtctggctgcaggaataccgccccgatagtggagaggaggccgtgacccttctagaagacttggagcttgatttatcaggacaacaggtcccaggtcaagttcatggacctgagatgctcgcaagggggatggtgcctctggatccagttcaggagtcctcgagctttgaccttcatcacgaggccacccagtcccacttcaaacattcgtctcggaaaccccgcctcttacagtcacgagctcttcctgctgcccacattcctgcaccccctcatgagggtagtcccagagaccaggcgatggcatctgcactattcacagcggattcccaggcaatggtgaagatcgaggacatggctgtgtccctcattctggaggaatggggatgtcagaatctggctcggaggaatctcagtagggacaacaggcaggagaattatgggagcgcatttccccagggtggtgaaaacaggaatgagaacgaggagtcaacctcaaaggctgaaacctcggaagattcagcatcacgcggggagacaacaggaagatcccagaaagagtttggagagaaacgtgaccaggagggcaaaacaggagaaagacagcagaaaaaccctgaggagaaaaccaggaaagagaaaagagattcagggccagctataggaaaggacaaaaaaaccatcacaggagagagaggtccaagggagaaggggaaaggattgggaagaagcttcagtctgagctccaacttcaccacccctgaagaagttcccacgggaacaaagtctcacagatgtgatgaatgtggtaaatgcttcacgagaagttcaagccttatccgccataaaataatccacactggagaaaagccctatgaatgtagtgagtgtgggaaagccttcagtcttaactccaaccttgtcctgcatcagaggatccacacaggagagaaacctcatgaatgtaacgagtgtggcaaggccttcagccacagttccaatctcatcctccatcagcgcatccactctggagagaaaccttatgaatgtaatgagtgcgggaaggccttcagccagagctcggacctcaccaagcatcagagaattcacacgggggagaaaccctatgaatgtagtgaatgtggaaaagctttcaaccgaaactcatacctgattttgcatcggagaattcacactcgagaaaagccctacaagtgcactaagtgtggcaaggccttcacccgcagctccaccctcactctgcatcacagaatccatgccagagagagagcctctgagtacagcccagcctcccttgatgcatttggcgcgttcctgaaaagttgtgtgtaaaggaagaatttgccatcaagccatttcccccttttgtttctaaaattatttcagagatgtgtgctcctggagggaaaaagaaatacagcctcaacagattaaaaaacaaaagtcacacttaaggatccttctagtcacatcagcagtgttctgcctttatgtagtagttgggcatataatccttccacacagcccctgcagggaaaggctaatcttacggataatccacgtgagatttccacacaagagaaaagcacacgcatagtgaaatgtcagtcttttcagtaatgaggatacctttaaggcactcttggactctcggcaaccacaacataatagttgaaagatcaagattggctccacgaaagtgatacggaggttaggatgctacttgctgcaaacaagccctactttggccaacatcctgcttatttctcaaaaaagagggacagtgaaaacaaaaacgacattgggacatgctgctcaaggtagttatatatacgataagttgtatatatgatcactggtagcctaccaaagctgtagaaatctaggactgtgctaatcagtatcaaaccaaagatttctatctcttcccgaaagagagggtatgtgcaccagtctacagttccaaaggactgcaacaaatgtagatggttctgtcctcatccctgagatcagttctactgaaatggcaacaacaactccaaatacatctctcccttcttgaaatccctaaagcactatcgcactcctaaatgcatttctccacaagttagcacttgattgtatactgtcttttaatccttcattgtttcatgtatgaagtttttaatcaccccctaacccccaaaaaagattcggttgtcaagggatatatttctatccctgccagcacagtgctggacatagtgagtactgaacacctaagaggcactcattcagactgacttctacaggacttctacgtgtgtgataaaagcctgtgaatcgtgagtccctgaaatatggtagcctggcccagcttctaaagaggaccttcgtagccacaaggcatgctaaacctctagggtctgatgctgtttttgttccaaatataaacgaaaggcactagtcagccgcctgcatagactttctaaacagtgagtaaataccatggaatgtcagaaatgactttatcatcgtcatcttgaagaaaaatatgaacactgatgaaggtcattttttttttttgacatctttctgtggcaaagctcttagaattctttgcagttagctgctgaacagtatgatgatttggggattttctgaatcatttgtacttagatactggagttcagaagatgtgatttttgttgcttttcagaaaaaggaacgtggtagggagtgttttttcccacgcttttccagtaactttgcaaaagcattaattgttcactggcaattactaaatgtattttgttgctctgagaaactcagcagtgtactgagatgtggctggctgtgccatcgtcatagtgcacagtgacttttctgtttcttatcactaaagactgaggtgaggttatgaaactttcattggtcccatcgttgtgcgcagggtgcaactggctacctagaagctgatggcaggagactgtttcacacacaggagattgtgagctgtgtaagtagtcatcgccactcaagtaggacaagggtcctacccaaggctaggaccgccctgcggaaacagaaacatagactgagaacaaacctcaagactatcagtgtgacctccccataacaagagaaccccatatatagtttgagactttcccttgagaaacttatactaaaactattactcatcagtcattcactgatcagcagctaaagtccatgagaccaaatggttttatatggaaccaacgaagtgggagctaaaactgcacagtggtcattctttggcctctccttggctttatgacttaaaccaactacaacttccctatagcttctaagcagtttcatcagcattacttgggaaaacgtgttgcaagtcaaccagtcactaggatatttctacccatgcaacggaagaaaaacccattactccagaagagtatatctaagtaactaaaatggaggcagaaaatgttttaaggattttcttcaaagaataagccacagcaatggttttgtagaaaactcctgtgcttttgagcaaggacttttgccctctagaaagcaactgaggccaggtgcggtggctcacgcctgtaatcccagcactttgggaggccgaggtgagcggatcacctgaggtcaggagttttgagaccagcctggccaacatggtaaaatcccgtctctactaaaattataaaaattagccgggcatgatggtgggcacctgtaatcccagctacttgggaggctgaggcaggagaatcacttgaacccaggaggcagaggttgcagtgagccaagattgcacactgcactccagcctgggtgactagcaaaactccatctcaaaaaaaaaaaaaagaaagaaagaaactgaaaagtgaggtgtggaactccaggcaacgacccaagcacttattttttaagagggaaaggactttggtcatgtttacattggcctttggtttttttttttctttcagccacaactatatgctgatataactcagccatcacttttgagttttgtttttaaatgaaggttaaatgtgacctgtgccctcacatttaattccgtttcatggagacatcttcctgactttgttggatagctgccactagggttgcttcgatcttcagccacatgctgtccttgaagcagctatttgaagatgtgttttctgaggaaaacaggctacaactgtttattaaaaccacttgcagtgcattcgtttatcagatgctcagtgcaaagtgtaattgggtcatggtcaaaaacgcttgcaacatctaattggcgttcaagatagtcattcaaaagttcttggcccgctgaagtctgttaacagttgaaacattctacagttaaccattagcatgctagttgtcctaatggaaatttttgaagagtttttcaatatataccctacccttgccaggaagagaagtaaaatcctcaggttgtggggtatttgtttctactccagcctggcaggcaaggctaaaacctgagattatcgatctatgagacatcttgatatgtaaagcacttaatattaaaggcataaaagtgaaactgctaaatatgtatagagaggttgacgtgtgatacgtgggacagttcacatagacatcagagaatttattccagaaaggagcctcctgaatgtgatgaatacggcaaagcctttaatcacatctcagcccttagcatcggaaagcttatactgtaaataaacttgatgaatattatatgtgaggaaaactttcatgtatagcactcattgcttcagacagaaaatgaattccgtcggtatgttccaatcgtgatgaatttgagaaacattgcaagagggagctcaatcttggccgggcgccgtggctcacgcctgtaatcgcagcactttgggag

SEQ ID NO: 730 - DNA, 5814 bp, Homo sapiens
gcgtgaggccgagggaggggcggcggcgcgagcggcggcggcggcggttccagcatgaagaggagagctggcctggggggcagcatgaggtcagtggtgggcttcttgtcccagcggggcttgcatggggaccccctgctcactcaggactttcagaggagacgcctgcggggctgcagaaacctctacaagaaggacctcctcggccacttcggctgtgtcaatgccattgaattctccaacaatggaggccagtggctggtctcaggaggagatgaccgccgggttctgctatggcacatggaacaagccatccactccagggtcaagcccatacagctgaaaggagagcaccattccaacattttttgcctggctttcaacagtgggaacactaaagtgttctctggaggcaatgatgagcaagttatcctccatgatgttgaaagcagtgagacattggacgtgtttgctcatgaagatgcagtatatggcttgtctgtgagcccagtgaatgacaacatttttgccagttcctcagatgatggccgggttctcatttgggacattcgggaatccccccatggagagcccttctgcctggcaaactatccatcagcctttcatagtgtcatgtttaaccctgtggagcccaggttgttggccacagccaattcaaaggaaggagtgggactctgggacattcgaaaacctcagagttctctcctgcgctatggtggaaacctgtccctccaaagtgccatgagtgtacgattcaacagcaacgggacccagctcctggccctgaggcgacgcctgccccctgtgctctatgacatccattcccgcctgcctgtgtttcagtttgacaatcagggttacttcaactcatgcaccatgaaaagctgctgttttgcaggagatcgtgaccagtatatcctttcgggctctgatgacttcaacctgtacatgtggagaattcctgcagatccagaagcaggtggcattggtagggtggtcaacggagccttcatggtgctgaaagggcatcgatctattgttaaccaagtccgatttaatccccacacctacatgatctgctcttctggtgtagaaaagattatcaagatctggagcccatacaagcagccaggatgtactggagacctcgacggtcggattgaggacgattcccgctgcctctatacccatgaagagtacatcagccttgtgctgaacagtgggagtggcctgtcgcatgactacgccaaccagtcggtccaggaagacccccggatgatggccttctttgactcactggtacgccgagagatcgagggctggagctctgactcagacagtgacctcagtgagagtactatcctccaactgcacgctggggtcagcgagcgctcaggctacactgactcagagtcttcggcctcattgcctcgctccccgcctcccacagtagatgagtctgccgacaacgccttccacctggggcccctgcgggtcaccaccacaaacacagtagcctcaactccaccaacacccacgtgtgaggatgcagcctctcgccagcagcgtctgtctgctctgcggcgctaccaagacaaacgcctcctggccctttccaatgagtccgattctgaggagaatgtctgtgaggtggaactagacacagatctctttccccggccacggtcacccagccccgaagatgaatccagcagttccagcagctctagcagctctgaggatgaggaggagctgaatgaacgccgagcctctacctggcagcggaatgccatgcggcgccgacagaagacaacccgagaagacaagcccagtgccccaatcaagcccaccaacacttacattggagaagacaactatgattacccccagatcaaagtggatgacctctcctcctccccaacctcgtcccctgagcggagcacttccacgctagagattcaaccaagccgggcatcaccaacttctgacatagaatcagttgagcgaaaaatttataaagcttacaagtggctccgctactcttatatctcctactcaaataacaaagatggagagacctccttggtgactggggaggcagatgaagggagagcaggaaccagccacaaagacaacccagccccttcttccagtaaggaagcctgtctaaacatagcaatggcccagaggaaccaggacctgccacctgaaggctgcagcaaggacacttttaaagaagagactcctagaactcccagcaatggcccaggccatgagcacagcagccatgcttgggcagaggtgccagagggtacctctcaggacactggcaatagcggctctgtagagcacccttttgaaaccaagaagctcaatggaaaggccctgagcagtcgggctgaggagccgccttctcctcctgtccccaaggcatctggctccactctcaacagcgggtctggcaactgtcccaggacccagtctgatgacagtgaggagaggagcctcgaaaccatctgtgccaaccacaacaatggacgcttacaccctcgtccccctcaccctcacaataacgggcagaacttgggggagctggaggtggtggcctactcttccccaggacactcagacactgaccgtgataactcgtccctgacagggacactcctacacaaagattgttgcgggtctgaaatggcctgtgagacccccaatgctggaacaagagaggaccccactgacaccccagccacagatagtagcagggctgttcatggccacagtggcctcaaaaggcaacgaattgaattggaagatacagattcagagaattcctcctcagagaagaaattaaaaacatgataaatacaaagggaaaacaaaaagctacaaaagtagccttacaaaaaaaaaaaattgtttagtgaatacagaggaaaggaaaaacaagtattaaaggcacatgaaaccagggcctgaaattttgtgtctgatgctgctcccttctatccaacattcaacaacgggtctgaatgtctagctggccattggcttgtgctgtgttaagaaaggggaaaaaaaaataacccaagtgactcctttctagtgagacgtgagcgtagtgtgccgcgcaaggctctgtggaagtaaatctttgttgagacgttcgacttgttcttgtgtacgcacaatggcacgtgtgcgcttattgtctcataagaccttccttttagttctccatcagaaaggacctatgaatttgtactttttgccatctcaccctgtttacatgccataggtgttctggtctggatgatgggtgcctgttaaatcaggttgtgctgccagtgagttgtagatttatgctggaagaatggagaatggaaacaggccttcagcccattggctgcgctggagaggaaagcatggttcctttcttaaagaaatcttccatgttttctctaagtaacacttctttattgagcatttaatgtggacatactataaaaaagaatttttaatgctaatgagaggtttagcacttaagatcagattcaagagaatatagattcctgataaatttcactgtttgcaaattgagcagtgctgcaacatgtactgtatgaaggccataaaatagagctagtcatggataacagactttaaccagttaggtgctagatcctaagaggcactcacaaggccagcaggtgcttccttggctcccatgatcgatcgaggcatagtgaaagaagggcaaagacagctttccagagctttgtgctcaggctactaaagtagttgttataggtgtgttaacgaagaagcttagtgaggagcagaatgtggtactatattcatttaactcaacccagaaccattggtcagaattggtgggactggcatcttccctcagacttgcagttgatagaggctgtggtgttctcactagactttgcagagcagtaggcatctcaaggtaacagattcttattgagtaggtctattaggagtcagaaggtgttggggaggagtctctggcttatgactcctggttcccattagtcttaagtcttctggttcccataaaagactcagttttattgaggtagatacaggtttagaagagaaaagagcaacagattttcagcgttgcagtcactcggttatctatgaagggttgtgcaaaacaggaaggtctgggaatgaccagatatcttgttggcataaatgttatgaaaaggcagaatactggcaagaaatgaggaagagagagaaaaacaatataactttcttgagtgcaaaggtgctagacaactaggagcccagctgggattggtgtagggagggccgaacgctgactagtgtggcctcactgccccaggcttcctttcagaggaaggcctgtcctgctggaactggagccaaggggaggctgcctatgaaggcagaagatgtggatgaattcaggcactgggggtgggggggttatttataaacacaaggtggttggtttaagccaaaaggagataccatcctgataagctctgtgaaagagaagatgtgcctggtgtgtgtaatgcggctggggtatgaaaacactgagaaggagatgaaggagtgtgtgtagcatgggggtgtgtacaacttaacacctggacttttactgggggagtgggaaagtgattctgtaaccaacattagaattactttggatttgtaatcagattggttctatgatttgtctttgactattcacagataattgtaaatgctggttttataagcccaagtcattttacatttgcttttccaaaatgtattaaattggaatttttttaatcctttatatacaaaaaaatacgatcactcagtgtgtgtttctcttccccttcttagtcagcacacccagtcctttattttattctattctatttattttattttaataagtacttagcctcttctgacttctcaaaggacaatcggatacatatcttcctgaaaagaagtagttaaagttcccttgggaactagctacttggtagttacaattcccaaatgcagaacttggtcttttcatgttaaaagccttaatctcatttgggtactcaaaagagaaatcagagtttattctggttaacttgagaagccaagaaagatcatttttagcaagtatgccttccatccttggcagaggcttcccagcatcctaggctcagcttaccgggtgataggccccataagacacacacatgagcagggtgagaaatgcttgctttatagctgctccaccctcatctccagagattttgtgtctatggttgtgggtctggaaacctggcaggaaccacttctagagtacctttgcctaaactcttttagaattgaggccccaactttgatggcacatttaatacccaatttcttccataatagatatttttaatagcaggacagatggcactgattagatcaagaactatttggaagtgcctcttatgtttttttcctgcattctgtacataaagttttaagtggcaggtccagatatgtaaaatcatttctctctattttccagctggttttgttaatgattctctaggacagcaggtaaatgagttaagttgttggcttggggcaagtgaagtttgtgactatgcttgatttaataagctgagagtctcttgtttgtctgtcaaggtgccttcctctgctgaagccttacctccttctcacccagtaacggttaactcttctcttgtgtatatgcaaataaacctattattcact

SEQ ID NO: 731 - DNA, 4693 bp, Homo sapiens
ggactgcgggataggaagctggggatatggacaagcagcagcgttatagcgctctgggtttcgggacataggcctgggccatgcggcccccttggccccttggcgcgacccccaggaacgttcggaaagctggtcctcgtggctgggggaaaggcggggggtgggggggaagcgggcacgtgaccccggtcagccaatctgggtgctgctgacgtggccgcgcggccccgatgctctccccacccccccagcccgttccggaagggaggggctgggggctacgccccctcccccagcacggcttcgttttctgggggggggttgacaccccggattacataccccgtaccaagccgagggcaactttggaggccccctggaaggctttaggatccagattcttcgctgctgctgccttaccgccgagaaccaccacccgccaggcgtcttgcggccacacccctggcgggttcaggcaggctacgcccacgcgacccctcccgtttccctgctttggccaatggaggagctacgaatggcacgacctgctcgagcttggcagtctccagttgggctgtgcatggaagcttgggaagactttgttggaaggggaggcggggagagagtgctggaggctctggggcgatggcttccgcacctcttccaaccaccctctttccctggagtcggcggaccacagctcagccaattggcttggagatgtggcgggttgccacttccctgtgggtctctgcggcactcttctgcctggtgactgacaccttggaaatgaagtttatgacgtcatcgctgcggctggccaatagaaaaagctcccgcggagaggtgttccttccccttcgactcagcttcttcacccgcgtgagcgagcgcgcgcgcgcggagggggtggggaaaatctcaagcagggtggcgcgcatgagcggcgaagctcctcctccccgcctatatataaagggctggcgcggggctcggcggcgccatttcgtgctggagtggagcagcctctagaacgagctggaggattctgcctaccgatacagagccttcgagtcgtccggggccgccattacaatccacctccatccgcttggaaatggccttcgtcccggcctatgactggtcccagcgggcagtacagaccccctagaagcccctggagctcccctttttcgggccccgcccaatcctcggagtctgtccaccccctctactccgccctcaagaggatttcaaagatggaggcggcggctccctaaaccacttttcgtgttcatccgcctccatccgagatcgaaacgggacctcgtcggccccgtaggggcccgacaagaagagggaatccctgcagaccaacagcgggctatattgacgacggtgtctgagatcggggaccgtcttttgaagagtcagtccctccttagttgcccgcctcagctgaggccgccgccattttcttgctgtccgccgtctgcagagcgcgccaagctgcccggagctctccgagaggccccaaagagactgctttcgtgccggccaggcagggggtttgtcgcctggaggcccaagaggaacggcctccccccaacttagcgggttatgctggaccgggcggtgagggaaaccgaggccacccggactttccgcggctgagggcagcgccggttccttgcggtcaagatgctgcaaaacgtgactccccacaataagctccctggggaagggaatgcagggttgctggggctgggcccagaagcagcagcaccagggaaaaggattcgaaaaccctctctcttgtatgagggctttgagagccccacaatggcttcggtgcctgctttgcaacttacccctgccaacccaccacccccggaggtgtccaatcccaaaaagccaggacgagttaccaaccagctgcaatacctacacaaggtagtgatgaaggctctgtggaaacatcagttcgcatggccattccggcagcctgtggatgctgtcaaactgggtctaccggattatcacaaaattataaaacagcctatggacatgggtactattaagaggagacttgaaaacaattattattgggctgcttcagagtgtatgcaagattttaataccatgttcaccaactgttacatttacaacaagcccactgatgatattgtcctaatggcacaaacgctggaaaagatattcctacagaaggttgcatcaatgccacaagaagaacaagagctggtagtgaccatccctaagaacagccacaagaagggggccaagttggcagcgctccagggcagtgttaccagtgcccatcaggtgcctgccgtctcttctgtgtcacacacagccctgtatactcctccacctgagatacctaccactgtcctcaacattccccacccatcagtcatttcctctccacttctcaagtccttgcactctgctggacccccgctccttgctgttactgcagctcctccagcccagccccttgccaagaaaaaaggcgtaaagcggaaagcagatactaccacccctacacctacagccatcttggctcctggttctccagctagccctcctgggagtcttgagcctaaggcagcacggcttccccctatgcgtagagagagtggtcgccccatcaagcccccacgcaaagacttgcctgactctcagcaacaacaccagagctctaagaaaggaaagctttcagaacagttaaaacattgcaatggcattttgaaggagttactctctaagaagcatgctgcctatgcttggcctttctataaaccagtggatgcttctgcacttggcctgcatgactaccatgacatcattaagcaccccatggacctcagcactgtcaagcggaagatggagaaccgtgattaccgggatgcacaggagtttgctgctgatgtacggcttatgttctccaactgctataagtacaatcccccagatcacgatgttgtggcaatggcacgaaagctacaggatgtatttgagttccgttatgccaagatgccagatgaaccactagaaccagggcctttaccagtctctactgccatgccccctggcttggccaaatcgtcttcagagtcctccagtgaggaaagtagcagtgagagctcctctgaggaagaggaggaggaagatgaggaggacgaggaggaagaagagagtgaaagctcagactcagaggaagaaagggctcatcgcttagcagaactacaggaacagcttcgggcagtacatgaacaactggctgctctgtcccagggtccaatatccaagcccaagaggaaaagagagaaaaaagagaaaaagaagaaacggaaggcagagaagcatcgaggccgagctggggccgatgaagatgacaaggggcctagggcaccccgcccacctcaacctaagaagtccaagaaagcaagtggcagtgggggtggcagtgctgctttaggcccttctggctttggaccttctggaggaagtggcaccaagctccccaaaaaggccacaaagacagccccacctgccctgcctacaggttatgattcagaggaggaggaagagagcaggcccatgagttacgatgagaagcggcagctgagcctggacatcaacaaattacctggggagaagctgggccgagttgtgcatataatccaagccagggagccctctttacgtgattcaaacccagaagagattgagattgattttgaaacactcaagccatccacacttagagagcttgagcgctatgtcctttcctgcctacgtaagaaaccccggaagccctacaccattaagaagcctgtgggaaagacaaaggaggaactggctttggagaaaaagcgggaattagaaaagcggttacaagatgtcagcggacagctcaattctactaaaaagccccccaagaaagcgaatgagaaaacagagtcatcctctgcacagcaagtagcagtgtcacgccttagcgcttccagctccagctcagattccagctcctcctcttcctcgtcgtcgtcttcagacaccagtgattcagactcaggctaaggggtcaggccagatggggcaggaaggctccgcaggaccggacccctagaccaccctgccccacctgccccttccccctttgctgtgacacttcttcatctcacccccccccgcccccctctaggagagctggctctgcagtgggggagggatgcagggacatttactgaaggagggacatggacaaaacaacattgaattcccagccccattggggagtgatctcttggacacagagcccccattcaaaatggggcagggcaagggtgggagtgtgcaaagccctgatctggagttacctgaggccatagctgccctattcacttctaagggccctgttttgagattgtttgttctaatttattttaagctaggtaaggctggggggagggtggggccgtggtcccctcagcctccatggggagggaagaagggggagctctttttttacgttgatttttttttttctactctgttttccctttttccttccgctccatttggggccctgggggtttcagtcatctccccatttggtcccctggactgtctttgttgattctaacttgtaaataaagaaaatatt

SEQ ID NO: 732 - DNA, 904 bp, Homo sapiens
cctcaggggggccagattgcgatcgcgatgaggcttcggaaccagctccagtcagtgtacaagatggacccgctacggaacgaggaggaggttcgagtgaagatcaaagacttgaatgaacacattgtttgctgcctatgcgccggctacttcgtggatgccaccaccatcacagagtgtcttcatactttctgcaagagttgtattgtgaagtacctccaaactagcaagtactgccccatgtgcaacattaagatccacgagacacagccactgctcaacctcaaactggaccgggtcatgcaggacatcgtgtataagctggtgcctggcttgcaagacagtgaagagaaacggattcgggaattctaccagtcccgaggtttggaccgggtcacccagcccactggggaagagccagcactgagcaacctcggcctccccttcagcagctttgaccactctaaagcccactactatcgctatgatgagcagttgaacctgtgcctggagcggctgagttctggcaaagacaagaataaaagcgtcctgcagaacaagtatgtccgatgttctgttagagctgaggtacgccatctccggagggtcctgtgtcaccgcttgatgctaaaccctcagcatgtgcagctcctttttgacaatgaagttctccctgatcacatgacaatgaagcagatatggctctcccgctggttcggcaagccatcccctttgcttttacaatacagtgtgaaagagaagaggaggtaggggccaagcccccaccccatcccactccccttccctccccagatatttatgtgaaatgaactgcagctttattttttgaaataaaaacttttaaaaagcaaaaaaaaaaaaaaaaaaaaaaaaaaaaaaaaaa

SEQ ID NO: 733 - DNA, 456 bp, Homo sapiens
ttttgtttttcagctcacttcaagggtacctgaagcgaattggcaccaaagcagcagctgtattgccgcagttctagcttcaccttcacgatgtttcccttggtcaaaagcgcactaaatcgtctccaagttcgaagcattcagcaaacaatggcaaggcagagccaccagaaacgtacacctgattttcatgacaaatacggtaatgctgtattagctagtggagccactttctgtattgttacatggacatatgtagcaacacaagtcggaatagaatggaacctgtcccctgttggcagagttaccccaaaggaatggaggaatcagtaatcatcccagctggtgtaataatgaattgtttaaaaaacagctcataattgatgccaaattaaagcactgtgtacccattaagatatggcattattgaagaaataaagtacatttgaaaccttc

SEQ ID NO: 734 - DNA, 2277 bp, Homo sapiens
gggaaatggcggccgcgggcttggtcgctgtggcagcggctgccgagtactctggcacggtagcgtcgggaggtaacctccctggtgttcactgcggcccaagctccggggcaggccctggttttggcccgggctcgtggagccgctctctcgatcgagccctggaggaggcggcggtcactggggtgctgagcctgagcggccggaaactgagggagtttccccggggagcggccaaccacgacctgacggacaccacccgggcggacctgtcgcgaaatcgcctttcagaaattcctatagaagcatgtcactttgtttctctggaaaatctcaacttgtaccaaaattgtattcgttatattccagaggcaattttaaacctacaagctctaacattcttaaatattagtcggaaccaactgtcaacattgccggtacacttgtgtaatttgccattgaaagtcttaattgctagtaataacaaattggtgtcacttccagaagaaattggacaccttagacatttgatggaacttgatgtgagctgcaatgaaattcaaactataccttcccaaattggtaacctggaggccttgagagaccttaatgtaagaagaaatcacctagtacatttgcctgaagagctggcggagttgcctttgatacggttagacttctcatgcaataaaattaccacaatccctgtttgttatcggaacctcaggcacctacagacgatcaccctagataacaatccactacaatcacctcctgcacagatatgtataaaaggcaaagtccacatatttaaatacctgaacatacaagcttgtaagattgctccagatctgccggattatgataggagaccgttgggttttggctcctgccatgaagaactgtactcaagtcgcccttatggagcccttgattcaggcttcaatagtgtggacagtggtgataagagatggtcagggaatgaacctacagatgaattttcagatctgcctcttcgagtagcagagattactaaagaacaaagactacgaagagaaagccagtaccaagagaaccgcggcagtttggtagtaacaaacggcggagtggaacatgatctggatcagattgactacatagacagctgcaccgcagaggaagaggaggccgaggtgagacagcccaagggaccagacccagacagccttagttcacagtttatggcgtatattgaacagcggcgaatctctcatgagggttcaccagtaaagccagtagccattagggagtttcaaaaaacagaagatatgagaagatacttacatcaaaacagggttccagctgagccatcttccctcctgtcactatcagcaagtcacaatcagctgtcacacacagacctggaacttcatcagagaagggagcagttagtagagcgcactcggagagaggctcagcttgctgccctgcagtatgaggaggagaaaataaggaccaagcagatccagagagatgctgtcctggactttgtcaaacaaaaagcatcacaaagtccacaaaaacagcacccgctcctagatggcgtagatggtgagtgccccttcccatccagaaggtctcagcacactgatgatagtgccttgtgcatgtcgctgtcagggttgaatcaagtgggctgtgctgctaccctgcctcattcttctgccttcacgcctcttaagagtgatgacagacctaatgctctattaagttcacctgcaacagaaacagttcatcattcccctgcatattcttttcctgctgctatccagagaaatcagcctcagcgccctgaaagcttccttttccgagcaggtgtcagggcagaaaccaacaaaggtcatgcttcaccccttcctccatctgctgcacctaccactgattctacagattccataacaggacagaattcaagacagagagaagaagagctggaattaatagaccaactgcgtaaacatattgagtaccggttgaaagtgtctctaccttgtgatctcggagcagctctaactgacggtgttgttctttgccatttggccaatcatgtgcgacctcgatctgtcccaagcattcatgttccctcaccagctgtagtaagttgataatcctaaaaagccttggctattcatcagacatttgttaagcacagtggacagacatttcttaagcattgtgctagatattaaggatacagatataaagagtccagtctctacaaaaaaaaaaaaaaaaaaa

SEQ ID NO: 735 - DNA, 2234 bp, Homo sapiens
gcggcctttcatttccgcttccggtgcgggccgcgcgcgagcgcagcggtgggaggcggcgaccagccggttgaggccccaggcttggcctcaccacaatgtggcacgaggctcggaagcatgagcggaagcttcgaggcatgatggtcgactacaagaagagggcggagcggagacgggagtattatgaaaagatcaagaaggacccagcccagttcctgcaggtacatggccgagcttgcaaggtgcacctggattctgcagtcgccctggccgctgagagccctgttaatatgatgccctggcagggggacaccaacaacatgattgaccgattcgatgtccgtgcccacctggaccacatccccgactacaccccccctctgctcaccaccatctccccagaacaggagtcggacgaacggaagtgtaactacgagcgctacagaggcctggtgcagaacgactttgccggcatctcagaggagcagtgcctgtaccagatctacattgatgagttgtacggaggcctccagagacccagcgaagatgagaagaagaagctggcagagaagaaggcttccatcggttatacctacgaggacagcacggtggccgaggtagagaaggcggcagaaaagccagaggaggaggagtcagcggccgaggaggagagcaactcggacgaagatgaggtcatccccgacatcgacgtggaggtggacgtggatgaattgaaccaggagcaggtggcagatctcaacaaacaggccacgacttatggcatggccgacggtgacttcgtcaggatgctccggaaagacaaggaggaggcagaggccatcaagcatgccaaggctcttgaggaggagaaggccatgtactcgggacgccgctctcgacgccagcggagagagtttcgggagaagcggctgaggggtcgcaagatcagcccacccagctatgcccgccgagacagccccacctatgacccctataagcggtcaccctcggagtccagctcagagtcccgctcccgctcccgctccccgaccccgggccgcgaggagaagatcacgttcatcaccagttttgggggcagcgatgaggaggcagccgcagccgctgctgccgcagcagcatcaggagtcaccacagggaagccccccgcacctccccagcctggcggccccgccccgggacgtaatgccagcgcccgccgccgctcctcctcctcctcctcctcctcttctgcctcgaggacctccagctcccgctccagctctcgctccagctcccgctctcgccgtggtgggggctactaccgttccggccgccacgcccgctcccggtcccgctcctggtcccgctcccgctcccgctcccggcgctattcccggtcccgtagccgtggccggcggcactcaggtgggggctcccgagacggacaccggtactcccgctcgcccgcccggcgtggtggttacgggccccggcgcagaagcaggagccgctcccactcaggggaccgctacaggcggggcggccggggcctcaggcaccacagcagtagccgcagccgcagcagctggtccctcagcccgtcccgcagtcgcagcctgactcgcagccgcagccatagccccagccccagccagagccgcagccgcagccgcagccgcagccagagcccctcgccatcacccgcaagagagaagctgaccaggccggccgcgtcccctgctgtgggcgagaagctgaaaaagaccgaacctgccgctggtaaagagacaggagctgccaaacccaagctgacgcctcaggagaagctgaaactgaggatgcagaaggcgctgaacaggcagttcaaggcggataagaaggcggcacaagaaaagatgatccagcaggagcatgagcggcaggagcgggaagacgagcttcgagccatggcccgcaagatccgcatgaaggagcgggaacgccgagagaaggagagagaagagtgggaacgccagtacagccggcagagccgctcaccctccccccgatacagtcgagaatacagctcttctcgaaggcgctcaaggtcccgatcccgaagcccccattaccgacattaggcagaagagtggggggtggggaggacaagggggtgggtaaggggctcaagctgtgatgctgctggttttatctctagtgaaataaagtcaaaagttatttaattcccgtca

SEQ ID NO: 736 - DNA, 3989 bp, Homo sapiens
gtaagtaagtacctaaccagatccagaacattcccagtgaaggaccccctgacagcaccctaatcagaatccggaatgttcccataggtaatcatataaccttcccaggcacgatccggaatgctcccagtgagcatcttgtcccaccccacattggcttgggtctgaaaggtggggacagtgagcatattacctgccttgcagctggctcggtagagccattgtcatactcctccagggcagccgtgcaggccccgggcacaccacgtgtctctgatctgagccccctccccaggggccggccctgatgacaacaccaccttcttccagggcctgtactgtgtctctgtcaactgcatggacaacgcggaagcccagttcaccacggccctgcggctcaccaaccaccaggagctgtgggccttcatcgtcaccaacctggcgagtgtgtatatacgggaaggaaatagacaccaagagctctacagtctgctggagaggatcaacccggaccacagcttccctgtcagctcgcactgcctccgagcagccgccttctatgtgcgtgggctcttctccttcttccagggacgctacaacgaggccaagcgatttctgcgggaaactctgaagatgtccaatgctgaggacctgaaccggctcacagcctgctccctcgtgcttctgggccacatcttctatgtgctgggaaaccacagggagagtaacaacatggtggtgcctgccatgcagctcgccagcaagatcccggacatgtcggtacagctgtggtcgtcagcactgctgagagacctgaataaagcctgtgggaacgccatggatgcccatgaagccgcccagatgcaccagaacttctcgcagcagctgctccaggaccacattgaggcctgcagcctccccgaacacaacctcatcacgtggacagacggtccaccccccgtgcagttccaagctcagaatggacccaacaccagcctggccagcctcctgtgaggccttgatggggccatccagctccgcagggcctgcgcgtctccggcttccacccagacggcactcaagcctgcccccgaggcgtgcttccttcctgattgtctctagagcttccaagtcctgggaatgtgcggggccagtccctgccctcccaggaggggtggtagccgttcccacctcgcagcaggacccccagtgcagaggctcacaggtggcacacaggcgctgtctctccagagccatccttcagagtggacctcagtgccagtcctgcctcagcatctgggtcacgtcggccaggagtagggtgcaggcctccagcaggtcctaatcctgtgtgccagggcaggcagtgccccaggggcaccacgcctgactctccatcacccaggccttgatgccgagcgggagtagagtgtttcctctgctcaaggcaatttccagagcccggatgccagtttctggcctgaatttggagggaagaagtaatggcgctagtgtgggacgaagcacagatcccagcacttttcccagctttctctccagcatcagtccctgcagcagctggggcctctggtcaggaaccctcagggacccaggaactcagcttccaaacatctgcaccttgaccggactcgccatcccgccgtgggggtgcaggtgattgtaaacacgggtgtgcatgtggatgcacacgggtgtgcggtgaagatctgtggagatggagctgggagctgaggctcctgttgcaccagccaccttcccccatcttgtggctgctgaggggcaggaagcgggggagtgggctcgtctcctaaatttaagatcacctcctcagctagcttagagtgcgtggcacgggccccccgcccccgagatctggagcccagggactttcttcctggcagatctgtggccttccctgctcagcctcttggtccccccactccctccaccgcctcaccttccctgctgggtctctggggcacagtgtgaaacccgcaccctagccaggccccagggagcctccgctgggcccagacagcagcgtttggttttatccacttttcttggataatcaggaggtgccccagtggtcacagtgtggcattccgagttggggcgggtggtcgggtcaagatagcagcagcaggtgtcagggctcaagacaccaccccctccagcttctggggcccaggagcctctccctgctacagggggtgggggtcctgctcagcagggtaggtggtggttttaggtcttgtcaccctcactcagtggaactgcctctgggagctttggcgtctgtgactaaagggacgctggattgctcaggtcagctgctcggggctcccaggctgggtgtgccttagccacaggcagggctgtcaataacccccttcctcactggccaccacctgacatcagcaccagtgacaggctggtcagagggcggggctggtgagggtttgtcctaagaggaccaccgccatctctgggtctccagggggagagcctggccctgtcctttgctacccagggctgcccccaggcccatgaagccaataggagagcgtgtggcactggcccacaaactgtccctgtcctgtcttcctcccgagccatggcctctgctagctccaccttgaaggagccccccacatcctcccctacatcccagagatgccaccacttgtgtctccacaatgtgctcctgcccacccgggttccgcactgtccgacccctgcacaccactcatgtcaccacggcgtgcatcatgttcatccccatctatttatttaagcctttctttgcttgtagggcattttgtatgtagagcagttgaaaacagaacctcagaacttaacatctgtcctgatgttaaagtgcttttcatgaccaccctgttatctatgtatatgtaaagttaaggatgagatcttaagtttacaattaaaaactcagtactcaatatttaatattctactcgagctttatggaagccaaatcatgtgcatgtgtgtgtgtgcgtgtgtgcaagctttgaacctccttccacagccgcatcttctcatgacacaaagcttttgataagtactttcctgtgggtcgctcagcgcctcatagcatctcattcaattgcaagaatagaggccagacacggtggcgcatgcctgtagtcccagctaactgggaggctgaggcaggaggatcacttgagcccaggagattgaggctgcagtgagcatgatcgcgacactgcactccagcctgggtgacggtgagactttgtctcaaaaaaaaaaaaaaaaacaatggaaggcagacagcaagtccctgaggacacatcacacagtgtcctgtagctaagtgtctaggaaaaaacaaaaactccaaacccttcagtggatgaggacaaggtcgcagaaaggcattctgttgacagatgaacagccgaaagctggccagaccctcctgtatgcctctgcccttgtcctgtgggttgagggggtctgaccaggaggccacctacagcaggaagtgaggctgccatgtttccttgagacacagctgcctctccccagctctgtccctgtagtcacctgccggtgggcgaggatcctctccctgggataagcactcccagccccgtttatcagaaacacaggcaaggaaattggaactgccacccagcccagcatggtggctcaattggttggttgcgttgtcagttgtctcttcgttttgttaaggtttttaataagtacgtttggcataatgtcttttaatgggtttgtaatatttgtaacggttttagcagcctataacttttcagctggtgcttttacttagggaaaaaaacaatttgtaaatacagaacattgtttaaaagacataaccatagaacatagcttcctgtttgtggattttgtttcctatatattcaaagtaaaatgacttacaggagccaaaa

SEQ ID NO: 737 - DNA, 1712 bp, Homo sapiens
atgctgggggaggggctggcggcctcgacggcagctgcggaactaggccgagggacaaaggctaagtttttccatggtttggactggatatcggtggaactctggtcaagctggtatattttgaacccaaagacatcactgctgaagaagaagaggaagaagtggaaagtcttaaaagcattcggaagtacctgacctccaatgtggcttatgggtctacaggcattcgggacgtgcacctcgagctgaaggacctgactctgtgtggacgcaaaggcaatctgcactttatacgctttcccactcatgacatgcctgcttttattcaaatgggcagagataaaaacttctcgagtctccacactgtcttttgtgccactggaggtggagcgtacaaatttgagcaggattttctcacaataggtgatcttcagctttgcaaactggatgaactagattgcttgatcaaaggaattttatacattgactcagtcggattcaatggacggtcacagtgctattactttgaaaaccctgctgattctgaaaagtgtcagaagttaccatttgatttgaaaaatccgtatcctctgcttctggtgaacattggctcaggggttagcatcttagcagtatattccaaagataattacaaacgggtcacaggtactagtcttggaggaggaactttttttggtctctgctgtcttcttactggctgtaccacttttgaagaagctcttgaaatggcatctcgtggagatagcaccaaagtggataaactagtacgagatatttatggaggggactatgagaggtttggactgccaggctgggctgtggcttcaagctttggaaacatgatgagcaaggagaagcgagaggctgtcagtaaagaggacctggccagagcgactttgatcaccatcaccaacaacattggctcaatagcaagaatgtgtgcccttaatgaaaacattaaccaggtggtatttgttggaaatttcttgagaattaatacgatcgccatgcggcttttggcatatgctttggattattggtccaaggggcagttgaaagcacttttttcggaacacgagggttattttggagctgttggagcactccttgagctgttgaagatcccgtgatcattacctggggaggggttcctgaaaccttccacaatgggatctgtggactttcatttttttaagagacttactcaatttcatgactgtactacctgaaacaaagtgagaaaggacaggtgtatttttctaagtcatcaagataaatccttaagaattcagtctaaattagcaaccaggaaggaaaaatatattaaaaacaacaaaaaagtggcacatgtccaggcagtgtgaggatttgctgtatataagttgcctgctttgtatttttgaaatctctgcatcactcattggaagtgcttctgaagagagctgctctgtgttcagttgactggttttgtgtcctgtttgaacttgctgaatgtaaggcaggctactatgcgttataatctaatcacaatttgtcaatatggtcttggcaatcatctgtgcattactctggtttgcattaagcctgtgtgtgaacttactgtaaaacatgttttatttcaaggttctgcaaaattaattgggcaggttaattgtgtacctgaaacttaacaagcagtttttggaagggca

SEQ ID NO: 738 - DNA, 2280 bp, Homo sapiens
gggtggatgaggaggctcgggcccttccacccacgcgtccattgggcggcgccgccatcactctcttctgggctacaccgccttctcttcctccgcggaacccggatcccctcctccaccaccctctccccgccccgtcacgatagcctctcattggacggaggcacggtcaatcctcctcgagttagggagccgactggacgcgaggcctttgggccgtccccagcctcgtcggattggcttcctgcgcgttggcgcaacggaagaggcggccggccgagggcgcgcctctgctctggctggactgccgcggaggaggcgagaaggaatccgacgctggggggcttgctcgggcggcagcgactgctgctgcggatgggagggggccggctcggcgcgcccatggagcgccacggcagggcttccgccacctccgtctcgtcggctggggagcaggcggccggggaccccgaagggcggcggcaggagccactgcggcgccgggcgagcagcgcgtcggtgcccgcggtcggggcctcggctgagggcacgaggcgggatcgactgggctcttacagcggccccacctcggtctcccgccagcgcgtcgaaagcctgaggaaaaagcggccgctttttccatggtttggactggatatcggtggaactctggtcaagctggtatattttgaacccaaagacatcactgctgaagaagaagaggaagaagtggaaagtcttaaaagcattcggaagtacctgacctccaatgtggcttatgggtctacaggcattcgggacgtgcacctcgagctgaaggacctgactctgtgtggacgcaaaggcaatctgcactttatacgctttcccactcatgacatgcctgcttttattcaaatgggcagagataaaaacttctcgagtctccacactgtcttttgtgccactggaggtggagcgtacaaatttgagcaggattttctcacaataggtgatcttcagctttgcaaactggatgaactagattgcttgatcaaaggaattttatacattgactcagtcggattcaatggacggtcacagtgctattactttgaaaaccctgctgattctgaaaagtgtcagaagttaccatttgatttgaaaaatccgtatcctctgcttctggtgaacattggctcaggggttagcatcttagcagtatattccaaagataattacaaacgggtcacaggtactagtcttggaggaggaactttttttggtctctgctgtcttcttactggctgtaccacttttgaagaagctcttgaaatggcatctcgtggagatagcaccaaagtggataaactagtacgagatatttatggaggggactatgagaggtttggactgccaggctgggctgtggcttcaagctttggaaacatgatgagcaaggagaagcgagaggctgtcagtaaagaggacctggccagagcgactttgatcaccatcaccaacaacattggctcaatagcaagaatgtgtgcccttaatgaaaacattaaccaggtggtatttgttggaaatttcttgagaattaatacgatcgccatgcggcttttggcatatgctttggattattggtccaaggggcagttgaaagcacttttttcggaacacgagggttattttggagctgttggagcactccttgagctgttgaagatcccgtgatcattacctggggaggggttcctgaaaccttccacaatgggatctgtggactttcatttttttaagagacttactcaatttcatgactgtactacctgaaacaaagtgagaaaggacaggtgtatttttctaagtcatcaagataaatccttaagaattcagtctaaattagcaaccaggaaggaaaaatatattaaaaacaacaaaaaagtggcacatgtccaggcagtgtgaggatttgctgtatataagttgcctgctttgtatttttgaaatctctgcatcactcattggaagtgcttctgaagagagctgctctgtgttcagttgactggttttgtgtcctgtttgaacttgctgaatgtaaggcaggctactatgcgttataatctaatcacaatttgtcaatatggtcttggcaatcatctgtgcattactctggtttgcattaagcctgtgtgtgaacttactgtaaaacatgttttatttcaaggttctgcaaaattaattgggcaggttaattgtgtacctgaaacttaacaagcagtttttggaagggca

SEQ ID NO: 739 - DNA, 1763 bp, Homo sapiens
ccgcgcgcggacactgtccccgcacggtggtccctcgttggtgcgtggcctgacatccggctggaggcctcgggtgctccgaaagcggtaccttcgggggcccccccgcacccattgtttttccatggtttggactggatatcggtggaactctggtcaagctggtatattttgaacccaaagacatcactgctgaagaagaagaggaagaagtggaaagtcttaaaagcattcggaagtacctgacctccaatgtggcttatgggtctacaggcattcgggacgtgcacctcgagctgaaggacctgactctgtgtggacgcaaaggcaatctgcactttatacgctttcccactcatgacatgcctgcttttattcaaatgggcagagataaaaacttctcgagtctccacactgtcttttgtgccactggaggtggagcgtacaaatttgagcaggattttctcacaataggtgatcttcagctttgcaaactggatgaactagattgcttgatcaaaggaattttatacattgactcagtcggattcaatggacggtcacagtgctattactttgaaaaccctgctgattctgaaaagtgtcagaagttaccatttgatttgaaaaatccgtatcctctgcttctggtgaacattggctcaggggttagcatcttagcagtatattccaaagataattacaaacgggtcacaggtactagtcttggaggaggaactttttttggtctctgctgtcttcttactggctgtaccacttttgaagaagctcttgaaatggcatctcgtggagatagcaccaaagtggataaactagtacgagatatttatggaggggactatgagaggtttggactgccaggctgggctgtggcttcaagctttggaaacatgatgagcaaggagaagcgagaggctgtcagtaaagaggacctggccagagcgactttgatcaccatcaccaacaacattggctcaatagcaagaatgtgtgcccttaatgaaaacattaaccaggtggtatttgttggaaatttcttgagaattaatacgatcgccatgcggcttttggcatatgctttggattattggtccaaggggcagttgaaagcacttttttcggaacacgagggttattttggagctgttggagcactccttgagctgttgaagatcccgtgatcattacctggggaggggttcctgaaaccttccacaatgggatctgtggactttcatttttttaagagacttactcaatttcatgactgtactacctgaaacaaagtgagaaaggacaggtgtatttttctaagtcatcaagataaatccttaagaattcagtctaaattagcaaccaggaaggaaaaatatattaaaaacaacaaaaaagtggcacatgtccaggcagtgtgaggatttgctgtatataagttgcctgctttgtatttttgaaatctctgcatcactcattggaagtgcttctgaagagagctgctctgtgttcagttgactggttttgtgtcctgtttgaacttgctgaatgtaaggcaggctactatgcgttataatctaatcacaatttgtcaatatggtcttggcaatcatctgtgcattactctggtttgcattaagcctgtgtgtgaacttactgtaaaacatgttttatttcaaggttctgcaaaattaattgggcaggttaattgtgtacctgaaacttaacaagcagtttttggaagggca

SEQ ID NO: 740 - DNA, 668 bp, Homo sapiens
cggggacccggctgcggtggctgcgggactgacgagaaactactaaagttcctggggaagcaaagtagaatttcataagaacaaaatggatggagaggagaaaacctatggtggctgtgaaggacctgatgccatgtatgtcaaattgatatcatctgatggccatgaatttattgtaaaaagagaacatgcattaacatcaggcacgataaaagccatgttgagtggcccaggtcagtttgctgagaacgaaaccaatgaggtcaattttagagagataccttcacatgtgctatcgaaagtatgcatgtattttacgtacaaggttcgctacactaacagctccaccgagattcctgaattcccaattgcacctgaaattgcactggaactgctgatggctgcgaacttcttagattgttaaataaaataaattataataaactgttaactcttttcagtatttaatacctgtagttcagttagtaactttttcatatatagcatgttgcctgtatgcagttgaactatataaagttcattgcaaagcagattatcttgtttttttgcatagcaatcaaagttgaaatttgtttgctacatcaacaaattaaggacattttcacaaactgagaaataaacaaatatgccaattaaaaaaaaaaaaa

SEQ ID NO: 741 - DNA, 3073 bp, Homo sapiens
gcccgcgtccgggctcctgcggcgggcggggcggtgtcccggccggaagcggctgtgcggcggccgcgctgccacctcagggaaatttggatatgtgcagtgcatctcctcgaagatgctgatggtggaaatttcttgaaaccgctctcgtaatttgccacgtgctgttgcaaatattctggtgaatgaacacagaatcagcatggctttcctttgctgagaaatcactgatgggaagtgagacttgttaaacttgaaagtgaatggacctgagtggaccctttgatcacatcagtaaacatgagcggtaccaaacctgatattttatgggcaccacaccatgttgatagatttgttgtgtgtgactcagaactaagtctttatcatgtggaatctactgtgaattcagaactcaaagctggatctttacgtttatctgaagactctgcagctacattactgtcaataaattcagatacaccctatatgaaatgtgttgcctggtatcttaattatgatcctgaatgtctgctggcagttggacaagcaaatggtcgagttgtacttacaagccttggtcaagatcataactcaaagttcaaagatttgataggaaaagagtttgttccaaaacatgcacgacaatgtaatacccttgcctggaatccactggatagtaactggctagctgctagtttagataagcacagagctgacttttcagtgctaatatgggatatctgcagcaaatatactcctgatatagttcccatggaaaaagtgaaactttcagcaggtgaaactgaaacaacattattagtaacaaaaccactttatgagttaggacagaatgatgcttgtctgtctctttgttggcttccacgagaccagaaacttctccttgctggtatgcatcgtaacctagctatatttgatcttcggaatacaagccaaaagatgttcgtaaatacaaaagctgttcagggtgtgacggtagacccatatttccacgatcgtgttgcttccttctatgaaggtcaggttgcaatatgggatcttagaaaatttgagaagccagttttgacattgactgagcaaccaaaacccttaacaaaagtagcatggtgtcccactaggactggtctacttgccactttaacaagggatagtaatattattagattgtatgatatgcagcatacacccactcccattggggatgaaactgaacccacaataattgaaagaagtgtgcaaccttgtgacaattacattgcttcctttgcgtggcatccaacaagtcaaaatcgaatgatagttgtaactcccaaccgaacaatgtcagacttcactgtttttgaaaggatatctcttgcctggagcccaattacatctttaatgtgggcttgtggtcgtcatttatatgaatgtacggaagaagaaaatgataattctttagaaaaagatatagcaacgaagatgcgtcttcgggctttatcaaggtatggacttgatacagagcaggtgtggaggaaccacattttagctggaaatgaagatccacagctcaagtcactctggtatactctgcactttatgaagcaatacacagaagatatggatcagaaatctccaggcaacaaaggatcattggtttatgcaggaattaaatcaattgtaaagtcatcgttgggaatggtggaaagcagcagacataattggagtgggttggataagcaaagtgatattcaaaatttaaatgaagagagaatcttagctttacagctttgtgggtggataaagaaaggaacggatgtagacgtggggccatttttgaactcccttgtacaagaaggggaatgggaaagagctgctgctgtggcattgttcaacttggatattcgccgagcaatccaaatcctgaatgaaggggcatcttctgaaaaaggagatctgaatctcaatgtggtagcaatggctttatcgggttatacggatgagaagaactccctttggagagaaatgtgtagcacactgcgattacagctaaataacccgtatttgtgtgtcatgtttgcatttctgacaagtgaaacaggatcttacgatggagttttgtatgaaaacaaagttgcagtacgtgacagagtggcatttgcttgtaaattccttagtgatactcagttaaatagatacatcgaaaagttgaccaatgaaatgaaagaggctggaaatttggaaggaattttgcttacaggccttactaaagatggagtggacttaatggagagttatgttgatagaactggagatgttcaaacagcaagttactgtatgttacagggttcacctttagatgttcttaaagatgaaagggttcagtactggattgagaattatagaaatttattagatgcctggaggttttggcataaacgagctgaatttgatattcacaggagtaagttggatcccagttccaagcctttagcacaagtttttgtgagttgcaatttctgtggcaagtcaatctcctacagctgttcagctgtgcctcatcagggcagaggttttagtcagtatggtgtgagtggctcaccaacgaaatctaaagtcacaagttgtcctggctgtcgaaaaccacttcctcgatgtgcgctttatctcattaatatgggaacaccagtttctagctgtcctggaggaaccaaatcagatgaaaaagtggacttgagcaaggacaaaaaaattagcccaatttaacaactggtttacatggtgtcataattgcaggcacggtggacatgctggacatatgcttagttggttcagggaccatgcagagtgccctgtgtctgcatgcacgtgtaaatgtatgcagttggatacaacggggaatctggtacctgcagagactgtccagccataaaatgttaccaccttaagagaacccttcaagtgtggagctttctagtaggtgtccttcatagctcagaaacatacctcagaacaagccattcatgacttacctgtaatgggaaaataaatcattctatcaaaaaaaaaaaaaaaa

SEQ ID NO: 742 - DNA, 14220 bp, Homo sapiens
gcggccgccttctcatcgctcctggaaggtcccgagcgcgacaccatgtcggagcccgggggcggcggcggcgaggacggctcggccggattggaagtgtcggccgtgcagaatgtggcggacgtgtcggtgctgcagaagcacctgcgcaagctggtgccgctgctgctggaggacggcggcgaggcgccggccgcgctggaggcggcgctggaggagaagagcgccctggagcagatgcgcaagttcctttcggacccgcaggtccacacggtgctggtggagcgctccacgctcaaagaggacgtcggtgatgaaggagaagaagaaaaagaattcatttcctataacatcaacatagacattcattatggggttaaatccaatagcttggcattcattaaacgtactcccgtgattgatgcagataaacccgtgtcttctcagctccgggtccttacactcagtgaagactcgccctacgaaactttgcattctttcattagcaatgcagtggctcctttttttaagtcctacattagagagtctggcaaggcagacagggatggtgataaaatggctccttcagttgaaaagaagattgcagaactcgaaatgggactccttcacttgcagcaaaatattgaaattccggagatcagcctgccgattcatccaatgatcacaaatgttgcaaaacagtgttatgagcgtggagaaaagccaaaagttacagactttggtgataaggttgaagacccaacatttcttaatcagttacaatctggagttaaccgctggatccgagaaattcaaaaagtgaccaaactggatcgagatcctgcatcaggaactgccttacaggaaattagtttttggctaaacttggaacgtgcgttataccgcatccaggagaaacgggagagcccggaagttctcctgactctggatatcttgaaacatggcaagcgcttccatgccaccgtcagttttgacactgacacaggtctaaaacaggctttggaaactgtgaatgactacaatcctctgatgaaagatttccctctgaatgatttgctgtctgccacggagctggacaaaataagacaggcgcttgttgccattttcacacatttgagaaagatccgaaacacaaaatatcctattcagagggcactgcgtttggtggaggcaatttcaagagacttgagttctcaattactcaaagtattgggcactaggaaattgatgcatgttgcttatgaagaatttgaaaaagttatggtagcatgctttgaagtttttcagacttgggatgatgagtatgagaaacttcaggtattgttgagagacatcgtcaaaagaaaaagggaagaaaatctgaagatggtgtggcgtatcaaccctgcccacaggaagctgcaggcccgccttgaccagatgagaaaatttagacgccagcatgaacagctaagagctgttatcgtcagggtcctgaggccacaggtcacggcagttgcacaacagaatcaaggagaggtccctgaaccccaagatatgaaagtggctgaggttctctttgatgctgcagatgcaaatgccattgaggaagtaaaccttgcttatgagaacgtcaaggaagtggatggactggatgtttccaaagagggcacggaagcctgggaggctgctatgaagaggtacgatgagaggatcgacagagtggagacccggatcaccgctcgccttcgggatcagcttggcacagccaagaatgccaacgagatgtttaggattttctccaggtttaatgcactgtttgtcaggcctcacatccgtggggccattcgcgaataccagacccagctgatccagcgcgtgaaagatgacattgagtctcttcacgacaagttcaaggtccagtacccacagagtcaggcttgtaagatgagtcacgttcgtgacttgccccctgtgtcagggtctatcatctgggctaaacagatcgacaggcagctgacggcctacatgaagcgggtggaagatgtccttggcaagggctgggagaatcacgtggaggggcagaagctgaagcaggatggagacagcttccgcatgaagctcaacacgcaggagatctttgatgactgggcaaggaaggtgcagcagcgcaacctcggtgtctcggggcgcattttcaccatcgaaagtactcgggttcggggccgaactggaaatgtgcttaagctgaaagttaactttcttcctgagattatcacactatccaaagaagtccggaacctcaaatggcttggtttccgcgtcccactggcgattgtgaacaaagcccatcaagcaaaccagctttacccgtttgccatctcactgatcgagagcgttcgtacctatgaacggacctgcgagaaggtggaggagcggaacaccatttcccttttggtggctggcttgaaaaaggaagtgcaggccctgatcgcagaaggcattgcgttggtgtgggagtcctacaaacttgacccatatgtacagcgcttagcagagactgtcttcaacttccaagaaaaggtggatgatctgctgatcattgaagaaaaaatagacctagaagtccgttccttggaaacttgtatgtatgaccataagacattctcggaaatcttgaacagagtccagaaagcagtggatgacttaaatctgcactcctattccaatttgcccatctgggtcaacaagcttgacatggagattgaaagaatattgggcgtccgtctgcaagctggcctgagagcttggacgcaggttcttcttggacaagctgaagataaagcagaagttgacatggacacagatgctccacaagttagtcacaagcctggtggagagccaaagatcaaaaatgtcgttcatgagctaagaataaccaatcaggtaatctacttgaatccaccaattgaagagtgcagatacaagctgtatcaggaaatgtttgcctggaagatggttgtactgtctctccccaggatccagagtcagaggtaccaggtgggtgtacattacgaattgactgaggaagagaaattctatcggaatgctttaacacggatgcctgatggccctgttgccctggaagagtcgtattctgctgtcatgggcattgtatctgaagttgaacagtatgtcaaggtttggcttcagtatcagtgtttatgggatatgcaagctgaaaacatctataacagacttggagaagatctcaacaaatggcaggctctcctggtccaaataaggaaggccagaggaacctttgacaatgcagaaaccaagaaagagtttggaccagtagttatagattatggcaaggtacaatctaaggtgaacttgaaatatgactcttggcataaggaggttcttagcaaatttgggcagatgctaggatcaaacatgacggaattccattcccagatctcaaagtcccgccaagagttggagcagcactcagtagacacggccagcacctccgatgcagtgaccttcatcacctatgtgcagtctttgaaacggaagatcaagcagtttgagaagcaagttgagctctaccgcaatggccagcgcttactggaaaagcaaaggttccagttcccaccttcctggctttatattgacaacatcgagggagagtggggagccttcaatgacatcatgcggcgaaaggactctgccattcagcagcaggtggcaaacctgcaaatgaagattgtccaggaggatcgggccgtggaaagccgcaccaccgacctgctgactgactgggagaagaccaagcctgtcacgggcaaccttcgcccagaagaggcacttcaggctctcaccatatatgaggggaagtttggtaggctgaaggacgacagagagaagtgtgcaaaggccaaggaggcgctggaattgacagatactgggcttctcagtggcagtgaagagcgcgtgcaggtggccttagaagaattacaggacctcaaaggcgtttggtcagaactttctaaggtttgggagcaaatcgatcagatgaaggagcaaccctgggtttcagtacagcctcgaaagcttcgacaaaatttggatgccctcctgaaccagctgaaaagcttccctgcccggttgcgacagtatgcgtcctatgagtttgttcagaggcttctgaaaggttacatgaagataaatatgctggtgattgaactgaaatccgaagcacttaaagaccgccattggaaacagctcatgaaaaggcttcacgttaattgggttgtttctgagctaacccttggccaaatctgggatgttgacttgcagaaaaatgaagcgattgtcaaggatgtactgcttgtggcacaaggggagatggctttggaagaatttttgaagcagataagagaagtgtggaatacttatgaactagacttggttaattatcagaacaagtgccgcttgatccgtggctgggatgacctcttcaacaaggtcaaagaacacatcaacagcgtctcggccatgaagctctctccgtattacaaggtttttgaagaggatgctctcagctgggaagataagctgaacaggatcatggctctctttgatgtgtggattgatgtgcagaggcggtgggtctacctggaaggtatcttcacaggcagtgcagatatcaagcacctgctgccagtggaaacccagcggtttcagagcatcagcactgagtttttggctctaatgaaaaaagtgtccaagtctccccttgttatggatgttctgaacatccagggagtacagaggtctctggaaagattggcagacctgctaggaaagatccagaaagcattgggagaatatctggaaagagagcggtcatctttccccaggttctattttgtgggtgatgaagatttgcttgaaatcattggaaacagcaagaatgtcgctaaattacagaaacacttcaagaagatgtttgctggagtttcgagcatcatcctgaacgaggataactctgttgttttgggtatttcatctcgggaaggagaggaggttatgtttaaaactcctgtgtcaattactgaacatcccaaaatcaatgagtggctcacattggtagaaaaggagatgagagtcaccctggccaaactgcttgctgagtctgttacggaagttgagatttttggtaaagcaacttcaattgacccaaatacctacatcacttggattgataaataccaggcccagcttgtggttttgtcagcccagatagcctggtctgagaacgtggagaccgcactgagcagcatgggcggaggtggagatgccgcgcccttgcactctgtgctgagcaatgtggaggtcaccctcaatgtgttagcagactctgtcctcatggagcagcccccactccgaaggcggaagctagaacacttgattacagagttggttcaccagagagatgttacaaggtccttgatcaaaagcaagattgacaacgccaaatcttttgaatggctcagccagatgcgattttactttgaccctaagcaaactgatgtgttacagcagttgtcaattcaaatggcaaatgccaaatttaactatggctttgagtacctgggtgttcaggacaaactggtccagacccccctcactgaccgctgctatttgacaatgacacaagccttggaggccaggctggggggttccccatttggacctgctggaactgggaaaacagagtctgtcaaagctcttggccatcagcttggacggtttgttttagttttcaactgtgatgaaacctttgatttccaggcaatgggccggatctttgtgggcctttgccaggtgggtgcctggggctgctttgacgagttcaaccgcctggaggagcggatgctctcggctgtgtcccagcaggtgcagtgcatacaggaagcactgcgtgaacattccaaccccaactacgacaagacctctgcccccattacttgtgagctgctgaacaaacaagtcaaggtgagcccggacatggccatcttcatcaccatgaaccctggctacgcgggccggtctaaccttcctgacaacttgaagaagctgttccggagcttggccatgaccaagcccgaccggcagttaatcgcccaggtcatgctgtactcacagggtttccgcactgctgaagtgcttgccaacaaaatcgtcccgttttttaaactatgcgatgagcagctctcttcccaaagccattatgacttcggtcttcgggctttgaagagtgtgctggtgagtgcaggcaatgtgaagagagagagaatccagaagataaagagggagaaagaggaacgaggggaagcagttgatgaaggagaaattgctgaaaatctccctgaacaagagattctgatacagagcgtctgtgagacgatggtgccaaagctggtggcagaggacatcccgctgctcttcagcctcctgtcggacgtgttccctggagtccagtatcacaggggtgagatgactgcccttcgagaggagctgaagaaagtgtgtcaggagatgtatttgacatatggagatggagaagaagttggtggaatgtgggttgaaaaggttctccagctctatcagatcacccagatcaatcatggcctgatgatggtggggccctcgggaagtgggaagagcatggcctggcgtgtcctgctgaaggcattggagagactcgagggtgtggaaggtgtggcccatatcatcgaccccaaggccatcagcaaagaccacctctacggaaccctggaccccaacaccagggaatggacagatgggctcttcacacacgtgctgagaaagatcatcgacagcgtgagaggcgagctgcagaagcgccagtggatcgtcttcgatggcgatgtggatccagagtgggttgagaacttgaactcagtgctggatgacaataagctcctaactttgcccaatggagagcgcctcagtcttccacccaatgtgagaataatgtttgaggtacaggacttgaaatacgcgaccttggccacagtgtcgcgctgcggcatggtctggttcagtgaggatgtgctgagcaccgacatgatcttcaacaacttcctggccaggctgcgcagcatcccgctggatgaaggggaggatgaggcacagcggcggcgtaagggcaaagaggatgagggggaggaggccgcttcccccatgctgcagatccaaagagatgcagctacgatcatgcaaccgtacttcacgtccaacggcctggtcaccaaggcgctagagcacgccttccagctggagcacatcatggacctaacacgcctgcgctgcctgggctcgctcttctccatgctgcaccaggcctgccgcaacgtggcgcagtataacgccaaccatcccgacttccccatgcagatcgagcagctggagcgctacattcagcgatatctggtttatgccatactctggtccctgtctggagacagccggctaaaaatgagagcagagctgggtgaatacatcagaagaatcacgaccgtgcctctgcccactgcgcccaacatacccattatcgattatgaggtgtccatcagcggagaatggtctccgtggcaggccaaggtgcctcagattgaagtggagacgcacaaggtggcagcccctgatgtcgtcgtgccaacgctggacacagtccgccacgaagccctcttgtacacttggctggccgaacacaagcccctggtcttgtgtggccctcctgggtctggcaagaccatgacactcttcagcgccctccgggccttgcctgacatggaggtggtgggtctcaacttctccagtgctactactccagagctgcttctgaagacttttgatcactactgcgagtacaggcgcacacctaatggggtggttttggctcctgttcaacttggaaagtggctggtgttgttctgtgatgaaatcaacttgccagatatggataaatatgggacccagagggtcatatccttcatcagacagatggtggagcacggaggcttttaccgtacctcagatcaaacatgggtgaagctggagagaatccagtttgttggggcttgtaatccccccacagaccctggaagaaagcccctctcacacaggttcctgcgccacgtgcctgtcgtgtatgtggattacccgggccccgcctccctcacacagatctacggcaccttcaaccgcgccatgctgaggctcattccatccctgcggacgtatgcagagccgctcactgctgccatggtggagttctacaccatgtctcaggagagattcacccaggatacacaacctcactatatctattcaccccgtgaaatgactaggtgggtgagaggcatctttgaagcgctgagacctctggagaccctgcctgttgaaggcctcattcggatttgggcacatgaagctctgcgtctcttccaagatagactcgtagaggatgaggagaggcgttggactgatgagaacatcgacacggttgctctgaagcacttccctaacatcgacagagagaaggcaatgagccgacccatcttgtacagcaactggctgtcaaaggattacatcccagtagaccaagaagagttaagagattatgtcaaagctaggctgaaggtcttttatgaagaagaacttgatgttccgctggtgctgtttaatgaagtcctagaccacgtgctgaggattgacagaatattccgtcaacctcaaggccacttgcttctgattggtgttagtggagcaggaaaaactaccctgtctcgtttcgtcgcctggatgaacggtttgagtgtgtaccagattaaggtccataggaagtacacaggggaagactttgatgaagatctacggacagtgttgagacgttctggctgtaaaaatgaaaagatagcatttataatggatgaatctaatgtgttagattctggattcctggagcgaatgaatacccttctggccaatggagaggtgcctggtctctttgaaggagacgagtatgccaccttgatgacgcagtgcaaagagggggcacagaaggaaggcctgatgctggactcgcacgaggagctctacaagtggttcactagccaggttatccgcaacctccacgtcgtgttcaccatgaacccgtcctcggagggactcaaggaccgggcagctacatcaccagcacttttcaacaggtgtgtgttgaattggtttggagactggtccaccgaagcactgtatcaggttggcaaagaattcacaagtaagatggatctggagaagccaaattacatcgtgcctgattacatgccagttgtgtatgataagctgccgcagccaccatcccatcgggaagccattgtgaacagctgtgtgtttgttcatcagactcttcaccaggcgaatgctcggctagcaaagcgaggcggcagaacgatggccatcacccctcgccactacctggacttcatcaatcactatgccaacctgttccacgagaagcggagcgagctggaggagcagcagatgcacttgaacgtggggctcaggaagatcaaagagacagtcgaccaggtagaagaactgcgtcgtgacttgaggataaagagccaagagctggaggtgaagaatgcagcagccaatgacaagctgaaaaagatggtgaaagaccagcaggaggctgaaaagaagaaggttatgagccaagaaatccaggaacagctgcataagcagcaggaggtaattgcagacaaacagatgagtgtcaaagaagatcttgataaggtggaacctgccgtcattgaggcccagaatgctgtgaagtcgatcaagaagcagcacctggtggaggtgaggtccatggccaaccctcctgctgctgtgaagctggcgctggagtccatctgcctgctgctgggggaaagcaccacagactggaagcagatccgctccatcatcatgcgggagaacttcatccccaccatcgtcaacttctctgcagaggagatcagtgacgccataagggagaagatgaagaaaaattacatgtccaatccaagttacaattatgaaattgtgaatcgggcttccctggcttgcggccctatggtgaaatgggcaattgcacagcttaactatgcagacatgttaaagagagtggagcccctacgcaatgagctgcagaagctggaagatgacgccaaggacaaccagcagaaggccaacgaggtggagcagatgatccgagacctggaagccagcatcgcccgctacaaggaggaatacgccgtcctgatctcagaggcccaggccatcaaggcagacctggcagctgtcgaggcaaaagtaaaccggagcactgctcttctgaagagcttgtctgctgaacgtgaacgatgggaaaaaacaagtgaaactttcaaaaaccagatgtccaccattgctggggactgtctcttgtcagctgcgttcattgcctacgcgggttactttgaccagcagatgcgtcagaacttgttcactacctggtcccatcacctacagcaagccaacatccagttccgtacagatattgccaggacggaatacctttccaatgctgatgagcgtcttcgctggcaggccagctccttgcctgctgatgacctttgcacagaaaatgccatcatgctgaaacgattcaataggtatccgctgatcattgacccctctggacaggccacagaattcattatgaatgaatataaggatcgtaagatcacacggaccagcttcctggatgacgccttcagaaagaacttagagagtgcactgagattcggtaacccccttctggtccaggatgtggaaagctacgatccagttttgaacccggtgctgaaccgtgaagtgcggcgaacaggggggagagtgctgatcactctcggggaccaggacatagacctgtcgccatcgtttgtcatcttcctgtccacccgggatccaactgtcgagttcccaccagatctctgttcccgggttacttttgtaaacttcacagttacccgtagcagtttacaaagccagtgtctaaatgaagtacttaaagcagaaagacctgatgtggacgagaaacgatctgatcttcttaaacttcaaggggaatttcagctccgtttgcgtcagctggaaaaatctctactacaagctctgaacgaggtgaaagggcgcattttggatgacgacacgatcataaccactctggagaacctgaagagagaggctgcagaggtcaccaggaaagttgaggagacggacattgtcatgcaggaggtggagaccgtgtcccagcagtacctcccgctctccaccgcctgcagcagcatctacttcaccatggagtccctcaagcagatacacttcttgtaccagtactccctccagtttttcctggacatttatcacaacgtcctatacgagaacccgaacctgaagggtgtcaccgaccacacacagcgcctgtccattataacaaaggacctcttccaggtggcgtttaaccgagtggctcgaggcatgctgcatcaggaccacattacctttgccatgctgctggcaagaatcaaactgaagggcaccgtgggggagcccacctacgatgcagaattccagcacttcttgagaggaaatgagattgtcctgagtgctggctccacccccaggatccagggcctgactgtggagcaggcggaggcggtggtgaggctgagctgccttcccgcgtttaaggacttgattgcaaaggttcaggcagacgagcaatttggcatctggctggacagcagctccccggagcagactgtgccctacctctggagtgaagaaacacctgcaacacccattggccaggccatccaccgcctgctcctgatccaggctttccggcccgatcgcctgttggccatggcccacatgtttgtttcaacaaaccttggggagtctttcatgtccatcatggagcagccgctcgacctgacccacattgtgggcacagaggtgaagcccaacactcctgtcttaatgtgctctgtgcctggttatgatgccagtggacatgtcgaggaccttgcagccgagcagaacacgcagatcacttcaattgcaatcggctctgcagaaggctttaaccaagcagataaggcaataaacaccgctgtaaagtcgggcaggtgggtgatgctgaagaatgtgcatctggccccagggtggctgatgcagctggagaagaagttgcattccctgcagccgcatgcctgcttccgactcttcctcaccatggagatcaaccccaaggtgcctgtgaatctgctccgtgcgggccgcatctttgtgttcgagccaccgccaggggtgaaggccaacatgctgaggacgttcagcagcattcccgtctcacggatatgcaagtctcccaacgagcgtgcccgcttgtacttcctgctggcctggtttcatgcgatcatccaagaacgcttacgatacgcaccactggggtggtcaaagaagtatgaatttggagagtctgacctgcggtcagcttgcgatacggtggacacgtggctggatgacacggccaagggcaggcagaacatctcaccggataagatcccgtggtctgcactaaagaccttaatggcccagtccatttatggcgggcgcgtggacaacgagtttgaccagcgtctgctcaacaccttcctggagcgcctgttcacaaccaggagtttcgacagtgagtttaagctggcatgcaaggtcgacggacataaagacattcaaatgccagatggcatcaggcgagaggagtttgtgcagtgggtggagttgctccccgacacccagacgccctcctggctgggcctgcccaacaacgccgagagagtcctccttaccacacagggtgtggacatgatcagtaaaatgctgaagatgcagatgttggaggatgaggacgacctggcctacgcagagactgagaagaagacgaggacagactccacgtccgacgggcgccctgcctggatgcggacactgcacaccaccgcgtccaactggctgcacctcatcccccagacgctgagccacctcaagcgcaccgtggagaatatcaaggatcctttgttcaggttctttgagagagaagtgaagatgggcgcaaagctgcttcaggacgttcgccaggaccttgcagatgtcgtccaggtgtgcgaaggaaagaagaagcagaccaactacttgcgcacgctgatcaacgagctagtgaaagggatcttgcctcggagctggtcccactacacggtgcctgccggcatgaccgtcatccagtgggtgtccgacttcagcgagaggatcaaacagctgcagaacatctcactggcagctgcatctggtggcgccaaggagctaaagaacatccacgtgtgcctgggtggcctgttcgtgcctgaggcgtacatcactgccaccaggcagtatgtggcccaggccaacagctggtccctggaggagctctgcctggaagtcaacgtcaccacctcacagggcgccacccttgacgcttgcagcttcggagtcacgggtttgaaacttcaaggggccacgtgcaacaacaacaagctgtcactgtccaatgccatctcaaccgcccttcccctgacgcagctgcgctgggtcaagcagacaaacaccgagaagaaggccagtgtggtaaccttacctgtctacctgaacttcacccgtgcagacctcatcttcaccgtggacttcgaaattgctacaaaggaggatcctcgcagcttctacgagcggggtgtcgcagtcttgtgcacagagtaaacttttctagctgcccctttctgtaatagtgaaagttggtatttaacatttattcatttttaaaatatttggaaggtctgagcttgtgaaaagaaagtggttggtctgaggttggaggaagctgaatggaatctgacggttgggagtggtggaaattggaaggataccaggaggtatttgggaaggccaatggcgtggctcctttgaggaaataaaacactaagcatgagccgg

SEQ ID NO: 743 - DNA, 2200 bp, Homo sapiens
actgccgacccgagtgcttcccgcagagggctggtggtgggagcggagtgggtcgggcggggccgagccgggccgtgggccgtgtgggggccgggcggcggccgggccggcggacggcgggatgggctgcaccgtgagcgccgaggacaaggcggcggccgagcgctctaagatgatcgacaagaacctgcgggaggacggagagaaggcggcgcgggaggtgaagttgctgctgttgggtgctggggagtcagggaagagcaccatcgtcaagcagatgaagatcatccacgaggatggctactccgaggaggaatgccggcagtaccgggcggttgtctacagcaacaccatccagtccatcatggccattgtcaaagccatgggcaacctgcagatcgactttgccgacccctccagagcggacgacgccaggcagctatttgcactgtcctgcaccgccgaggagcaaggcgtgctccctgatgacctgtccggcgtcatccggaggctctgggctgaccatggtgtgcaggcctgctttggccgctcaagggaataccagctcaacgactcagctgcctactacctgaacgacctggagcgtattgcacagagtgactacatccccacacagcaagatgtgctacggacccgcgtaaagaccacggggatcgtggagacacacttcaccttcaaggacctacacttcaagatgtttgatgtgggtggtcagcggtctgagcggaagaagtggatccactgctttgagggcgtcacagccatcatcttctgcgtagccttgagcgcctatgacttggtgctagctgaggacgaggagatgaaccgcatgcatgagagcatgaagctattcgatagcatctgcaacaacaagtggttcacagacacgtccatcatcctcttcctcaacaagaaggacctgtttgaggagaagatcacacacagtcccctgaccatctgcttccctgagtacacaggggccaacaaatatgatgaggcagccagctacatccagagtaagtttgaggacctgaataagcgcaaagacaccaaggagatctacacgcacttcacgtgcgccaccgacaccaagaacgtgcagttcgtgtttgacgccgtcaccgatgtcatcatcaagaacaacctgaaggactgcggcctcttctgaggggcagcggggcctggcgggatgggccaccgccgactttgtaccccccaacccctgaggaagatgggggcaagaagatcacgctccccgcctgttcccccgccgcttttctcctctttcctctctttgttctcagctccccctgtcccctcagctccagacgtaggggaggggttgccacaggcctccctgtttgaagcctgcccttgtctgagatgctggtaatggccatggtacccccttctgggcatctgttctggtttttaaccattgtcttgttctgtgatgaggggaggggggcacatgctgagtctcccaaggctgcgtctggaggggcccctgcttctccagcctggacccccagctttgcccaacaccagcccctgccccagcccaagtccaaatgtttacagggagcctcctgcccagtcccccaaccccagccgctcggaggccccaaaggaaaaagcacaagaagcgtgagacgccaccattcctggaaaccacagtccacctgctcattctcgtagctttttaaaaaaatgaaagtaaaggaaaaaaaaaaaactgcaaatctagaaaactttttagagaaaaactatttaaaactgtcagatcctgaccagcaagcccccccccagccccccttccaagtgactccgtgccttgagtgtgtctgcgtgtttacacccgtccctctgctggccgcccccgtgcgagcggcacccctgccctgccctccacagaattgggttccaagggctgttccagacaactgccaacgtcactgagggccctgccccagcggccctggccccaggctctattaacctaaaatgtagctccctagcgctaacctaggaaccgccgctgcctgctggggggccacgcccctcatgcccttgtcccaggcccggggccttcagcgttgaacacttccttgcttttttcacatgttttatggaattgttcacctggtttgaaataataaaatgtagaaagaaaaaaaat

SEQ ID NO: 744 - DNA, 1843 bp, Homo sapiens
ctaatgaactcctgggtcacgtggtgcgcacgcgccaaaggcacacgataaaggaaaacgcgggcttatcgtggcctttaaaatccggcttggtgagcttgggtcgcctctgaaggagaaccattttccatctctttcatagttttttcccccagtcagcgtggtagcggtattctccgcggcagtgacagtaattgtttttgcctctttagccaagacttccgccctcgatcaagatggtggttggacggccttcctaacctttacggggcctggcggtgctgacgcctgagctggtaggggtggagcaggtaggaaacagcaaatgcagaagctgctgcgcggaagtcggccatggactggaaagaagttcttcgtcggcgcctagcgacgcccaacacctgtccaaacaaaaaaaaaagtgaacaagaattaaaagatgaagaaatggatttatttacaaaatattactccgaatggaaaggaggtagaaaaaacacaaatgaattctataagaccattccccggttttattataggctgcctgctgaagatgaagtcttactacagaaattaagagaggaatcaagagctgtctttctacaaagaaaaagcagagaactgttagataatgaagaattacagaacttatggtttttgctggacaaacaccagacaccacctatgattggagaggaagcgatgatcaattacgaaaactttttgaaggttggtgaaaaggctggagcaaagtgcaagcaatttttcacagcaaaagtctttgctaaactccttcatacagattcatatggaagaatttccatcatgcagttctttaattatgtcatgagaaaagtttggcttcatcaaacaagaataggactcagtttatatgatgtcgctgggcaggggtaccttcgggaatctgatttagaaaactacatattggaacttatccctacgttgccacaattagatggtctggaaaaatctttctactccttttatgtttgtacagcagttaggaagttcttcttctttttagatcctttaagaacaggaaagataaaaattcaagatattttagcatgcagcttcctagatgatttattggagctaagggatgaggaactgtccaaggagagtcaagaaacaaattggttttctgctccttctgccctaagagtttatggccagtacttgaatcttgataaagatcacaatggcatgctcagtaaagaagaactctcacgctatggaacagctaccatgaccaatgtcttcttagaccgtgttttccaggagtgtctcacttatgatggagaaatggactataagacctacttggactttgtccttgcattagaaaacagaaaggaacctgcagctctacaatatattttcaaactgcttgatattgagaacaaaggatacctgaatgtcttttcacttaattatttctttagggccatacaggaactaatgaaaatccatggacaagatcctgtttcatttcaagatgtcaaggatgaaatctttgacatggtaaaaccaaaggatcctttgaaaatctctcttcaggatttaatcaacagtaatcaaggagacacagtaaccaccattctaatcgatttgaatggcttctggacttacgagaacagagaggctcttgttgcaaatgacagtgaaaactctgcagaccttgatgatacatgatctctgaaagactagactgtcttatattatgagatacttgaatgctgcatgtaaagcctttaaagcaaaatcctcagaaatggtctaaataaaacacttgatatgcctagagaacacaaaaaaaaaa

SEQ ID NO: 745 - DNA, 1438 bp, Homo sapiens
agcattgagaagttcagctgttgtagagcttgatttggaaggcaccagaatccggaggaaaaaacctctgggggaaagaccaaaggatgaggatgaacgcacagtgtatgtggagttacttcccaaaaatgttaatcacagctggattgaaagagtatttgggaaatgtggcaatgttgtttatataagtataccattataagtctactggagatccaaaggggtttgcgtttgtggaatttgaaacaaaagaacaagcagcaaaagcaattgagtttcttaacaacccaccagaagaagcaccaagaaaacctggcatatttcctaaaacagtgaaaaataagcccattccagccttaagagttgtggaagagaagaaaaagaaaaagaagaagaaaggcagaagcttccaaggaaaatagagatatagaaatctctactgaagaggaaaaggatactggagatctaaaagatagctctctcttgaaaacaaaaaggaaacataagaaaaaacataaagagagacataaaatgggagaagaagttataccattaagagtgctatcaaagagcgaatggatggatttgaaaaaagagtatttagcgctacaaaaagctagcatggcttctttaaaaaaaacaatatcccaaataaaatcagagtcagaaatggaaacagacagtggagtacctcaaaacactggaatgaaaaatgaaaaaacagccaacagggaagagtgtcgcacccaggagaaagttaatgcaacaggaccacagttcgtgagtggagtgattgtgaagatcattagcacagagcctctacctggcaggaaacaagtccgggatactttggcagcaatctcagaagttctttatgttgatttgctagaaggggatacagaatgccatgctagatttaagactcctgaggatgctcaagcagtaataaatgcctatacagaaattaacaaggaacactgctggaaactcgagatcctttctggtgatcacgaacaaaggtattggcagaagattttggttgatagacaggcaaaacttaatcagcctcgggaaaagaaaagaggcactgaaaagttaatcaccaaagctgaaaagattagactggcaaagactcaacaagcgagtaaacatataagattttctgaatatgattgaaaaaaaaaacagttcacctcttaatacttcacaagatacttgagctgttcttgggagattcacttttattatggtagcactgcataattaatgtgtttttaattaaaagaaatatctttgttccttaacttgtaaataagacttttttctagagacaaatatgatgtataccacaatttttcttaaacattttatttgttgaaattatcttagatgtcagtgtcaggtgatttagtaaataaatgtgttttgaacattaaaa

SEQ ID NO: 746 - DNA, 5128 bp, Homo sapiens
actctggagtgggagtgggagcgagcgcttctgcgactccagttgtgagagccgcaagggcatgggaattgacgccactcaccgacccccagtctcaatctcaacgctgtgaggaaacctcgactttgccaggtccccaagggcagcggggctcggcgagcgaggcacccttctccgtccccatcccaatccaagcgctcctggcactgacgacgccaagagactcgagtgggagttaaagcttccagtgagggcagcaggtgtccaggccgggcctgcgggttcctgttgacgtcttgccctaggcaaaggtcccagttccttctcggagccggctgtcccgcgccactggaaaccgcacctccccgcagcatgggcaccagcctcagcccgaacgacccttggccgctaaacccgctgtccatccagcagaccacgctcctgctactcctgtcggtgctggccactgtgcatgtgggccagcggctgctgaggcaacggaggcggcagctccggtccgcgcccccgggcccgtttgcgtggccactgatcggaaacgcggcggcggtgggccaggcggctcacctctcgttcgctcgcctggcgcggcgctacggcgacgttttccagatccgcctgggcagctgccccatagtggtgctgaatggcgagcgcgccatccaccaggccctggtgcagcagggctcggccttcgccgaccggccggccttcgcctccttccgtgtggtgtccggcggccgcagcatggctttcggccactactcggagcactggaaggtgcagcggcgcgcagcccacagcatgatgcgcaacttcttcacgcgccagccgcgcagccgccaagtcctcgagggccacgtgctgagcgaggcgcgcgagctggtggcgctgctggtgcgcggcagcgcggacggcgccttcctcgacccgaggccgctgaccgtcgtggccgtggccaacgtcatgagtgccgtgtgtttcggctgccgctacagccacgacgaccccgagttccgtgagctgctcagccacaacgaagagttcgggcgcacggtgggcgcgggcagcctggtggacgtgatgccctggctgcagtacttccccaacccggtgcgcaccgttttccgcgaattcgagcagctcaaccgcaacttcagcaacttcatcctggacaagttcttgaggcactgcgaaagccttcggcccggggccgccccccgcgacatgatggacgcctttatcctctctgcggaaaagaaggcggccggggactcgcacggtggtggcgcgcggctggatttggagaacgtaccggccactatcactgacatcttcggcgccagccaggacaccctgtccaccgcgctgcagtggctgctcctcctcttcaccaggtatcctgatgtgcagactcgagtgcaggcagaattggatcaggtcgtggggagggaccgtctgccttgtatgggtgaccagcccaacctgccctatgtcctggccttcctttatgaagccatgcgcttctccagctttgtgcctgtcactattcctcatgccaccactgccaacacctctgtcttgggctaccacattcccaaggacactgtggtttttgtcaaccagtggtctgtgaatcatgacccagtgaagtggcctaacccggagaactttgatccagctcgattcttggacaaggatggcctcatcaacaaggacctgaccagcagagtgatgattttttcagtgggcaaaaggcggtgcattggcgaagaactttctaagatgcagctttttctcttcatctccatcctggctcaccagtgcgatttcagggccaacccaaatgagcctgcgaaaatgaatttcagttatggtctaaccattaaacccaagtcatttaaagtcaatgtcactctcagagagtccatggagctccttgatagtgctgtccaaaatttacaagccaaggaaacttgccaataagaagcaagaggcaagctgaaattttagaaatattcacatcttcggagatgaggagtaaaattcagtttttttccagttcctcttttgtgctgcttctcaattagcgtttaaggtgagcataaatcaactgtccatcaggtgaggtgtgctccatacccagcggttcttcatgagtagtgggctatgcaggagcttctgggagatttttttgagtcaaagacttaaagggcccaatgaattattatatacatactgcatcttggttatttctgaaggtagcattctttggagttaaaatgcacatatagacacatacacccaaacacttacaccaaactactgaatgaagaagtattttggtaaccaggccatttttggtgggaatccaagattggtctcccatatgcagaaatagacaaaaagtatattaaacaaagtttcagagtatattgttgaagagacagagacaagtaatttcagtgtaaagtgtgtgattgaaggtgataagggaaaagataaagaccagaaattcccttttcaccttttcaggaaaataacttagactctagtatttatgggtggatttatccttttgccttctggtatacttccttacttttaaggataaatcataaagtcagttgctcaaaaagaaatcaatagttgaattagtgagtatagtggggttccatgagttatcatgaattttaaagtatgcattattaaattgtaaaactccaaggtgatgttgtacctcttttgcttgccaaagtacagaatttgaattatcagcaaagaaaaaaaaaaaagccagccaagctttaaattatgtgaccataatgtactgatttcagtaagtctcataggttaaaaaaaaaagtcaccaaatagtgtgaaatatattacttaactgtccgtaagcagtatattagtattatcttgttcaggaaaaggttgaataatatatgccttgtgtaatattgaaaattgaaaagtacaactaacgcaaccaagtgtgctaaaaatgagcttgattaaatcaaccacctatttttgacatggaaatgaagcagggtttcttttcttcactcaaattttggcgaatctcaaaattagatcctaagatgtgttcttatttttataacatctttattgaaattctatttataatacagaatcttgttttgaaaataacctaattaatatattaaaattccaaattcatggcatgcttaaattttaactaaattttaaagccattctgattattgagttccagttgaagttagtggaaatctgaacattctcctgtggaaggcagagaaatctaagctgtgtctgcccaatgaataatggaaaatgccatgaattacctggatgttctttttacgaggtgacaagagttggggacagaactcccattacaactgaccaagtttctcttctagatgattttttgaaagttaacattaatgcctgctttttggaaagtcagaatcagaagatagtcttggaagctgtttggaaaagacagtggagatgaggtcagttgtgttttttaagatggcaattactttggtagctgggaaagcataaagctcaaatgaaatgtatgcattcacatttagaaaagtgaattgaagtttcaagttttaaagttcattgcaattaaacttccaaagaaagttctacagtgtcctaagtgctaagtgcttattacattttattaagctttttggaatctttgtaccaaaattttaaaaaagggagtttttgatagttgtgtgtatgtgtgtgtggggtggggggatggtaagagaaaagagagaaacactgaaaagaaggaaagatggttaaacattttcccactcattctgaattaattaatttggagcacaaaattcaaagcatggacatttagaagaaagatgtttggcgtagcagagttaaatctcaaataggctattaaaaaagtctacaacatagcagatctgttttgtggtttggaatattaaaaaacttcatgtaattttattttaaaatttcatagctgtacttcttgaatataaaaaatcatgccagtatttttaaaggcattagagtcaactacacaaagcaggcttgcccagtacatttaaattttttggcacttgccattccaaaatattatgccccaccaaggctgagacagtgaatttgggctgctgtagcctatttttttagattgagaaatgtgtagctgcaaaaataatcatgaaccaatctggatgcctcattatgtcaaccaggtccagatgtgctataatctgtttttacgtatgtaggcccagtcgtcatcagatgcttgcggcaaaagaaagctgtgtttatatggaagaaagtaaggtgcttggagtttacctggcttatttaatatgcttataacctagttaaagaaaggaaaagaaaacaaaaaacgaatgaaaataactgaatttggaggctggagtaatcagattactgctttaatcagaaaccctcattgtgtttctaccggagagagaatgtatttgctgacaaccattaaagtcagaagttttactccaggttattgcaataaagtataatgtttattaaatgcttcatttgtatgtcaaagctttgactctataagcaaattgcttttttccaaaacaaaaagatgtctcaggtttgttttgtgaattttctaaaagctttcatgtcccagaacttagcctttacctgtgaagtgttactacagccttaatattttcctagtagatctatattagatcaaatagttgcatagcagtatatgttaatttgtgtgtttttagctgtgacacaactgtgtgattaaaaggtatactttagtagacatttataactcaaggataccttcttatttaatcttttcttatttttgtactttatcatgaatgcttttagtgtgtgcataatagctacagtgcatagttgtagacaaagtacattctggggaaacaacatttatatgtagcctttactgtttgatataccaaattaaaaaaaaattgtatctcattacttatactgggacaccattaccaaaataataaaaatcactttcataatcttgaaaaaa

SEQ ID NO: 747 - DNA, 1700 bp, Homo sapiens
cctagtcccagcccagggggccgctctcgccggcgtcgagggcgtggcggcgaggctgctgctgcaggcggctcccggctctgccttcggccccgcccgccgcccaccaggctcccagaggccccgcagctcgcgccgtccggctccccgcagccccgtcgggcagcccgggcccgtccgctgccctcccggctcccgtcctgcggcggcggggcgtgcaggtgaggccccacggcgcccggcctctccagcagtgggtgcctgatagacatcctaggactatacagaaggaaaaggcccactttgggggataatgctgagggacactatgaaatcttggaatgatagccagtcagatctgtgtagcactgaccaagaagaggaagaagagatgatttttggtgaaaatgaagatgatttggatgagatgatggatttaagtgatctgcctacctcactttttgcttgcagcgtccatgaagcagtgtttgaggcacgagagcagaaggaaagatttgaagcactcttcaccatctatgatgaccaggttacttttcagctgtttaaaagctttagaagagtcagaataaatttcagcaaacctgaagcggcagcaagagcgcgaatagaactccacgaaacagacttcaatgggcagaagctaaagctatattttgcacaggtgcagatgtccggcgaagtgcgggacaagtcctatctcctgccgccccagcctgtcaagcagttcctcatctcccctccagcctctcccccggtggggtggaagcagagcgaagatgcgatgcctgttataaattatgatttactctgtgctgtttccaaattgggaccaggagagaaatatgaacttcacgcgggaacagagtcgacacccagcgtggtggttcatgtctgtgaaagtgaaactgaagaggaagaagagacaaaaaaccccaaacagaaaattgcccagacgaggcgccccgaccctccgaccgcagcgttgaatgagccccagacctttgattgcgcgctgtgaggcccttggttgtggtgcgaggcggctgccctggtgggctctggccatggcgctctgtgcctgcggccgatgcgttgctgcgaacagcataggtgagactctgccgagtgaggtataggtcttctcaccacgcctgtactgcagacacggtcgtgtagagtagcagctgatttgacctgtcccagattttaagtgatattccaaaagggactttacattaaaggagaagcccccaagatgtggccacccttaaccatttttaaatagtaacaaattaggaaaacagctcccctcccctccagccatgtaagtcctcctgattctgtatcacatgagacaccaaaaactggaaatgtagtcacacccagtacagtaccatttttatgaatttaaaaatagtcttataattttaattgtttgtgggtatttttctactggtataaatagcttctaattaataaatcgatcaaaggttgttactcagtatacatgaaattttttgcaggaaaagaaaccagaaatacagaataattcatagaaatcatggttctcaagtatttgttcaattagctttggggaagaaatgccaaatccactttgaggatgagtcttacgacacagatccacccacatgttgctcttatctggaatttgggacaaa

SEQ ID NO: 748 - DNA, 3678 bp, Homo sapiens
cggggctgattctctggctgtgtggggcgcacggtcccgggatactggggacggcggggtgggagggcgccgtcctggggccgcggcggccgggcgggggagatggcggcgcgatggagcagcgaaaacgtggttgtagagttccgtgactcccaggcaactgcgatgtctgtggactgtcttgggcagcatgcagtgctttctggccgcagattcttatacatcgtcaatctagatgcccctttcgaaggtcaccgaaagatctctcgccagagcaaatgggacattggagctgtgcagtggaatcctcatgacagctttgcacactattttgcggcttcgagtaaccaacgagtagacctttacaagtggaaagacggcagtggggaagttggcacaaccttacaaggccacactcgtgtcatcagcgacttggactgggcggtgtttgagcctgacctcctggttaccagctctgtggacacctacatctacatttgggatatcaaagacacaaggaaacctactgttgcactgtctgctgttgcgggtgcctcccaggtcaaatggaataaaaaaaatgctaactgccttgccaccagccatgacggcgatgtgcggatatgggataagaggaaacccagtacagcagtggaatatctagccgcccacctctccaaaatccatggcctggactggcacccagacagcgagcacattcttgctacctccagtcaagacaattctgtgaagttctgggattaccgccagcctcggaaatacctcaatattcttccttgccaggtgcctgtctggaaggccagatacacacctttcagcaatggattggtgactgtgatggttccccagctgcggagggaaaacagccttctcctgtggaatgtctttgacttgaacaccccagtccacaccttcgtggggcatgatgatgtggtcctggagttccagtggaggaagcagaaggaagggtccaaggactatcaactggtgacgtggtcccgggatcagaccttgagaatgtggcgggtggattcccagatgcagaggctttgtgcaaatgacatattagatggtgttgatgagttcattgagagtatttcccttctgccggaacctgagaagaccctgcacactgaagatacagatcaccagcacactgcaagccatggggaggaagaagccctaaaagaagatccccctagaaatctcctggaagagaggaaatcagatcaactggggctgcctcagaccttgcagcaggaattctccctgatcaatgtgcaaatccggaatgtcaatgtggagatggatgcggcagacaggagctgcacagtgtctgtgcactgcagcaaccatcgtgtcaagatgctggtgaagttccctgcacagtacccaaacaacgccgccccttccttccagtttattaaccccacaaccatcacatccaccatgaaagctaagctgctgaagatcctgaaggacacagccctgcagaaagtgaagcgtggccagagctgcctggagccctgcctgcgccagctcgtctcctgccttgagtcctttgtgaaccaggaagacagcgcttccagcaacccgtttgcactccccaactctgtcactccccccttaccgacgtttgcgcgggtgaccacggcttacgggtcgtaccaggacgccaacattccctttcctaggacttctggggccaggttctgcggagcaggttacctggtatatttcacaaggcccatgacaatgcatcgggcggtgtctcccacagagcctactccgagatctctctcagccttgtctgcttatcacactggcttgatcgcgcccatgaagatccgcacagaggcccctgggaaccttcgtttatacagtgggagccccactcgcagcgagaaagagcaggtctccatcagctccttctactacaaggagcggaaatcaagacgatggaaaagtaagcgtgagggatcagactctggcaatcgacagatcaaggctgctgggaaagtcatcatccaggatattgcttgcctcctgcctgttcacaaatcgctgggagagctgtacatattgaatgtgaatgatattcaggaaacatgtcagaagaatgccgcctctgccttgctcgttggaagaaaggatcttgtccaggtttggtcgctggctacggtagctacagatctttgccttggtccgaaatctgacccagatttggaaacaccctgggctcgacatccatttgggcggcagctgctggagtccctgttggctcactattgccggctccgggatgttcagacactggcgatgctctgtagcgtgtttgaagcccagtctcggcctcaggggctaccaaacccctttgggccttttcctaaccgttcttctaatcttgtggtgtcccatagtcgatatcctagctttacctcttctggttcctgctccagtatgtcagacccagggctcaacactggcggctggaacatagcgggaagagaggcagagcacttgtcctccccttggggagaatcctcaccagaagagctccgctttgggagtctgacctacagtgatccccgtgagcgagaacgcgaccagcatgataaaaataaaaggctcctggaccccgccaatacccagcaatttgatgactttaagaaatgctatggggaaatcctctaccgttggggtctgagagagaagcgagctgaagtgttgaagtttgtctcctgtcctcctgaccctcacaaagggatcgagttcggcgtgtactgcagccactgccggagtgaggtccgtggcacgcagtgtgccatctgcaaaggcttcacgttccagtgtgccatctgtcacgtggctgtgcggggatcgtccaatttctgcctgacctgtgggcacggtggccacaccagccacatgatggagtggtttcggacccaggaggtgtgtcccaccgggtgtgggtgccactgcctgcttgaaagcactttctgaacctacagaagttgggtattgtctgaaatcccagaggacccataagtgccggtgacaagctgtctgtcaggggagaggctccagaacctgggttcgtccccagtgagaccggaggatgatcccccaaggactgcgcagcatcagctcttggtgggcctctgccttctcttctgtttggccacctggtgtggatgtcactgtgtgaagataaggacagaagtgcagagctgcgctttgtgtgttgtctatgtcggctgagctaccaaggtggaagttttcatggagaaaagcacctggctccagggccagtgttacagtgttaccctgtaaggtgttagccttaaaccaccgagcagcgttctcttgatgccagtgcagagaccagagtcagatgcccgaggacagtgggtaggaatttcatcaacaaatggacctatggcatcatggctttagaagctggtacatttactgagctgatggacagtggccttctaaaatatgacacttaaattgtaaatatgcactgtacttaaggattcttaagatgtatttttttgttatttctcctccagctgctatcccttggctaataaaattctagtaatttgaaaaaaaaaaaaaagagagaaagttaaaaaaaaaaaaaaaaaa

SEQ ID NO: 749 - DNA, 3393 bp, Homo sapiens
gtttccgggacgttcggagggtggcctctctcccaccgggttccgcataccccaggcaccggcccgcatccaagtgtcaggttggagccgggaagcggccctggtggtagcggcggcgggggcaggatgagcgcggaggcggcggaccgggaggcggccacctccagccggccctgcaccccgccgcagacctgctggtttgagtttctgctggaggagtcactgttggagaaacatctgcgcaagccctgcccggatcctgcaccagttcaacttatagttcagtttttggaacaggcttccaaaccttcagttaatgaacaaaaccaagttcaacctccgcctgataacaagagaaatcgtattttaaaactacttgctcttaaagttgctgcacatttgaagtgggacttagacatattagagaaaagtttgtctgttccagtattgaatatgctactaaatgaactactctgcatcagtaaagttcctcctgggacaaagcatgtagacatggatctggccactttacctccgaccactgccatggctgtacttctctataatagatgggcaattaggacaattgttcaaagtagttttccagtcaaacaggcaaaacccggaccccctcagttaagtgttatgaatcaaatgcaacaggaaaaagagctaacagaaaacattttgaaagtgctcaaagaacaagctgctgattctattttggtactagaagcagccctaaaattaaacaaggatctttatgtccatacgatgagaactctagatttattggccatggaaccaggcatggtaaatggagaaactgagagttctactgctggattgaaagtcaaaaccgaagaaatgcagtgccaggtgtgctatgatttgggcgcagcatacttccagcaaggctccacaaattcagctgtctatgaaaatgccagggaaaaattttttagaaccaaagaactaattgcagagataggttcattatctcttcattgtaccatagatgagaagcggttagctggctattgtcaagcatgtgatgttcttgtaccttcttctgatagtacatctcaacagttgactccatatagtcaagtccatatttgtttgagatctggcaactatcaggaggtaatacagattttcattgaagacaacttaaccttgagtttacctgtccagttccgacagtcagtcctaagagaactctttaagaaagctcaacagggaaatgaagctctagatgaaatctgttttaaagtttgtgcctgtaatacagtccgtgatatactggaaggcagaacaattagtgttcaatttaaccagctatttcttagaccaaataaagagaaaatagactttcttcttgaggtatgttcaagatcagtaaatttagaaaaagcttcagagtctttgaaaggaaacatggctgcttttctaaagaatgtgtgtctggggttggaagatctgcagtatgttttcatgatttcttcacatgagcttttcattacattgttgaaagatgaagaacgaaagctacttgttgatcagatgaggaagagatcccctagagtaaatctgtgcattaaacctgtaacttcattttatgatatcccagcttcagcaagtgtcaacattggtcagttagagcatcaacttatattgtcagtggatccttggaggattagacaaattttaattgaattacatggtatgacttcagagcgccagttctggacagtgtctaataagtgggaagtaccttctgtctatagtggtgttatcctgggaattaaagacaatttaacaagagatttggtttatattcttatggccaaaggtttgcactgcagtactgttaaggacttttcccatgctaaacagctctttgctgcttgtttggagttggtaacagagttctcaccgaagcttcgtcaggtcatgctgaatgagatgttgcttttggatattcatacacacgaagctgggacagggcaggcaggagagagaccgccatccgaccttataagtagagtacgaggctatctggaaatgaggcttcctgatattcctcttcgtcaagttatagctgaggaatgtgttgcctttatgttaaactggagagaaaatgaataccttacactccaagttcctgcatttttgcttcagagtaatccatatgtaaagcttggacagcttttagcagctacatgcaaagaacttccaggccctaaagaaagcagacggactgccaaagacctttgggaagttgttgttcaaatctgtagtgtgtccagtcagcacaaacgaggaaatgatggcagagttagtttaataaaacagagggaatctacgttaggtatcatgtatcggagtgaactgctttcttttatcaaaaaattacgagaaccactcgttttgactattattttatcactctttgtgaaacttcacaatgttcgggaggacattgtgaatgatattacagctgaacacatttctatttggccatcttccattcccaacctccagtctgtggactttgaagctgtggcaatcacagtgaaagagctagttcgatatacactcagtataaatccaaataaccattcttggttaattatccaggcagatatttactttgcaacgaatcagtattcagcagctcttcactattacctccaggcaggagctgtgtgttctgacttctttaacaaggctgtgccccctgatgtttatacagaccaggtaataaaacgaatgataaaatgttgttctttgctgaattgccacacacaggtggctattttatgtcagttcctcagagaaattgactacaaaacagcgtttaaatctctgcaagaacaaaacagtcatgatgctatggactcctactacgactacatatgggatgttaccattttggaatacttgacttatcttcatcataaaagaggagaaacagataaaagacaaattgcaatcaaagccatcggccagacagagttgaatgcaagcaatccagaagaagtgttacagctggcagcgcagagaaggaaaaaaaagtttctccaagcaatggcaaaactttacttttaagcagttaaatttttttaacttttattttttaaacaatgggctaaaaataaacagtattaaaaggttaagtttatataatacatatgtacacaattagtggtgttttcttttcagacaaaatactgaaacaaatattagtttaaaaacaaactatacagaagacttcataccgtaacaataaatgtatagtttcttcaaagggagaagagattcacatatctgataacaaaataaactagcaatctagttttctaatctaaaaaaaaaaaaaaaaaaaaa

SEQ ID NO: 750 - DNA, 1859 bp, Homo sapiens
cgcaagcagctggatctccggtaactgagacatagggtataactgttgtcgcggcggaggaagtgaggacggcgccaagggccttccgggccagtgttggatccctgtagtttgtgaagatggtgttgctaacaatgatcgcccgagtggcggacgggctcccgctggccgcctcgatgcaggaggacgaacagtctggccgggaccttcaacagtatcagagtcaggctaagcaactctttcgaaagttgaatgaacagtcccctaccagatgtaccttggaagcaggagccatgacttttcactacattattgagcagggggtgtgttatttggttttatgtgaagctgccttccctaagaagttggcttttgcctacctagaagatttgcactcagaatttgatgaacagcatggaaagaaggtgcccactgtgtcccgaccctattcctttattgaatttgatactttcattcagaaaaccaagaagctctacattgacagtcgtgctcgaagaaatctaggctccatcaacactgaattgcaagatgtgcagaggatcatggtggccaatattgaagaagtgttacaacgaggagaagcactctcagcattggattcaaaggctaacaatttgtccagtctgtccaagaaataccgccaggatgcgaagtacttgaacatgcgttccacttatgccaaacttgcagcagtagctgtatttttcatcatgttaatagtgtatgtccgattctggtggctgtgaaataatgaatacagtcactggtaagggagaacctagaacccagtaggtgtatattttcaggaaactgagctcacagagatgtgtattagaatccaagtggaacttctgcctctaaagaccttgcaagaaaagagatgccctgaaaatgaaaggttgcacctcatttaatgaagcttaaccctatgtagaaagtctctttcgggggcagaggctttctctgggtgccaagccatatatattagggaatagtagattgttaatttcgttttttccctcccagtgcattttaaaaacagcactggctggggcattctcattctctgatggagccatcaatgagatttaacttagtcaacctgtgctagcaacattctgaaattccttcaaagaaggcagtcctttgggaaggtgttttttttttttttttttttttgactctaatcaacattccttttgttggtgacatttgtgattttcagtaatctgagtttttgatggccttttaaacaagactccagtatgtgaaggttaattgctgtgctccacagatctcgtctattggcccctgtagaaagttaacctttgttgttttccttttataatttgcttattgcacaattgctttagggtaagtgaattatattaagatgccttgaaattatagcactccttgattaagaagctaaaatgtttctctcatttactccttaaacaaaagacttaaattagtttgggtcattattacttttattttgcagcatttggtttgttattagcgtaagagcaagtataggatatggagaggcccctggcttcatgagaacaaaggcaggcccaggttataattacagctttctcctgccccttctttactttctctaccacagttttctccactgtttgttttcctcttgccacaatttgctaacatttaaaaaattttcctgcacccagtagtttcatatcctgtagacatcctcttaggacattctcaaatttcaaaataaaaaatattcatctatgtagttaattaaagttaaagtttttgcagatcaactactcaaactactaaatacatttacctgagaaaaa

SEQ ID NO: 751 - DNA, 698 bp, Homo sapiens
ggcgccgccgcaaacgtcagtgtacgaggcagacggcggcagtgcggcttgctcttggaagttcaggctcggttgtcttttgggagccatggagagtgacttttatctgcgttactacgtggggcacaagggcaagttcggccacgagttcctggagtttgagtttcgaccggacgggaagttaagatatgccaacaacagcaattacaagaatgatgtcatgatcagaaaagaggcttatgtacataaaagcgtgatggaggaactgaagagaataattgacgacagtgaaattaccaaagaggatgatgcattgtggcctcctcctgaccgagtgggccggcaggagcttgaaatcgtcattggagatgaacacatttcttttacaacatcaaaaattggttcccttattgatgtcaatcaatccaaggatccagaaggcttacgagtattttattatcttgtccaggacctgaagtgtttggtcttcagtcttattggattacacttcaagattaaaccaatctagactgaatattggtgtggacatggggggtgggtgggagtagaaaattttgtgtatatcagggcagtatttttttatgaactataaatgattgtctttaataaatatgtgataaaatccaatttttattattttataaagacctgaacatgtgaaaaaaaaaaaaaaaaaa

SEQ ID NO: 752 - DNA, 2110 bp, Homo sapiens
gaacccggtctcccgcaagatggagccgggttgggctgtgacgctgctgctggggtcagaatgtcatacccaggctatcccccaacaggctacccacctttccctggatatcctcctgcaggtcaggagtcatcttttcccccttctggtcagtatccttatcctagtggctttcctccaatgggaggaggtgcctacccacaagtgccaagtagtggctacccaggagctggaggctaccctgcgcctggaggttatccagcccctggaggctatcctggtgccccacagccagggggagctccatcctatcccggagttcctccaggccaaggatttggagtcccaccaggtggagcaggcttttctgggtatccacagccaccttcacagtcttatggaggtggtccagcacaggttccactacctggtggctttcctggaggacagatgccttctcagtatcctggaggacaacctacttaccctagtcagcctgccacagtgactcaggtcactcaaggaactatccgaccagctgccaacttcgatgctataagagatgcagaaattcttcgtaaggcaatgaagggttttgggacagatgagcaggcaattgtggatgtggtggccaaccgttccaatgatcagaggcaaaaaattaaagcagcatttaagacctcctatggcaaggatttaatcaaagatctcaaatcagagttaagtggaaatatggaagaactgatcctggccctcttcatgcctcctacgtattacgatgcctggagcttacggaaagcaatgcagggagcaggaactcaggaacgtgtattgattgagattttgtgcacaagaacaaatcaggaaatccgagaaattgtcagatgttatcagtcagaatttggacgagaccttgaaaaggacattaggtcagatacatcaggacattttgaacgtttacttgtgtccatgtgccagggaaatcgtgatgagaaccagagtataaaccaccaaatggctcaggaagatgctcagcgtctctatcaagctggtgaggggagactagggaccgatgaatcttgctttaacatgatccttgccacaagaagctttcctcagctgagagctaccatggaggcttattctaggatggctaatcgagacttgttaagcagtgtgagccgtgagttttccggatatgtagaaagtggtttgaagaccatcttgcagtgtgccctgaaccgccctgccttctttgctgagaggctctactatgctatgaaaggtgctggcacagatgactccaccctggtccggattgtggtcactcgaagtgagattgaccttgtacaaataaaacagatgttcgctcagatgtatcagaagactctgggcacaatgattgcaggtgacacgagtggagattaccgaagacttcttctggctattgtgggccagtaggagggatttttttttttttaatgaaaaaaaaatttctattcatagcttatccttcagagcaatgacctgcatgcagcaatatcaaacatcagctaaccgaaagagctttctgtcaaggaccgtatcagggtaatgtgcttggtttgcacatgttgttattgccttaattctaattttattttgttctctacatacaatcaatgtaaagccatatcacaatgatacagtaatattgcaatgtttgtaaaccttcattcttactagtttcattctaatcaagatgtcaaattgaataaaaatcacagcaatctctgattctgtgtaataatattgaataattttttagaaggttactgaaagctctgccttccggaatccctctaagtctgcttgatagagtggatagtatgttaaaactgtgtactttaaaaaaaaattcaacctttacatctagaataatttgcatctcattttgcctaaattggttctgtattcataaacactttccacatagaaaatagattagtattacctgtggcaccttttaagaaagggtcaaatgtttatatgcttaagatacatagcctccctttttttcgcgttgtttcctttttttaaattgagttatgacaaataaaaaattgcatat

SEQ ID NO: 753 - DNA, 2176 bp, Homo sapiens
gaacccggtctcccgcaagatggagccgggttgggctgtgacgctgctgctggggtcagaatgtcatacccaggctatcccccaacaggctacccacctttccctggatatcctcctgcaggtcaggagtcatcttttcccccttctggtcagtatccttatcctagtggctttcctccaatgggaggaggtgcctacccacaagtgccaagtagtggctacccaggagctggaggctaccctgcgcctggaggttatccagcccctggaggctatcctggtgccccacagccagggggagctccatcctatcccggagttcctccaggccaaggatttggagtcccaccaggtggagcaggcttttctgggtatccacagccaccttcacagtcttatggaggtggtccagcacaggttccactacctggtggctttcctggaggacagatgccttctcagtatcctggaggacaacctacttaccctagtcagatcaatacagattctttttcttcctatcctgttttctctcctgtttctttggattatagcagtgaacctgccacagtgactcaggtcactcaaggaactatccgaccagctgccaacttcgatgctataagagatgcagaaattcttcgtaaggcaatgaagggttttgggacagatgagcaggcaattgtggatgtggtggccaaccgttccaatgatcagaggcaaaaaattaaagcagcatttaagacctcctatggcaaggatttaatcaaagatctcaaatcagagttaagtggaaatatggaagaactgatcctggccctcttcatgcctcctacgtattacgatgcctggagcttacggaaagcaatgcagggagcaggaactcaggaacgtgtattgattgagattttgtgcacaagaacaaatcaggaaatccgagaaattgtcagatgttatcagtcagaatttggacgagaccttgaaaaggacattaggtcagatacatcaggacattttgaacgtttacttgtgtccatgtgccagggaaatcgtgatgagaaccagagtataaaccaccaaatggctcaggaagatgctcagcgtctctatcaagctggtgaggggagactagggaccgatgaatcttgctttaacatgatccttgccacaagaagctttcctcagctgagagctaccatggaggcttattctaggatggctaatcgagacttgttaagcagtgtgagccgtgagttttccggatatgtagaaagtggtttgaagaccatcttgcagtgtgccctgaaccgccctgccttctttgctgagaggctctactatgctatgaaaggtgctggcacagatgactccaccctggtccggattgtggtcactcgaagtgagattgaccttgtacaaataaaacagatgttcgctcagatgtatcagaagactctgggcacaatgattgcaggtgacacgagtggagattaccgaagacttcttctggctattgtgggccagtaggagggatttttttttttttaatgaaaaaaaaatttctattcatagcttatccttcagagcaatgacctgcatgcagcaatatcaaacatcagctaaccgaaagagctttctgtcaaggaccgtatcagggtaatgtgcttggtttgcacatgttgttattgccttaattctaattttattttgttctctacatacaatcaatgtaaagccatatcacaatgatacagtaatattgcaatgtttgtaaaccttcattcttactagtttcattctaatcaagatgtcaaattgaataaaaatcacagcaatctctgattctgtgtaataatattgaataattttttagaaggttactgaaagctctgccttccggaatccctctaagtctgcttgatagagtggatagtatgttaaaactgtgtactttaaaaaaaaattcaacctttacatctagaataatttgcatctcattttgcctaaattggttctgtattcataaacactttccacatagaaaatagattagtattacctgtggcaccttttaagaaagggtcaaatgtttatatgcttaagatacatagcctccctttttttcgcgttgtttcctttttttaaattgagttatgacaaataaaaaattgcatat

SEQ ID NO: 754 - DNA, 2155 bp, Homo sapiens
gtcgcgacgggggttcagggaatatttactgggcctctccgctccctctgctcttggaggtgccatgaggtcagttagctacgtgcagcgcgtggcgctggagttcagcgggagcctcttcccgcacgcaatctgcctcggagacgttgataacgatacgttaaatgaactggtggtgggagacaccagcgggaaggtgtctgtgtataaaaatgatgacagtcggccatggctcacctgttcctgccagggaatgctgacttgcgctggggttggagacgtgtgtaataaaggaaagaacctgttggtggcagtgagtgctgaaggctggtttcatttgtttgacctgacacctgccaaggtgttggatgcttctgggcaccacgagacactaatcggagaggagcagcgtccagtcttcaagcagcacatccctgccaacaccaaggtcatgctgatcagcgacatcgatggagatgggtgtcgtgagctggtggtgggctacacagaccgtgtggtgcgagctttccgctgggaggagctaggtgagggtcctgaacatctgacagggcagctggtgtccctcaagaaatggatgctggagggtcaggtggacagcctctcagtgactctggggccactgggtcttcctgaactgatggtgtctcagccaggttgtgcgtatgcaattctactgtgtacctggaaaaaggacactgggtcccctcctgcctctgaagggcccacggatggtagtagggagaccccagctgcccgagacgtggtgctgcaccagacatctggccgtatccacaacaagaatgtctccactcacctaattggcaacatcaaacaaggccacggcactgagagtagtggctctggcctctttgccctgtgcaccctggatgggacactgaagctcatggaagaaatggaagaagcagacaagctgctgtggtcagtgcaggtggatcaccagctctttgccctggagaaactggatgtcaccggcaacgggcatgaggaggtagttgcatgcgcctgggatggacagacatatatcattgatcacaaccgcaccgtcgtccgcttccaagtggatgaaaatatccgtgccttctgtgcgggcctgtacgcctgcaaagagggccgcaacagcccctgcctcgtatatgtcactttcaaccagaagatctatgtgtactgggaggtgcagctggagcggatggagtctaccaatctggtgaaactgctggagaccaagccggagtaccacagcctgctgcaggagctgggcgtggatcctgacgacctccctgtgactcgtgccctgcttcaccaaacgctctaccatccagaccagccaccacagtgtgctccctcaagcctccaggatcccacctagctgtacttgcctcatagctggtgaaggattcttctgaacccccaccctaccccctaaaggtatctgtggtattggcaggatagggaatatgcattacagaaatgcaggatttgactctgggcatgaaagatggcagcagccctagggtgaccgtgaactatagacctcgcagtcttttcggtgaaagaagagacaagttgaccctctgcccatttccttatggacctcacccatcatgccagcagggtcataggaccctggccttgttccaaatcatctgggacatgacccactccccactgtcactgtgttgaaaacagagacttgtttgtgtggccccaacacccataaggaaaccaggctttaggcccaggggagcagtggaggtaagggctccaccccatcttaagctctgtcttccgtggcacaattccaagttcttgacgttagtaattgttaaaggaatggcaaactgttttgttttgaaggatctttctacagtctggtcttacccatgttcctagcaaccctgagatgattttcttccatttaccaaagcagccgggtcagtgccttctcacgttgccgtattcttcaggtattagtcagcttcagaagccctgctcccatttttccacccacccattcccccataaaacagcttattgtctccaagacaatagacatttaaaatgtgatgcgggtttatgatccagaccacaatcagaattatatcttgggtcattt

SEQ ID NO: 755 - DNA, 2358 bp, Homo sapiens
agcagtttacggaagtgtaacgttgaggcccttcttgtgtatctggagaaaatagaggttctgactcctcaggagcaaaaaacataacctgaagagggaggaagtggatttggggttcaccatttcttggggcacacttgattgaaaactgagacttctgaagagaaggccagaagatacaaagacagaccatcccagttgaatgctgtcttccaagaacagaagaaaatgatccaggcccaggaatccataacactggaggatgtggctgtggacttcacttgggaggagtggcaactcctgggcgctgctcagaaggacctgtaccgggatgtgatgttggagaactacagcaacctggtggcagtggggtatcaagccagcaaaccggatgcactcttcaagttggaacaaggagaacaactgtggacaattgaagatggaatccacagtggagcctgttcagacatatggaaagttgatcatgtgctggagcgcttgcagagtgaaagcctggtgaacagaaggaaaccatgtcatgaacatgatgcatttgaaaatattgttcattgcagcaaaagtcagtttctgttagggcaaaatcatgatatatttgacttacgtggaaaaagtttgaaatccaatttaactttagttaaccagagcaaaggctatgaaataaagaactctgttgagtttactggaaatggggactcctttcttcatgctaaccatgaacgacttcatactgcaattaaattccctgcaagtcaaaaactcatcagcactaagtcccaattcatcagtcccaagcatcagaaaacacgaaaattagagaagcatcatgtgtgcagtgaatgtgggaaagccttcatcaagaagtcttggctaactgatcaccaggtaatgcatacaggagagaaaccccacagatgtagtctatgtgagaaagccttctccagaaagttcatgcttactgaacatcagcgaactcatacaggagaaaaaccttatgaatgccctgaatgtggcaaagcctttctcaagaaatcacggctcaacatacatcagaaaacacataccggagagaaaccctatatatgcagtgaatgtggaaaaggcttcatccagaaaggaaatctcattgtacaccagcgaattcatacaggtgagaaaccttatatatgcaatgaatgtggaaaaggcttcattcagaagacgtgtctcatagcacatcagagatttcacacaggaaagacgccctttgtgtgcagtgaatgtggaaaatcctgttctcagaaatcaggtctcattaaacatcaaagaattcacacaggagagaaaccctttgaatgtagtgaatgtgggaaagcctttagcacaaagcaaaagctcattgtccatcaaaggactcatacaggagagagaccctatggctgtaacgagtgtgggaaagcgtttgcgtatatgtcgtgtctggttaagcataagagaatacacacaagggagaaacaagaggcagccaaggtggaaaatcctcctgcagagaggcacagctcattacacaccagtgatgtcatgcaggagaaaaactctgctaacggggcgactacacaagtgccttctgtggcccctcagacatcattaaacatcagcggcctcctcgcaaacaggaacgtagtccttgtgggacagccagtggtcagatgtgcagcctcaggagataacagaggatttgcacaggacagaaaccttgtgaatgcagtgaatgtggttgtgccttccgtgatcaattatgtcttattttatgttacagaaaacccataggaagaaaactcagatctatgtggaaaagggttgagcaaaaatttgtagttcattatgtggccgaaaagcatacactgagagaacatgtataaggctgagatagcctgataaactcatcctattaaaatgtatgctgtgatacacaggcaaatttgatgttaacctaagcacatacacagcaattgctcgactgtgtcaattaaatgagtaaaggaagcccaagtacttttaagtggaggaaatgaagtactgtgaatttttaaaacagatgagataattggtgtcgggagtgttgcagtgactgaaaagcttcataaggggcagttggtgggaaagggctaatactgtaatggtggaatgtgggacacatatgtgtcaattcagtttccttagaccagtgccagtgtggaggattaattgaaaaccaggaccataaactttcagaactttgtattatgcagagggatctgtgaaactagtcaatttgtttcattaaacaaatattttaaaattaaaaaaaaaaaaaaaaaa

SEQ ID NO: 756 - DNA, 4577 bp, Homo sapiens
tccgtgaggcgcgggcggcggcgaccgcggcgccagtgagggggccctggggcccgggcggctccgggccggggccccgccgcgggacggaccatgctacgctccactggcttcttccgggccattgactgcccctattggtctggggcgcccggggggccctgccggcggccctactgccacttccggcaccgcggggcccggggccccggcgcgcccggtgacggcggagaggcgccccccgcagcagggctgggttacgacccctacaaccctgagctgcccaagccccccgcgcagagggagaatggcaccctgggcctgggggaggagccgcgcccggatgtgctggagttggagctggtcaaccaggccatcgaggccgtgcgcagtgaggtggagctggagcagcggcgctaccgggagctgctggagacgacccgtgagcaccgctccgccgaggcccccgccctggcgccccgcggccccaacgccagccccactgtgggcccggacgaggatgccttcccactggccttcgactacagccccggcagccacggcctattaagccctgatgccggctaccagcccaccccactggccgcccctgccgagccgggcagcaagtactcgctggcgtccctggacaggggtcagggcagaggtggagggggtggcggtgccctggaatacgtccccaaggctgtgagccagccccggcggcacagccgccccgttcccagtggcaagtacgtggtggacaactccaggccacccacagacctggagtatgaccctctctccaactactcggcccggcacctcagcagggccagctcccgggatgagcgggccgccaagcggccccggggctcccgcggcagtgagccctacacacctgctcccaagaagctctgtgacccctttggcagttgcgatgcaaggttctcagactcagaagatgaggccgccacggtcccaggtaacgagcccaccacggccagcacccccaaagccagggccgaccctgagatcaaggccaccgggcagccaccctccaaagagggcctggaggccgaggggggcggcctgcgggagaccaaggagacggccgtgcagtgcgacgtgggggacctccagccgcccccagccaagcccgcctccccagcccaggtccagtcctcacaggatgggggctgccccaaggagggaaaacccaagaagaaaaaaaccggggccccacctgcccccagctgcaaagacggggcccaggggaaggacaagaccaaggacaagggccgagggcggcctgtggagaagccccgtgcggacaagaagggcccgcaggccagcagcccccggcgcaaggcagagcggccggaagggaccaagaagaagccatcttcggccactcctgtggccacctcagggaaagggaggcctgaccggccagcgcggcggccgagccccacaagcggggactcccgaccggcggccggcagaggcccaccccgccccctccagctgcccgacaggaagagcaccaaggccccgtcggggaagctagtggagcggaaagcccgctcactagacgagggcgcctcccaggacgcccccaagctgaagaagcgggccctgagccacgccgacctctttggggacgagagtgaggacgaggccgcagggccaggggtgccgagcgtgtggccctctgccctccccagcctcagctcggactcagactccgactcagactccagcctgggcttcccggaggcgcaggggccgcccaagcggctcaaggcctccccgcccccctcccccgccccatcctcctcctcctcctcctcctcctccacctccagcgcgggggcggatgtggactactcggccctggagaaggaggtggactttgactccgaccccatggaggagtgcctgcggatcttcaacgagtccaccagcgtcaagacggaggacagaggccggctggcccggcagccccccaaggaagagaagagtgaggagaaggggctttcgggtctgaccactctgttccccgggcagaagaggaggatctcccacctttccaagcaaggccaggaggtggagcccccgaggaggggtcccgcggtgcccccggcccggcccccgacggcgcaggaggtgtgctacctgcgggcccagcaggcgcagagggcatcggcgagcttgctgcaggcccccgccaggctggcagagaagtcgccctccgtccacatttccgcccctggcgagaagaggaggatcgcccacatccccaacccccgcctggctgcagcccccacaggtgccaagaggacccttgcggccagcggcagccagccctccaacggccctgagccaggtggccagcagctgaaaacacgcacattgtcggggatggcgtccaagactaccaccaccatcatccctaagcgaatcgcccacagtccatccttacagagtttaaagaaacccattatccccaaagagtttgggggcaaagtccccaccgtcatccgccagcgctatctcaacctgttcatcgaggagtgtctcaagttctgtacctccaaccaggaggccatagagaaggcactgaacgaggagaaggtggcctatgaccgcagccccagcaagaacatctacctgaatgtggccgtgaacaccctcaagaagctcaggggcctggcccccagcgctgtgcccggcctcagcaaaaccagtggccgcagggttgtgtcccacgaggtggtgttggggggcaggttggccgccaagaccagcttctcgctcagccgtccaagcagcccccgggtggaggacctgaaaggggctgccctgtacagccgcctcagggagtacctgctcacccaggaccagctcaaggagaacggctaccccttcccgcacccagagcggcccgggggcgcaatcatcttcacagctgaggagaagaggcccaaggactcttcctgcaggacctgctgccgctgtggcaccgagtacctcgtgtcctcttcaggccgctgcatccgggacgaggagtgttattaccactggggacggctgcgccggaaccgggtggccggaggctgggagacccagtacatgtgctgctcggctgccgccggctctgtcggctgccaagtcgcaaagcaacacgtgcaggatggccggaaggagcgccttgagggcttcgtgaagacctttgagaaagagctctcaggagacacccacccggggatctacgccctggactgcgagatgtcctacaccacatatggcctggagctgacgcgcgtcacggtggtcgacacggacgtgcacgtggtttatgacaccttcgtgaagcctgacaacgagatcgtggactacaacaccaggttttcgggggtgacggaggctgaccttgccgacacaagtgtcacgctgcgtgacgtccaggccgttctgctgagcatgttcagcgctgacaccatcctcatcggacacagcctggagagcgacctcctggccctgaaggtcatccacagcaccgtggtggacacgtctgtgctcttcccccaccgcctgggcctcccctacaagcggtccctgcggaacctcatggccgactacctcagacagatcatccaggacaatgtggatgggcacagctccagcgaggacgccggcgcctgcatgcacctggtgatctggaaggttcgagaagacgccaagaccaagcgatgacgcctgcccgcctcccacccgcctctcctgccgtcccgctggtccttagccccatgcctcttccaaaacagtgcaataaatctccggtaacccgtccacctggccgaggcagcccagagcagcgggatgagctggcggccagagaacgcccagcccagcccacccccgctcacgtcctgccgcacccctccgccggtccccaccctctgccccccagccctctggcgtctctagaaactgctgctgatggagaccaggacagagcccgcccccacccggcccgcagcccctcctgcccctcctgccaggccctccctcccgggtggtggccggcacctctgctcctcacgtgggtcgcggggcgggcttgtcccaggtttgtttgagacagtctttttttattttgtattgttatttttattatttttaatttaaacctgatgacttgcacagcatctttcccaccgggaagagcgggcctgctgccttccctcctgcggggtgggggtgggacagaccccagtgggggccagggccacactcagcgcagtgtgggctggacccgcctctgtgctccaggggctggccggtcttcgggggcgccggcttccaccactcgccgccccacccctgcactccgtgacctctgagaacccagctggcccctcgttagccccagggtctgccgtctagagggagcccaccggcctccggacactgtcttcccgctagagccccgtcctcctctgcggggctctccggacccccttccccctcacctccaggcagggacagaataaatgtttgtatggatttta

SEQ ID NO: 757 - DNA, 1714 bp, Homo sapiens
gcatcctggtaaccagaagaaaaatatgagacggggaatcatcgtgtgatgtgtgtgctgcctttggctgagtgtgtggagtcctgctcaggtgttaggtacagtgtgtttgatcgtggtggcttgaggggaacccgctgttcagagctgtgactgcggctgcactcagagaagctgcccttggctgctcgtagcgccgggccttctctcctcgtcatcatccagagcagccagtgtccgggaggcagaagatgccccactccagcctgcatccatccatcccgtgtcccaggggtcacggggcccagaaggcagccttggttctgctgagtgcctgcctggtgaccctttgggggctaggagagccaccagagcacactctccggtacctggtgctccacctagcctccctgcagctgggactgctgttaaacggggtctgcagcctggctgaggagctgcgccacatccactccaggtaccggggcagctactggaggactgtgcgggcctgcctgggctgccccctccgccgtggggccctgttgctgctgtccatctatttctactactccctcccaaatgcggtcggcccgcccttcacttggatgcttgccctcctgggcctctcgcaggcactgaacatcctcctgggcctcaagggcctggccccagctgagatctctgcagtgtgtgaaaaagggaatttcaacgtggcccatgggctggcatggtcatattacatcggatatctgcggctgatcctgccagagctccaggcccggattcgaacttacaatcagcattacaacaacctgctacggggtgcagtgagccagcggctgtatattctcctcccattggactgtggggtgcctgataacctgagtatggctgaccccaacattcgcttcctggataaactgccccagcagaccggtgaccatgctggcatcaaggatcgggtttacagcaacagcatctatgagcttctggagaacgggcagcgggcgggcacctgtgtcctggagtacgccacccccttgcagactttgtttgccatgtcacaatacagtcaagctggctttagccgggaggataggcttgagcaggccaaactcttctgccggacacttgaggacatcctggcagatgcccctgagtctcagaacaactgccgcctcattgcctaccaggaacctgcagatgacagcagcttctcgctgtcccaggaggttctccggcacctgcggcaggaggaaaaggaagaggttactgtgggcagcttgaagacctcagcggtgcccagtacctccacgatgtcccaagagcctgagctcctcatcagtggaatggaaaagcccctccctctccgcacggatttctcttgagacccagggtcaccaggccagagcctccagtggtctccaagcctctggactgggggctctcttcagtggctgaatgtccagcagagctatttccttccacagggggccttgcagggaagggtccaggacttgacatcttaagatgcgtcttgtccccttgggccagtcatttcccctctctgagcctcggtgtcttcaacctgtgaaatgggatcataatcactgccttacctccctcacggttgttgtgaggactgagtgtgtggaagtttttcataaactttggatgctagtgtaaaaaaaaaaaaaaaaaaaaaaaaaaa

SEQ ID NO: 758 - DNA, 3710 bp, Homo sapiens
atgcgcacagagaccaacctggctggtgaccgcggcgcagaaccaggggtcgctaaccagcttagccacaggattctcccgcaggatgggataaagagagcacagcccccaccccacacccctgccactggaacgcggtcctcctacagactccttcctcaaaaagggagaggcaacctgcgaggggccccgaccgcccccgtcagcttctcccgaatccggcgcaacccgctgcgcacccagctatcaggatccccgccgcgacgcccgacctccgtgctccgcctggcctcccccgcaggtgacctgccccgccgcccccggccgcgggcgggcggcggccgccactcacctcgcccggcagtgggaaccattttccgagggggaaggaaaggcaggctgcgggagggtcgcggggcgttaaggggcagcgggaaacgcagaggatgggggctccgtcctcagcgcgtccgcagccggctcgcagggctcggggcgccacgcggaggtgcagctgcacctcggggatggggcggccaaggagccgagaggctcggcgtccaccagccggggctccctactcacgctgcactgcgaggaggcggcggcggcagcgaaggaggaggaggcggcgcccggccgtccccgcccagagcccggcagccaccgagtggccgcccgcgtccccgcaggacccgcctcctcggctccgcagagcggcacacagggcgcgccgcgctcgctcggcacgggcagctcagccggcctcacgccgccgtccgcaacagcagccgcgggcggggtgcagccacctccgtgagcgccgcagcccgccccactcggggcggggcccgcgggcaccggagagcggacggccgagcacgagggggctgcgcgcagctccgggcagggaccccgtctgcaccgggtggcctgcaagattgccggggtaggcagggggaggagaacgctcacccgttccggtctggcgctcccttttctccacacccacacgcctcccgctccacgctggcggcgcagctgctcccgctgccacagccgccaccgccgccgaagctcgcgccgccgccgctgccgccttggctgagcgcggtcacgtgacgcgatccgcggggagcctgggggcgggcgagtgcgcgcgcgcgcgcgcggaggaaccgcggctcggaccgggactgggagctgagcggcactgggagggcgtttaaggggaggacccggcgagcgcgccctcggctggcgagcgcgcgcctggcgattagaacttgccgcgcggtcgggaaagggtggccggagtgaggggcggaggtggggacttgcgcctccgcacgcccctccctttcttccttcccctgagcgccttggcttgccgctgcccccgccccctccagcgcgccccttccctcctgccgcagcctgcgattggctgagaggctctgacgtccgtgtttccatgacgtgttggtgcaggagggagcggcgggggaggagggggtggccaggcgcgcggggaggtgactccgtcagtcacagctgctgtttcggcgcggggccgggccgctgccgcgacgtgtggaggcaggagagcgatgattgccgcaggagaagtgcgggcgcccttcacctggggcccctcccgaaccgcccccgggcccatgcccctccagggcccaggagcgagccagcgggagggcgagggcgagcgctcctggcgaggacagattaaggcgaacccccagtcagcggacatttgagcggctcctcgccgcgtctctgcccccactccaaaccggactcgacgcctgtcccgggccgtgacgcacgcaccggaggaaaaagtgcttctcggctcgctccctctttggggaagagagctcactccccatgcgggcgcgggacactccatctctgttcctgccggtcgggtccgcaaacaccggggatcccagctgcggcgcccaaagggttaacgcaggcgttcggccagtgcaaaccggcctcgcaggatccgcgcttaaaatccgggtgttttcattttgggtttgtttcttctactatgccaagctggtggctctcttttaattctcttgtaacatctcaaccctgcacccatctttcctgaggggaaaaggaaacgggataacttgcggtatttcgatgctcaaaggtaaccggcggctctgctccaaccttcaagagattttgcaagttgaaaaaaaaaaaaaaaccatccttcgtaacatctacttaaaaaaaaaaaagcaagttttccttcttgtacacgcatatacacagtaaagatgtgtatcttacctaagataccgcgcttcatcttcatctaatctttatttgaactcaccgtcgccactggcccagagaccttgtcagtgttattttcagtatcagttaatcagaacaaaaagataagttctgcaatcttctttctcttaattccagaactggaaaattaatatttatatagcctcctcaaaagcatacaggcaataggaagtatggtattatgttcacgatctgatgatagcatttgttttaaaatattttaaaagattagacacaaaatgtgtaaaagacgtttaaaagtgaataaatataaatcaatgctgttgcaaataatttttttatcagtttatgtatctcactaggcttgacattaccagccttctgagctgtgcccttgatgtgtaagataaacgaacattgaacagaatgatagcatttttcctctcttcagtcactgatggagaattggttaatgtggtacaataaatagcccttcctgacactatttcaaatctttttaacagaagaataacctaaatttcacctaataaatttcaatattatttccccctaaaatatctttcaaaacgactcagagacatttaagaatcactggcttttttccaacttttcctccaaggaagttacaatacaatgttgaattatgtattctactttaatcaagaatttgacattaaagtaatatgtgaatcattgctatagtacactagcaaaatgggtaataaactagaatctgttcactttgtgggtttgttccagttccagattataaaatgaatgctcttaaagtgttgtggtcatgaaacaattattgagcatctttatttaagaacacgattcaattaagttttcatttatatcgataaatctataaatgaaacatacggaatatatatattcatgtatatccataaatgaaaacgtgtgtgtgtgtgtatcccggaacatatttgtatgcattttaatgaaatgtgagtcatatgcaatgacaaacttttactgtcatagtcaagaaaattgtactgtagtttggtttttatatttttattcttcaaataggaaataaagggtgaaagcaatatagaaataactgttcacattacattaagaaattcaatttttttctcccacaggcttagtactaaagcatccctcacacatatttttcaatgtaaaaatcaagaaaatattgcattgcttactgtttccttgaaaaaaaattgaactatctgaaatcaaagatgccactgtatgtaacagtattctcttaatcttagacctaacttatcccatgtgtttaactgatctagagatgtatctttgcataaggaacaatataataatacaatttactggggaaataatat

SEQ ID NO: 759 - DNA, 3709 bp, Homo sapiens
atgcgcacagagaccaacctggctggtgaccgcggcgcagaaccaggggtcgctaaccagcttagccacaggattctcccgcaggatgggataaagagagcacagcccccaccccacacccctgccactggaacgcggtcctcctacagactccttcctcaaaaagggagaggcaacctgcgaggggccccgaccgcccccgtcagcttctcccgaatccggcgcaacccgctgcgcacccagctatcaggatccccgccgcgacgcccgacctccgtgctccgcctggcctcccccgcaggtgacctgccccgccgcccccggccgcgggcgggcggcggccgccactcacctcgcccggcagtgggaaccattttccgagggggaaggaaaggcaggctgcgggagggtcgcggggcgttaaggggcagcgggaaacgcagaggatgggggctccgtcctcagcgcgtccgcagccggctcgcagggctcggggcgccacgcggaggtgcagctgcacctcggggatggggcggccaaggagccgagaggctcggcgtccaccagccggggctccctactcacgctgcactgcgaggaggcggcggcggcagcgaaggaggaggaggcggcgcccggccgtccccgcccagagcccggcagccaccgagtggccgcccgcgtccccgcaggacccgcctcctcggctccgcagagcggcacacagggcgcgccgcgctcgctcggcacgggcagctcagccggcctcacgccgccgtccgcaacagcagccgcgggcggggtgcagccacctccgtgagcgccgcagcccgccccactcggggcggggcccgcgggcaccggagagcggacggccgagcacgagggggctgcgcgcagctccgggcagggaccccgtctgcaccgggtggcctgcaagattgccggggtaggcagggggaggagaacgctcacccgttccggtctggcgctcccttttctccacacccacacgcctcccgctccacgctggcggcgcagctgctcccgctgccacagccgccaccgccgccgaagctcgcgccgccgccgctgccgccttggctgagcgcggtcacgtgacgcgatccgcggggagcctgggggcgggcgagtgcgcgcgcgcgcgcgcggaggaaccgcggctcggaccgggactgggagctgagcggcactgggagggcgtttaaggggaggacccggcgagcgcgccctcggctggcgagcgcgcgcctggcgattagaacttgccgcgcggtcgggaaagggtggccggagtgaggggcggaggtggggacttgcgcctccgcacgcccctccctttcttccttcccctgagcgccttggcttgccgctgcccccgccccctccagcgcgccccttccctcctgccgcagcctgcgattggctgagaggctctgacgtccgtgtttccatgacgtgttggtgcaggagggagcggcgggggaggagggggtggccaggcgcgcggggaggtgactccgtcagtcacagctgctgtttcggcgcggggccgggccgctgccgcgacgtgtggaggcaggagagcgatgattgccgcaggagaagtgcgggcgcccttcacctggggcccctcccgaaccgcccccgggcccatgcccctccagggcccaggagcgagccagcgggagggcgagggcgagcgctcctggcgaggacagattaaggcgaacccccagtcagcggacatttgagcggctcctcgccgcgtctctgcccccactccaaaccggactcgacgcctgtcccgggccgtgacgcacgcaccggaggaaaaagtgcttctcggctcgctccctctttggggaagagagctcactccccatgcgggcgcgggacactccatctctgttcctgccggtcgggtccgcaaacaccggggatcccagctgcggcgcccaaagggttaacgcaggcgttcggccagtgcaaaccggcctcgcaggatccgcgcttaaaatccgggtgttttcattttgggtttgtttcttctactatgccaagctggtggctctcttttaattctcttgtaacatctcaaccctgcacccatctttcctgaggggaaaaggaaacgggataacttgcggtatttcgatgctcaaaggtaaccggcggctctgctccaaccttcaagagattttgcaagttgaaaaaaaaaaaaaaccatccttcgtaacatctacttaaaaaaaaaaaagcaagttttccttcttgtacacgcatatacacagtaaagatgtgtatcttacctaagataccgcgcttcatcttcatctaatctttatttgaactcaccgtcgccactggcccagagaccttgtcagtgttattttcagtatcagttaatcagaacaaaaagataagttctgcaatcttctttctcttaattccagaactggaaaattaatatttatatagcctcctcaaaagcatacaggcaataggaagtatggtattatgttcacgatctgatgatagcatttgttttaaaatattttaaaagattagacacaaaatgtgtaaaagacgtttaaaagtgaataaatataaatcaatgctgttgcaaataatttttttatcagtttatgtatctcactaggcttgacattaccagccttctgagctgtgcccttgatgtgtaagataaacgaacattgaacagaatgatagcatttttcctctcttcagtcactgatggagaattggttaatgtggtacaataaatagcccttcctgacactatttcaaatctttttaacagaagaataacctaaatttcacctaataaatttcaatattatttccccctaaaatatctttcaaaacgactcagagacatttaagaatcactggcttttttccaacttttcctccaaggaagttacaatacaatgttgaattatgtattctactttaatcaagaatttgacattaaagtaatatgtgaatcattgctatagtacactagcaaaatgggtaataaactagaatctgttcactttgtgggtttgttccagttccagattataaaatgaatgctcttaaagtgttgtggtcatgaaacaattattgagcatctttatttaagaacacgattcaattaaattttcatttatatcgataaatctataaatgaaacatacggaatatatatattcatgtatatccataaatgaaaacgtgtgtgtgtgtgtatcccggaacatatttgtatgcattttaatgaaatgtgagtcatatgcaatgacaaacttttactgtcatagtcaagaaaattgtactgtagtttggtttttatatttttattcttcaaataggaaataaagggtgaaagcaatatagaaataactgttcacattacattaagaaattcaatttttttctcccacaggcttagtactaaagcatccctcacacatatttttcaatgtaaaaatcaagaaaatattgcattgcttactgtttccttgaaaaaaaattgaactatctgaaatcaaagatgccactgtatgtaacagtattctcttaatcttagacctaacttatcccatgtgtttaactgatctagagatgtatctttgcataaggaacaatataataatacaatttactggggaaataatat

SEQ ID NO: 760 - DNA, 4877 bp, Homo sapiens
gcccgaaacccggaagtgagcggcggcagctgcgaggctcggagaaacaggcgccgcgggctccgcgcccggccggacccgggcccgagatcatgatgctgccgccaccgccgccaccacggagcgagaagcccagatagacgccccggcggccccgggtcctggagtcccgccgcctgctgcccggccgaggaccccaccccgcctgccgcccgatgcttgcagtggggcccgccatggacagggattacccgcagcatgaacccccgccggcgggcagcctcctgtacagcccgccgcccctgcagagcgccatgctgcactgcccctactggaacaccttctcgctgccgccataccctgccttctccagcgacagccgcccgttcatgagctccgcctccttcctcggcagccagccctgcccagacaccagctatgcccccgtggccaccgcctccagcttgccaccaaagacctgcgactttgctcaggactcctcctattttgaggacttctccaacatctccatcttctcctcgtccgtggactccctgtcggacatcgtggacacgcccgacttcctgccggctgacagcctcaaccaggtgtccaccatctgggacgataaccctgccccctccacccacgataagctgttccagctcagcaggccgtttgcaggcttcgaggactttctgccctcccacagcaccccgcttctcgtcagctaccaggagcagagtgtgcagagccagccagaggaggaggacgaggctgaggaggaggaggcggaggagctggggcacacagagacctacgccgactacgtgccgtccaagtccaagatcgggaagcagcacccagaccgcgtggtggagaccagcacactgtccagcgtcccacccccagacatcacctacaccctggccctgccctcggacagcggggccctgtctgccctgcagctagaggccatcacctacgcctgccagcaacacgaggtcctgctccccagcgggcagcgcgcgggctttctcatcggcgatggggccggcgtgggcaaaggccggacggtggccggagtcatcctggagaaccacctgcgcggccggaagaaagcattgtggttcagcgtctccaacgacctcaagtacgatgcggagcgcgacctgcgggacatcgaagccacgggcatcgcggtgcacgcgctcagcaagatcaagtacggtgacaccactacctcagagggcgtcctcttcgccacctactccgccctgattggggagagccaggccggtggccagcaccgcactcgcctccggcagatcctggactggtgtggggaggcctttgagggcgtcatcgtgttcgacgagtgtcacaaagccaagaatgccggctccaccaagatgggcaaggccgtgctagacctgcagaacaagctgcccctggcccgcgtggtctacgccagcgccacaggtgcctctgagcctcggaacatgatctacatgagccgcttgggtatctggggcgagggcacacccttccggaactttgaggagttcctgcacgccatcgagaagaggggcgttggcgccatggagatcgtggccatggacatgaaggtcagcggcatgtacatcgcacgccagctcagcttctccggcgtcaccttccgcatcgaggagatcccgctggccccagccttcgagtgcgtctacaaccgcgcagccctgctgtgggccgaggccctgaacgtgttccagcaggcggccgactggatcggcctggagtcgcgcaagtccctgtggggccagttctggtcggcacaccagcgcttcttcaagtatctgtgcatcgcagccaaggtgcgccggctggtggagctggcccgagaggagctggcgcgagacaagtgcgtggtcatcgggctgcagtccacgggcgaggcgcgcacgcgggaggtgctgggggagaacgatgggcacctcaactgcttcgtctcggccgctgaaggcgtgttcctgtcgctaattcagaagcactttccgtccaccaagagaaagcgggacagaggagcgggcagcaagcggaaacggcgacctcggggacgcggggccaaagccccccggctggcgtgcgagacagcgggcgtcatccgcatcagtgacgacagcagcacggagtcggaccctggcctggacagcgacttcaactcctcccccgagtccctggtggatgacgacgttgtcatcgttgatgcagtcgggctccccagtgacgaccggggatccctgtgcctcctgcagagagacccgcatggccccggggtcctggagcgggtggagcggctgaagcaggatctgctggacaaagtgcgccggctgggccgggaactgccagtcaacaccctggacgagctcatcgaccagctgggcggcccccagcgggtggcggagatgaccggcaggaaaggccgcgtggtgtccaggcccgacgggacggtggccttcgagtcgcgggcagagcagggtctgtccatcgaccacgtgaacctcagggagaagcagcgcttcatgagcggcgagaagctcgtggccatcatctcggaggcctccagctcgggtgtctccctccaagccgaccgccgtgtccagaaccagcggcgccgcgtgcacatgaccttggagctgccgtggagcgccgaccgcgccatccagcagttcggccgcacccaccggtccaaccaggtctccgcgccagagtatgtcttcctcatctcggagctggccggggagcgccggttcgcctccatcgtggccaagcgcctggagagtctgggggccctgacccacggagaccgccgcgccacggagtcccgtgacctcagcaagtacaactttgagaacaagtatggcacccgggccctgcactgtgtcctcaccaccatcctgagccagactgagaacaaagtgcctgtgccccagggataccctggaggggtccccaccttcttccgggacatgaagcagggcctgctgtctgtgggcattggtggccgggagtcccggaatggctgcctggacgtggagaaggactgttccatcaccaagttcctgaaccgcatcctggggctggaggtgcacaagcagaatgccctgttccagtacttctcagacaccttcgaccacctcatcgagatggacaagcgggagggcaaatacgacatgggcatcctggaccttgctcccggtatcgaggagatctacgaggagagccagcaggtgttcctggctcccgggcacccgcaggacgggcaggtggtcttctacaagatcagcgtggaccgcggcctgaagtgggaggacgcctttgccaagtcgctggcgctgacgggcccctatgacggcttctacctctcctacaaggtccgcggtaacaagcccagctgcctgctggcggagcagaaccgcggccagttcttcacggtgtacaagcccaacatcggccggcagagccagctggaggccctggacagcctccgccgcaagttccaccgggtcaccgcggaggaggccaaggagccctgggagagtggctacgctttgtcgctgacgcactgcagccacagcgcctggaaccggcactgccggctggcgcaggagggtaaggactgcctgcaggggctgcggctgcggcaccactacatgctgtgcggcgcgctgctgcgcgtgtggggccgcatcgccgccgtcatggccgacgtcagcagcagcagctacctgcagatcgtgcggctgaagaccaaggacaggaagaagcaagtgggcatcaagatccccgagggctgcgtgcgccgggtgctgcaggagctgcggctgatggatgcggacgtgaagcgcaggcaggcgcccgccctgggctgccccgccccgcccgccccgcgcccgctggcgctgccttgcggccccggagaggtgctggacctcacctacagccccccggccgaggccttcccgccgcccccgcacttctctttcccggcgccgctgtccctggacgccggccccggcgtcgtgccgctgggcacccccgacgcccaggccgaccctgcggccctcgcgcaccagggctgcgacatcaacttcaaggaggtgctggaggacatgctgcgctcgctgcacgcggggccgccctccgagggcgcgctgggggagggcgcgggggcggggggcgcggcgggcggtggtcccgagcggcagagcgtgatccagttcagcccacccttccccggcgcccaggctcctctctgacacgcctttaggcgaaacatgccccaagacacagggaccgtttctcccctaggagcagcggtggggagcagggccaaggtcccctgaccactgctcagaggagccctaggccctggccgcagtgccttcagcgcccgacccgggcccccacctggtcagccctggcggggcccactcaggacagctgggggccggggcgtggcagggccctctctgtgcctctcctcctaagtaggaaggggctccgggtggctgctctgggactgggcacccacaagggctcagtgggcccaaacccttgaaatccgtgaaaccgggtggtcccaagagctagaaactcaggaaaccccaggtgctcagggccccgcgtctcgggggctccgtggggcagacccctgctaatatatgcaattctccctcccccagcccttccctgacccctaagttattgcccgctcacctctcccaggccccaggccgcggagctggcagggtggcgcctgcggtttctatgtatttatagcaagttctgatgtacatatgtaaaggacttttttaaat

SEQ ID NO: 761 - DNA, 5099 bp, Homo sapiens
gatgaccgtggttaaggcagtagaaagcaggctcgacactgagacgcggttccagccctagaaggattgcattttacgattcaggcaaacttcgagtctcctcatgtgacatgtgtgcactcctggaccgttttaattatgagaaacgtggtttgcagcatgattccttccagtcgataaatcggaatctctctcgctcccaccccttcttaacttcaggcttcctgcatcccggagcactcccggcagccccttccctcccccgccccggggatgctccgactcggcgcttagccattcatcaaccggttcacaccggcggcggccgccgcggagtgacgtccggagggggcgggcctccgcccccgcctgtcggctcctggcccgcggttccaggccgcgattggtggctggagggttgcacgtcgcgccggctataaaggggagggcttgtgacgcaagggcgcctcggcgcgtgtattggctccttcggctgcgggccggctcggctacgcgctctgctccgagccgctcactgcatggtagagtctggtgcccccgccgccgcctgcatcgccgccaccgccgctccgccacgaccaccgccgcctcctgccctgcagccaccgccaccgcctgtgtcgccgccgcctcgggaccggctgtatgattaggccacaatcttcaatgagtaaacatattcctcaattctgtggtgttcttggtcacacatttatggagtttctgaagggcagtggagattactgccaggcacagcacgacctctatgcagacaagtgaactgtagaaactgattactgctccaccaagaagcccccataagagtggttatcctggacacagaagtgttgaattgaaatccacagagcattttacaagagttctgacctggatggggtaaacctcagtgcacttcttttctgttggcctcagtattactggattgaagaattgctgcttcttgttaggaggttcatttcacttatcattacttacaacttcatactcaaagcactgagaatttcaagtggagtatattgaagtagacttcagtttctttgcatcatttctgtattcaatttttttaattatttcataaccctattgagtgttttttaactaaattaacatggctcgaatgaaccgcccagctcctgtggaagtcacatacaagaacatgagatttcttattacacacaatccaaccaatgcgaccttaaacaaatttatagaggaacttaagaagtatggagttaccacaatagtaagagtatgtgaagcaacttatgacactactcttgtggagaaagaaggtatccatgttcttgattggccttttgatgatggtgcaccaccatccaaccagattgttgatgactggttaagtcttgtgaaaattaagtttcgtgaagaacctggttgttgtattgctgttcattgcgttgcaggccttgggagagctccagtacttgttgccctagcattaattgaaggtggaatgaaatacgaagatgcagtacaattcataagacaaaagcggcgtggagcttttaacagcaagcaacttctgtatttggagaagtatcgtcctaaaatgcggctgcgtttcaaagattccaacggtcatagaaacaactgttgcattcaataaaattggggtgcctaatgctactggaagtggaacttgagatagggcctaatttgttatacatattagccaacatgttggcttagtaagtctaatgaagcttccataggagtattgaaaggcagttttaccaggcctcaagctagacagatttggcaacctctgtatttgggttacagtcaacctatttggatacttggcaaaagattcttgctgtcagcatataaaatgtgcttgtcatttgtatcaattgacctttccccaaatcatgcagtattgagttatgacttgttaaatctattcccatgccagaatcttatcaatacataagaaatttaggaagattaggtgccaaaatacccagcacaatacttgtatatttttagtaccatacagaagtaaaatcccaggaactatgaacactagaccttatgtggtttattccttcaatcatttcaaacattgaaagtagggcctacatggttatttgcctgctcactttatgtttacatctcccacattcataccaatatacgtcaggtttgcttaaccattgatttttttttttttttaccaagtcttacagtgattattttacgtgtttccatgtatctcactttgtgctgtattaaaaaaacctccattttgaaaatctacgttgtacagaagcacatgtctttaatgtcttcagacaaaaaagccttacattaatttaatgtttgcactctgaggtgcaacttaacagggagggcctgagaaaagaatgggagggggctattaattatttttagcaaaatgttgcctttgtcttgtgcaaacatgtagaatatgctctttaatttagtaaaatatttttttaaaaggtagagatgctttgttattgtaatcataaacttcctgaaattcttgtaatttttttcccatacttatcagaagtgtgtttaccaacttatttttgtttgaaagtgtgattttttttttccttcccaacctctcttgcaaaaaaagaaatgggtttctgctaatgaattgagcagacatctaatattttatatgccttttgagctgtgtaacttaatatttggatacttgacaatttgttttattatgtaattgataaaatggtgatgtgtattaatgttagttcaaccatatatttatactgtctggggatgtgtggttatagttctgtgggagaaataattttgtcagtgttcaccagcttgtaaaaacttagtgcgagagctgaaacatctaaataaataatgacatgcatttatcatcattgagattggtttgcttaaaattaacttattttgtagaagacaaaatgaattgcacttcacttaatgtgtgtcctcatctttttacaaataaatgaaggattataaatgatgtcagcattttagtaaacttttagacaaaatttgttagggtcattcatgaaaactttaatactaaaagcactttccattatatactttttaaaggtctagataattttgaaccaatttattattgtgtactgaggagaaataatgtatagtagaggacagccttggtttgtaaagctcagttccactagttcatggttttgtgcaacttctgagcctcagttttctcctttgcaaattaataattacatacctttatagattttgaaattaatttaaatattagtatttggtacatgaaggcttaatgttaagtttcctttaatgatccacaataatccctttgatcacgttaatctaaatctagatgtctttgtctaattttttttgaatagcagttataaatgtaaaggactcaaagtttaagtaaaaagtgatactccaccttgtgtttcaaagaatttagttccacctcttcataccagtttaacacttaatatatttcattggattttagacagggcaaaaggaagaacaggggcctctggaggcccttggttatttaaatcttggattatttgtgatagtaatcacaaatttttggctaatttttaacctgaggttttgttttttttttaaaggaaatgcagcctagtcttgagaacataattttatataatcaattactaaatgttaaactattaccacacagcccataaaacagcatttgcgtttattgagagagaggatgtgccatcatgattaatgaaaactatcttttgagtttgaaaagaaattaatttgcagtgtttggattgtatatatggtgctaaaaataaattaatttactttataaaccttatctgtacattatacgatgtgatgaaatttgctttttatccaaatattttgtatcttgtaaatatggctaattataggaatgcctataatacatcttagattccttatatctaataagagttcaaagagttatgagttgaagtcttgaatgcaggaaactatctgatagtgttctaaaatttggttacttgggtttggatacccttagtgggatgatgtaaatagaggctagctacctaggcttgtctatagcaaccataatgttgatgtaagtaatgcggttactgaatcataagaaaatgccatctctttttagttgaaggaaaactctggaagtaggtgccattggtcattctgcagtgcactgcaaccattgtttcccctagtgccctcttttccctagggcattgctctcctattcccacgccttaacacagctctatacctagaagcagccagcccaggcatgcagtcacatttaatcacatcccccttctagagtgcttcaaaatgatgtagtccctcaacttggctaaagaatctcaatctcttgaaatttatttttttaatgtcatattcatctggtaaatatctactgtttgccaggcatttaagaatatggcaaagaacataaaagatggtgtcaccagattttggtcaccaatgagtacccgacccgttgccatgattaagagagaatgctttctattggagtttcaggaaatataatttgagaatactttaaagggaagtggaagtataagtgaatgatatttttcttttacatgtaaacaatgaagttatttcaaagttaagttttaaacaaaatacatgaagtagtgtctgccatacatgttaatattctacattcttgcttccttaaattaatatgtttgtgtgtatatatgtgcctcacacctgaattgaaaattaaagactggtttaaaagtggtttaaaagtgacatttaatgtttctccattacgtttggggtaaccagcctaagtggaatcttggaaggaaagtaagggaaaaacttgtatttgccttcaatgaattaaaccagtgatatgtgttaacgtatgaatgaaaggattgatggtgattttataattatatatattgccgcagtaaccagttaataaattgatagctaccaaaaaaaaaaaaaaaaaa

SEQ ID NO: 762 - DNA, 1799 bp, Homo sapiens
acactggggtggtgcttagccggcgccagaccgaccctcgacttcggagaggcagcgcggttcctctgggtgcttccgcctccccttctcctgcttctccagcctcttcggcctcctcgcccgccgcgggaacccgagaccccagtgtatgccccacccctgaccccgctcgcgacatgtccaccccggctcggcggcgcctcatgcgggacttcaagaggttgcaggaggatcctccagccggagtcagcggggctccgtccgagaacaacataatggtgtggaacgcggtcattttcgggcctgaagggaccccgtttgaggatggaacatttaaacttacaatagaattcactgaagaatatccaaataaaccacctacagttagatttgtctctaagatgttccatccaaatgtctatgcagatggtagtatatgtctggacatacttcagaaccgttggagtccaacctatgatgtgtcttccattctaacatccatacagtctctgttggatgaacccaatcccaatagtccagcaaacagccaggctgctcagctgtaccaggagaacaaacgggaatatgaaaagcgtgtttctgcaatagtagaacaaagctggcgtgattgttgaccccgggtacagtttaaagaagctggccataagaaaaatatatattgatgtgtttgtcacctccctactcctgtcattacatttactttattaaaagcaaaataactgttgtgctgtttccatcttccttgccaagttttcctaccccttctaccctctccttaaacatcagaaaacaccctctatgaaatcaaatgtactgtacctgggttacttgcaaaaattactaatgcttcagtttttctgttgtatttcatttccagttttcaggcagttatttttattattgtactttaagcttttaagatgaattgttatacaagaggtgcttatgcttagcttgatgaccaggatgttatttttaacaaaatgattgctgaagtgtttcatcctggctggtccttcacttgtgttggatttagaagtgaatgtgtttggaatatggcctacagagaatagaaacaaatccatgtaaacaattttgaaggaggcatgggagctaaaaatcctgtgatactaagatctcagtcatatgaattacaacgtagtatttactggcaagaaggagaaagttgaaggactcagctaaaggagtacagcaattgtagtaactgacacatcctctctttgcaagctgctgactgggcacactcatgccaagtttcagaattattggtcttctgggtttttgctttttaaaagaggtgtgggagcagaggaatggaaacaatcgtgagtttttgagctagggaaagttggagctcctttaatctttttaaaggatcagtgctgccctaagtgaataaactcaattgtccatctttattttagagttttaatgaattcaaggaagggagcatagcatatctgtggcaaactattttccactcaaatcctgagttattgctgcatgctttaatttcttccctttcagcatctgagaaccttaaagccaatgtctgcgatctttttttggatatttatacttttagatatatagtacctttaagtagcagtatgggacaaggcttgtaaatgttttgtctaatgttctattgtcaccttttatgcatttatcacttccaaatctaactttgcacaagtaacccatgtaaaaaaaaatgtacatttttcaaaagttgtaaataaaaataaccttaaaaa

SEQ ID NO: 763 - DNA, 1709 bp, Homo sapiens
acactggggtggtgcttagccggcgccagaccgaccctcgacttcggagaggcagcgcggttcctctgggtgcttccgcctccccttctcctgcttctccagcctcttcggcctcctcgcccgccgcgggaacccgagaccccagtgtatgccccacccctgaccccgctcgcgacatgtccaccccggctcggcggcgcctcatgcgggacttcaagaggttgcaggaggatcctccagccggagtcagcggggctccgtccgagaacaacataatggtgtggaacgcggtcattttcgggcctgaagggaccccgtttgaggatgtctatgcagatggtagtatatgtctggacatacttcagaaccgttggagtccaacctatgatgtgtcttccattctaacatccatacagtctctgttggatgaacccaatcccaatagtccagcaaacagccaggctgctcagctgtaccaggagaacaaacgggaatatgaaaagcgtgtttctgcaatagtagaacaaagctggcgtgattgttgaccccgggtacagtttaaagaagctggccataagaaaaatatatattgatgtgtttgtcacctccctactcctgtcattacatttactttattaaaagcaaaataactgttgtgctgtttccatcttccttgccaagttttcctaccccttctaccctctccttaaacatcagaaaacaccctctatgaaatcaaatgtactgtacctgggttacttgcaaaaattactaatgcttcagtttttctgttgtatttcatttccagttttcaggcagttatttttattattgtactttaagcttttaagatgaattgttatacaagaggtgcttatgcttagcttgatgaccaggatgttatttttaacaaaatgattgctgaagtgtttcatcctggctggtccttcacttgtgttggatttagaagtgaatgtgtttggaatatggcctacagagaatagaaacaaatccatgtaaacaattttgaaggaggcatgggagctaaaaatcctgtgatactaagatctcagtcatatgaattacaacgtagtatttactggcaagaaggagaaagttgaaggactcagctaaaggagtacagcaattgtagtaactgacacatcctctctttgcaagctgctgactgggcacactcatgccaagtttcagaattattggtcttctgggtttttgctttttaaaagaggtgtgggagcagaggaatggaaacaatcgtgagtttttgagctagggaaagttggagctcctttaatctttttaaaggatcagtgctgccctaagtgaataaactcaattgtccatctttattttagagttttaatgaattcaaggaagggagcatagcatatctgtggcaaactattttccactcaaatcctgagttattgctgcatgctttaatttcttccctttcagcatctgagaaccttaaagccaatgtctgcgatctttttttggatatttatacttttagatatatagtacctttaagtagcagtatgggacaaggcttgtaaatgttttgtctaatgttctattgtcaccttttatgcatttatcacttccaaatctaactttgcacaagtaacccatgtaaaaaaaaatgtacatttttcaaaagttgtaaataaaaataaccttaaaaa

SEQ ID NO: 764 - DNA, 2678 bp, Homo sapiens
tagtcttctctctttcttaagcagtgataaaccttttaatgagaacaaaaaggaaataaattgctaactctgaaggaaccagtaagaaatacactgaagtatggtctgttgttttagaataatttgttaaatggaccagagtaatatagtggaacatgcatcaccttataccatatagtaactgattcttctaagtttacttgaacagatttcagtcaggaaaaaacattgctcaattgtgttcttcaatttattcaacaaacaattgaaaataatattttaaaggacataatctcttcatatcacatcttaacaattcttgaatgagatccagtttgtccatgccttgtaagtaagtttataacctactatgctttagggcctcctgctaccttaggttgacatatatttaagaaaaataatttcatttcaatagtagcataaacattagaaaaataaatttgctggaaacatgaatgcaatctaaaccaaatgtgattttaaaattatttctgccattaattccctccatatgtgtgaataattgagttgattttatagtgaagtaccttatgagccatacttaagggtttctgagagggactatgaagtttttcctggcttaaattcaattaagttttcattatagggtcactatgacatgaaaaggaaccagtatgaacacttttatacttattcccttctattttaaaaataacttgattatggatttgtattctggcattggtttttgaaccattgtgctttcattctttctagtctgtctaaaaatcactggagcgtttaagatggcagctgactaacataggcctttgaggtcttttggtcttctaaaggaagaaggccaaattttgggcccagtttcttaaggatgttttcaaaatgtacagtggctaaaatcttgtaagcagtaattttgtgtttatgatggctgtctccaagtttgggggaaaataatggcaaaacaaaaaatcacatttgagtagttcttagagcaattcctagagatgtatttcttacctggcctttcctctctaccctgtatctttgcattatttaatacttggaaaaacccacatagcattaaaaacaaagtactactgaacaaagtgataaatacattttcttaaatctttcttttctaaccacaggaacatttaaacttacaatagaattcactgaagaatatccaaataaaccacctacagttagatttgtctctaagatgttccatccaaatgtctatgcagatggtagtatatgtctggacatacttcagaaccgttggagtccaacctatgatgtgtcttccattctaacatccatacagtctctgttggatgaacccaatcccaatagtccagcaaacagccaggctgctcagctgtaccaggagaacaaacgggaatatgaaaagcgtgtttctgcaatagtagaacaaagctggcgtgattgttgaccccgggtacagtttaaagaagctggccataagaaaaatatatattgatgtgtttgtcacctccctactcctgtcattacatttactttattaaaagcaaaataactgttgtgctgtttccatcttccttgccaagttttcctaccccttctaccctctccttaaacatcagaaaacaccctctatgaaatcaaatgtactgtacctgggttacttgcaaaaattactaatgcttcagtttttctgttgtatttcatttccagttttcaggcagttatttttattattgtactttaagcttttaagatgaattgttatacaagaggtgcttatgcttagcttgatgaccaggatgttatttttaacaaaatgattgctgaagtgtttcatcctggctggtccttcacttgtgttggatttagaagtgaatgtgtttggaatatggcctacagagaatagaaacaaatccatgtaaacaattttgaaggaggcatgggagctaaaaatcctgtgatactaagatctcagtcatatgaattacaacgtagtatttactggcaagaaggagaaagttgaaggactcagctaaaggagtacagcaattgtagtaactgacacatcctctctttgcaagctgctgactgggcacactcatgccaagtttcagaattattggtcttctgggtttttgctttttaaaagaggtgtgggagcagaggaatggaaacaatcgtgagtttttgagctagggaaagttggagctcctttaatctttttaaaggatcagtgctgccctaagtgaataaactcaattgtccatctttattttagagttttaatgaattcaaggaagggagcatagcatatctgtggcaaactattttccactcaaatcctgagttattgctgcatgctttaatttcttccctttcagcatctgagaaccttaaagccaatgtctgcgatctttttttggatatttatacttttagatatatagtacctttaagtagcagtatgggacaaggcttgtaaatgttttgtctaatgttctattgtcaccttttatgcatttatcacttccaaatctaactttgcacaagtaacccatgtaaaaaaaaatgtacatttttcaaaagttgtaaataaaaataaccttaaaaaaaaaaaaaaaaaaaaaaaaaaaaaaaaaaaaaaa

SEQ ID NO: 765 - DNA, 3780 bp, Homo sapiens
agagcgctgccgccgccgctttcgcccgggagccgggggccgggcgccatcatgctgagccggctcggggcgctgctgcaggaagccgtgggggcgcgcgagcccagcattgacctgctgcaggccttcgtggagcactggaagggcatcacgcactactacatcgagagcacagatgaaagcacccccgccaagaagacagacattccctggcggctgaagcagatgctggatatcctggtgtatgaagagcagcagcaggcggccgcgggtgaggcagggccctgcctggagtacctgctgcagcacaagatcctggagactctctgcacgctgggcaaggccgagtaccccccaggcatgcggcagcaggtgttccagttcttcagcaaggttctggcgcaggtgcagcaccccctgctgcattacctcagcgtccacaggcctgtgcagaaactcctccgacttggtgggactgcttccggatccgttacagaaaaggaggaggtgcagttcaccaccgtcctctgctccaagatccagcaggacccagagctgctcgcctacatcctggaaggtaaaaagattgtaggtaggaagaaagcatgcggagaacccactgccctgcctaaggacacaaccagccacggggacaaggactgctcccacgatggtgctcctgccaggccccagctggacggggagtcctgtggggcccaggccttgaacagccacatgcctgctgagaccgaggagctggacggtgggaccacagagagcaacctgattacctccctgcttgggctgtgccagagcaagaagagtcgggtggccttgaaggcccaggagaacctgctgctcctggtgagcatggcctccccagcagctgccacctacctggtacagagcagcgcctgctgccctgcgatcgtccggcactttgccagttgtaccggtccatgcctgtcttcctggaccccgcagacattgccaccttagagggcatcagctggaggttacccagtgccccgtctgatgaggcttccttccctggcaaggaggccttggctgccttcttgggctggtttgattactgcgaccacctcatcacagaggcacacacggtggttgcggacgccttggcgaaggctgtggctgagaacttcttcgtggagaccctgcagccccagctcctgcacgtgtccgagcagagcatcttgacctccaccgccctcctcacagccatgctgcgccagcttcgctcccctgcgctgctgcgggaggccgtggctttcctcctgggcacagaccggcagcctgaagcccccggggacaacccccacaccctgtatgctcatctcatcgggcattgtgaccacctctctgatgagatcagcatcaccacactccggctgtttgaggagctgctgcagaagccccacgaggggatcatccacagcctggtcctgcgcaaccttgagggccgcccttacgtggcctggggctcaccagagcctgagagctatgaggacaccctagacctggaggaagacccctacttcaccgacagcttcctggattccggctttcaaactcccgcaaagcctcgcctagctcctgctaccagttacgatggcaaaacagcagtgaccgagatcgtcaacagtttcctgtgcctggtccccgaggaagccaagacctctgccttcctggaggagacaggctatgacacatacgtccacgatgcttatggcctgttccaggagtgcagctcccgcgtcgcctcctggggctggcctctgacccccacacctttggacccccatgagcccgagcgacctttcttcgagggccacttcctccgagtgctgtttgaccgcatgtcccggattctggatcagccatacagcctgaacctgcaggtgacctcggtcctgtcccggcttgccctcttcccccacccccatattcatgagtacctgctggatccgtacatcagcctggcccccggctgcaggagcctattctccgtgttggtgagggtgatcggggacttgatgcagagaatccagagggtaccccagttcccaggcaagctgctcctggtgcgcaagcagttgacgggccaggctcctggggagcagctggaccaccagaccctcctccagggcgtggtggtgctggaggagttctgcaaggagctggctgccattgccttcgtcaagtttcccccacatgatcctcgccagaacgtctccccagccccggaagggcaggtctgagccagcaccagggcggtgggagactcctgtccacacctctgccccagagctgcctcctgcctggcactgccgccacactcccctcctgggatggggcttctgctcccgggctcactcaaggagactgcggcatgttgaccacaccagactgggtttcagggaatgggcatgccaggtgccaaggagccaaacagatggctttccaggcagcaaggtccttggggccttcttggaggagcttgggtgacagccaggtgagcacccagaccccagaccctcatgtgctgtgtgcctggccccttctgtactggccatttgtggccagggccaagcctgtgactcaactccaggggcaagatggggagtgagctgatggctccgagactggtcaggagcccaggccagtgagatggggcctggagccttgtctgtgtcacattaggtaccatgggagctgctgagacctgacattttgtcccctgcctacatggcttggcccatggagaaggagcagtgaatgggatcgtcggggaagcccctcttcctgctctgctcccctggaaactgttgcaaaactcccagccgcctcatggcaaatgcccaaagcatgttccgcacccaggcgggggcccctgctaatgagaaccttggtgcagctgcagccaggaggggagcgggcccaggagccaggctcaggtccagctggttcctctctggcgccttctgaacccgtctcagcaggtccacagcacctgggcagaggtcagagaccaggggaggccgggccttgccctcccttctgcccagggcccagtgttcttgatagaagacccttctggggagccagggagctcaggggacagataagggaaggacgccccctgactccaggcccctgagcctggcgggaagtggctgcggcccaggcagccagtcctggtggtgttctccctgcatgccctccgtggctgggctgccaccccacccggcccgaatctgtcttgacctgcaggaatacacgggcggcgccaggcattacctcacagcgggactacacagttgctggctttgctcctgggcaaggaggagcaggccagagcctcttttgcttccttttcttgcccatgccgcttctagaagccaggcacaggttgccaagaggtgacacgaaacaggaggaaactcagtgacctctgcctctcccacattcctccccgcgggggaggacctcgccgctctgaagagcaccgtgcacatgtgggtgcacaaacgtgggtgttggtgtggacggggcgcagatctccgtggatgaactgcgtctggactcttagattcataaaatattcgagggtttgggagtcacagaccctcccctctcctcagtgcactttggcatttgcacggtgtcttccccggacagcacagcaataaatggtgtgattgcgtggaaaaaaaaaaaaaaaaaaaaaaaaaaaaaaaaaaaaaaaaaaaaaaaaaa

SEQ ID NO: 766 - DNA, 2129 bp, Homo sapiens
tttccgcattgaaggggctgctccgaatggagggggaggggaggtgtttaggagaaagtaggggctgtgggtgtcgggagccggctgacgggtggacaagggggggttagcagctgggctgcgaccgttagggaggggctcaaggtgtgcatgtgtgagggaagagagagagagagaagggcgcctcagaggtgactttcagcctgcgagccttcttcccggggcgccataaacgcccccaatttcccagctgctaaaggaagaggaagatcttagcaaagcaatgtctcaagatggtgcttctcagttccaagaagtcattcggcaagagctagaattatctgtgaagaaggaactagaaaaaatactcaccacagcatcatcacatgaatttgagcacaccaaaaaagacctggatggatttcggaagctatttcatagatttttgcaagaaaaggggccttctgtggattggggaaaaatccagagaccccctgaagattcgattcaaccctatgaaaagataaaggccaggggcttgcctgataatatatcttccgtgttgaacaaactagtggtggtgaaactcaatggtggtttgggaaccagcatgggctgcaaaggccctaaaagtctgattggtgtgaggaatgagaatacctttctggatctgactgttcagcaaattgaacatttgaataaaacctacaatacagatgttcctcttgttttaatgaactcttttaacacggatgaagataccaaaaaaatactacagaagtacaatcattgtcgtgtgaaaatctacactttcaatcaaagcaggtacccgaggattaataaagaatctttacttcctgtagcaaaggacgtgtcttactcaggggaaaatacagaagcttggtaccctccaggtcatggtgatatttacgccagtttctacaactctggattgcttgatacctttataggagaaggcaaagagtatatttttgtgtctaacatagataatctgggtgccacagtggatctgtatattcttaatcatctaatgaacccacccaatggaaaacgctgtgaatttgtcatggaagtcacaaataaaacacgtgcagatgtaaagggcgggacactcactcaatatgaaggcaaactgagactggtggaaattgctcaagtgccaaaagcacatgtagacgagttcaagtctgtatcaaagttcaaaatatttaatacaaacaacctatggatttctcttgcagcagttaaaagactgcaggagcaaaatgccattgacatggaaatcattgtgaatgcaaagactttggatggaggcctgaatgtcattcaattagaaactgcagtaggggctgccatcaaaagttttgagaattctctaggtattaatgtgccaaggagccgttttctgcctgtcaaaaccacatcagatctcttgctggtgatgtcaaacctctatagtcttaatgcaggatctctgacaatgagtgaaaagcgggaatttcctacagtgcccttggttaaattaggcagttcttttacgaaggttcaagattatctaagaagatttgaaagtataccagatatgcttgaattggatcacctcacagtttcaggagatgtgacatttggaaaaaatgtttcattaaagggaacggttatcatcattgcaaatcatggtgacagaattgatatcccacctggagcagtattagagaacaagattgtgtctggaaaccttcgcatcttggaccactgaaatgaaaaatactgtggacacttaaataatgggctagtttcttacaatgaaatgttctctaggattctaaaataggcaggtactttactatgttactgtaccctgcagtgttgatttttaaaatagagttttctgcagtatgcttttagtctaagaaaagcacagatggagcaatactttccttctttgaagagaatcccaaaagttagttcatcttaaagtgcaatattgtttaatcttaaaactgggcaactttggaagaacttttaacagaagcctcaatgatgatcactttgaattgcttgtgatttcaaaaataaagcagtgaagcaataaaaaaaaaaaaaaaaaa

SEQ ID NO: 767 - DNA, 2185 bp, Homo sapiens
tggttttaccttttccgggagtctccagctggccctcatttgtgtccggagctcaggagttcccaaaccgactcagtcgcaccaagtttccgtcttttggaattggggaaggagtttctttctttcttttcttttttcttgagccagttttaatcgctttgaataaatactcccttaagtagttaaatataggaggagaaagaatacatcggttgttaaagcaggagaggaagagagacctgccctgtagcgtgactcctctagaaaaaaaaaaaaaaagccggagtattttactaagcccctaaaatgtcgagatttgtacaagatcttagcaaagcaatgtctcaagatggtgcttctcagttccaagaagtcattcggcaagagctagaattatctgtgaagaaggaactagaaaaaatactcaccacagcatcatcacatgaatttgagcacaccaaaaaagacctggatggatttcggaagctatttcatagatttttgcaagaaaaggggccttctgtggattggggaaaaatccagagaccccctgaagattcgattcaaccctatgaaaagataaaggccaggggcttgcctgataatatatcttccgtgttgaacaaactagtggtggtgaaactcaatggtggtttgggaaccagcatgggctgcaaaggccctaaaagtctgattggtgtgaggaatgagaatacctttctggatctgactgttcagcaaattgaacatttgaataaaacctacaatacagatgttcctcttgttttaatgaactcttttaacacggatgaagataccaaaaaaatactacagaagtacaatcattgtcgtgtgaaaatctacactttcaatcaaagcaggtacccgaggattaataaagaatctttacttcctgtagcaaaggacgtgtcttactcaggggaaaatacagaagcttggtaccctccaggtcatggtgatatttacgccagtttctacaactctggattgcttgatacctttataggagaaggcaaagagtatatttttgtgtctaacatagataatctgggtgccacagtggatctgtatattcttaatcatctaatgaacccacccaatggaaaacgctgtgaatttgtcatggaagtcacaaataaaacacgtgcagatgtaaagggcgggacactcactcaatatgaaggcaaactgagactggtggaaattgctcaagtgccaaaagcacatgtagacgagttcaagtctgtatcaaagttcaaaatatttaatacaaacaacctatggatttctcttgcagcagttaaaagactgcaggagcaaaatgccattgacatggaaatcattgtgaatgcaaagactttggatggaggcctgaatgtcattcaattagaaactgcagtaggggctgccatcaaaagttttgagaattctctaggtattaatgtgccaaggagccgttttctgcctgtcaaaaccacatcagatctcttgctggtgatgtcaaacctctatagtcttaatgcaggatctctgacaatgagtgaaaagcgggaatttcctacagtgcccttggttaaattaggcagttcttttacgaaggttcaagattatctaagaagatttgaaagtataccagatatgcttgaattggatcacctcacagtttcaggagatgtgacatttggaaaaaatgtttcattaaagggaacggttatcatcattgcaaatcatggtgacagaattgatatcccacctggagcagtattagagaacaagattgtgtctggaaaccttcgcatcttggaccactgaaatgaaaaatactgtggacacttaaataatgggctagtttcttacaatgaaatgttctctaggattctaaaataggcaggtactttactatgttactgtaccctgcagtgttgatttttaaaatagagttttctgcagtatgcttttagtctaagaaaagcacagatggagcaatactttccttctttgaagagaatcccaaaagttagttcatcttaaagtgcaatattgtttaatcttaaaactgggcaactttggaagaacttttaacagaagcctcaatgatgatcactttgaattgcttgtgatttcaaaaataaagcagtgaagcaataaaaaaaaaaaaaaaaaa

SEQ ID NO: 768 - DNA, 1979 bp, Homo sapiens
gagcccccgaggcccgagggagagggaagagcgccgggcccgggtcgcggaggcgggcgccgccggaacgcgaagcgcggggctactgcgggcaggcgcgagttcgcgcagcaccgcccccggcgtgacctgctggtcgcttccggcgcgggaggagaatgtggccgccttgcgggacgctccggaccctggccttggcgcggtcgcggggagcccgggcctgcagcggggatgggggcgtttcctacacgcagggccagagtccggagccgcggacccgcgagtatttctactacgtggaccaccagggccagcttttcctggatgattccaaaatgaagaatttcatcacctgcttcaaagacccgcagttcctggtcaccttcttctcccgcctgagacccaaccgcagcgggcgctacgaggccgctttccccttcctctcgccctgcggcagagagcgcaacttcctgcgctgcgaggaccggccggtggtcttcacgcacctgctgaccgcggaccacgggcctccgcgcctctcctactgcggcggtggcgaggccctggccgtgcccttcgagccggcgcgcctgctgcccctggccgccaacgggcgcctgtaccacccggcgccggagcgtgcgggcggcgtgggcctggtgcgctccgccctggccttcgagctcagcgcctgcttcgagtacgggcccggcgcgcctgcgctgccctcgcacgtgcgctggcagggccgccgcctcgccctcaccatggacctggccccgctgctgctcgcggctcggtcgccctgagcggggccaagggaaaggcgggaggccgcgggcgcctctcgccccgctcccccgggactccacgccccggaaagcccgcgccacccgcgctcgcggcagcctagtgcgcctgcgcgctcggccccgcccccacccggcgctgtccttggtgctgccgcggcccggccctcccggacaccccgctccccacggcgcgcgccccccgcgcacccgactccggcgccctccggattggcctgcgctcgagacgtcaggcactggcggcgggcgcggggctctggtgcgcgtgcgcgagcgtcccccgccccctcccagcccggcgactgctcgggcccggccgccacctgcacggcgggggagccgctcgccgcgggagcgtcaggtgaggggacgcccgacccaaggtcaccaggcgtgggggcgctgggggatcggggaccatcccggctctgaccctggtgcgctccgagaagggcgtgggtcctggagggggatggggaacgcggaggccacgccctccctgagcccggccgaaaatcaaccggctctcgtgggtagcagaggaggccgtgggggatacaggcaccaggtcgcagcgctgcagaggtgcgcaagggccgcccaaagaccagcttgggcctcgcactgcgcccgaggcagacacagggcgttccatcctcttccctccccgctcccgcacagaggggcgcccaggaggcagtgacagtcgtcgcggaatcctgcgtgtgacaccccgcccctgcccagcggattagggagttgtcctctggtaaaaggatttctgggctgcttccagcttggggccctcatccctgccctggcaggcctttctacaccgatctgcatctagtggggggtcagcgtgagcagcagcgccgtgagttctgaggccaagaaccttctccacttgagaagccttcctgggggaggctgagtgggccaggcctggagccacgtaccaacactttatacccaggggaatggatcccaagggcccagataacgcccccaacttcttggggttcacacgcgtcctgagacatctgggaactgcctctgcctgggccaaagctattccattaaaactttattgctgtgcttaaaaaaaaaaaaaaaaaaaaaaaaaaaaaaaaaaaaaaaaaaaaaaaa

SEQ ID NO: 769 - DNA, 5165 bp, Homo sapiens
gggggcacagtccaatgaggagcgagccgggtggccggctgaggggcgtgcttcatgctcgcgggatttttaaaaatggtttctcctggatcttatcccaactgcgcctgagaccttgtttcacctcctgatgtgctgggtgtggttaggcctcgagccgggagctatttgcctcccaggaggaagccagggcagggttccgcggggaatggcggtgagggagccactcgggacgcggaggccctaaaatgaagaagcttcggcctgaggcttcgggagcggcgagcagggaagtgggagtgtgtgtgggtgagtgtgtgtgtgtgtgtgtgtgtgtgtgtgtgtgtgtgaataagccagaggctgcctggtggggccccgccgtggcccagtgactgagataattgtcttcgtctgtgaggtaatgcgaacaagccccgttcccctaagccgtgatgcatgcggggttgacgcggccgggctctgtccccataaactgtgacacaggtgtgtgtagacgtctatgagggccatagcgccgggctgtaagggcatctgtaggggtgacgcagccgggctgtgtctctgcacctccgttctgtgcgaggtcaatgctggtggggtctgcagaggtggcacggccaggacgggtctccgtgtctctgaaatgtgcctttgcacttctgtcaggttgacagggacaggcagtgtctctctggtgtgagcgtctgtgggtgtgaaagggccagcgagtgtgcggctgtgactggtcgggatcgggcctggatgcatggccttttgagtgagcacaggtgtgtgcgaccatgtcacctgtctttctagtgtctccgttgcttcctgtgccttggccttccagccatgtggtacctgctagggagcagtggtcccaaagtgacgtgagaggctgtacgctgttgtgaaaatgaccaagaagaaggcttcacaagtcacgagatggcagttttggagccagaagtgctctccgtgcacactacctggaggacaagaggaagtaacctcaagaatagaattccttttggggaagaaagagctggccttcaggaaaagcatcccggaggaggaagaagaagtgttatacgtcctaaagtaaggtttcaggccagcatccttcagaaaaagcatccccgaggaggaagacgaatcgttaaacatctgaaagggtcaggccagcatccttcagaaaaagcatccccgaggaggaagacgaatcgttaaacatcttaggtcagctctagcctctcggaatttgtcttcttcagtggaaaccccgagaagactgatcagttcttcagttctaaaacaatggcccagggtttggtgacgttcgccgacgtagccatagacttttctcaggaggagtgggcctgtctgaactctgctcagagggacctgtactgggacgtgatgctggagaactacagtaacttggtctcactggatttggagtcagcatatgaaaataagagtttacctacagaaaaaaacattcatgaaataagggcttccaaaaggaattcagatagaagaagtaaatcccttggccgtaactggatatgtgaaggtacgcttgaaagaccacagcgctccagagggaggtatgtcaatcagatgatcatcaattatgtcaaaaggcctgctactagagaaggcacccctcctagaacacatcagagacatcataaggagaattcctttgaatgtaaggactgtgggaaggcctttagtcgtggctatcaacttagtcaacatcagaaaatccatactggtgagaaaccttatgaatgtaaagaatgtaagaaggccttccgttggggcaatcagcttactcaacatcaaaaaattcatactggggagaagccctacgaatgtaaagactgtgggaaggcttttcgatggggctcaagcctcgttattcataagaggattcatactggtgaaaaaccctatgaatgtaaagactgtggaaaggcctttcggcgtggtgatgagctcactcagcaccagagattccacactggggagaaagactacgaatgcaaagactgtgggaagacctttagccgtgtgtataaacttattcagcacaagagaattcatagtggggagaagccttacgagtgtaaagactgtgggaaggcttttatttgtggttcaagcctcattcagcataaaagaattcacacaggtgagaaaccctatgaatgtcaagaatgtgggaaggcctttactcgagtcaattaccttactcagcatcagaagatccacaccggtgagaagcctcacgaatgtaaggagtgtgggaaggcctttcgctggggttcgagcctcgttaagcacgagaggatacatacgggcgagaagccgtacaagtgcacagagtgtgggaaggccttcaattgtggctatcacctcactcagcacgagagaatccacacaggcggaaccccgtataaatgtaaggagtgtgggaaggctttcatttatggatcgagcctcgtgaaacatgagagaattcataccggggtgaaaccctatgggtgtacagaatgtgggaagagctttagtcacggccatcagcttacacaacatcagaaaacgcacagtggggcgaaatcctacgaatgtaaggagtgcgggaaggcatgtaaccacctaaaccatctccgagaacatcagaggatccacaacagttgaagagccttttgaacgcagtagcccgctcgtatctatggtttcgctttccacagtttgttacctgcagtcaactgcagttcaaaaatattaaatggaaaattccagaaataaagaattttaagtctcaaatggtgtgcccttctgagtagcgtgatgaaatctctcgctgtccggctccagccggccggggatgtgagtcatcccttggtccagcacatccacgctgtatacgccacccaccctgctagtgacttagtagccgtcttggtgatcagatcaactatcccagcatcacagtgcctgtgcccaagcagtcctcactttgcttaacagtggccccagagagcaggagtagtgatgctggtgattcggatatgccaaagagaagccacaaagtgcttccttttaaatgaaaaggtgaaagttctcaacttaaaaaagaaaagaaaaaaatcatatactgaggttgctaagatctacatgacaataagatattttgggagagagatacgttcacataattttattacatatattgttacaattgttctattttgttagttactgttggtaatctcttactgtgcctaatttataaattaaactttagatatgtatgtacaggaaaaaatgtagtatatagtatcgtatatatgtacaggaaaaaaacgtactatctgtggtttcaggtatccactgcgggtcttcgaacgtacccccctcaggtgagaggggactgctgtacaaagaatataggaaggcctctagactacatccattccttcctcaacaggaggaaaattcctggtacagtttaacgtaaggcttcactgatcactgttgtttttgtttttgtttttgtttttttgagacagagtctcactcttgcccaggctggagtgcagtggcacggtcttggctcactgcaacctccacctcccaggttccagcaattctcctgcctcagcctccccagtagctgggattacagacatgcaccaccacacctggctaatttttgtatttttagtagagacagttttcaccatgttgtccaggctggtctcaactcctgacctcaggtgatccacccaccttgccctcccaaagtgctaggattacaggcgtgagccactgcacctagcccactgatcactcttctgcttacagaatatcagaagtcattctagaggcaaatttgaagagtggaaaaatcactttttctgaatgatcttgtttttggtgtagatgtttttattgtgtgggttagtttaatgaatacataaagactaccagtaccattctgtctttactccgtggcatctgtggaataaccctgctaatgtaacacgtgagaaagcctttggtcatgccacccactctaccagttgtccccaccatcccccgccctcctccctgtgagacactgggccaaaggctcactacccctgtgcgttgtccagcacacagacactatgtgcattatttgtacataaggataatcacatctacctgagactgctatcatggaaattaaatgtttggtacatgtaaagtctttgaaagtgtaactggaatattgtgtaattttaataaataataactattgttgtttttatgatcattactaccatttgtgttgccattagtgaatttttacaagaaaactccctgtgggtgcaatgagtctggaaaagaccattgagtcttctagaagaaaacattaagagattattggcacagccgtgggttacgcaatgatttcttagtacacaaaacacagcaaacataaaaagttgttacacttcatcaaaagtacaaagttctgttcatcaaatgatgctgttaagatagggaaaagacaagaaacaggactggaagaagatgtttgctctaaggtacacctgacaaaggaactctcatagaaaatataaagaatccctcaagttgaaaaaaaaatcaatttaaaggggagaaaacttcagcacgtctcaacagaagaccaccaaatggccaataagtaagtgaaaatgtattcaatgtcattgctcctcaaggaactgtagagtaaaaccacaatgtgctgtcactctagacagtcaccaggatgattaaatttaaatcacaataacaaggctgatttcagatgtctcaccacaaagaaggaggataagggagcgaggtgatggatatgttaattagcttgatttaatccttccacattgtatacatgtatcagaacatcacattgtactccatcaatataatacaattattatttgtcaatcaaatattaataaaatcaaagatgagcaggaaaaaaaaaaaaaaaaaaaaaaaaaaaaaaaaaaaaaaaaaaaaaaaaaaaaaaaaaaaaaaaaaaaaaaaaaaaaaaaaaaaaaaaaaaaaaaaaaaaaaaaaaaaaaaaa

SEQ ID NO: 770 - DNA, 1467 bp, Homo sapiens
caccatgctcgccctggaggctgcacagctcgacgggccacacttcagctgtctgtacccagatggcgtcttctatgacctggacagctgcaagcattccagctaccctgattcagagggggctcctgactccctgtgggactggactgtggccccacctgtcccagccaccccctatgaagccttcgacccggcagcagccgcttttagccacccccaggctgcccagctctgctacgaaccccccacctacagccctgcagggaacctcgaactggcccccagcctggaggccccggggcctggcctccccgcataccccacggagaacttcgctagccagaccctggttcccccggcatatgccccgtaccccagccctgtgctatcagaggaggaagacttaccgttggacagccctgccctggaggtctcggacagcgagtcggatgaggccctcgtggctggccccgaggggaagggatccgaggcagggactcgcaagaagctgcgcctgtaccagttcctgctggggctactgacgcgcggggacatgcgtgagtgcgtgtggtgggtggagccaggcgccggcgtcttccagttctcctccaagcacaaggaactcctggcgcgccgctggggccagcagaaggggaaccgcaagcgcatgacctaccagaagctggcgcgcgccctccgaaactacgccaagaccggcgagatccgcaaggtcaagcgcaagctcacctaccagttcgacagcgcgctgctgcctgcagtccgccgggcctgagcacacccgaggctcccacctgcggagccgctgggggacctcacgtcccagccaggatccccctggaagaaaaagggcgtccccacactctaggtgataggacttacgcatccccaccttttggggtaaggggagtgctgccctgccataatccccaagcccagcccgggcctgtctgggattccccacttgtgcctggggtccctctgggatttctttgtcatgtacagactccctgggatcctcatgttttgggtgacaggacctatggaccactatactcggggaggcagggtagcagtgcttccagagtcccaagagcttctctgggattttcttgtgatatctgattccccagtgaggcctgggacctttttaagatcgctgtgtgtctgtaaaccctgaatctcatctggggtgggggccctgctggcaaccctgagccctgtccaaggttccctcttgtcagatctgagatttcctagttatgtctggggccctctgggagctgttatcatctcagatctcttcgcccatctatggctgtgttgtcacatctgtcccctcatttttgagatcccccaattctctggaactattctgctgcccctttttatgtgtctggagttccccaatcacatctagggctcctccaaaaaaaaaaaaaaaaaaaa

SEQ ID NO: 771 - DNA, 3346 bp, Homo sapiens
gcggaggcgggcgcgcgccccgcaggggagggggcggagagcgcgagaaggagggaggaggcgtccccgtgcgggagcccggctgaccgcgccagacccagacagagcatcgcggctttggctgcaacaggcggtgggctcggctcgggggcggaggcggcgaaagggcggggagcgcgaggaggagcgacctggcctcaccgctgccgcctcttccccgccgcatggacgagcgcctcagccttctgcgctcgccgccgccgccctcagcccgccaccgcgcccaccctcctcagcgcccagcgagcagcggcggtgcccacacgctggtgaaccacggctacgcggagcccgccgcaggccgcgagctgccgcccgacatgaccgtggtgcccggggaccacctgctggagccggaggtggccgatggtggaggggccccgcctcaaggcggctgtggcggcggcggctgcgaccgctacgagccgctgccgccctcactgccggccgcgggcgagcaggactgctgcggggagcgcgtggtcatcaacatctccgggctgcgcttcgagacgcagctgaagaccctttgccagttccccgagacgctgctgggcgaccccaagcggcgcatgaggtacttcgacccgctccgcaacgagtacttcttcgaccgcaaccggcccagcttcgacgccatcctctactactatcagtccgggggccgcatccgccggccggtcaacgtgcccatcgacattttctccgaggagatccgcttctaccagctgggcgaggaggccatggagaagttccgcgaggacgagggcttcctgcgggaggaggagcggcccttgccccgccgcgacttccagcgccaggtgtggctgctcttcgagtaccccgagagctccgggccggcccggggcatcgccatcgtgtccgtgctggtcatcctcatctccattgtcatcttctgcctggagacgctgccggagttccgcgacgagaaggactaccccgcctcgacgtcgcaggactcattcgaagcagccggcaacagcacgtcggggtcccgcgcaggagcctccagcttctccgatcccttcttcgtggtggagacgctgtgcatcatctggttctccttcgaactgctggtgcggttcttcgcttgtcctagcaaagccaccttctcgcgaaacatcatgaacctgatcgacattgtggccatcattccttattttatcactctgggtaccgagctggccgaacgacagggcaatggacagcaggccatgtctctggccatcctgagggtcatccgcctggtaagggtcttccgcatcttcaagctgtcgcgccactccaaggggctgcagatcctcgggcaaacgctgaaggcgtccatgcgggagctgggattgctcatcttcttcctctttattggggtcatccttttctccagcgcggtctactttgccgaggcagacgaccccacttcaggtttcagcagcatcccggatgccttctggtgggcagtggtaaccatgacaacagtgggttacggcgatatgcacccagtgaccatagggggcaagattgtgggatctctctgtgccatcgccggtgtcttgaccatcgcattgccagttcccgtgattgtttccaacttcaattacttctaccaccgggagacagaaggggaagagcaatcccagtacatgcacgtgggaagttgccagcacctctcctcttcagccgaggagctccgaaaagcaaggagtaactcgactctgagtaagtcggagtatatggtgatcgaagaggggggtatgaaccatagcgctttcccccagacccctttcaaaacgggcaattccactgccacctgcaccacgaacaataatcccaactcttgtgtcaacatcaaaaagatattcaccgatgtttaatatgtgatacaagtgacatgctgtgctcagtattgtgtggaacgtgcccccttggtctgcctatgcccttgttttatacatttccagaccattcatcaaggaaaggacctgaagaagtggaaagcacacttcattctccctctccctgctgcttcatactgaaacaggtgcctgttttgcaagtgggctgcattctctcagctctccttttccctcttaccctctctctcttaacattgtaaacaacagacttacgttaaacttcatttctagtacacgccctatttaaaaaagagcagtacatcctgggaggaaatgaaactaaagaacagttagagtaactgtttaacctcagaattttaaaggcagttgtttctttcctaagcacatcaattcgtagtaaatgatgcttcggtttgatggacctttcaacgttatttattgaatatgtatttcggttgcctaccctgtagatatgtggatgaagagtctaactagaataatgacttgtaaacccaccatgagttatttggtttttgacttaaattcctatttgaatcccctttcccggaattttaagtgtctctacaactttgaataaagggaaatgcccaagatgtcctgatctgactaattagtttaattctttcgggcttgctaagcatttctaaagcattagactaacagattcctgtgaagttctgtgcatatgtcccagccccaacaactatcaaagtctagaaacagatgttttcagtgttgctgagagaaacaaaaaatttcctaatgcatctgagagataagcttcggcagtatcacaagaagattaaagtggcagacaccccttccagcggaagttactaattcggacctgactgatgcagtttccatagcaacccatgtttcctgggaaacccgaaaaaggttgtcatggcatctcttgctctctagccccacctcccagcccctgccgtttccacagtaacctttccagatggttcctacttaaatgatttcataaggaaaaccactgtttgaataagccgcacaaaaaataaagttaagtctgagactctaaggaggtgaaatgaatcccaaatgcattttttaactatgaaaatcattatgtcattccataatgactgaatcaaggaggaaaatatggtgtttggaatgttagatattaaccacaataaggcatgatctggattaaatgccatttattaggcaataatttttaaagatgcttctctacagttttctttctccaagaactttcaagccaacaaatgaaatttaaaagcaaatgtaaaagtgttctgtacataagcaaatgagagattcgatcagtgtgcctgaaaccttactacaagggaccttcaggctttctcttt

SEQ ID NO: 772 - DNA, 549 bp, Homo sapiens
ccttcggccacccccgctgaccatggcagtgtttcatgacgaggtggaaatcgaggacttccaatatgacgaggactcggagacgtatttctatccctgcccatgtggagataacttctccatcaccaaggaagatttggagaatggggaagacgtggcaacgtgtcctagctgctctctcattataaaagtgatttatgacaaagatcagtttgtgtgtggagaaacagtcccagccccttcagccaacaaagaattagttaaatgctgaagaagccttcaggaatccaaatcctgaacatttggaatgagcccagatagaaatatcgaatgcaaagctactggcttcacagagacaaccatttatgatttgctgttctgtaagagtgtggattctttctatcaactgctgatatcatcttcaggaagcaagtccataacatgacatatctggattttgtgcttagaaccttaaattggaagcattcttaattatgcatctaaatttaaaagaagataatttcaaaacagtaaaaaaaaaaaaaaaaa

SEQ ID NO: 773 - DNA, 3632 bp, Homo sapiens
agaagggaggtagtcgccctccgtcgtggcctggcgtggattccgagcgttggtgtctggcggtttccgaccgttggtgtctggcacgcgccaccccgatgtaccaggtaaagccctatcacggggtcggcgcccctctccgtgtggagcccacctgcatgtactggctccccaacatgcacggcaggagcggcggcccagcactcggcactggccacttgcagacaagaagacaagaaaatgatttgaggacagcttcaatcgcggtgtgaagaagaaagcaacaaaacgaccactgaaaacaatgccggtggcaaaacatccaaagaaagggtcccaagtggtacatcgtcatagctggaaacagtcagagccaccagccaatgatcttttcaatgctgcgaaagctgccaaaagtgacatgcagtgtggccatgaggtctgccggaagtgacttgttggtgttatctcctgagttaaaatgtgaagggatttttttttttcagattactgagagtcttcagttactagaggcggatttccctgactgaagaccatgttgcaggcccacagctgcctacagaaccgtcccaaaatatggcaaagaaacctattctgagcgatagggtctcaccatgttgcccaggctggtcttgaactcctggactcatcctaaagtgctggcctctcattccctgtctgtgcacacctcacggcaagggccagcctgtttcctcccggtcacctccaaatcttgctgcttttaattcaactcagaggcctagccagggttgagttctcacccacctgtgccgccctgccttgttacctggaagcacagccttggggactgagcaggccctcactgtcactttaagaagggaatcagccactttgtgctcaccacctctggggaaggtgtgagaggagagaaggaagtggctgtttggctgctgacaacatgaagacttcctgcgatgagaacagaggcacaggtgccggccctgcagcccccagaacccggactggagggggccatggggcgccggaccctggccctgccctgggtgctgctgaccctgcgtgtcactgcagggaccccggaggtgtgagtacaagttcggatggaggccaccgagctctcgtccttcaccatccgttgtgggttcctggagtctggctccatctccctggtgactgcccgctgggaaacccagagcagcatctctctcatcctggaaggctctggggccagcagcccctgcgccaacaccaccttctgctgcaagtttgcgtccttccctgagggctcctgggaggcctgtgggagcctcccgcccagctcagacccagggctctctgtcccgccgactcctgcccccattctgcgggcagacctggccgggatcttgggggtctcaggagtccttctctttgactgtggctacctccttcatctgctgtgccgacagaagcaccgccctgcccctaggctccagccatcccacaccagctcctaggcactgagagcacgagcatgggcacccagccaggcctcccaggctgctctccacgtcccttatgccactatcaacaccagctgctgcccagctactttggacacagctcacccccgacagggggccgtcctggtgggcatcactccccacccacaccgcacactggccccagggccctgctgcctgggcctccacatccatccctgcacatggcagctttgtctctgttgagaatggactctacgcttaggctgggcagaggcctccctgcactggtcctggcctcactcttttccctgacccttggggcccagggccatggagggacccttaggagttcaatgagagagaccatgaggccactgggctttccccttcccaggcctcctgggtgccacccccttacgttattcttgggcctctaataagtgtcccacaggtgcctggccaggcccacctgctgcagatgtggtctgtgtgtgtgcatgtgtgggtgtgtgtgggcacaggtgtgagtgtgtgagcaacagtaccccattccagtcgtttcctgctgtgactaagtcagcaacacagttcctctgacatgggccttggctgtgcttctttgggggtgaagagattggggaggaagtctccacccctgggaggcagaagccaggcatagcgcgctggctaggactccagtaccgtgaagggaggcagtgagagcagacatctgtgcctcattcctgatctcaaggggaaagcaagaacaagggaggcttcctcaggatctcgaacctgcggaaggaggaccagtctgtgtacttctgccaagtccagctggacatacagatcagggaggctgtcgtggcagtccatcaaggggacccacctcaccatcacccaggccctcaggcagcccctccacagggcccctctcctgcctggacagctctgctggtctccccgtcccctggagaagaacaaggccatgggtcggcccctgctgctgcccctgctgctcctgctgcagccgccagcatttctgcagcctggtggctccacaggatctggtccaagctacctttatggggtcactcaaccaaaacacctctcagcctccatgggtggctctgtggaaatccccttctccttctattacccctgggagttagccatagttcccaacgtgagaatatcctggagacggggccacttccacgggcagtccttctacagcacaaggccgccttccattcacaaggattatgtgaaccggctctttctgaactggacagagggtcaggagagcggcttcctcaggatctcaaacctgcggaaggaggaccagtctgtgtatttctgccgagtcgagctggacacccggagatcagggaggcagcagttgcagtccatcaaggggaccaaactcaccatcacccaggctgtcacaaccaccaccacctggaggcccagcagcacaaccaccatagccggcctcagggtcacagaaagcaaagggcactcagaatcatggcacctaagtctggacactgccatcagggttgcattggctgtcgctgtgctcaaaactgtcattttgggactgctgtgcctcctcctcctgtggtggaggagaaggaaaggtagcagggcgccaagcagtgacttctgaccaacagagtgtggggagaagggatgtgtattagccccggaggacgtgatgtgagacccgcttgtgagtcctccacactcgttccccattggcaagatacatggagagcaccctgaggacctttaaaaggcaaagccgcaaggcagaaggaggctgggtccctgaatcaccgactggaggagagttacctacaagagccttcatccaggagcatccacactgcaatgatataggaatgaggtctgaactccactgaattaaaccactggcatttgggggctgtttattatagcagtgcaaagagttcctttatcctccccaaggatggaaaaatacaatttattttgcttaccatacaccccttttctcctcgtccacattttccaatctgtatggtggctgtcttctatggcagaaggttttggggaataaatagcgtgaaatgctgctga

SEQ ID NO: 774 - DNA, 2956 bp, Homo sapiens
agaagggaggtagtcgccctccgtcgtggcctggcgtggattccgagcgttggtgtctggcggtttccgaccgttggtgtctggcacgcgccaccccgatgtaccaggtaaagccctatcacggggtcggcgcccctctccgtgtggagcccacctgcatgtactggctccccaacatgcacggcaggagcggcggcccagcactcggcactggccacttgcagacaagaagacaagaaaatgatttgaggacagcttcaatcgcggtgtgaagaagaaagcaacaaaacgaccactgaaaacaatgccggtggcaaaacatccaaagaaagggtcccaagtggtacatcgtcatagctggaaacagtcagagccaccagccaatgatcttttcaatgctgcgaaagctgccaaaagtgacatgcagtgtggccatgaggtctgccggaagtgacttgttggtgttatctcctgagttaaaatgtgaagggatttttttttttcagattactgagagtcttcagttactagatccagacacggggactgcagagaaaggctgtgtgcatccgctgtctactccactgtctcctctgcagaggcggatttccctgactgaagaccatgttgcaggcccacagctgcctacagaaccgtcccaaaatatggcaaagaaacctattctgagcgatagggtctcaccatgttgcccaggctggtcttgaactcctggactcatcctaaagtgctggcctctcattccctgtctgtgcacacctcacggcaagggccagcctgtttcctcccggtcacctccaaatcttgctgcttttaattcaactcagagaagggaatcagccactttgtgctcaccacctctggggaaggtgtgagaggagagaaggaagtggctgtttggctgctgacaacatgaagacttcctgcgatgagaacagaggcacaggtgccggccctgcagcccccagaacccggactggagggggccatggggcgccggaccctggccctgccctgggtgctgctgaccctgcgtgtcactgcagggaccccggaggtgtgagtacaagttcggatggaggccaccgagctctcgtccttcaccatccgttgtgggttcctggagtctggctccatctccctggtgactgtgagcagggggggccccgatggtgctggggggaccacgctggctgtgttgcacccggaacttggcatccagcaatgggcccctgctcgccaggcccgctgggaaacccagagcagcatctctctcatcctggaaggctctggggccagcagcccctgcgccaacaccaccttctgctgcaagtttgcgtccttccctgagggctcctgggaggcctgtgggagcctcccgcccagctcagacccagggctctctgtcccgccgactcctgcccccattctgcgggcagacctggccgggatcttgggggtctcaggagtccttctctttgactgtggctacctccttcatctgctgtgccgacagaagcaccgccctgcccctaggctccagccatcccacaccagctcctaggcactgagagcacgagcatgggcacccagccaggcctcccaggctgctctccacgtcccttatgccactatcaacaccagctgctgcccagctactttggacacagctcacccccgacagggggccgtcctggcatagcgcgctggctaggactccagtaccgtgaagggaggcagtgagagcagacatctgtgcctcattcctgatctcaaggggaaagcaagaacaagggaggcttcctcaggatctcgaacctgcggaaggaggaccagtctgtgtacttctgccaagtccagctggacatacagatcagggaggctgtcgtggcagtccatcaaggggacccacctcaccatcacccaggccctcaggcagcccctccacagggcccctctcctgcctggacagctctgctggtctccccgtcccctggagaagaacaaggccatgggtcggcccctgctgctgcccctgctgctcctgctgcagccgccagcatttctgcagcctggattatgtgaaccggctctttctgaactggacagagggtcaggagagcggcttcctcaggatctcaaacctgcggaaggaggaccagtctgtgtatttctgccgagtcgagctggacacccggagatcagggaggcagcagttgcagtccatcaaggggaccaaactcaccatcacccaggctgtcacaaccaccaccacctggaggcccagcagcacaaccaccatagccggcctcagggtcacagaaagcaaagggcactcagaatcatggcacctaagtctggacactgccatcagggttgcattggctgtcgctgtgctcaaaactgtcattttgggactgctgtgcctcctcctcctgtggtggaggagaaggaaaggtagcagggcgccaagcagtgacttctgaccaacagagtgtggggagaagggatgtgtattagccccggaggacgtgatgtgagacccgcttgtgagtcctccacactcgttccccattggcaagatacatggagagcaccctgaggacctttaaaaggcaaagccgcaaggcagaaggaggctgggtccctgaatcaccgactggaggagagttacctacaagagccttcatccaggagcatccacactgcaatgatataggaatgaggtctgaactccactgaattaaaccactggcatttgggggctgtttattatagcagtgcaaagagttcctttatcctccccaaggatggaaaaatacaatttattttgcttaccatacaccccttttctcctcgtccacattttccaatctgtatggtggctgtcttctatggcagaaggttttggggaataaatagcgtgaaatgctgctga

SEQ ID NO: 775 - DNA, 1436 bp, Homo sapiens
ccccatctctactaaaaaaaaaaaaaaaaaaaggatttgaagtcctggccggagcaattaggcaagggataaaaaggcacctaaggcccttttgcaataagaagccagatggataaaggaagtgctggtcaccctggaggtgtactggtttggggaaggtccccggcccccacagccctctggggagcctcaccctggctctccccactcacctcagccctcaggcagcccctccacagggcccctctcctgcctggacagctctgctggtctccccgtcccctggagaagaacaaggccatgggtcggcccctgctgctgcccctgctgctcctgctgcagccgccagcatttctgcagcctggtggctccacaggatctggtccaagctacctttatggggtcactcaaccaaaacacctctcagcctccatgggtggctctgtggaaatccccttctccttctattacccctgggagttagccatagttcccaacgtgagaatatcctggagacggggccacttccacgggcagtccttctacagcacaaggccgccttccattcacaaggattatgtgaaccggctctttctgaactggacagagggtcaggagagcggcttcctcaggatctcaaacctgcggaaggaggaccagtctgtgtatttctgccgagtcgagctggacacccggagatcagggaggcagcagttgcagtccatcaaggggaccaaactcaccatcacccaggctgtcacaaccaccaccacctggaggcccagcagcacaaccaccatagccggcctcagggtcacagaaagcaaagggcactcagaatcatggcacctaagtctggacactgccatcagggttgcattggctgtcgctgtgctcaaaactgtcattttgggactgctgtgcctcctcctcctgtggtggaggagaaggaaaggtagcagggcgccaagcagtgacttctgaccaacagagtgtggggagaagggatgtgtattagccccggaggacgtgatgtgagacccgcttgtgagtcctccacactcgttccccattggcaagatacatggagagcaccctgaggacctttaaaaggcaaagccgcaaggcagaaggaggctgggtccctgaatcaccgactggaggagagttacctacaagagccttcatccaggagcatccacactgcaatgatataggaatgaggtctgaactccactgaattaaaccactggcatttgggggctgtttattatagcagtgcaaagagttcctttatcctccccaaggatggaaaaatacaatttattttgcttaccatacaccccttttctcctcgtccacattttccaatctgtatggtggctgtcttctatggcagaaggttttggggaataaatagcgtgaaatgctgctga

SEQ ID NO: 776 - DNA, 2207 bp, Homo sapiens
actgacggccggccggcttcccggaactggaaggttacattgattacccacctagtacaacatcttacgggaagagcatagtatttcctagaggaatatgaacataacaggaaggtatcattggctctgaattaaatttgaacttgtcccctgaatagctacaggttttggaagctgaatcaatgttatcagatgagttagaatccaaaccagagctcctggtacagtttgttcagaatacgtccatcccattgggacaggggcttgtagaatcagaagctaaagatattacttgcttgtccctccttcccgtgactgaagcctcagaatgcagtcggctaatgttaccagatgatactacaaatcattctaactcctccaaggaggtcccttcctcagctgttttgagaagccttcgggtgaatgtgggtccagacggagaggagacgagagctcagactgtacagaaatccccggagtttttgtccacttcagagtcttctagcttgttgcaagatctacagccaagtgatagcacttcttttattcttcttaacctaacaagagcaggtctgggctcttcagctgagcacttagtgtttgtacaggatgaggcagaagattcagggaatgatttcctctccagtgagagcacagacagtagcattccatggttcctccgggttcaggagttggcccatgacagtttgattgctgctactcgtgcacaactggcaaagaatgcaaaaaccagcagcaatggagaaaatgtccaccttggttctggtgatgggcagtcaaaagattctgggccccttcctcaagtggaaaagaagctcaagtgtacagttgaaggttgtgaccggacatttgtatggccagctcactttaaataccacctcaagactcatcgaaatgaccgctccttcatctgtcctgcagaaggttgtgggaaaagcttctatgtgctgcagaggctgaaggtgcacatgaggacccacaatggagagaagccctttatgtgccatgagtctggctgtggtaagcagtttactacagctggaaacctgaagaaccaccggcgcatccacacaggagagaaacctttcctttgtgaagcccaaggatgtggccgttcctttgctgagtattctagcctccgaaaacatctggtggttcactcaggagagaagcctcatcagtgccaagtctgtgggaagaccttctctcagagtggaagcaggaatgtgcatatgagaaagcatcacctgcagctgggagcagctgggagtcaagagcaggagcaaactgctgagccactaatgggcagtagtttgcttgaagaggcttcagtacccagtaaaaacctggtgtctatgaattcccagcccagccttggtggagagtccttgaacctaccaaataccaattctatcctgggagttgatgatgaggtgcttgctgaaggatccccacgttccctgtcttcagtgcctgatgtgacacatcacctggtgaccatgcagtcagggaggcaatcatatgaagtttctgtcttaactgcagtaaatccacaagagttactaaaccaaggagatttaactgaaagacggacatgagcgtgggtgctgactcctggaagagcaactctatctgatctcaaaatgcgtatactgggaacaggatgccttagcccacaacagaaccagaatgaatctttgaaggcacaagactctgcttttgccactcttcctctttcctggtatagaagatggatgtaggagagcttcttttctaactaccatctgatcagacaaggaatgaagcaatgactgtgggctgggaaactgtacctacctctcttcccactgcaaatttctgggatagaccaaaagtgaatttgattatgtgttggctgaagttcttcattctgactgttgaggggaggttttcctttgaagagttttcatcccagactcagctgtcttttcacatggatgaaataattcctgctaccaacaacagagcttcaccaggaagttgagttttcaagatgccttgttgctttgaagaagggagtgatgtcaattctcttgttacattctccctttagcaacctgagtaagagactctctgccactgggctgcaaaaaaataaattacttgaatctccccttgaaaaaaaaaaaaaaaaaaaaaaaaaaaaa

SEQ ID NO: 777 - DNA, 1792 bp, Homo sapiens
acgttatcttcagggagtttcaggaggtttttggctcaaggcacccaactgtcaggcacaaagaaagcattgtgtccctaccctcactgctctcctgtgcccaggttattaacacaaattccattattgtcaaggctttggctagaatggcttgttcctgctggggctgaccattagaactgagatggaggaacaaaagctcccccgatcccgatcctaaccttccacccagtcccctcccactccccaggtcccataaagtggcgggagcatcgtagcgtaggaagaagccgccacaccttcctccataacctgggaggatggaagagctcttcgaagctttgctcttcgtgtccccctgaaacaagggttactgtgagtcttgcacacaaggaacatgcgctccaaggttcctagccaggtgggtgctctgcaaagttagggcaaagagagtctggccacatgcagcctctccactggagaaggattttcatctgccaggtggcggggcccttagcctcgttaatcctgcttaatcctgctagaacatacctacagggagcccactttccacgcagagcatcccttgaaggaggggcttcccagaatgctgaggattctgggcttctcagactccgatcagatgcacctcagccctgggatcagtgccccagccctgcctgccagtttcctttttcacttcaccatgagcataagtttgggtgggaactcagcctgttcattcacttcatactgagttcccactctgtgccagggcctgacctgtgcactgccaaaagagcagggaacagcaaaaccctttcctcccaccgtgggccttggagaatgaatgcagggggtggccacgggtagtcgtctggggcttggttctccctgagctaacctcgccagcctggcccagcttgccctgatcccctgatggtccgtgcacatgtgtttatacttgcattgttgactggggtccaattgcctttttggcaaaggcatcaagcattcaaagatgttcagatcttttctgtctggctcttttcctcggaatgaggctccagtgtgtccctttagtcccttagccattatctgagaggctagaattctggcagtgtccccgtgcatctttccccagtggaggagagaactctcggaccagtgagctagagaagcaacccaccccggccgctggaagcaggggaggtgaaatgtgtccaaactcctctcaggctgtcagatggccttgagcggcaccaagtagaaaacgcgctcccacccctgaccttctcctcagcttcattgtgagacctcaagttcctcagcttccaggatgatcaacctagctgaaaacctgaagtccctcccggtacaagtccaagcagtccccagccagggagaccaggtgttgtctgacatcccacacacatcggcacacttgggggattgcaaaagggaggaagggagccaaaggctagggccccggggttcagctaacactcagcacccctcccaaagagcgccccctgtgtgttctggatctctagaggggtttggtttgggccaagtagtgcttagttttaattttctctttctggaaataaatacttttaataagtaaagatgctgctcagctgtcatatcctgcaaggttagaggaaagatgtgggccgtgcgcggtggctcatgcctgtaatcccagcactttgggaggccaaggcaggcagatcacttgaggccaggagttcaagaccagcccaggcaacatggtgaccccatctctacc

SEQ ID NO: 778 - DNA, 3720 bp, Homo sapiens
ccacgcgtccggccagccgggtggcacagcggtgtcgtggccgtgttgctgatcgcctgggtggttgttggcgtgtccctgcagcgaaggatcctggttgacagtgaaaaagcagtctggctcccgaggtccaccccttataccccaaggtccagatggcggccaacgtgggtgatcaacgtagcacagattggtcttctcagtacagcatggtggctggggcaggccgagagaatggcatggagacgccgatgcacgagaacccggagtgggagaaggcccgtcaggccctggccagcatcagcaagtcaggagctgccggcggctctgccaagtccagcagcaatgggcctgtggccagtgcacagtacgtgtcccaggcagaagcctcagctttgcagcagcagcagtactaccagtggtaccagcagtacaactatgcctacccctacagctactactatcccatgagcatgtaccagagctatggctccccttcccagtatgggatggccggctcctatggctcagccacaccccagcagccatccgcaccccaacaccaagggactctgaaccagcccccagtccccggcatggatgagagcatgtcctaccaggctccccctcagcagctgccgtcggctcagccccctcagccctcaaatcccccacatggggctcacacgctgaacagtggccctcagcctgggacagctccagccacacagcacagccaggcggggcccgccacgggccaggcctatgggccacacacctacaccgaacctgccaagcccaagaagggccaacagctgtggaaccgcatgaaacccgcccctgggactggaggtctcaagttcaacatccagaagcgaccctttgctgttaccacccagagctttggctccaacgcagagggccagcacagtggttttggcccccagcccaaccctgagaaagttcagaaccacagcgggtcctctgcccgggggaacctgtctgggaagccggatgactggccccaggacatgaaagagtatgtggagcgctgcttcaccgcctgtgagtcggaggaggacaaggaccgcacggaaaagctgctcaaggaggtgctgcaggcgcggctgcaggacggctcggcctataccattgactggagccgggagcccttgccggggctgacccgggagcctgtggctgagagccctaagaagaagcggtgggaggccgctagcagccttcaccctcctagaggggcaggctcggcgacaaggggcgggggtgccccgtcccagcgagggacgcccggggctgggggtgccggtcgagcccggggcaacagcttcaccaagtttggcaaccgcaacgtcttcatgaaggacaacagctcttcttccagcacagactcccgctcccgctcctcctccaggtccccgacgcgccacttccgcagaagtgactcccactcagactccgacagctcctactcagggaatgagtgtcaccctgtgggccgcaggaacccgccccctaagggccggggcggtcgaggggcccatatggatcggggccgaggcagggcgcagcgtgggaagaggcacgatctggcgcccaccaagcgcagtcgaaagaagatggcggcgctggagtgtgaggacccggagcgagagctgaagaagcagaagcgggcagcccgcttccagcacggacactcccgccgcctgcgcctcgagcccctggtgctgcagatgagcagcctggagagcagtggggctgaccctgactggcaggagctgcagatcgtgggcacctgccctgacatcaccaagcactacctgcgcctcacctgtgcccccgacccgtccaccgtgcgccctgtggcagttttgaaaaagtcgctgtgcatggtcaagtgccactggaaagagaagcaggactacgcgtttgcctgcgagcagatgaagtcgatccggcaggatctgacggtgcagggcatccgcaccgagttcacggtggaggtgtacgagacccatgcccggatcgccttggagaagggtgaccatgaagagtttaaccagtgccagacgcagctcaagtcgctgtacgccgagaacttgcctggcaatgtgggcgagtttactgcctaccgaatcctctactacatcttcaccaagaactcgggagacatcaccacggagctggcatacctcacacgagaactgaaggcagatccttgcgtggcccacgccttggcattaaggacagcctgggccctgggcaactaccaccgctttttccggctctactgccatgcaccctgcatgtctggctacctcgtggacaagtttgcagatcgggagcgcaaggtcgccctcaaggccatgatcaaaaccttccgccctgcgctgccagtctcctacctgcaggccgagctggccttcgagggcgaggccgcctgccgggccttcctagagcccctgggcctggcctacacgggcccggacaactccagcatcgactgccgcctcagcctggcgcagctgtcagccttctgagcacccagcgaggaggggcgggggcaggggctgcagcccccagcgctgcctttgcggattctgtttttgagccgtggacttgggttgtaaatttatttgtggggagtgcgctccaggaagagccaccatccctgcccccgttttcccaccggggagtctgtacagagatttttctacgtttttattttttgcctcagagggatgggattggggaggaggggatgggcagcggagggttgggggcatggtctgcaggctcatctgtgtccgcctttcactccactaatgctgtctcagtgttttctctctctctctttcgagcttgcactccggtacccgacccggcgccctggcccatcccatgccggggggccagtggaaagaagacaggccgtccagcccgtgcccgcctgcggcgggggcacccagcaagcccgcccaccgcccgctgcctcacctgcttcgccacagactcttgttcccagccccttggggcctccgtgtttggggtgggggagctgcttagagactgtgcccgtcctcggccccccaccctgaagtgccagcaccaccagcaccagatcctccgccgccacaccgcactgaggacacgccggccgggccgcctcgtctcaagttgtataaagttgtctccgtgtcccctcctccctctgcccccagtgtttcttctgatttttttttcccctttccctccctccctctccgcattcttcccttggttcagcacaggtaaaacggttcccctccctccctgccttcatggatcaccagctcacgtcatgttgccttctcttttctttgtgtgtgtgtttatttaagttatttttcttcctcctctcccttttctttttggccctccctccctccctcttctgccatgtaactggaggatgtgctatgagtttgcaaacagctggactgtcaggctgctttttttccagatgttcctcctctgcctccccttcccctcctctcccctccttttccttccttccttcctttccttggagcactgagcaccatttggaagcttgagagaaaccaaaattaaagagagaaagagagagaaaaaaaaaaaaaaaaaaaaaaaaaaaaaaaaaaaaaaaaaaaaaaaaaaaaaaaaaaaaaaaaaaaaaaaaaa

SEQ ID NO: 779 - DNA, 1482 bp, Homo sapiens
cggaagcggcggagtagagcggagcctggcgggcgtgggaacccaggccccgccgaggcggccaggaggtgagatggcagctgggcaaaatgggcacgaagagtgggtgggcagcgcatacctgtttgtggagtcctcgctggacaaggtggtcctgtcggatgcctacgcgcacccccagcagaaggtggcagtgtacagggctctgcaggctgccttggcagagagcggcgggagcccggacgtgctgcagatgctgaagatccaccgcagcgacccgcagctgatcgtgcagctgcgattctgcgggcggcagccctgtggccgcttcctccgcgcctaccgcgagggggcgctgcgcgccgcgctgcagaggagcctggcggccgcgctcgcccagcactcggtgccgctgcaactggagctgcgcgccggcgccgagcggctggacgctttgctggcggacgaggagcgctgtttgagttgcatcctagcccagcagcccgaccggctccgggatgaagaactggctgagctggaggatgcgctgcgaaatctgaagtgcggctcgggggcccggggtggcgacggggaggtcgcttcggcccccttgcagcccccggtgccctctctgtcggaggtgaagccgccgccgccgccgccacctgcccagacttttctgttccagggtcagcctgtagtgaatcggccgctgagcctgaaggaccaacagacgttcgcgcgctctgtgggtctcaaatggcgcaaggtggggcgctcactgcagcgaggctgccgggcgctgcgggacccggcgctggactcgctggcctacgagtacgagcgcgagggactgtacgagcaggccttccagctgctgcggcgcttcgtgcaggccgagggccgccgcgccacgctgcagcgcctggtggaggcactcgaggagaacgagctcaccagcctggcagaggacttgctgggcctgaccgatcccaatggcggcctggcctagaccaggggtgcagccagcttttggagaacctggatggccttagggttccttctgcggctattgctgaacccctgtccatccacgggaccctgaaactccacttggcctatctgctggacctgctggggcagagttgattgccttccccaggagccagaccactgggggtgcatcattggggattctgcctcaggtactttgatagagtgtggggtgggggggacctgctttggagatcagcctcaccttctcccatcccagaagcggggcttacagccagcccttacagtttcactcatgaagcaccttgatctttggtgtcctggacttcatcctgggtgctgcagatactgcagtgaagtaaaacaggaatcaatcttgcctgcccccagctcacactcagcgtgggaccccgaatgttaagcaatgataataaagtataacacggaaaaaaaaaaaaaaaaaaaaaa

SEQ ID NO: 780 - DNA, 1959 bp, Homo sapiens
tgaccttgaggataggcgtgtgttctcgagtctgtgtatgatttaccaatttgtgcactaacgtcctttgctccatccccgcccccctccaccagccggctcactcctttctactaattgtggatgtctctctcctcttttcctctcttactgcagcactccttgctcaagacccctccccagtacctacccttccaggcccccctttcccatctcagggcagaggccacaggaggctgaagcgggttgggggatctgttcgtggcctcagagcggcgagagcccctcttcttcccgagcagtgggagtcgcgcttggtggaggccgaagacctgagacctctcgccctcctctgccctgctggccgcctacccagacggcttgtttgcccagggcacacgcccccttttctgtgcttcgaagtccctctcttttgccaaccctcatttggggcgtgagagcgggggttaggtggcacccactctgtcttagggtgctccctgtgacagatcctggtcttctttctgggttattgctgtttgtatcccaattttgcttcccagctgggtactctggggtaactgcaccctaggtcaggggatgggacgcggggcttcaccacgggcttcgcccctcctccggccgtttggagaacggccgagcttggggaccgcccggcgcctgaccgcccgcctccgcagagagcggcgggagcccggacgtgctgcagatgctgaagatccaccgcagcgacccgcagctgatcgtgcagctgcgattctgcgggcggcagccctgtggccgcttcctccgcgcctaccgcgagggggcgctgcgcgccgcgctgcagaggagcctggcggccgcgctcgcccagcactcggtgccgctgcaactggagctgcgcgccggcgccgagcggctggacgctttgctggcggacgaggagcgctgtttgagttgcatcctagcccagcagcccgaccggctccgggatgaagaactggctgagctggaggatgcgctgcgaaatctgaagtgcggctcgggggcccggggtggcgacggggaggtcgcttcggcccccttgcagcccccggtgccctctctgtcggaggtgaagccgccgccgccgccgccacctgcccagacttttctgttccagggtcagcctgtagtgaatcggccgctgagcctgaaggaccaacagacgttcgcgcgctctgtgggtctcaaatggcgcaaggtggggcgctcactgcagcgaggctgccgggcgctgcgggacccggcgctggactcgctggcctacgagtacgagcgcgagggactgtacgagcaggccttccagctgctgcggcgcttcgtgcaggccgagggccgccgcgccacgctgcagcgcctggtggaggcactcgaggagaacgagctcaccagcctggcagaggacttgctgggcctgaccgatcccaatggcggcctggcctagaccaggggtgcagccagcttttggagaacctggatggccttagggttccttctgcggctattgctgaacccctgtccatccacgggaccctgaaactccacttggcctatctgctggacctgctggggcagagttgattgccttccccaggagccagaccactgggggtgcatcattggggattctgcctcaggtactttgatagagtgtggggtgggggggacctgctttggagatcagcctcaccttctcccatcccagaagcggggcttacagccagcccttacagtttcactcatgaagcaccttgatctttggtgtcctggacttcatcctgggtgctgcagatactgcagtgaagtaaaacaggaatcaatcttgcctgcccccagctcacactcagcgtgggaccccgaatgttaagcaatgataataaagtataacacggaaaaaaaaaaaaaaaaaaaaaa

SEQ ID NO: 781 - DNA, 2592 bp, Homo sapiens
ggtggacggcgacgctgggtgacccggggtgcaagaattcaggggttgggaaggtgtgagccgcaaacccagcggagggcgggaagaaggaggaggcctctagggtggtcgggggactgggggccccgccggcagaggtccctcggcctcctgactgactgactgcggccgcctccggccaggacgctgggagctgcctgcgggaaggtgcggggagcggagccatggcctccggtgcgtataacccgtatatagagataattgaacaacccaggcagaggggaatgcgttttagatacaaatgtgaagggcgatcagcaggcagcattccaggggagcacagcacagacaacaaccgaacatacccttctatccagattatgaactattatggaaaaggaaaagtgagaattacattagtaacaaagaatgacccatataaacctcatcctcatgatttagttggaaaagactgcagagacggctactatgaagcagaatttggacaagaacgcagacctttgtttttccaaaatttgggtattcgatgtgtgaagaaaaaagaagtaaaagaagctattattacaagaataaaggcaggaatcaatccattcaatgtccctgaaaaacagctgaatgatattgaagattgtgacctcaatgtggtgagactgtgttttcaagtttttctccctgatgaacatggtaatttgacgactgctcttcctcctgttgtctcgaacccaatttatgacaaccgtgctccaaatactgcagaattaaggatttgtcgtgtaaacaagaattgtggaagtgtcagaggaggagatgaaatatttctactttgtgacaaagttcagaaagatgacatagaagttcgttttgtgttgaacgattgggaagcaaaaggcatcttttcacaagctgatgtacaccgtcaagtagccattgttttcaaaactccaccatattgcaaagctatcacagaacccgtaacagtaaaaatgcagttgcggagaccttctgaccaggaagttagtgaatctatggattttagatatctgccagatgaaaaagatacttacggcaataaagcaaagaaacaaaagacaactctgcttttccagaaactgtgccaggatcacgtagaaacagggtttcgccatgttgaccaggatggtcttgaactcctgacatcaggtgatccacccaccttggcctcccaaagtgctgggattacagttaattttcctgagagaccaagacctggtctcctcggttcaattggagaaggaagatacttcaaaaaagaaccaaacttgttttctcatgatgcagttgtgagagaaatgcctacaggggtttcaagtcaagcagaatcctactatccctcacctgggcccatctcaagtggattgtcacatcatgcctcaatggcacctctgccttcttcaagctggtcatcagtggcccaccccaccccacgctcaggcaatacaaacccactgagtagtttttcaacaaggacacttccttctaattcgcaaggtatcccaccattcctgagaatacctgttgggaatgatttaaatgcttctaatgcttgcatttacaacaatgccgatgacatagtcggaatggaagcgtcatccatgccatcagcagatttatatggtatttctgatcccaacatgctgtctaattgttctgtgaatatgatgacaaccagcagtgacagcatgggagagactgataatccaagacttctgagcatgaatcttgaaaacccctcatgtaattcagtgttagacccaagagacttgagacagctccatcagatgtcctcttccagtatgtcagcaggcgccaattccaatactactgtttttgtttcacaatcagatgcatttgagggatctgacttcagttgtgcagataacagcatgataaatgagtcgggaccatcaaacagtactaatccaaacagtcatggttttgttcaagatagtcagtattcaggtattggcagtatgcaaaatgagcaattgagtgactcctttccatatgaattttttcaagtataacttgcaagatttaaatccttttaaatcttgataccacctatatagatgcagcattttgtatttgtctaactggggatataatactatatttatactgtatatataatactgactgagaatataatactgtatttgagaatataaaaaacttttttcagggaagaagcatacaactttggacatagcgaatacaaaattggaagctgtcataaaaagacaactcagaggccaggcgcaggggctcacacctgtaatcctagcactttgggaggccaaggcgggtggatcacttgagaccaggaattcgagaccagcctggccaacatggtgaaaccccgtctctactaaaaatacaaaaattagctgagcatggtggtacgtgcctgtactgtcagctacttgggaggctgaggcacaataattgtttgaacccaggaagcagaggttgcagtgagctgagatcacaccaccgcactccagcctgggtgacagagtgagactctgtctc

SEQ ID NO: 782 - DNA, 2983 bp, Homo sapiens
gcccagataggggagcggaggtggcggcggcggcggtagcggtggccttggttgtcttccagtctcctcggctcgccctttagccggcaccgctccccttccctcccccttcctctcttccttccttccctccccttccctttttcccttccccgtcggtgagcggcgggggtggctccagcaacggctgggcccaagctgtgtagaggccttaaccaacgataacggcggcgacggcgaaacctcggagctcgcagggcgggggcaaggcccgggccttggagatggagaattctcagttgtgtaagctgttcatcggcggcctcaatgtgcagacgagtgagtcgggcctgcgcggccactttgaggcctttgggactctgacggactgcgtggtggtggtgaatccccagaccaagcgctcccgttgctttggcttcgtgacctactccaatgtggaggaggcggacgccgccatggccgcctcgccccatgccgtggacggcaacactgtggagctgaagcgggcggtgtcccgggaggattcggcgcggcccggtgcccacgccaaggttaagaagctctttgtcggaggccttaaaggagacgtggctgagggcgacctgatcgagcacttctcgcagtttggcaccgtggaaaaggccgagattattgccgacaagcagtccggcaagaagcgtggattcggcttcgtgtatttccagaatcacgacgcggcagacaaggccgcggtggtcaagttccatccgattcagggccatcgcgtggaggtgaagaaagcagtccccaaggaggatatctactccggtgggggtggaggcggctcccgatcctcccggggcggccgaggcggccgggggcgcggcggtggtcgagaccagaacggcctttccaagggcggcggcggcggttacaacagctacggtggttacggcggcggcggaggcggcggctacaatgcctacggaggcggcggcggcggttcgtcctacggtgggagcgactacggtaacggcttcggcggcttcggcagctacagccagcatcagtcctcctatgggcccatgaagagcggcggcggcggcggcggtggaggcagtagctggggcggtcgcagtaatagtggaccttacagaggcggctatggcggtgggggtggctatggaggcagctccttctaaaagaaaatttaaaatgcctgggagtggctataggggtagctctttccaacagcccaagtggggtcaactcctaagccccaccccctcacacacaccgccttccctgttttgcccttgggggagccacttctaaggctgcttacccttgggggtgttcctctatttgcctgccacctctcttgtctctccctctgaagatggactcggccccacatacacatttttgtgttacagtcattgatggactctatttttttattattacttggaccttggtcgtttttatactagcaaaatgtcttgttttaatttgtgttttttggggggagggagggagtgaacttgctgattctgtagcaaaacctgggtgggggttggggtggggggtagtttactttgttgtaaggacttgataacctggctacagcgttttctatgaaatctacttggatcccatgcctgaaatttggaagcatatgtacaaaaatcatttttacgttttatttttaataaatcattgtgtttgaccgtacatgtctaacattttttttctaggatccattccgtaccgttttttaagggatatttgtttaagactttacgtgttaattctttattcttgatgtgtacttagagaaacttaagaggtcctgtggtttttttcccctctcctgttgccctgctagttgcgtgttgaattatatcccttacaggcaaaacttttgaagtggtggatgtggctttttaaactcttaagtttctgtgcatccatctcttgtactaagcgaattgtttatcatcttgacatggttggtcatttctatgacaatttacttcaaactgtgtactgtgtagttctatatagtttgtgttaagcatgtcattcatataaactgtttaaaatttttcagatggcctagtttcatccctcttactggtttgtctgtaatgaatggttaaaaataagggttatattttaccctcaaatgcgtttttgtactttcagagcaggtttaaacgttttttttttttttttcctatatccgaactgttggcctcatggaaatccctttcccgatctttgtagcaccatctactggcagaatggcagagtagctgcgaaacaatttgtttaaaaacttgcttaagacaattgcatcagatttggaagttttgccatcaaaattctttgcagaattggaagttaacacatttgcttgtaactgagatgggcttcacaggaatgtagttgccagttcatatcacaatagccctttctatatgaggtttgaaaatgtaaactgctatgcatagcttgggcaatagccctaaattgctatgacaactaatgaaccagctacgtatactggtattttaggtgcaagttgtaaagcaaaatatctgtgtattctgcttggttaacaaatgtatatttgtagccctttcctgcaatagcattcaagttgttgtttataagagaagaacaaaagtgataataggtgaaaattgcctttctggatagaaatagagaatagcaacgtttatggatatcacaaataaagaattcaattctttacatgattgagtgagagtatgtataacctggtgggtgggttcagagtaccttttaatctagtatgcttaacttgatgttaatatttaacttaaatatttgacttacatgttgacgttgaaggctcaaagctatactaagaagctttctgaaagattgggctttaaaataaaataatattttaatattgaaaaaaaaaaaaaaaaaa

SEQ ID NO: 783 - DNA, 593 bp, Homo sapiens
ggggtccttccgtgcgcgttgatatgattggccggcgaatcgtggttctcttttcctccttggctgtctgaagatagatcgccatcatgaacgacaccgtaactatccgcactagaaagttcatgaccaaccgactacttcagaggaaacaaatggtcattgatgtccttcaccccgggaaggcgacagtgcctaagacagaaattcgggaaaaactagccaaaatgtacaagaccacaccggatgtcatctttgtatttggattcagaactcattttggtggtggcaagacaactggctttggcatgatttatgattccctggattatgcaaagaaaaatgaacccaaacatagacttgcaagacatggcctgtatgagaagaaaaagacctcaagaaagcaacgaaaggaacgcaagaacagaatgaagaaagtcagggggactgcaaaggccaatgttggtgctggcaaaaagccgaaggagtaaaggtgctgcaatgatgttagctgtggccactgtggatttttcgcaagaacattaataaactaaaaacttcatgtgtctggttgtttgaaaaaaaaaaaaaaaaaa

SEQ ID NO: 784 - DNA, 615 bp, Homo sapiens
ggggtccttccgtgcgcgttgatatgattggccggcgaatcgtggttctcttttcctccttggctgtctgaagatagatcgccatcatgaacgacaccgtaactatccgcactagaaagttcatgaccaaccgactacttcagaggaaacaaatggtcattgatgtccttcaccccgggaaggcgacagtgcctaagacagaaattcgggaaaaactagccaaaatgtacaagaccacaccggatgtcatctttgtatttggattcagaactcattttggtggtggcaagacaactggctttggcatgatttatgattccctggattatgcaaagaaaaatgaacccaaacatagacttgcaagacatggcctgtatgagaagaaaaagacctcaagaaagcaacgaaaggaacgcaagaacagaatgaagaaagtcagggggactgcaaaggccaatgttggtgctggcaaaaagtgagctggagattggatcacagccgaaggagtaaaggtgctgcaatgatgttagctgtggccactgtggatttttcgcaagaacattaataaactaaaaacttcatgtgtctggttgtttgaaaaaaaaaaaaaaaaaa

SEQ ID NO: 785 - DNA, 297 bp, Homo sapiens
atgctgagccggcttcaggaactgcgcaaggaggaggagacgctgctgcggttgaaggcagccctgcacgaccagctgaaccgcctcaaggttgaagaattagccctccaatcaatgatcagttctagaagaggggatgagatgctgtcttctcacactgtacctgaacagtcacatgatatgttggtgcatgtagacaatgaagcatcaatcaaccaaacaaccctggagctgagcacaaagagtcatgtgacsgaagaggaggaggaggaagaggaagaagaatcagattcctaa

SEQ ID NO: 786 - DNA, 2493 bp, Homo sapiens
ccctccgggcaggggaggtaggcctgggcctgacgccggccacgcagcggcgggagagtgagcactcgggcggcggcgtcctggagacccgcgagagatggaagcggcggcgacgccggcggctgccggggcggcgaggcgcgaggagctagatatggatgtaatgaggcccttgataaatgagcagaattttgatgggacatcagatgaagaacatgagcaagagcttctgcctgttcagaagcattaccaacttgatgatcaagagggcatttcatttgtacaaactcttatgcaccttcttaaaggaaatattggaactggccttttaggacttccattggcaataaaaaatgcaggcatagtgcttggaccaatcagccttgtgtttataggaattatttctgttcactgtatgcacatattggtacgttgcagtcactttctatgtctgaggtttaaaaagtcaacattaggttatagtgacactgtgagctttgctatggaagtgagtccttggagttgtcttcagaagcaagcagcatgggggcggagtgtggttgacttttttctggtgataacacagctgggattctgtagtgtttatattgtcttcttagctgaaaatgtgaaacaagttcatgaaggattcctggagagtaaagtgtttatttcaaatagtaccaattcatcaaacccttgtgagagaagaagtgttgacctaaggatatatatgctttgctttcttccatttataattcttttggtcttcattcgtgaactaaagaatctatttgtactttcattccttgccaacgtttccatggctgtcagtcttgtgataatttaccagtatgttgtcaggaacatgccagatccccacaaccttccaatagtggctggttggaagaaatacccactcttttttggtactgctgtatttgcttttgaaggcataggagtggtccttccactggaaaaccaaatgaaagaatcaaagcgtttccctcaagcgttgaatattggcatggggattgttacaactttgtatgtaacattagctactttaggatatatgtgtttccatgatgaaatcaaaggcagcataactttaaatcttccccaagatgtatggttatatcaatcagtgaaaattctatattcctttggcatttttgtgacatattcaattcagttctatgttccagcagagatcattatccctgggatcacatccaaatttcatactaaatggaagcaaatctgtgaatttgggataagatccttcttggttagtattacttgtgccggagcaattcttattcctcgtttagacattgtgatttccttcgttggagctgtgagcagcagcacattggccctaatcctgccacctttggttgaaattcttacattttcgaaggaacattataatatatggatggtcctgaaaaatatttctatagcattcactggagttgttggcttcttattaggtacatatataactgttgaagaaattatttatcctactcccaaagttgtagctggcactccacagagtccttttctaaatttgaattcaacatgcttaacatctggtttgaaatagtaaaagcagaatcatgagtcttctatttttgtcccatttctgaaaattatcaagataactagtaaaatacattgctatatacataaaaatggtaacaaactctgttttctttggcacgatattaatattttggaagtaatcataactctttaccagtagtggtaaacctatggaaaatccttgcttttaagtgttagcaatagttcaaaaaattaagttctgaaaattgaaaaaattaaaatgtaaaaaaattaaagaataaaaatacttctattattcttttatctcagtaagaaataccttaaccaagttatctctcttttatgctactcttttgccactcacttgagaacagaataggatttcaacaataagagaataaaataagaacatgtataacaaaaagctctctccagatcatccctgtgaatgccaaagtaaactttatgtacagtgtaaaaaaaaaaaatctcagttatgtttttattagccaaattctaatgattggctcctggaagtatagaaaactcccattaacataatataagcatcagaaaattgcaaacactagaattaattttacactctaatggtagttgatcttcatagtcaagaggcactgttcaagatcatgacttagtgtttcaatgaaatttgaaaagggactttaaaacttatccagtgcaactcccttgtttttcgtcagaggaaaaggaggcctagaaaggttaagtaacttggtcgagaccactcagccttgagatcaagaaaacctaatcttttgactcccaggccaggatgttttatttctcacatcatgtccaagaaaaagaataaattatgttcagcttaaaaaaaaaaaaaaaaaaaaaaaaaaaaaa

SEQ ID NO: 787 - DNA, 3213 bp, Homo sapiens
gaccgaagcaagagctggttcaggtggcagccacagcagcctcagggacctcagcaactatggcctcctgcccagactctgataatagctgggtgcttgctggctccgagagcctgccagtggagacactgggcccggcatccaggatggacccagaatctgagagagccctgcaggcccctcacagcccctccaagacagatgggaaagaattagctgggaccatggatggagaagggacgctcttccagactgaaagccctcagtctggcagcattctaacagaggagactgaggtcaagggcaccctggaaggtgatgtttgtggtgtggagcctcctggcccaggagacacagtagtccagggagacctgcaggagaccaccgtggtgacaggcctgggaccagacacacaggacctggaaggccagagccctccacagagcctgccttcaacccccaaagcagcttggatcagggaggagggccgctgctccagcagtgacgatgacaccgacgtggacatggagggtctgcggagacggcggggccgggaggccggcccacctcagcccatggtgcccctggctgtggagaaccaggctgggggtgagggtgcaggcggggagctgggcatctccctcaacatgtgcctccttggggccctggttctgcttggcctgggggtcctcctcttctcaggtggcctctcagagtctgagactgggcccatggaggaagtggagcggcaggtcctcccagaccccgaggtgctggaagctgtgggggacaggcaggatgggctaagggaacagctgcaggccccagtgcctcctgacagtgtccccagcctgcaaaacatgggtcttctgctggacaagctggccaaggagaaccaggacatccggctgctgcaggcccagctgcaggcccaaaaggaagagcttcagagcctgatgcaccagcccaaagggctagaggaggagaatgcccagctccggggggctctgcagcagggcgaagccttccagcgggctctggagtcagagctgcagcagctgcgggcccggctccaggggctggaggccgactgtgtccggggcccagatggggtgtgcctcagtgggggtagaggcccacagggtgacaaggccatcagggagcaaggccccagggagcaggagccagaactcagcttcctgaagcagaaggaacagctggaggctgaggcacaggcattaaggcaagagttagagaggcagcgacggctgctggggtctgtacagcaggatctggagaggagcttgcaggatgccagccgcggggacccagctcatgctggcttggctgagctgggccacagattggcccagaaactgcagggcctggagaactggggccaggaccctggggtctctgccaatgcctcaaaggcctggcaccagaagtcccacttccagaattctagggagtggagtggaaaggaaaagtggtgggatgggcagagagaccggaaggctgagcactggaaacataagaaggaagaatctggccgggaaaggaagaagaactggggaggtcaggaggacagggagccagcaggaaggtggaaggagggcaggccaagggtggaggagtcggggagcaagaaggagggcaagcgacagggcccgaaggaacccccaaggaaaagtggtagcttccactcctctggagaaaagcagaagcaacctcggtggagggaagggactaaggacagccatgaccccctgccatcctgggcagagctgttgaggcccaagtaccgggcaccccagggctgctcaggtgtggacgagtgtgcccggcaggagggcctgactttctttggcacagagctagccccagtgcggcaacaggagctggcctctctgctaagaacatacttggcacggctgccctgggctgggcagctgaccaaggagctacccctctcacctgctttctttggtgaggatggcatcttccgtcatgaccgcctccgcttccgggattttgtggatgccctggaggacagcttggaggaggtggctgtgcaacagacaggtgatgatgatgaagtagatgactttgaggacttcatcttcagccacttctttggagacaaagcactgaagaagaggtcagggaagaaggacaagcactcacagagcccaagagctgcggggcccagggaggggcacagccatagccaccaccaccaccaccggggctgacaccctgccccacagggaatggccttggcctggcccagcccaagatcccagcgttatctaactcctggagggtggactctgtcctggcttgtttggtgtcctcagatatctttcacacagtagagcaaaatcaccagccctgcactgatgtcactttatgtagaaaaaggccttagctggacctgcgttgccgtctatgcaaatgcatgcaaatactccaggccctgggatgtgggcttgtgttttgtcactgtgaagggggagatgggagaggagcctgttttggggtggggtctggggaaggcaatctgattctgaagctaaagagctttcatcctcttgagtgtatgtccccatagtgggccccttgacccacatgctgaccggtgccttgggatttgactagagttgctggctcgaggcccagcacgaggacttaccctggggttttgttaggtttggaagcagctgtccctagggggtgaagtcccccccctttttttttttacccctgcttctcccacggcttcacctccctatgtgaactgtagactcagatcccaataaagtgctgttgcagctatgatgctaggtggtttctaagcacaggggacaccccacaccccctgcctgaatggatgggtccatcccaggcactggtacttgcccccttgttctgtatccccctttgcccttgccttgcccttccaacaaaccctaggcccttgagaagctgatacttctccttttgctcacagctgccttggccccacccctgggagatgtagcaaattgagtgtgggttttggagtctgagcctcaggctcaaatccaggccaagtgatcttgggcaagttaatctctgggaactttgggtttcttatcctcaaaaaaggcgatggaagggctggggaagtgattaaataaaagcaacgcaagaaaaaaaaaaaaaaaaaaa

SEQ ID NO: 788 - DNA, 2133 bp, Homo sapiens
agctggctgggcggttaggagggcccggggccgagacgatggctgaccacaaccctgacagcgactccacgccgcgcacgctgctgcgacgcgtgctggatacagcggacccgcgcaccccgcggcgaccccggagtgctcgggctggagcccggagagccctgcttgaaacggcttcccccaggaagttgagtggccaaacaaggacgatagccagagggcgttcccatggagccaggtctgttggcagatcggcccatattcaggccagtgggcacttggaggaacagacacctcggacgctgctgaagaacatcctactaactgccccagaatcttccatcctgatgcctgagtcggtagtgaagccagtgccagcaccgcaggcggtccaaccctccagacaagagagcagttgcggcagcctggagctgcaacttcctgagctcgagccccccacaaccctggctccaggtctgctggcccctggcaggaggaaacagaggctgagactgtcagtgtttcagcagggagtggaccaggggctgtctctctcccaagagcctcaagggaatgctgatgcctcttccctcaccagatccctcaacctgacctttgccacgcctcttcagccacagtcagtgcagaggcctggcttggcccgcagacctccagcccgccgagctgtagacgtgggtgcctttttgcgggatctgcgagatacttccctggctcctccaaacattgtgttggaggacacccagccgttctctcagcccatggttggctcccccaacgtgtatcactccctgccctgcacgcctcacactggggctgaagacgctgagcaggctgccggtcgcaagacacagagcagtgggcctgggctgcagaagaatagtgagtgtgtggcactggtggcctggagccaaatttagcttgggtgagagttgacaatggtagttttccttcctcaagcccctctgtgcccctagagcaccctggctgtggctgcctccttcatccaagagcagagtccatgttgggccaggagacttcagatccatgtcctggtgctgcctctggctttgtctttcctcagtgggcaggactgggtctgctggtccatctttacccttctctgagctatgcagccttggcctgctgcgtctccggcctgtattctctccccttcactcaggccctgggaaaccagcccagtttctggcaggagaggcagaggaggtcaatgcctttgctctgggcttcctgagcaccagcagtggtgtctctggagaagatgaagtagagcccttacacgatggagttgaagaggcagagaaaaagatggaagaagaaggtgtgagtgtgagtgaaatggaggcaacaggagcacaaggacccagcagggtagaagaggctgagggacacacagaggtgacagaagcagagggatcccaggggactgctgaggctgacgggccaggagcatcttcaggggatgaggatgcctctggcagggcagcaagtccagagtcggcctccagcacccctgagtctctccaggccaggcgacatcatcagtttcttgagccagccccagcgcctggtgctgcagtcttatcttcagagcctgcagagcctctgttggtcaggcatccccctaggccccggaccaccggccccaggccccggcaagatccccacaaggctggactgagccactatgtgaaactctttagcttctatgccaagatgcccatggagaggaaggctcttgagatggtggagaagtgcctagataaatatttccagcatctttgtgatgatctggaggtatttgctgctcatgctggccgcaagactgtgaagccagaggacctggagctgctgatgcggcggcagggcctggtcactgaccaagtctcactgcacgtgctagtggagcggcacctgcccctggagtaccggcagctgctcatcccctgtgcatacagtggcaactctgtcttccctgcccagtagtggccaggcttcaacactttccctgtccccacctggggactcttgcccccacatatttctccaggtctcctccccacccccccagcatcaataaagtgtcataaacag

SEQ ID NO: 789 - DNA, 2589 bp, Homo sapiens
cggaagtagtgtcggcgcgggagctgagcggagtggccttgccaccggaggggaagggctgctggcgttaggcctggctgggtcgtgcggctgagcgtgaggctagaaagaaaaagcgatcctccaagagtgagaacgggagatctgccgaggataacaacctcccttgtggccgaagggcgggggatccccacacgagggctccgcttcgagagacggcgacaaaggaaagttcgtagcgcgttccggaggcccggccacctctgagaagggagacgacgctgctgggtccgctgagcggggcgacccgagcttatatagaattggtgataggatcacaacttctgaggtcccagcaagagtcctaacatctagcagctctaccaccaggacaggccccctaaaactaattccaacaagcacctctgaagtcttctcattcacaggttaaggctacctttccagataatccaacagctaaatcaccagtttccaagggcatttgcatcacctatggaaagcatcggatccttatacaccagatgttcttgacagctcatcccgtcattcccccctgcacaaaagttgctataccagcggacaagcaagacaactactgagcttcttttgattgtcaagtagatataatatcactgccagcaaaacagcacaaaaagtgtctcttcacagtatcactaccagttgggactatgctaagtaaatcagcttgcctagatgaggaccccttctattcttgggtagccaggatttgaaggagatactctgacctgtgccagtggtaagtgactaatacttttacacactgaactggtcctggaaactgagatgtcttctttgtaagtgaagaatatacaacataatcttgaagaacggcacagtggtatgggccacaagcatactttatgtgtgtaacggactgaaagacaaattaatcttggtgaaaggatttttcatctcttatttctatttgccagtgttagtcagtgttctgctggcttagattattacctttttctggttccttactgtgttttattctgatgggtcctagaaatccctctcctgaccacttgtcagaatcagaaagtgaggaagaagaaaatattagttacctaaatgagagttctggggaagagtgggattcctctgaagaagaggactctatggtgcccaacttatcgcctcttgagagtcttgcctggcaggttaagtgccttttaaaatattccacaacttggaaacctttaaatcctaattcctggttgtatcatgctaaactgttggatccaagcacaccagtccatatacttcgagagataggtctaagactctcccattgttcccattgtgtccccaaactggaaccaattcctgaatggccccctctggcctcttgtggagtcccaccttttcaaaagcctcttacaagtcccagccggctctctagagatcatgccactctaaatggagcactgcaatttgccaccaaacagctaagccgaacattgagtagagccactcccatacctgaatacctaaaacagatccctaattcatgtgtttctgggtgttgctgtggccggctgactaaaacagttaaggaaacaactcgtactgaacccatcaacaccacttattcttacactgacttccaaaaggcagttaacaaactcctaactgcatcactgtaaagatctaccatttgctctgatatctctgatgttgctaattgagaaagtggtacaaagttagtcattacacagcccactaatgccttctcagtcaaactctcttatgccctggcaagccaatgaggataccctttgacaaaccctgtggataaaatgataatatcaaagtgctgggattgaacccttctaattttaaagaaccttgttattagaaaatctcagcctaatacaatctgaagttaagagttttagcagcattgtttttctaagtagatttagctatagattttcttctggccaaacaaggaagagtatatgcccttgtaaatgagtcttgttttgtttatttaaatagtcagtcaaaacgtagaaatcagtatacgtaaaataaaatgcatgagactattaaatcttttcatataccctacaaataaaatgaaatctgtgtgtggtcctggttgactgggcatctaaagggaatcagaaaagagattgtgaaaagttatatatatatcctcttccttattttagttttgctttttcctattttccataattaagtgccgtttacaaagtggcatcaaaaaattgaagcaggccaggcatggtggctcatgcctgtaatcccagcagtttgggaggctgagggcaggtggatcacttgagatcgggagttcgtgaccagcctggccggcatggtgaaagcccgtctctactgaaaatgtaaaaattagccgggcgtggtggcatgtgcctgtagtcgcagctacttgggaggctaagacaggagaattgcttgaacctgggaggtggaggttgcagtgagctgagatcgcgccactgcactccagcctgggcaacagtgagacaccgtctc

SEQ ID NO: 790 - DNA, 6855 bp, Homo sapiens
gcagtgaccgtaaagctgttcgctcggtgcgacgcaagtctcagctcagcgcgcttatcctgggtccaccggcgctaccgccccccgacgtgagagagcgaagttcttgggccgcgctccctccctacctgggtgccctccccctccgggagcctgggtccccggggcggtcgcggcggctgcatcctcaggccaggccgcggggggagggggcggcacgggcctccgaaagcggggccatggagcccagagagtcggggaaggctcctgtgacgtttgatgacatcactgtgtacttactccaggaggaatgggtgctgctgagccagcaacagaaggagctctgtggttccaacaagctggtggcaccactgggaccaactgttgccaatcctgagctgttccgcaagttcggacgagggccagagccatggcttggcagcgtccagggccagaggagccttctggagcatcacccaggaaaaaaacagatgggctacatgggagaaatggaggtgcaaggtcccaccagggagagtggacagtccctcccgcctcagaagaaagcctacctttcccacctcagtacaggcagtggacacatcgagggagactgggccggaagaaacaggaaacttctgaagccccggtccatccagaagtcgtggtttgtgcagtttccgtggctgatcatgaatgaggagcagacggctctgttctgctctgcttgccgagaatacccctccatcagggacaaacggtcaagactaatagaaggttatacaggaccattcaaggtggagactctcaaataccacgcgaagagcaaggcccacatgttctgtgtcaatgccttggcagcgagggaccccatctgggcagcccggttccggagcatcagagacccacctggagatgttctggccagcccggagccgctcttcactgcagattgccccatattctaccccccagggcctctgggaggatttgatagcatggctgagctcctgccaagttcaagagctgaactagaggaccctgggggggatggagcaattcctgcaatgtatctagactgcatttcagatttgaggcaaaaagaaatcactgatggcatccacagctcctcagacattaatattttatataatgatgcagtagaatcctgcattcaggacccttctgcagaggggctgtcggaggaggttcctgtggtgtttgaggagctgccggtggtgttcgaggatgtggcagtgtatttcacccgggaggagtggggcatgctagacaagcggcagaaggagctgtacagagacgtgatgcggatgaactacgagctgttggcatccttgggacctgccgctgccaagccagacttgatctccaaactggagcggagggctgcaccctggatcaaggacccaaatgggccaaagtgggggaaaggtcgtcctccagggaacaagaagatggtggcagtgagagaggcagacacacaggcctcggctgcagactccgcgttgcttccaggctctcccgtggaggcccgtgcctcctgctgcagttccagcatttgtgaggaaggagatggacctaggagaatcaagaggacatacaggccccgttccattcagaggtcatggtttgggcagttcccatggttagtaattgaccccaaagagaccaaactcttctgctcagcctgcatagaaagacctaatctccatgataaatcatctcggttagtcagaggttacacggggccttttaaagtggagactttaaaataccatgaagtcagcaaagcgcacaggctctgtgtcaacacggttgaaatcaaggaagacacccctcacactgccctcgttccagagatctccagcgacctcatggccaacatggagcactttttcaatgccgcctactccattgcataccactcaaggcccctgaatgactttgagaagatcctgcagctcctccaaagcacggggaccgtgatattaggcaagtaccgcaatcgcacggcgtgcactcagttcatcaagtacatctcagagaccctgaagagggagatcctggaggacgtgcggaactcgccctgtgtgagcgtgctgctggacagctccaccgacgcctccgagcaggcctgcgtggggatttacatccgctacttcaagcagatggaggtgaaagagtcctacatcactctggcccctctctacagtgagacagcagatgggtacttcgagaccatcgtttctgccctggatgagctggacatccccttccggaagcctggctgggtggtggggctggggacggatggctcagccatgttgagctgcagaggaggccttgtggaaaagttccaggaggtcatcccgcagctgctgcctgtccactgcgtggcccaccggctgcacctggctgtggtggacgcctgcgggagcatcgatctggtgaagaagtgtgaccggcacatccgcaccgtcttcaagttttatcagtcctcaaacaagaggctgaacgagctgcaggaaggtgcggcgcctctggagcaggagatcatccgcctgaaggatctgaatgcggtccgctgggtggccagcaggaggcgcacgctgcacgcgctgctcgtgagctggcccgccctggccaggcacctccagagggtggcagaggctgggggccagattgggcaccgggccaaagggatgctgaagctcatgcgcggcttccactttgtcaagttctgccacttcctgttggacttcctgagcatctacaggcctctgtccgaggtgtgccagaaggagatcgtgctgattacagaggtgaacgccacgctgggccgcgcctacgtggcactggagagcctccgtcaccaggcagggcccaaagaggaagaattcaacgccagcttcaaggatgggcggctccacggcatctgcttggacaaactggaggtagcggaacagcggttccaggcggatagggagaggacagtcctgacggggattgagtacctccagcagaggtttgacgcagaccgacccccacagctgaagaacatggaggtgtttgacaccatggcctggccaagtgggattgaacttgccagttttgggaatgatgacattctcaacctggccaggtatttcgagtgctccctcccaacaggatacagtgaggaagctctgctggaggagtggctgggcctgaaaaccattgcccagcacctcccgttctccatgctctgcaaaaacgccctggcccagcactgccgcttccccctgctaagcaagctcatggccgtggtggtctgtgtgcccatctccacctcttgctgtgagcgggggttcaaggccatgaaccgaatcaggaccgatgagaggaccaagctctccaacgaggtgctcaacatgctcatgatgacagctgtgaacggcgtggccgtcacggagtacgacccccagcccgccatccagcactggtacctgacctcctcaggccggcgtttcagccatgtctacacctgtgcccaggtgccagcccgctcccctgcaagcgccaggctcaggaaggaggagatgggagccctctatgtggaggagcccaggacccagaagccacccatcctgccctccagggaagcagcggaggttctgaaggactgcatcatggagcctcccgagagactcctgtatccccacaccagccaggaggcccccgggatgtcctgagggacagggagtccttgggactgccttggagacgcctctgtgatcactgggacaggctctgcagattctaggctgccctaggatcttctgctggtggcgatggtctctaagcaccaggaagtgggcagtggcatcccagagcagcaggggtatcaggaggtgcatgacctgtttcctgaggccccactcagcacagccatgcctcacagcacacaaatgtgccagaaggttctatatctcaagttcatttttaaggtgctgcagaaaataaccccatcatgaaaggtttcagcccctgagttttggtggcaagaggagtgtcctggtaggggagactgttggacatccctggggaatgttccagggaggctgcccacagtctaagtgggaatgggaaagaccaccttgttagagggggaggttgcccctgctctagggacagctggcctggctgcaagagcccccagaggcattgttctgggacttcctaccctggctcccacagcagaagcagtgaggccgtggtctcgtgcggaactctacctcttcccagggcttcctttagggcgaaacaatcacaagccctttgcacagagcacccaagaaagttctcttcctgcagctccagatggtggagctgggctcttctggcagggggtctggtgcttcccggagagccgagccgcgtttaacccgtggcatgcccggcccggtttacccaggagaggatgggacgaagttggagttgggaggcttgggatgcagccccagctctgctgcaggcagtggtctgattaatcccttcctctttgtgcctcagtttccctctccatgaagtggcagcagagatccaagtgcctgctgactccccatctgccctaggattagtgaatgagagcctcgagctccctcaaagacctctggctgcagtgtggacttagctgccatctgccccatcctcgtccttagtgggacaggtaggaatttgtctccaaagtccttgttgtaggagttgctctctgaatgcaccatctgcacgacaggctagtccactcttctctgagctgccctggggactctgcaccaggatctccagggcccactgagacatccccgaatgggcgctcagtgacaagggctttgaacaacctcctccagggactttgggcctgctctagcttcagaaccacagaaccaccgccctagaggcacagaggggcttctggcactgctaggttcacaccctcctcgccccgatcttccttccacctaaagtgaagcacttttccttccaagggcagctccgtcttggcaggctcaggaggccgcttatcaggaggaggatgattttgtctaggttctgccttccttaaccatgggcaggaaatgaggcaagtcagcaggcagggtttctctgccctgcctgatacttgttttaaacaggcaggaagtgggcgccatccatcccagcttgcttgctgcctggctcaggcaggtcctgtgctgtgctgcaggcccctgtgggtgggccctttctccatagtctgccgcttcccattcccagggtagatgctggcatctgagcacctgagtacccttcctattcccagggtagaagctgctgtctgagtacccttcccattcccaggggtagatgctggcgtccgagcccctccctggtaccgcaggtaccctggtaccccacctgccctttcatccccaccccagtacttagccttagcactgttgctttcgtgtcattttcagttctagtcaggaattcctttcttgctttctgcctttgacctgtggaaatgtctcccagccctgtgggtctggcggtcagagggaccccacaggcctgtggtgcgggagctctgggaggtgttactatctgcgtggctaaggcacacacaggcctccttctccccatcaccgtctccatgggcgttcaggaacttgcccaggtcaggcactgtggatgtgaactcgtggaaagggagggagaaaggcttttttaggtggggctatagcctctgccctacccacagggattccacatcaaggtgctgttccagcacacatgcttcctgcggcctcttcatccttgaagaatccctcagagcaggaggccatcctgtgagcagccgtgagtgggtctctgtgggagtagttctggagctgaggtggaagctaggggaagcaactcgccctctccacgtcagcatcagcgtgctccgaggacaccggccagtgccttccttaggtggtgggaaaggggggtccctgtgcagcggggccactgagaatgctgtttgtcataaaatttgcactacccgatttctcaaggggcacaggcctgctccgttcccctttgtcagccaatggccaagaaggaagaagatgactgccatcttattcctgaacttcctcattcaggacccccgtggaaacacagtgagcatccttatcagaggccctggcccaggctggcccctttgctttgtttggagaggctggctgagtttcagcccctagtgctggagacccccttgttggagaggcttcctgtttatgcctcacaagaagaaaaaccacagggctctgggaggggaagaagcatgcactcccgctttggctggagtcccagcgcttgtcgccaccctcctccttgcctgtagtcttgacagcatccgtatgtacgtgtcctggcatttcccctccctctccctgatgactgatacccaccgggtctgacattccaagtaaccagtatgtaactggtagtttgatcccaatagccatagcgactccaggtgggagtgagggagcccagccccctgtcctggaagataccttagagtatgtgaccgcgctccagacccttgcttctctctcctgcagaggatgagtttctagggtgctaagtacctatcagaacagtgtggaggggcgggtccctcatacaggtgtgtgcttagccaaatacagtaactgtgactggcccagggatgttctctcctctattttcaaagatgaaaggaggttttaaaaaccatgtttgattcctaaccttttgctacctgaataaagcagagtctatttc

SEQ ID NO: 791 - DNA, 4566 bp, Homo sapiens
cggtcccatcccaagaaccgactaaggctgtgagtgtccgggaaccagacccgcttggaggccacagccccgacgtcccgcgcccacgcggcagatcgggcgctgcggcctgggagcctcggggagatgcggagcaggagcaattccggggtccgcttggacgggtacgcgcggctggtgcagcaaaccatcctgtgttaccagaatcccgtcacggggctgctgtcagccagccatgagcagaaggatgcctgggtgcgggataacatctacagtatcctggccgtgtggggcctgggcatggcctaccgtaagaatgcagaccgcgatgaggacaaggccaaggcctacgagctggagcagaacgtggtgaagctgatgcgaggtcttctccagtgcatgatgagacaggtggccaaagtggagaagttcaaacacactcagagcaccaaggacagcctgcacgccaagtacaacaccgccacctgtggcacggtggtgggcgacgaccagtggggccacctccaggtggatgccacctctctcttcctcctgttcctggcccagatgaccgcctcaggcttacgtatcattttcactctcgatgaggtggccttcatacagaatcttgtcttttacatagaagctgcatataaagtcgctgattatggaatgtgggagcgtggagataagactaatcagggcatcccggaattgaatgcaagctccgtaggaatggccaaggcagctcttgaggcaattgatgaactggacctttttggagcccatggaggacgcaagtcagtgattcatgttctgccagatgaggtcgagcactgccagtctattctgttctccatgctgccaagagcgtcgacatctaaagaaattgatgctggacttctttccattatttccttcccggcctttgcagtggaagatgtaaaccttgtaaatgtgaccaaaaatgaaattatttctaagctccaggggcgttatggatgctgtcgcttccttcgagatggttataaaactccaagagaggaccctaatcgactgcattatgaccctgctgaactcaagctcttcgaaaacattgaatgtgagtggcctgtgttttggacatattttataatagatggagtcttcagtggtgatgctgttcaggtccaagaataccgagaggccctggagggaatactcatcagaggcaagaatgggatccgcctggtgcctgaactctacgctgtcccgcctaacaaggtagatgaagagtacaagaatcctcacacagtagaccgagttcctatggggaaggtgcctcatctgtggggccaatccttgtacatcctcagctcgctgttggcagagggattccttgccgctggtgaaatcgatcccttaaatagaagattttccacttcagtcaaacctgatgttgtagtacaagttactgttttggcagaaaacaatcacattaaggacttattgaggaaacacggggtgaacgtccagagtatcgcggacattcatccaattcaagtccagccgggccggattcttagtcacatatatgccaagcttggacggaataagaatatgaatttgagtgggcgaccgtatcgacatattggtgtccttggaacctctaaactatatgtgattaggaaccaaatctttacttttacaccccagttcaccgaccagcatcacttctacctggccctcgacaatgagatgatcgtggagatgctaaggatcgagctggcctacctgtgcacctgctggaggatgacgggcagacccacactcaccttccccatcagtcgcaccatgctcacaaatgatggctcagacattcattctgctgtgctctccacaattagaaaactagaggatggatattttggaggagccagagtaaaattagggaacctttcggaatttctcaccacatcgttctacacatatctgacttttctggatccagactgtgatgagaagttgtttgacaatgccagcgaagggactttcagtcctgatagtgattcagatttggtaggatatctggaagacacctgtaatcaagaaagccaagacgaacttgaccattatatcaaccaccttctgcaaagcacatcgttgaggtcctatctgcctcctctttgtaagaacacagaagaccgccatgtcttcagtgctatccactccacgcgggacatactttctgtgatggcaaaagcaaagggtttggaagttccatttgttcccatgactttgccgactaaagttctaagtgcccaccgtaaatcactgaatcttgttgattctcctcagccactcctagaaaaggttcctgaaagtgactttcagtggcccagagatgaccatggtgacgtggactgtgagaagctggttgagcagctaaaagattgttcgaacctacaggaccaagcagacattctgtacattctttatgtcataaagggtcccagctgggacacaaatctctctggacagcacggggtcaccgttcaaaaccttcttggtgagctctatgggaaagccggcttgaaccaggagtggggtctgattcgctacatctcaggccttctcaggaagaaagtggaggtcctggctgaggcctgcacagacctgctttcgcaccagaagcagctcaccgtgggcctgccgcccgagccccgggagaagatcatctctgcgccccttcccccagaggagctcacaaaactcatctacgaggccagtgggcaggacatcagcattgccgtcctcacgcaggagattgtggtttacctggccatgtatgtcagggcgcagcccagcctctttgtggagatgctgagactccggattggactgatcattcaggtgatggccacggagctggcacggagcctgaactgctcaggagaagaggcttctgaaagtttgatgaacctcagccctttcgatatgaaaaatctcctgcaccatattctaagtgggaaagagtttggcgttgaaagaagtgtgcgccctatccactcctccacatccagccctaccatctccatccacgaggtgggccataccggagtcaccaaaactgagaggagtggcattaacagactgaggagtgaaatgaaacagatgactaggcggtttagtgctgatgaacagttcttttctgtgggccaggccgcgtccagcagtgcgcattcctccaagtctgcgaggtccagcaccccatcctcgcccactggcacgtcatcctcagactcgggaggacatcacatcggctggggtgagcggcagggccagtggctgcgcaggagaaggctggatggggccatcaacagggtccccgtgggattctaccagagggtgtggaagatcctccagaagtgccacggtctctccatcgatggttatgtcctcccatcctcgacgacccgagagatgaccccgcatgagatcaagtttgctgtccatgtcgaatcggtgctgaaccgcgtgccgcagcccgagtaccggcagctgctggtggaagccatcatggtgctgacgctgctctcggacacggagatgaccagcatcgggggcatcatccacgtggaccagatcgtgcagatggccagtcagctgttcttgcaggaccaggtgtcaattggtgccatggacaccctggagaaagaccaagccacaggaatctgccacttcttttatgacagcgctccgagtggggcttatgggacgatgacctacctaacaagagcagtggcttcttatttgcaggaattgttgcccaattcgggctgccagatgcaatagggtctcacctggaaacatgatcacactctcaatctgtcacgtgccccctagccttactgggaaccttctgtcccccaagatcccctgtgctatcaggaaagcatgtcccatcagaaacactctcggggggcaatggtagcactcaccctgaaactgatgtatgttaaagccacagagatagagctgaggagtcctgtgttcccccgcaaggagcaccccgggatcattttctaggttcatttctctggaacatttgctgtagcatctggtctcacggactctgaggaggaattggaaattggtctcttttgagtgcagagggaactgagacgccagcttaaattggctcttgcagagagttacagaaatagtttcgatgagctagtgacacatcctaaagatgcaaagatcctcctggcggcagtagccttgacaagggccacctcttcacaggatgcagtctgtctgtgcaccaaactcttcaccaaatagaacacttgtgtctctctgtggaatggggggttttcttgtgccttgcttgctttcatagccttccattttattggcatggctgccttgatgtaacataattctctgtccccaagatttagaaaattcctcttcgttcaccttggctcatggtcttccagggtttttatcctggctgtctatgaactagggttttctcctgccttaggaaaaatactgcatcttctggaatctagaaaaaaa

SEQ ID NO: 792 - DNA, 1282 bp, Homo sapiens
ctgcgatcccgcagggcagcgacgcgactctggtgcgggccgtcttcttccccccgagctgggcgtgcgcggccgcaatgaactgggagctgctgctgtggctgctggtgctgtgcgcgctgctcctgctcttggtgcagctgctgcgcttcctgagggctgacggcgacctgacgctactatgggccgagtggcagggacgacgcccagaatgggagctgactgatatggtggtgtgggtgactggagcctcgagtggaattggtgaggagctggcttaccagttgtctaaactaggagtttctcttgtgctgtcagccagaagagtgcatgagctggaaagggtgaaaagaagatgcctagagaatggcaatttaaaagaaaaagatatacttgttttgccccttgacctgaccgacactggttcccatgaagcggctaccaaagctgttctccaggagtttggtagaatcgacattctggtcaacaatggtggaatgtcccagcgttctctgtgcatggataccagcttggatgtctacagaaagctaatagagcttaactacttagggacggtgtccttgacaaaatgtgttctgcctcacatgatcgagaggaagcaaggaaagattgttactgtgaatagcatcctgggtatcatatctgtacctctttccattggatactgtgctagcaagcatgctctccggggtttttttaatggccttcgaacagaacttgccacatacccaggtataatagtttctaacatttgcccaggacctgtgcaatcaaatattgtggagaattccctagctggagaagtcacaaagactataggcaataatggagaccagtcccacaagatgacaaccagtcgttgtgtgcggctgatgttaatcagcatggccaatgatttgaaagaagtttggatctcagaacaacctttcttgttagtaacatatttgtggcaatacatgccaacctgggcctggtggataaccaacaagatggggaagaaaaggattgagaactttaagagtggtgtggatgcagactcttcttattttaaaatctttaagacaaaacatgactgaaaagagcacctgtacttttcaagccactggagggagaaatggaaaacatgaaaacagcaatcttcttatgcttctgaataatcaaagactaatttgtgattttactttttaatagatatgactttgcttccaacatggaatgaaataaaaaataaataataaaagattgccatgaatcttgcaaa

SEQ ID NO: 793 - DNA, 2879 bp, Homo sapiens
gaaggacgtggggacacgggccagagtggctggccccacgcacggacaggagtgaacccgagctgtgccgaccaacccccaggatggcggaagctcaccaggccgtggccttccagttcacggtgaccccagacggggtcgacttccggctcagtcgggaggccctgaaacacgtctacctgtctgggatcaactcctggaagaaacgcctgatccgcatcaagaatggcatcctcaggggcgtgtaccctggcagccccaccagctggctggtcgtcatcatggcaacagtgggttcctccttctgcaacgtggacatctccttggggctggtcagttgcatccagagatgcctccctcaggggtgtggcccctaccagaccccgcagacccgggcacttctcagcatggccatcttctccacgggcgtctgggtgacgggcatcttcttcttccgccaaaccctgaagctgcttctctgctaccatgggtggatgtttgagatgcatggcaagaccagcaacttgaccaggatctgggctatgtgtatccgccttctatccagccggcaccctatgctctacagcttccagacatctctgcccaagcttcctgtgcccagggtgtcagccacaattcagcggtacctagagtctgtgcgccccttgttggatgatgaggaatattaccgcatggagttgctggccaaagaattccaggacaagactgcccccaggctgcagaaatacctggtgctcaagtcatggtgggcaagtaactatgtgagtgactggtgggaagagtacatctaccttcgaggcaggagccctctcatggtgaacagcaactattatgtcatggaccttgtgctcatcaagaatacagacgtgcaggcagcccgcctgggaaacatcatccacgccatgatcatgtatcgccgtaaactggaccgtgaagaaatcaagcctgtgatggcactgggcatagtgcctatgtgctcctaccagatggagaggatgttcaacaccactcggatcccgggcaaggacacagatgtgctacagcacctctcagacagccggcacgtggctgtctaccacaagggacgcttcttcaagctgtggctctatgagggcgcccgtctgctcaagcctcaggatctggagatgcagttccagaggatcctggacgacccctccccacctcagcctggggaggagaagctggcagccctcactgcaggaggaagggtggagtgggcgcaggcacgccaggccttctttagctctggaaagaataaggctgccttggaggccatcgagcgtgccgctttcttcgtggccctggatgaggaatcctactcctatgaccccgaagatgaggccagcctcagcctctatggcaaggccctgctacatggcaactgctacaacaggtggtttgacaaatccttcactctcatttccttcaagaatggccagttgggtctcaatgcagagcatgcgtgggcagatgctcccatcattgggcacctctgggagtttgtcctgggcacagacagcttccacctgggctacacggagaccgggcactgcctgggcaaaccgaaccctgcgctcgcacctcctacacggctgcagtgggacattccaaaacagtgccaggcggtcatcgagagttcctaccaggtggccaaggcgttggcagacgacgtggagttgtactgcttccagttcctgccctttggcaaaggcctcatcaagaagtgccggaccagccctgatgcctttgtgcagatcgcgctgcagctggctcacttccgggacaggggtaagttctgcctgacctatgaggcctcaatgaccagaatgttccgggagggacggactgagactgtgcgttcctgtaccagcgagtccacagcctttgtgcaggccatgatggaggggtcccacacaaaagcagacctgcgagatctcttccagaaggctgctaagaagcaccagaatatgtaccgcctggccatgaccggggcagggatcgacaggcacctcttctgcctttacttggtctccaagtacctaggagtcagctctcctttccttgctgaggtgctctcggaaccctggcgtctctccaccagccagatcccccaatcccagatccgcatgttcgacccagagcagcaccccaatcacctgggcgctggaggtggctttggccctgtagcagatgatggctatggagtttcctacatgattgcaggcgagaacacgatcttcttccacatctccagcaagttctcaagctcagagacgaacgcccagcgctttggaaaccacatccgcaaagccctgctggacattgctgatcttttccaagttcccaaggcctacagctgaaggttggagaaatgccagctgccctttcgtccccacactgtggaggaagggacctgtggcagctcacaggcatgaggggtggccgtgcacaggtgcccaggctccaaggacagctccggcagcaggtcctcgctgggcagatgctgctccctgagggcccaggtggtggaggtggggttggagcaggaagggaattttgatttttttttttcttgatagatactaataaaaataaggctgtgtaattttctctcagcccttaggtacctgtgttttgtttgggaactcggaggccctccccctcccccagctcagaccacagaggtggcaagagaagggctgaagctggaagactgttcatgagggacttgtgtgacctgctttgaaatgtgtgactctgctgagtgacgtaggctctgagatagctgtccacgcccacgtgtttgcttggaataaatacttgcctcagaaccttca

SEQ ID NO: 794 - DNA, 2834 bp, Homo sapiens
gcaattcccaccgcggaaggtgccgaccaacccccaggatggcggaagctcaccaggccgtggccttccagttcacggtgaccccagacggggtcgacttccggctcagtcgggaggccctgaaacacgtctacctgtctgggatcaactcctggaagaaacgcctgatccgcatcaagaatggcatcctcaggggcgtgtaccctggcagccccaccagctggctggtcgtcatcatggcaacagtgggttcctccttctgcaacgtggacatctccttggggctggtcagttgcatccagagatgcctccctcaggggtgtggcccctaccagaccccgcagacccgggcacttctcagcatggccatcttctccacgggcgtctgggtgacgggcatcttcttcttccgccaaaccctgaagctgcttctctgctaccatgggtggatgtttgagatgcatggcaagaccagcaacttgaccaggatctgggctatgtgtatccgccttctatccagccggcaccctatgctctacagcttccagacatctctgcccaagcttcctgtgcccagggtgtcagccacaattcagcggtacctagagtctgtgcgccccttgttggatgatgaggaatattaccgcatggagttgctggccaaagaattccaggacaagactgcccccaggctgcagaaatacctggtgctcaagtcatggtgggcaagtaactatgtgagtgactggtgggaagagtacatctaccttcgaggcaggagccctctcatggtgaacagcaactattatgtcatggaccttgtgctcatcaagaatacagacgtgcaggcagcccgcctgggaaacatcatccacgccatgatcatgtatcgccgtaaactggaccgtgaagaaatcaagcctgtgatggcactgggcatagtgcctatgtgctcctaccagatggagaggatgttcaacaccactcggatcccgggcaaggacacagatgtgctacagcacctctcagacagccggcacgtggctgtctaccacaagggacgcttcttcaagctgtggctctatgagggcgcccgtctgctcaagcctcaggatctggagatgcagttccagaggatcctggacgacccctccccacctcagcctggggaggagaagctggcagccctcactgcaggaggaagggtggagtgggcgcaggcacgccaggccttctttagctctggaaagaataaggctgccttggaggccatcgagcgtgccgctttcttcgtggccctggatgaggaatcctactcctatgaccccgaagatgaggccagcctcagcctctatggcaaggccctgctacatggcaactgctacaacaggtggtttgacaaatccttcactctcatttccttcaagaatggccagttgggtctcaatgcagagcatgcgtgggcagatgctcccatcattgggcacctctgggagtttgtcctgggcacagacagcttccacctgggctacacggagaccgggcactgcctgggcaaaccgaaccctgcgctcgcacctcctacacggctgcagtgggacattccaaaacagtgccaggcggtcatcgagagttcctaccaggtggccaaggcgttggcagacgacgtggagttgtactgcttccagttcctgccctttggcaaaggcctcatcaagaagtgccggaccagccctgatgcctttgtgcagatcgcgctgcagctggctcacttccgggacaggggtaagttctgcctgacctatgaggcctcaatgaccagaatgttccgggagggacggactgagactgtgcgttcctgtaccagcgagtccacagcctttgtgcaggccatgatggaggggtcccacacaaaagcagacctgcgagatctcttccagaaggctgctaagaagcaccagaatatgtaccgcctggccatgaccggggcagggatcgacaggcacctcttctgcctttacttggtctccaagtacctaggagtcagctctcctttccttgctgaggtgctctcggaaccctggcgtctctccaccagccagatcccccaatcccagatccgcatgttcgacccagagcagcaccccaatcacctgggcgctggaggtggctttggccctgtagcagatgatggctatggagtttcctacatgattgcaggcgagaacacgatcttcttccacatctccagcaagttctcaagctcagagacgaacgcccagcgctttggaaaccacatccgcaaagccctgctggacattgctgatcttttccaagttcccaaggcctacagctgaaggttggagaaatgccagctgccctttcgtccccacactgtggaggaagggacctgtggcagctcacaggcatgaggggtggccgtgcacaggtgcccaggctccaaggacagctccggcagcaggtcctcgctgggcagatgctgctccctgagggcccaggtggtggaggtggggttggagcaggaagggaattttgatttttttttttcttgatagatactaataaaaataaggctgtgtaattttctctcagcccttaggtacctgtgttttgtttgggaactcggaggccctccccctcccccagctcagaccacagaggtggcaagagaagggctgaagctggaagactgttcatgagggacttgtgtgacctgctttgaaatgtgtgactctgctgagtgacgtaggctctgagatagctgtccacgcccacgtgtttgcttggaataaatacttgcctcagaaccttca

SEQ ID NO: 795 - DNA, 2625 bp, Homo sapiens
gaaggacgtggggacacgggccagagtggctggccccacgcacggacaggagtgaacccgagctgtgccgaccaacccccaggatggcggaagctcaccaggccgtggccttccagttcacggtgaccccagacggggtcgacttccggctcagtcgggaggccctgaaacacgtctacctgtctgggatcaactcctggaagaaacgcctgatccgcatcaagaatggcatcctcaggggcgtgtaccctggcagccccaccagctggctggtcgtcatcatggcaacagtgggttcctccttctgcaacgtggacatctccttggggctggtcagttgcatccagagatgcctccctcaggggtgtggcccctaccagaccccgcagacccgggcacttctcagcatggccatcttctccacgggcgtctgggtgacgggcatcttcttcttccgccaaaccctgaagctgcttctctgctaccatgggtggatgtttgagatgcatggcaagaccagcaacttgaccaggatctgggctatgtgtatccgccttctatccagccggcaccctatgctctacagcttccagacatctctgcccaagcttcctgtgcccagggtgtcagccacaattcagcggtacctagagtctgtgcgccccttgttggatgatgaggaatattaccgcatggagttgctggccaaagaattccaggacaagactgcccccaggctgcagaaatacctggtgctcaagtcatggtgggcaagtaactatgtgagtgactggtgggaagagtacatctaccttcgaggcaggagccctctcatggtgaacagcaactattatgtcatggaccttgtgctcatcaagaatacagacgtgcaggcagcccgcctgggaaacatcatccacgccatgatcatgtatcgccgtaaactggaccgtgaagaaatcaagcctgtgatggcactgggcatagtgcctatgtgctcctaccagatggagaggatgttcaacaccactcggatcccgggcaaggacacagatgtgctacagcacctctcagacagccggcacgtggctgtctaccacaagggacgcttcttcaagctgtggctctatgagggcgcccgtctgctcaagcctcaggatctggagatgcagttccagaggatcctggacgacccctccccacctcagcctggggaggagaagctggcagccctcactgcaggaggaagggtggagtgggcgcaggcacgccaggccttctttagctctggaaagaataaggctgccttggaggccatcgagcgtgccgctttcttcgtggccctggatgaggaatcctactcctatgaccccgaagatgaggccagcctcagcctctatggcaaggccctgctacatggcaactgctacaacaggtggtttgacaaatccttcactctcatttccttcaagaatggccagttgggtctcaatgcagagcatgcgtgggcagatgctcccatcattgggcacctctgggagtttgtcctgggcacagacagcttccacctgggctacacggagaccgggcactgcctgggcaaaccgaaccctgcgctcgcacctcctacacggctgcagtgggacattccaaaacagtgccaggcggtcatcgagagttcctaccaggtggccaaggcgttggcagacgacgtggagttgtactgcttccagttcctgccctttggcaaaggcctcatcaagaagtgccggaccagccctgatgcctttgtgcagatcgcgctgcagctggctcacttccgggacaggggtaagttctgcctgacctatgaggcctcaatgaccagaatgttccgggagggacggactgagactgtgcgttcctgtaccagcgagtccacagcctttgtgcaggccatgatggaggggtcccacacaaaagcagacctgcgagatctcttccagaaggctgctaagaagcaccagaatatgtaccgcctggccatgaccggggcagggatcgacaggcacctcttctgcctttacttggtctccaagtacctaggagtcagctctcctttccttgctgaggtgctctcggaaccctggcgtctctccaccagccagatcccccaatcccagatccgcatgttcgacccagagcagcaccccaatcacctgggcgctggaggtggctttggccctgtagcagatgatggctatggagtttcctacatgattgcaggcgagaacacgatcttcttccacatctccagcaagttctcaagctcagagacgaacgcccagcgctttggaaaccacatccgcaaagccctgctggacattgctgatcttttccaagttcccaaggcctacagctgaagcccttaggtacctgtgttttgtttgggaactcggaggccctccccctcccccagctcagaccacagaggtggcaagagaagggctgaagctggaagactgttcatgagggacttgtgtgacctgctttgaaatgtgtgactctgctgagtgacgtaggctctgagatagctgtccacgcccacgtgtttgcttggaataaatacttgcctcagaaccttca

SEQ ID NO: 796 - DNA, 4914 bp, Homo sapiens
cccgggccggggcacggagagagccgagcgccgcagccgtgagccgaatagagccggagagacccgagtatgaccggagaagcccaggccggccggaagaggagccgagcgcggccggaaggaaccgagcccgtccgaagggagcggagcgcagcctggcctggggcccggtcgagcccgcgccatggcggccgaggcgacagctgtggccggaagcggggctgttggcggctgcctggccaaagacggcttgcagcagtctaagtgcccggacactaccccaaaacggcggcgcgcctcgtcgctgtcgcgtgacgccgagcgccgagcctaccaatggtgccgggagtacttgggcggggcctggcgccgagtgcagcccgaggagctgagggtttaccccgtgaggtgggaggtcaggggtcagcctctccggtgcgcggatcggggtcaggggtcagccgcggggccctcaggatgctccatgttttcgcccccctcttgcgcccgcgcctggggcggggcggggccggcctggccgggagggggccggggccgcggcaggtagggccggccgcgggctgagcgcgcctggtgtgggtctgcagcggaggcctcagcaacctgctcttccgctgctcgctcccggaccacctgcccagcgttggcgaggagccccgggaggtgcttctgcggctgtacggagccatcttgcaggtgaggggggtgtgagcgccgcagcaccagtggctttagggcctgtcgcttacgcgatgcgggtagtattgttcccgttgcgcagttgaggacaccgaggttcacggtctgagtaacacctcattacaccgaagcctgggcctgtattcccagagctttgggaggctgaggcgagaggatcacttgagcacaggagttcgagaccagcctggacaacatagtgagacccccatctctaaataaaaatagaccaacgctaaagcctgtgctccagagcctccaggcaattggatcagaagtcgcagctctggtgggaggaaggcgagccctcatgtgtgtccctgtgccactttgccttggcccctttgctgtccatcctttttcagggcgtggactccctggtgctagaaagcgtgatgttcgccatacttgcggagcggtcgctggggccccagctgtacggagtcttcccagagggccggctggaacagtacatcccaagtcggccattgaaaactcaagagcttcgagagccagtgttgtcagcagccattgccacgaagatggcgcaatttcatggcatggagatgcctttcaccaaggagccccactggctgtttgggaccatggagcggtacctaaaacagatccaggacctgcccccaactggcctccctgagatgaacctgctggagatgtacagcctgaaggatgagatgggcaacctcaggaagttactagagtctaccccatcgccagtcgtcttctgccacaatgacatccaggaaggtaggagaaggcatctgagtctcctaacccaagatggaagagccagagggctctggagtgagcagaacctcaccccattcccccagggaacatcttgctgctctcagagccagaaaatgctgacagcctcatgctggtggacttcgagtacagcagttataactataggggctttgacattgggaaccatttttgtgagtgggtttatgattatactcacgaggaatggcctttctacaaagcaaggcccacagactaccccactcaagaacagcagttgcattttattcgtcattacctggcagaggcaaagaaaggtgagaccctctcccaagaggagcagagaaaactggaagaagatttgctggtagaagtcagtcggtatgctctggcatcccatttcttctggggtctgtggtccatcctccaggcatccatgtccaccatagaatttggttacttggactatgcccagtctcggttccagttctacttccagcagaaggggcagctgaccagtgtccactcctcatcctgactccaccctcccactccttggatttctcctggagcctccagggcaggaccttggagggaggaacaacgagcagaaggccctggcgactgggctgagcccccaagtgaaactgaggttcaggagaccggcctgttcctgagtttgagtgccgaccaacccccaggatggcggaagctcaccaggccgtggccttccagttcacggtgaccccagacggggtcgacttccggctcagtcgggaggccctgaaacacgtctacctgtctgggatcaactcctggaagaaacgcctgatccgcatcaagaatggcatcctcaggggcgtgtaccctggcagccccaccagctggctggtcgtcatcatggcaacagtgggttcctccttctgcaacgtggacatctccttggggctggtcagttgcatccagagatgcctccctcaggggtgtggcccctaccagaccccgcagacccgggcacttctcagcatggccatcttctccacgggcgtctgggtgacgggcatcttcttcttccgccaaaccctgaagctgcttctctgctaccatgggtggatgtttgagatgcatggcaagaccagcaacttgaccaggatctgggctatgtgtatccgccttctatccagccggcaccctatgctctacagcttccagacatctctgcccaagcttcctgtgcccagggtgtcagccacaattcagcggtacctagagtctgtgcgccccttgttggatgatgaggaatattaccgcatggagttgctggccaaagaattccaggacaagactgcccccaggctgcagaaatacctggtgctcaagtcatggtgggcaagtaactatgtgagtgactggtgggaagagtacatctaccttcgaggcaggagccctctcatggtgaacagcaactattatgtcatggaccttgtgctcatcaagaatacagacgtgcaggcagcccgcctgggaaacatcatccacgccatgatcatgtatcgccgtaaactggaccgtgaagaaatcaagcctgtgatggcactgggcatagtgcctatgtgctcctaccagatggagaggatgttcaacaccactcggatcccgggcaaggacacagatgtgctacagcacctctcagacagccggcacgtggctgtctaccacaagggacgcttcttcaagctgtggctctatgagggcgcccgtctgctcaagcctcaggatctggagatgcagttccagaggatcctggacgacccctccccacctcagcctggggaggagaagctggcagccctcactgcaggaggaagggtggagtgggcgcaggcacgccaggccttctttagctctggaaagaataaggctgccttggaggccatcgagcgtgccgctttcttcgtggccctggatgaggaatcctactcctatgaccccgaagatgaggccagcctcagcctctatggcaaggccctgctacatggcaactgctacaacaggtggtttgacaaatccttcactctcatttccttcaagaatggccagttgggtctcaatgcagagcatgcgtgggcagatgctcccatcattgggcacctctgggagtttgtcctgggcacagacagcttccacctgggctacacggagaccgggcactgcctgggcaaaccgaaccctgcgctcgcacctcctacacggctgcagtgggacattccaaaacagtgccaggcggtcatcgagagttcctaccaggtggccaaggcgttggcagacgacgtggagttgtactgcttccagttcctgccctttggcaaaggcctcatcaagaagtgccggaccagccctgatgcctttgtgcagatcgcgctgcagctggctcacttccgggggtaagttctgcctgacctatgaggcctcaatgaccagaatgttccgggagggacggactgagactgtgcgttcctgtaccagcgagtccacagcctttgtgcaggccatgatggaggggtcccacacaaaagcagacctgcgagatctcttccagaaggctgctaagaagcaccagaatatgtaccgcctggccatgaccggggcagggatcgacaggcacctcttctgcctttacttggtctccaagtacctaggagtcagctctcctttccttgctgaggtgctctcggaaccctggcgtctctccaccagccagatcccccaatcccagatccgcatgttcgacccagagcagcaccccaatcacctgggcgctggaggtggctttggccctgtagcagatgatggctatggagtttcctacatgattgcaggcgagaacacgatcttcttccacatctccagcaagttctcaagctcagagacgaacgcccagcgctttggaaaccacatccgcaaagccctgctggacattgctgatcttttccaagttcccaaggcctacagctgaaggttggagaaatgccagctgccctttcgtccccacactgtggaggaagggacctgtggcagctcacaggcatgaggggtggccgtgcacaggtgcccaggctccaaggacagctccggcagcaggtcctcgctgggcagatgctgctccctgagggcccaggtggtggagcccttaggtacctgtgttttgtttgggaactcggaggccctccccctcccccagctcagaccacagaggtggcaagagaagggctgaagctggaagactgttcatgagggacttgtgtgacctgctttgaaatgtgtgactctgctgagtgacgtaggctctgagatagctgtccacgcccacgtgtttgcttggaataaatacttgcctcagaaccttca

SEQ ID NO: 797 - DNA, 1265 bp, Homo sapiens
gttcagggcggggccggtcggtgagtcagcggctctctgatccagcccgggagaggaccgagctggaggagctgggtgtggggtgcgttgggctggtggggaggcctagtttgggtgcaagtaggtctgattgagcttgtgttgtgctgaagggacagccctgggtctaggggagagagtccctgagtgtgagacccgccttccccggtcccagcccctcccagttcccccagggacggccacttcctggtccccgacgcaaccatggctgaagaacaaccgcaggtcgaattgttcgtgaaggctggcagtgatggggccaagattgggaactgcccattctcccagagactgttcatggtactgtggctcaagggagtcaccttcaatgttaccaccgttgacaccaaaaggcggaccgagacagtgcagaagctgtgcccaggggggcagctcccattcctgctgtatggcactgaagtgcacacagacaccaacaagattgaggaatttctggaggcagtgctgtgccctcccaggtaccccaagctggcagctctgaaccctgagtccaacacagctgggctggacatatttgccaaattttctgcctacatcaagaattcaaacccagcactcaatgacaatctggagaagggactcctgaaagccctgaaggttttagacaattacttaacatcccccctcccagaagaagtggatgaaaccagtgctgaagatgaaggtgtctctcagaggaagtttttggatggcaacgagctcaccctggctgactgcaacctgttgccaaagttacacatagtacaggtggtgtgtaagaagtaccggggattcaccatccccgaggccttccggggagtgcatcggtacttgagcaatgcctacgcccgggaagaattcgcttccacctgtccagatgatgaggagatcgagctcgcctatgagcaagtggcaaaggccctcaaataagcccctcctgggactccctcaaccccctccattttctccacaaaggccctggtggtttccacattgctacccaatggacacactccaaaatggccagtgggcagggaatcctggagcacttgttccgggatggtgtggtggaagaggggatgagggaaagaaatggggggcctgggtcagatttttattgtggggtgggatgagtaggacaacatatttcagtaataaaatacagaataaaaatcaagtgtttttacgcaaaaaaaaaaaaaaaa

SEQ ID NO: 798 - DNA, 1674 bp, Homo sapiens
ggagcgctttaggctggccggcggcgctgggaggtggagtcgttgctgttgctgtttgtgagcctgtggcgcggcttctgtgggccggaaccttaaagatagccgcaatggctgaaaatggtgataatgaaaagatggctgccctggaggccaaaatctgtcatcaaattgagtattattttggcgacttcaatttgccacgggacaagtttctaaaggaacagataaaactggatgaaggctgggtacctttggagataatgataaaattcaacaggttgaaccgtctaacaacagactttaatgtaattgtggaagcattgagcaaatccaaggcagaactcatggaaatcagtgaagataaaactaaaatcagaaggtctccaagcaaacccctacctgaagtgactgatgagtataaaaatgatgtaaaaaacagatctgtttatattaaaggcttcccaactgatgcaactcttgatgacataaaagaatggttagaagataaaggtcaagtactaaatattcagatgagaagaacattgcataaagcatttaagggatcaatttttgttgtgtttgatagcattgaatctgctaagaaatttgtagagacccctggccagaagtacaaagaaacagacctgctaatacttttcaaggacgattactttgccaaaaaaaatgaagaaagaaaacaaaataaagtggaagctaaattaagagctaaacaggagcaagaagcaaaacaaaagttagaagaagatgctgaaatgaaatctctagaagaaaagattggatgcttgctgaaattttcgggtgatttagatgatcagacctgtagagaagatttacacatacttttctcaaatcatggtgaaataaaatggatagacttcgtcagaggagcaaaagaggggataattctatttaaagaaaaagccaaggaagcattgggtaaagccaaagatgcaaataatggtaacctacaattaaggaacaaagaagtgacttgggaagtactagaaggagaggtggaaaaagaagcactgaagaaaataatagaagaccaacaagaatccctaaacaaatggaagtcaaaaggtcgtagatttaaaggaaaaggaaagggtaataaagctgcccagcctgggtctggtaaaggaaaagtacagtttcagggcaagaaaacgaaatttgctagtgatgatgaacatgatgaacatgatgaaaatggtgcaactggacctgtgaaaagagcaagagaagaaacagacaaagaagaacctgcatccaaacaacagaaaacagaaaatggtgctggagaccagtagtttagtaaaccaattttttattcattttaaataggttttaaacgacttttgtttgcggggcttttaaaaggaaaaccgaattaggtccacttcaatgtccacctgtgagaaaggaaaaatttttttgttgtttaacttgtctttttgttatgcaaatgagatttctttgaatgtattgttctgtttgtgttatttcagatgattcaaatatcaaaaggaagattcttccattaaattgcctttgtaatatgagaatgtattagtacaaactaactaataaaatatatactatatgaaaagagcaaaaaccaaaaaaaaaaaaaaaaaaaaaaaaaaaaaa

SEQ ID NO: 799 - DNA, 428 bp, Homo sapiens
atgtctcttgtcagctgtctttcagaagacctggtggggcaagtccgtgggcatcatgttgaccgagctggagaaagccttgaactctatcatcgacgtctaccacaagtactccctgataaaggggaatttccatgccgtctacagggatgacctgaagaaattgctagagaccgagtgtcctcagtatatcaggaaaaagggtgcagacgtctggttcaaagagttggatatcaacactgatggtgcagttaacttccaggagttcctcattctggtgataaagatgggcgtggcagcccacaaaaaaagccatgaagaaagccacaaagagtagctgagttactgggcccagaggctgggcccctggacatgtacctgcagaataataaagtcatcaatacctcaaaaaaaaaaaaaaaaaaaaa

SEQ ID NO: 800 - DNA, 1372 bp, Homo sapiens
cgggtgctgatgcgagtcggtggcagcgaggacattttctgactccctggcccctgacacggctgcactttccatcccgtcgcggggccggccgctactccggccccaggatgcagaatgtgattaatactgtgaagggaaaggcactggaagtggctgagtacctgaccccggtcctcaaggaatcaaagtttaaggaaacaggtgtaattaccccagaagagtttgtggcagctggagatcacctagtccaccactgtccaacatggcaatgggctacaggggaagaattgaaagtgaaggcatacctaccaacaggcaaacaatttttggtaaccaaaaatgtgccgtgctataagcggtgcaaacagatggaatattcagatgaattggaagctatcattgaagaagatgatggtgatggcggatgggtagatacatatcacaacacaggtattacaggaataacggaagccgttaaagagatcacactggaaaataaggacaatataaggcttcaagattgctcagcactatgtgaagaggaagaagatgaagatgaaggagaagctgcagatatggaagaatatgaagagagtggattgttggaaacagatgaggctaccctagatacaaggaaaatagtagaagcttgtaaagccaaaactgatgctggcggtgaagatgctattttgcaaaccagaacttatgacctttacatcacttatgataaatattaccagactccacgattatggttgtttggctatgatgagcaacggcagcctttaacagttgagcacatgtatgaagacatcagtcaggatcatgtgaagaaaacagtgaccattgaaaatcaccctcatctgccaccacctcccatgtgttcagttcacccatgcaggcatgctgaggtgatgaagaaaatcattgagactgttgcagaaggagggggagaacttggagttcatatgtatcttcttattttcttgaaatttgtacaagctgtcattccaacaatagaatatgactacacaagacacttcacaatgtaatgaagagagcataaaatctatcctaattattggttctgatttttaaagaattaacccatagatgtgaccattgaccatattcatcaatatatacagtttctctaataagggacttatatgtttatgcattaaataaaaatatgttccactaccagccttacttgtttaataaaaatcagtgcaaagaaaaaaaaaaaaaaaaaaaaaaaaaaaaaaaaaaaaaaaaaaaaaaaaaaaaaaaaaaaaaaaaaaaaaaaaaaaaaaaaaaaaaaaaaaaaaaaaaaaaaaaaaaaaaaaaaaaaaaaaaaaaaaaaaaa

SEQ ID NO: 801 - DNA, 2547 bp, Homo sapiens
ccacgcgtccgcggacgcgtgggcgagaagtgcttccaagcgtccattttgagccttggaaactacgacgaccaaagggccacgggttcctgggtcgtttctcatttccgtcgagttaaacgtctggggctgcttctgaggaatcagcttggctggccagcaagttcagctccggcaagtcatttgattcacccggtgatgaaatgggggtcaaccagtctgtgggctttccacctgtcacaggaccccacctcgtaggctgtggggatgtgatggagggtcagaatctccaggggagcttctttcgactcttctacccctgccaaaaggcagaggagaccatggagcagcccctgtggattccccgctatgagtactgcactggcctggccgagtacctgcagtttaataagcgctgcgggggcttgctgttcaacctggcggtgggatcttgtcgcctgcctgttagctggaatggcccctttaagacaaaggactctggataccccttgatcatcttctcccatggcctaggagccttcaggactttgtattcagccttctgcatggagctggcctcacgtggctttgtggttgctgtgccagagcacagggaccggtcagcggcaaccacctatttctgcaagcaggccccagaagagaaccagcccaccaatgaatcgctgcaggaggaatggatccctttccgtcgagttgaggaaggggagaaggaatttcatgttcggaatccccaggtgcatcagcgggtaagcgagtgtttacgggtgttgaagatcctgcaagaggtcactgctgggcagactgtcttcaacatcttgcctggtggcttggatctgatgactttgaagggcaacattgacatgagccgtgtggctgtgatgggacattcatttggaggggccacagctattctggctttggccaaggagacccaatttcggtgtgcggtggctctggatgcttggatgtttcctctggaacgtgacttttaccccaaggcccgaggacctgtgttctttatcaatactgagaaattccagacaatggagagtgtcaatttgatgaagaagatatgtgcccagcatgaacagtctaggatcataaccgttcttggttctgttcatcggagtcaaactgactttgcttttgtgactggcaacttgattggtaaattcttctccactgaaacccgtgggagcctggacccctatgaagggcaggaggttatggtacgggccatgttggccttcctgcagaagcacctcgacctgaaagaagactataatcaatggaacaaccttattgaaggcattggaccgtcgctcaccccaggggccccccaccatctgtccagcctgtaggcacaactggccatttgtaaagtcacttcagccaagttttcatttgggagctacccaagggcacccatgagctcctatcaagaagtgatcaacgtgaccccttttcacagattgaaaggtgtaatcacactgctgcttggataactgggtactttgatcttagatttgatcttaaaatcactttgggactgggatcccttgctgattgacaaacagactttctgggaccttgatggagtggggaacaagcagtagagtgggactgggggagacccaggccccgggctgagcactgtgaggcctggatgtgaagactcagcccagcgaagctcattcccttacccccggccagtgctgctgcttcagtggaagagatgaagccaaaggacagaatgaaaatccctaccttcagagactctagcccagcccaacaccatctcttcctacctctcagccttctccctccccagggccacttgttgaagtctgagcactttatgtaaatttctaggtgtgagccgtgatcacattttctatttatttccaagtcttctcattgtatggaacatagtactacttatacttacagtagtaagttatacttgtgagcccacagagtggcagacagcatggctctcacagcacagggagaaaaactgaggtacacagaggtacctcagaagctctggatgtctttgggggttttgctaagtgtatcttgataggaaacaacaaaagcaggttgagatggggaagatgacagaacaacagtgttaaatggccatttgcacaggcctttgccacaacagagaagtagtttggtcagctaaaactcagctgcagcctggacagtagagcgagaccccatcttaaaaataaagaaggctgggcgtggtggctcatgcctgtaatcccagcactttgggaggccaaggcaggcagatcacttaaggccaggagttcaagaccacctggccaacatggtgaaaccccgtctctactaaaaatacaaaaaattagcctggcgtaatggcaggcgcctataatcccagctactcaggaggctgaagcagaagaatcacttgaacctaggaggcggaggttgcagtgagtcaagatcgcgccactgcactccagcctgggtgacagagcaagactctgtctt

SEQ ID NO: 802 - DNA, 3339 bp, Homo sapiens
agtcgctccggaggaggcgtgaatcgcgcagggattgactaatttggggtggggggtgcggtgggcgatggagcagcctgaggacatggcgtcgctgagcgagttcgactccttggcgggcagcatcccggccaccaaggtggagatcaccgtgtcctgcaggaacctcctggacaaagacatgttttccaagtccgacccactgtgcgtcatgtatacccaagggatggagaacaagcagtggcgggagtttgggcgcaccgaagtcatcgacaacacgctcaatcctgacttcgtgcgcaagttcattgtggattactttttcgaggagaagcagaacctccgttttgatctatacgacgttgactctaagagtcctgatttatccaaacacgatttcctgggccaggccttctgcacccttggagagattgtggggtcccctgggagccgcctggaaaagcccctcacgataggcgcattcagcctgaattccaggacgggcaaacccatgccagctgtgtccaacggtggtgtcccaggaaagaaatgtggcaccatcatcctgtccgctgaggagctcagcaactgtagggatgtcgccaccatgcagttctgtgccaacaagctggacaagaaagatttctttgggaaatctgaccccttcttggtattctacagaagcaacgaggatggaacgttcaccatttgccacaagaccgaggtcatgaagaacaccctaaatccagtctggcaaactttctccattcccgtgagagccctctgcaacggcgactacgatcggaccatcaaggtggaggtgtacgactgggatcgggacggcagccatgacttcattggggagttcaccaccagttaccgggagctggcccgtgggcagagccaattcaacatctatgaggtggtaaacccgaaaaagaaaatgaagaaaaagaaatacgtgaattctggcacagtcaccctgctttcctttgctgtggagtcagagtgcaccttccttgactacatcaaaggagggacccagatcaacttcactgtggccattgatttcactgcctccaatgggaacccctcacagtccacatccctgcactacatgagcccctaccagctgaacgcctacgcgctggcgctgactgccgtcggagagatcatccagcactacgacagtgacaagatgttccctgccctgggcttcggggccaagctgcccccggatggcagagtgtcccacgagttcccactgaatggcaaccaggagaacccctcatgctgtggcatcgacggcatcctggaggcctaccaccgcagcctgcgcactgtgcagctgtacggccccaccaactttgcccccgtggtcacccacgtggccaggaatgcagcggccgtgcaggatggctcccagtactcggtgctgctcatcattactgatggggtcatctcggacatggcgcagaccaaggaggccattgtcaacgctgccaagctccccatgtccatcattatcgtcggcgtgggccaggcagagttcgacgccatggtggagctggatggcgacgacgtgcggatctcctcccgggggaagctggctgaacgcgacatcgtccagtttgtacccttccgggactacgtggaccgcacaggcaaccacgtgctgagcatggcccgcctggcccgagacgtgctggcagagatccctgaccaactggtgtcctacatgaaggcacagggcattcgcccgcgtcccccacccgcagcaccaacccactcgccctcgcagtccccagcccgcacgccccctgcgtcccccctgcacacgcacatctgaacctggtctcagcaggcaggtggctggggcctgggagaggccaggtgaatgggaggccagggccccagactccccgaagttggcctgcccggcctttgggacatctgtgtgcctgggaggctgccagggggtggggcttctgaagacccctcctcaatttcttggcctcacttattgcccaaacccagggagttaggggggtacgggtgaaagaggggtacacagggacccagcccttctcttcttccccaatacctggctctaacccagccaggaaggtgtaaacaataagggtgattggggtccctgtcgcccacccccggcaatcctatttgcttacctgtcaccctgaagcctgggcttggcctcctccagccccccatctccgtcccatcctcccatggtgtctactcctgtccctgagccccgccctgtggtctatcctgtgcccgatttccagtgaaccccatgaagctgatgggtttgcaggaaggcctgaacatgtgcaccctcccagggacactggatgcgctgggagccccggggaccccatggggtgctgtaatcatggaccgtaggccatgtgatgggcctgaagtggaggctgctcagcacagagccctttctggtgcctctcgaactcagtacgatgcaagttctagacacacagatggcctgtggaggcctctccctggtgtgggcccacaggtacttccatggttgactcctggcttcaggaatcccttcctccctccagaggcttcccagggccctcggtgcccacgcctctgcccatctggaggcctgagtaaggagtggctcagccccacgttcccacactgctcctgctctttgccctgtatcccatgaggctaggagacaggagtcctgggtttgagccctgcctccccccactgcctaatgtgggaacccaagcaaggcccttctaccttttgggcctcagtttccatgtctgtaccacaagagggttgaccagatggccccaggttttcctttaggtctgacatcctgagggtcattcatcccatgcccagttccccccatcctactcctaacagatgtgaccctacttgaggccgccttggcttttgggtcaccctgtctcatcccatcaccccaaacataccctagtccttcagcctggggctctggcatctgagcccgagctcctgcccctgctgtgggaaaggtggggaagaaggggatctccctcccgggcccacccagctgcccagcctttgcccactcggggagcagatcatgcatgccaatccctgttgccgcatggagctcctcagcccactgacctctccgtgcctggtgcaggccaggcccccgtcttccgcctgcctctgcttccccgtcatgcatggtggtggtgtttctacggtgtctggttctgtgcccgtctctgagacagtctctgtgtggaatttgccttaaactgaagtaaatttggttcttttagt

SEQ ID NO: 803 - DNA, 3549 bp, Homo sapiens
ggagcgcgtgcgccctcttactcggctccccttggtttcctggggtcctgccccttcaagctggggcgggagcggaggaccccgctctcaggggttgccggaccatgcgttgggggctgcgccctcgcgggccgggcgcggccgccctggccactgcccgaagtttgtgggggacgccccgccttccctgcagcccgggatggcaaggggcgacgaagaggcttctggtgcggtcggtctccggggccagtaaccaccagccgaactcgaatagtggcagataccgggacacggtgctgctgccgcagacgagcttccccatgaagctgctgggccgccagcagccggacacggagctggagatccagcagaaatgtggattttcagaactttattcatggcaaagagaaagaaaagtaaagacagaattttgccttcatgatggacctccttatgcaaacggtgaccctcatgttggacatgctttaaataagattttgaaagacatagccaatcgattccatatgatgaatggctccaaaatacattttgtgcccggctgggattgtcatgggttgcccattgaaataaaagtattatcagaacttggtagagaagctcagaatctttcagctatggaaattagaaagaaagctagatcatttgctaaagcagccattgagaaacagaaatcagcatttattcgttggggaataatggcagattggaataattgctactatacatttgatgggaagtatgaagccaaacagttgagaactttttaccaaatgtatgataagggcttggtttatcgatcttacaaacctgtgttttggtctccgtcatctaggactgcattggctgaagcagaacttgaatataatcctgagcatgtcagtcgttcaatatatgtaaaatttcctctcttaaagccttctccaaaattggcatctcttatagatggttcatctcctgttagtattttggtctggaccacacaaccttggacgattccagccaatgaagctgtttgctatatgcctgaatcaaagtatgctgttgtgaaatgttctaagtctggagacctctacgtactggcggcagataaagtagcatctgttgcttctactttggaaacaacatttgagactatttcaacactttcaggtgtagatttggaaaatggtacttgcagtcatccattaattcctgataaagcctctcctcttttacctgcaaatcatgtgaccatggcaaaaggaacgggattggttcacacagccccagctcatggtatggaagactacggtgtagcgtctcagcacaacctgcccatggattgtctagtggacgaagatggagttttcacagatgttgcaggtcctgaacttcaaaacaaggctgtccttgaagagggaactgatgtggttataaagatgcttcagactgcaaagaatttgttgaaagaggagaaattggtgcatagctatccgtatgactggaggaccaagaaacctgtggttattcgtgccagcaagcagtggtttataaacatcacggatattaagactgcagccaaggaattgttaaaaaaggtgaaatttattcctggatcagcactgaatggcatggttgaaatgatggacaggcggccatattggtgtatatcaaggcaaagagtttggggtgttccaattcctgtgtttcatcataagaccaaggatgaatacttgatcaacagccaaaccactgagcatattgttaaactagtggaacaacacggcagtgatatctggtggactcttccccctgaacaacttcttccaaaagaagtcttatctgaggttggtggccctgatgccttggaatatgtgccaggtcaggatattttggacatctggtttgatagcggaacttcatggtcttatgttcttccaggtcctgaccaaagagcagatttgtacttggaaggaaaagaccagctcgggggttggtttcagtcatccttattaacaagtgtggcagcaaggaagagagcaccttataagacagtgattgttcatggatttacccttggagaaaagggagaaaagatgtccaagtctcttgggaatgtcattcatcctgatgttgtcgttaatggaggacaagatcaaagcaaagagcctccgtatggtgctgatgtccttcgctggtgggtagctgattccaatgtcttcaccgaagttgcaattggcccatccgtgctcaatgctgccagagatgatattagcaagcttaggaatacacttcgctttcttttgggaaatgtggctgatttcaacccagaaacagattccatccctgtaaacgatatgtatgtcatagaccagtacatgctacacttactgcaggatttggcaaacaagattaccgaattatacaaacaatatgattttggaaaagttgttcggctgttacggacgttttataccagagagctctctaacttttatttcagtataatcaaagataggctctattgtgaaaaggaaaatgaccccaaacgacgctcttgtcagactgcattagttgaaattttggatgtaatagttcgttcttttgctcccattcttcctcacctggctgaagaggtgttccagcacataccttatattaaagagcccaagagtgttttccgtactgggtggattagtactagttctatctggaaaaagcccgggttggaagaagctgtggagagtgcgtgtgcaatgcgagactcatttcttggaagcatccctggcaaaaatgcagctgagtacaaggttatcactgtgatagaacctggactgctttttgagataatagagatgctgcagtctgaagagacttccagcacctctcagttgaatgaattaatgatggcttctgagtcaactttactggctcaggaaccacgagagatgactgcagatgtaatcgagcttaaagggaaattcctcatcaacttagaaggtggtgatattcgtgaagagtcttcctataaagtaattgtcatgccgactacgaaagaaaaatgcccccgttgttggaagtatacagcggagtcttcagatacactgtgtcctcgatgtgcagaagttgtcagtggaaaatagtattaacagctcactcgagcaagaaccctcctgacagtactggctagaagtttggatggattatttacaatataggaaagaaagccaagatttaggtaatgagtggatgagtaaatggtggaggatgggagtcaaaatcagaattatagaagaagtatttcctgtaactatagaaagaattatgtatatatacatgcagaaatatatatgtgtgtgtgtatctgtggatggatatatgtatatctcttcctatatatatccatagtggacttattcagaacatagatatgtattcagcttgtcttcaaatacggccaagcagaaaatgttttatattttataaatcatcttttgactctgtatttaaattctatgatactgaaaataaaggcattctggaaaaata

SEQ ID NO: 804 - DNA, 11740 bp, Homo sapiens
cccggagccggtgcgaggagggcacccggtgcgtccccggagcggggaggccaggccgggcaaccctggggccggtcggggcggcgtcactgcaccctccgccaggctccgcgggatgcaccgtggtagccgagggcggaggcgacactctcaggtaaattggcaggatgaggagcagcaaatcaaaagaggtgcctttaccaaatccaaggaactctcaaagcaaggatactgttcaagcagatataaccacatcgtgggatgcactttctcaaaccaaggctgctctgagacacattgaaaataaattagaagtagcccctacaagtacagctgtgtgtgattctgtcatggataccaagaagtcttctacaagtgctactcgaaaaataagtagaaaagatggtagatacctggatgattcttgggttaatgctccaatctccaaatccactaaatcacgaaaagagaaatctcgtagtcctctcagggccaccaccctggagggtaatgtgaagaaaaataatcgtgtggaatttcgtgaacctttggtttcttatagggaaatccatggtgcaccttccaatttcagttccagccatctggaatcaaagcacgtatactgtgtagatgttaatgaagaaaagactgagagcggtaactggatgataggcagtcgagaagaacggaatatacggagctgtgattttgagagctcccaatcatctgtcatcaatgatacagttgttaggtttttaaatgatcgaccagcaattgatgcattgcaaaattctgaatgtttgattaggatgggagcttctatgagaactgaggaagaaatgcctaacagaacaaaaggaagtgagaataatttgaagctttctgtgaataacatggcccatgatactgatccaaaagcgttacgactaactgactcttctccatcctctactagtacttctaattcccaaagattagatattctaaagcggcgacaacatgatgtcaaactggaaaaacttaaggaacggattagaaaacagtgggaacactcagaagaaacaaatggccggggccagaagctgggtcatattgaccatccagtaatggttgttaatgttgataactcagtaacagcaaaagtcagaaaagtggcaacagcaccacctgctccagcatataaaggtttcaacccttcagagaccaagattcgaacacctgatgggaaagtgtggcaggaggctgagtttcaaaacatgagtagagaactgtatcgagatttagcacttcactttgcagatgatatttctataaaggagaaacctgctgaaaaaagtaaagagaagaaagtagtcaagccagtacgaaaagtccaaaaagtagcacagttatcaagtacagaatgcagaacaggtagtagtcatcttataagtacatcttcttggcgagatggacaaaaattagtaaagaagattctgggacctgctcccagaatggagccaaaagagcaaagaacagcatcaagtgacagaggtggaagaagaagaactgctaaatctgggggtcacattggaagagcagaatctgatcccaggttggacgttttacatagacatcttcaaagaaactcagaacgttcgagaagtaaatctcggtctgaaaataatataaagaaactagcttcatctcttccagataataagcaggaggaaaatactgccttaaataaggactttttacctattgaaattcgtggcattcttgatgacctacagctggattctacagctcacactgcaaagcaagatactgtagagttacagaaccagaagtcatcagcaccagtacatgctcctaggagtcacagcccagtaaaaagaaaacctgacaaaataacagctaatgaagatccccctgttatttccaaaaggcgccactatgacacagatgaggtacgacagtacattgttaggcagcaggaggaaaggaagagaaagcaaaatgaagagaagaaggctcaaaaggaggctacagaacagaaaaacaaacgattacaagagctctaccggaagcagaaggaagcctttactaaagtaaaaaatgtccctccttctgagccatcagcaactaggcgactacaggaaacttactccaaattgctactagaaaagaccttgcttgaagagccatctcatcaacatgttacgcaggaaacacaggccaaaccagggtatcagccatctggagaatctgacaaagaaaacaaagtacaggaacgtcccccaagtgcatcttccagtagtgacatgtctctctcagaacctccacagcctcttgcaagaaaagacttgatggaatctacatggatgcagcctgaaagattgagcccacaagttcaccattctcaaccacagccttttgctggaacagctggaagtttactctcccatctcttgagtttagagcatgtaggaattttgcataaggattttgaatctattttaccaaccaggaagaatcataatatggcttcaaggccattaacttttacacctcaaccatatgtgacctcaccagctgcttatacagatgccttgttaaaacctagtgccagccaatataagagtaaactggatcgtattgaagccttgaaagcaacagctgcttctttgtccagcagaattgaaagtgaagccaagaaattagctggggccagcattaactatgggtcagcatggaacactgagtatgatgtgcagcaggcacctcaagaagatggaccttggaccaaggctgtaactccacctgtgaaagatgataatgaagatgttttctctgccagaattcagaagatgctgggaagctgtgtatctcatgcaacttttgatgatgatcttcctggtgtaggcaatcttagtgaatttaaaaagcttcctgagatgataagaccacagagtgccatatcaagctttagagtgagatcccctggtcccaaaccacaagggctactggcacagttatgtaaaaggcagactgactcttctagctctgatatgcaagcctgttctcaagacaaagccaaaatatctcttggttccagcatagattcagtcagtgaagggcctcttcttagtgaggggagtctctctgaagaagagggagaccaggatggacagccccttttgaaagtagcagaaattttaaaagaaaaggaattttgtcctggagaaagaaatagttatgaacccatcaaagagtttcagaaagaagctgaaaaattcttgccactttttgggcacataggtggtacacaaagcaaaggaccatgggaagaattggcaaagggaagtccacatagcgtcattaatatttttacaaaatcctatcagttatatggaaaagggtttgaagacaagttggacagaggaacatcaacatcacggcctttgaatgccaccgcaactcctctaagtggtgtttcatatgaagatgattttgtctcctctccagggactgggacttcgacagaaaaaaaatcaactcttgaacctcatagcactttaagccctcaggaggaccattctaacagaaagtctgcctatgatccttcctctgtggatgttacctcccagcattcatcaggagcccagtctgctgcatcgtctcgttcatctacttcttctaaaggaaagaaaggaaaaaaggaaaagacagaatggttggattcattcactggaaatgttcagaactcacttcttgatgaggaaaaagcagaacgtggctcccatcaaggaaagaaatctgggaccagcagcaaactttctgttaaagattttgagcagactcttgatacagatagcactttggaggatctttctggacattctgtgagtgtctcatcagataagggaagatctcagaaaactccaacttctcccctgtcaccaagttcccagaaatcattgcagtttgacgttgcaggaacttcttcagaaagatctaagtcgtcagtaatgcctccaactataacaggatttaagcctaatgcacctctcactgatctgaacccggcagccagcagaacaacgacagagaacatggctccaataccaggttctaagcgcttttctcctgctggcctccatcatcgtatggcagcagaactcagttatctgaacgccattgaggagtcggtgcgccaactgtcagatgtagaaagagttagaggcatttcacttgctcagcaggagagtgtgtctctagctcagataataaaggcacaacagcaacgccatgaaagagacttggccctcttgaaactaaaggctgaacaagaggctctggagagtcagagacaattagaagaaacccgaaacaaagcagctcaggtccatgcagaatcattacagcaggtggttcaatcacaacgggaagtaactgaagtcctgcaggaagcaacgtgtaaaatagcagctcagcagtcagaaactgctcgcctcaccacagacgcagcacgtcaaatctgtgagatggcagagttgactagaactcatatctcagatgctgtcgtggcttcaggagctccccttgcaatactgtatgaccaccaacggcagcaccttccagactttgtgaaacagctgaggaccagaactgaaacagataggaaaagtccatctgtttcactctctcagagtaaagaagggacccttgactcaaagcatcagaagtattctgcttcatatgatagttattctgagtcttcaggatacaagaatcatgatagaagaagtagcagtggtagcagccgccaagaaagtccttcagttccatcttgtaaggaaaatgagaagaaacttaatggtgaaaagatagagagttccattgatgaacaggttcagactgctgcagatgattctctacgaagtgatagtgttccatctcttcctgatgaaaaagactcaacgtctattgcaacagaatattctctgaaatttgatgaatccatgacagaagatgaaatagaagaacaatcatttcgatcattactaccttcagagagtcaccgcagatttaacatggaaaagagaagaggtcatcatgatgactctgatgaagaagcttctccagaaaaaactacactgtctactgccaaggaactgaacatgccattctcaggaggacaagatagcttttctaaatttactatggagatggttcgacagtatatgaaagaggaagaaatgagggcagctcaccagtcttcactcctgcgtctccgtgaaaaggccttgaaggagaagactaaggctgaattggcctggttagagcatcaaaaaaaacatctacgagacaaaggagaggatgataaaatgcccccgctccggaagaaacagcgtggtttgcttttaaggttgcagcaagaaaaggcagaaataaaacgtcttcaagaagccaataaggcagctcggaaggaaagacagctgattcttaaacagcaggaggagatagaaaagatccgacagaccaccataaaactacaggagaaattgaagtctgcaggggagagtaaattggactctcatagtgatgatgatacaaaggataataaggcaaccagtcctggtccaactgacttggagacccgcagtccttctcccatttcaatctccagcagtgaaactagcagcattatgcagaaactgaagaaaatgagaagccgcatggatgaaaagtttctgacaaagcgggagcaaaaattaatgcaacggcgacaacatgcagaggagctcctagagtggaagcgacgtttagatgcagaagaagcagaaattcgtcaaatggaaaaacaagctttggctgcctgggacaaagaattaataaaacccaaaactcctaagaaagaactggaggaccagagaacagaacagaaagaaatagcaagtgaagaggaatctccagtacctctgtactctcatctaaacagtgaaagctccattccagaagaattaggcagccctgctgttgaatatgtaccatccgagtctataggacaggagcagccagggagtccagatcacagtatacttactgaagaaatgatttgttcacaggaactagaatcttctacctctcctagtaaacattcacttcccaaaagctgcacatctgtgtcaaagcaggagtctagcaaaggaagtcataggactggaggacaatgtcacctgcctatcaagtcccatcagcactgttatagttggtcagatgagtcattatctatgacacagtcagaaactacatctgaccagagtgatattgaaggtaggatcagagctctgaaggatgagttgcggaaaagaaaatcagttgtgaaccagctgaagaaggaacagaaaaaaaggcaaaaggaaagactgaaagcccaagaagccagtctgatcaagcagttagagtcatatgatgaatttattaagaaaactgaagccgagcttagccaagatttggaaacatcaccaacagccaagcctcagattaaaacgctctcctcagcttctgaaaaacccaagatcaaacccctcacaccactacacagatctgaaacggcaaagaattggaaatcactaacagagtcagaacgttccagaggatccctggagcctattgctgaacatgttgatgcttcactgtctggttctgagagatcagtatcagaaaggtctttatctgcatatgcaaagagagtaaatgaatgggacagtcgaacagaagattttcagaccccatctccagttctcagatcatcaaggaaaatcagagaagaatctggagattctctagaaaatgtacctgcattacatcttctcaaagaattaaatgccactagtagaattcttgatatgtcagatggcaaggttggagaatctagtaaaaaatcagaaataaaagaaatagagtatacaaaattgaagaagagtaagattgaagatgccttttctaaagaaggtaaatctgatgtcttactgaaattagtcctagaacagggagattcatctgaaattctttcaaagaaagatcttcctttagattctgaaaatgttcagaaagacctagttggattagctattgaaaatctccataaaagtgaggaaatgttgaaagagagacagtcagatcaagatatgaatcatagtccaaacatccaatcaggaaaagacattcacgaacaaaagaacacaaaggaaaaagatttgtcttggtcagaacatctttttgctcctaaagagataccatactctgaagattttgaagtgtcttctttcaagaaagaaatttcagctgaattgtacaaagatgattttgaggtgtcatctttgctgtcactcaggaaagactctcagtcttgcagagataagccacagccaatgaggagctctacaagtggagccactagctttggtagtaatgaggaaatcagtgagtgcctaagtgagaaaagcctttctatccatagcaatgttcattctgacaggctgttggaactcaagtcccctactgagctgatgaaaagtaaggagcgcagtgatgtggagcatgaacagcaagttactgaatccccttccttggcttcagttcctactgcagacgagttatttgatttccacattggtgatagggtgttgattggaaatgttcagccaggaattcttcgattcaaaggtgagactagttttgctaaaggattttgggccggagtggagttagataaacctgaaggaaataacaatggaacatatgatggtattgcatattttgagtgcaaagaaaagcatggtatttttgctcctcctcaaaaaatatctcacattccagaaaactttgatgactatgtagacattaatgaagatgaagactgttactcagatgaacgatatcagtgctataatcaagagcaaaatgatacagagggtccaaaagacagagaaaaggatgtcagtgaatatttttatgagaaatccctacctagtgtgaatgatatagaagcctcagttaatagaagtagaagccttaaaatagaaacagacaatgtacaggacatttctggggtacttgaagcccatgttcaccagcagtcttcagtggattcacagatttcttcaaaggaaaacaaagacctcatttctgatgccacagaaaaggtttccatcgctgcagaagatgacactttagacaataccttttccgaagaattggagaagcaacagcagtttacagaagaggaagacaacctatatgctgaagcttcagaaaagctttgtacaccacttctggatcttttaacaagagaaaaaaaccaactggaagcccagctgaagtcatcactaaatgaggaaaaaaagtcaaaacaacaactggaaaaaatcagcttactgacagacagtttactaaaagtctttgtaaaggacacagtcaatcaactacaacaaatcaaaaaaaccagggatgagaaaatccagcttagcaatcaggagcttcttggtgatgaccaaaagaaagtaacaccccaagacctatcccaaaatgttgaggaacagtcgccaagtatttcaggttgcttcttaagttctgaattggaagatgaaaaagaagagatttcctctccagatatgtgtcccagaccggagagcccagtatttggtgccagtgggcaggaagaacttgctaagagacttgctgaacttgaactcagccgggagttcctgagcgcgttaggagatgatcaagactggtttgatgaagactttggtttgagctcttctcacaagatccaaaaaaataaggcagaagaaaccattgtacctctaatggcagaacctaaaagagtaacccaacaaccatgtgaaacattattggcagtcccccatactgcagaagaagtagagattcttgtacataatgcagcagaagaactttggaaatggaaagaattaggccacgatcttcatagcatcagtattcctacaaaactgcttggctgtgccagtaaaggtctagatatagaaagcactagtaaaagggtctacaaacaggcggtttttgatttaacaaaagagatttttgaggaaatatttgctgaggatcccaacttaaatcaacctgtctggatgaagccatgtagaatcaactctagttatttccgacgagtgaaaaatccaaataaccttgatgaaatcaagagcttcatagcaagtgaagtactcaagttgttcagtcttaaaaaggagccaaaccacaaaacagattggcagaaaatgatgaaatttggaagaaagaaaagagaccgagtggatcatatcctggttcaggagctccatgaggaggaggcacagtgggtgaactatgatgaggatgagttgtgtgtgaaaatgcagctagccgacgggatctttgagaccctgatcaaagatactattgatgttctgaatcagatcagtgaaaagcaggggagaatgctactagtgtgacatcttgcaaataaatcgaacgctgagtgctaatgtgagtcctgggcctttctgcctcctgatgtacacccatcgccatcatagcaagagtgcttctggaccttgtacttattcttaaagactaccagtatggagttcataggacaatgtggtacacctggtattacagcctttgcctttcgagactatccactggattaatgggttattttcagtgggcagggttgcacagtgtaatcctacaccttttgctaacacccctactaggtcccagagggccagaaacacctgacttacctctgagtttagactagggtatcacttctttgagtctgaagtcaagtgagagaggtatagataaatgcatcacatcacttttgaaatgtaattctggtctataccatggaagtcataaatggacattatagtctctaaacagtattaaacccttaaccacttctaaaataggcaagctcaataatgtctgccaacttcacattctggagtttatttcatttctttttgaagaccattttcttccattattgtagttgagcagcaccaagtggactgtcaggctaacaggaataagtggtagccttgctttctgagcaccatctaaagaattttaaacctctgcattatgtttagtgttctctgtgtgggcatgaaaacaaagaaatgcccctactgaagactgggctcaaaggaccaatgcagggctggttcttttaccccttggtttactcctgcacttgtcttactcattctgaatctctaccagctgctcccagaatcacagatactcaggaccatctcaggcatccaggcatggcaaagtggaaataattcattttggcctgcaaaccttcaactcccatctttccccaagaagtcagagatgctgttacttgaatgatttaggaaatgagtgtgtgcaccaaagacaaaaagatattgtctattgtttgtgtgcttgttttgcgctatggaacattttttaatttattttaagataaattattaagttgaaaatgtgtgtccctattcagaagtgaaagattcatcttgtaatagttaaacctccatcttgaagcttctatggttcatagtctttgcacaggaacctgtggttttaacaaaccaatacacatattgaagaagtcattttaattcagtgaaacgaagatgggcttttccagatcacctgcaatagcagcagtgggataaaatgatttaaaaacactgtacaatttaactctgcctctcttgcagcattgcttctcacaactattacctgcatctgaaaaaaaatctatagactccagctgctacattagagcataagagatgctctcctgggacctcagtaccctgccttcttgactggtttccgttcatcagtcctgtccctcttcaagtaatctagaagaatgtggatactcttaggcgtgaatgtaaatgccttaatattgaaggtcctggttagaagcatgatacaagacatctactggattcatatttacaaatatcctggaatgttatagcttcaaagtatattagaaaaaccccaaagatggtataatctttaagtgtgcacgttcgtttatttctgcatcttccctccaaacttgcctttgcatcttaaatatttcactatgcacactcccattcctcttgggtttcatcttgtcgtttaagaaatgtactgaaataatcattggaatatttgcattttgcacaatgactggtatgatagctcttgacaaataaggaaagcactgaaatgttgtgattgggtctcgggaaatgctcagattgatgtcttaccagcatttcttctgggcttgtgatgttgagctgtagtcttgtagccataatgagcaaattgactaagagaagcaaaggtttcttggggttattaaccagtagtgtggaaatactagttttatgtggccaaggaaaagcaaagccttttcttttcagtttgtgttatttggaagacagaaaaacatcttgtctacatcctttggctgtttgtaggatcacgttgtccttacgatactgaaactttacagctgctgtaaattttttataaatgaatttcaaaatgttataatgggactgtaggttgtttttctacatcttcattatttggacctaaaaccagtttttaataagaaagtttatctttactctttctgaaattatgactccag

SEQ ID NO: 805 - DNA, 2070 bp, Homo sapiens
cgctgtttcgtgggaccaggattgaaacaagatggcgggttcgtggtgagaagccgtcaaggagtagaaattggtatgcttagaagcagattctaaaagcagtttctcttcagaacatcttttttcataccacttgataagcatcttgaaacaccatggctgtagctgcagtaaaatgggtgatgtcaaagagaactatcttgaaacatttatttccagtccaaaatggagctttatattgtgtttgtcataaatctacgtattctcctctaccagatgactataattgcaacgtagagcttgctctgacttctgatggcaggacaatagtatgctaccacccttctgtggacattccatatgaacacacaaaacctatccctcggccagatcctgtgcataataatgaagaaacacatgatcaagtgctgaaaaccagattggaagaaaaagttgaacaccttgaggaaggacctatgatagaacaacttagcaaaatgttctttactactaagcaccgttggtatcctcatggacggtatcacagatgtcgtaagaatctgaatcctccaaaagacagatgatgcggaggttcctgggggaatcaaagagaaatgtgcctcatttgccatttgagaaaatgcagtctggtgtattcagtaatatatagtaaagtaataatgataaaatatcttttcatatattagaatgtgtacttttatataaagtaattctggatttgacattctcatttagagaaacctattttcttttttctttttctattttagtgtttcatttatgtgcggtctccaatttaggacttttccatagtgccaaagccatacatattcagtagaacatcaataaattacatcagaaattcaacactttattataaaacgggcttcgtgttagataattttgctaaacagtaggctactgtaagtgttctgagcatatttaagacaggctagcattttcaatttacaatattttcaactgatagtaggtttattgggatgtaaccctatgataagttgagaaacatctctttttgtgtgtctactgtgatttaagtatttttaatcatcagccaagcattgttagtagtataaatatgattaataaaaatgtgcatggctttcctgaaggagattttttaattgcctttgagaataaactcataaggtctaccaagaaaataaatgttatgatgtttcagttggcttctaggaaataattaaattagtgatattttaatcaggttttactatctgctaggccccttccatcaattcttattaaattctcaaaataatcctttgaaaagggagtataattacattttacagtgactcgaaccttacccaaacaagtgggagagccaggagccaaactatcaggctccaaagcttttttttagtgcatcacaatgacaaaggggtggttttctttcacccaagaatgtgctttcctggaaatttttctagatagaatattatgtaatttgttttgaaggttttttttcctgactgtcttaaagattatgctagctttagaacacatgcaaacagctgcagctctgtgattaaaatgttaaggtcactagaatagtgttaggaaaatgttaatagataattctgctgcctctattagcttatgtatgatccttaatagcattgcttccccttcagtttctatttaggaggtgaagaatcttttaataaggtagaaagttgctttatttaaatttgtactgtagaatgtttgtgatacagtatttgtaaaattgatatgaaaaataatttctcaaagtctattgtttgatctagttattttaataaaggaactctagaagtttcaagtggccagtgaagtgtgaggaatagagagtaaaggaaataattaataatggtgaccctctgttaagtggtttactttttccattaatataaatttcatttggaaagattaaaaaaacaagtttgattgaacttgataaatcagaaatatttaaaaaaaaaaaaaaaaaaaaaaaaaaaaaaaaaaaaaaaaaaaaaaaaaaaa

SEQ ID NO: 806 - DNA, 2073 bp, Homo sapiens
cgctgtttcgtgggaccaggattgaaacaagatggcgggttcgtggtgagaagccgtcaagcaggagtagaaattggtatgcttagaagcagattctaaaagcagtttctcttcagaacatcttttttcataccacttgataagcatcttgaaacaccatggctgtagctgcagtaaaatgggtgatgtcaaagagaactatcttgaaacatttatttccagtccaaaatggagctttatattgtgtttgtcataaatctacgtattctcctctaccagatgactataattgcaacgtagagcttgctctgacttctgatggcaggacaatagtatgctaccacccttctgtggacattccatatgaacacacaaaacctatccctcggccagatcctgtgcataataatgaagaaacacatgatcaagtgctgaaaaccagattggaagaaaaagttgaacaccttgaggaaggacctatgatagaacaacttagcaaaatgttctttactactaagcaccgttggtatcctcatggacggtatcacagatgtcgtaagaatctgaatcctccaaaagacagatgatgcggaggttcctgggggaatcaaagagaaatgtgcctcatttgccatttgagaaaatgcagtctggtgtattcagtaatatatagtaaagtaataatgataaaatatcttttcatatattagaatgtgtacttttatataaagtaattctggatttgacattctcatttagagaaacctattttcttttttctttttctattttagtgtttcatttatgtgcggtctccaatttaggacttttccatagtgccaaagccatacatattcagtagaacatcaataaattacatcagaaattcaacactttattataaaacgggcttcgtgttagataattttgctaaacagtaggctactgtaagtgttctgagcatatttaagacaggctagcattttcaatttacaatattttcaactgatagtaggtttattgggatgtaaccctatgataagttgagaaacatctctttttgtgtgtctactgtgatttaagtatttttaatcatcagccaagcattgttagtagtataaatatgattaataaaaatgtgcatggctttcctgaaggagattttttaattgcctttgagaataaactcataaggtctaccaagaaaataaatgttatgatgtttcagttggcttctaggaaataattaaattagtgatattttaatcaggttttactatctgctaggccccttccatcaattcttattaaattctcaaaataatcctttgaaaagggagtataattacattttacagtgactcgaaccttacccaaacaagtgggagagccaggagccaaactatcaggctccaaagcttttttttagtgcatcacaatgacaaaggggtggttttctttcacccaagaatgtgctttcctggaaatttttctagatagaatattatgtaatttgttttgaaggttttttttcctgactgtcttaaagattatgctagctttagaacacatgcaaacagctgcagctctgtgattaaaatgttaaggtcactagaatagtgttaggaaaatgttaatagataattctgctgcctctattagcttatgtatgatccttaatagcattgcttccccttcagtttctatttaggaggtgaagaatcttttaataaggtagaaagttgctttatttaaatttgtactgtagaatgtttgtgatacagtatttgtaaaattgatatgaaaaataatttctcaaagtctattgtttgatctagttattttaataaaggaactctagaagtttcaagtggccagtgaagtgtgaggaatagagagtaaaggaaataattaataatggtgaccctctgttaagtggtttactttttccattaatataaatttcatttggaaagattaaaaaaacaagtttgattgaacttgataaatcagaaatatttaaaaaaaaaaaaaaaaaaaaaaaaaaaaaaaaaaaaaaaaaaaaaaaaaaaa

SEQ ID NO: 807 - DNA, 2093 bp, Homo sapiens
cgctgtttcgtgggaccaggattgaaacaagatggcgggttcgtggtgagaagccgtcaagcaggagtagaaattggtatgcttagaagcagattctaaaagcagtttctcttcagaacatcttttttcataccacttgataagcatcttgaaacaccatggctgtagctgcagtaaaatgggtgatgtcaaagagaactatcttgaaacatttatttccagtccaaaattcgggcgtacatgtgcagatggagctttatattgtgtttgtcataaatctacgtattctcctctaccagatgactataattgcaacgtagagcttgctctgacttctgatggcaggacaatagtatgctaccacccttctgtggacattccatatgaacacacaaaacctatccctcggccagatcctgtgcataataatgaagaaacacatgatcaagtgctgaaaaccagattggaagaaaaagttgaacaccttgaggaaggacctatgatagaacaacttagcaaaatgttctttactactaagcaccgttggtatcctcatggacggtatcacagatgtcgtaagaatctgaatcctccaaaagacagatgatgcggaggttcctgggggaatcaaagagaaatgtgcctcatttgccatttgagaaaatgcagtctggtgtattcagtaatatatagtaaagtaataatgataaaatatcttttcatatattagaatgtgtacttttatataaagtaattctggatttgacattctcatttagagaaacctattttcttttttctttttctattttagtgtttcatttatgtgcggtctccaatttaggacttttccatagtgccaaagccatacatattcagtagaacatcaataaattacatcagaaattcaacactttattataaaacgggcttcgtgttagataattttgctaaacagtaggctactgtaagtgttctgagcatatttaagacaggctagcattttcaatttacaatattttcaactgatagtaggtttattgggatgtaaccctatgataagttgagaaacatctctttttgtgtgtctactgtgatttaagtatttttaatcatcagccaagcattgttagtagtataaatatgattaataaaaatgtgcatggctttcctgaaggagattttttaattgcctttgagaataaactcataaggtctaccaagaaaataaatgttatgatgtttcagttggcttctaggaaataattaaattagtgatattttaatcaggttttactatctgctaggccccttccatcaattcttattaaattctcaaaataatcctttgaaaagggagtataattacattttacagtgactcgaaccttacccaaacaagtgggagagccaggagccaaactatcaggctccaaagcttttttttagtgcatcacaatgacaaaggggtggttttctttcacccaagaatgtgctttcctggaaatttttctagatagaatattatgtaatttgttttgaaggttttttttcctgactgtcttaaagattatgctagctttagaacacatgcaaacagctgcagctctgtgattaaaatgttaaggtcactagaatagtgttaggaaaatgttaatagataattctgctgcctctattagcttatgtatgatccttaatagcattgcttccccttcagtttctatttaggaggtgaagaatcttttaataaggtagaaagttgctttatttaaatttgtactgtagaatgtttgtgatacagtatttgtaaaattgatatgaaaaataatttctcaaagtctattgtttgatctagttattttaataaaggaactctagaagtttcaagtggccagtgaagtgtgaggaatagagagtaaaggaaataattaataatggtgaccctctgttaagtggtttactttttccattaatataaatttcatttggaaagattaaaaaaacaagtttgattgaacttgataaatcagaaatatttaaaaaaaaaaaaaaaaaaaaaaaaaaaaaaaaaaaaaaaaaaaaaaaaaaaa

SEQ ID NO: 808 - DNA, 1273 bp, Homo sapiens
gggggccctctcaccccgctgcctctaggttctgggaagatggcgaaggtctcagagctttacgatgtcacttgggaagaaatgagagataaaatgagaaaatggagagaagaaaactcaagaaatagtgagcaaattgtggaagttggagaagaattaattaatgaatatgcttctaagctgggagatgatatttggatcatatatgaacaggtgatgattgcagcactagactatggtcgggatgacttggcattgttttgtcttcaagagctgagaagacagttccctggcagtcacagagtcaagcgattaacaggcatgagatttgaagccatggaaagatatgatgatgctatacagctatatgataggattttacaagaagatccaactaacactgctgcaagaaagcgtaagattgccattcgaaaagcccaggggaaaaatgtggaggccattcgggagctgaatgagtatctggaacaatttgttggagaccaagaagcctggcatgaacttgcagaactttacatcaatgaacatgactatgcaaaagcagccttttgtttagaggaactaatgatgactaatccacacaaccacttatactgtcagcagtatgctgaagttaagtatacccaaggtggacttgaaaacctcgaactttcaagaaagtattttgcacaggcattgaaactgaacaacagaaatatgagagctttgtttggactttatatgtcggcaagtcatattgcttctaatccaaaagcaagtgcaaaaacgaaaaaggacaacatgaaatatgctagttgggcagctagtcaaataaacagagcttatcagtttgcaggtcgaagtaagaaggaaaccaaatattctcttaaggctgtcgaagacatgttggaaacattgcagatcacccagtcttaaggtttcaaaaactctttgacattagatttcacaactgcacaattgaacttattggcctgtaacttatttactaaatgctcagtgctatttatatactacagtaattttctgttaagaaggcagttgtaaagaatgtgtttatataaacctaaaaatgccttttactgctaagtggggagatgggggaaatccatggaagagagatttaagacttattgattgtacatcagtctcttcatatcacatatacatgtatatatataaaactctaatgtagtataaccttgttaaataaaccatgatgatttacaaaaaaaaaaaaaaaaaaaaaaaaaaaaaa

SEQ ID NO: 809 - DNA, 4496 bp, Homo sapiens
gggagccccgaccgtcacgagcgtcgaagagacaaagccgcgtcagggggcccggccggggcgggggagcccggggcttgttggtgccccagcccgcgcggagggcccttcggacccgcgcgccgccgctgccgccgccgccgcctcgcaacaggtccgggcggcctcgctctccgctcccctcccccgcatccgcgaccctccggggcacctcagctcggccggggccgcagtctggccacccgcttccatgcggttcgggtccaagatgatgccgatgtttcttaccgtgtatctcagtaacaatgagcagcacttcacagaagttccagttactccagaaacaatatgcagagacgtggtggatctgtgcaaagaacccggcgagagtgattgccatttggctgaagtgtggtgtggctctgaacgtccagttgcggataatgagcgaatgtttgatgttcttcaacgatttggaagtcagaggaacgaagttcgcttcttccttcgtcatgaacgcccccctggcagggacattgtgagtggaccaagatctcaggatccaagtttaaaaagaaatggtgtaaaagttcctggtgaatatcgaagaaaggagaacggtgttaatagtcctaggatggatctgactcttgctgaacttcaggaaatggcatctcgccagcagcaacagattgaagcccagcaacaattgctggcaactaaggaacagcgcttaaagtttttgaaacaacaagatcagcgacaacagcaacaagttgctgagcaggagaaacttaaaaggctaaaagaaatagctgagaatcaggaagctaagctaaaaaaagtgagagcacttaaaggccacgtggaacagaagagactaagcaatgggaaacttgtggaggaaattgaacagatgaataatttgttccagcaaaaacagagggagctcgtcctggctgtgtcaaaagtagaagaactgaccaggcagctagagatgctcaagaacggcaggatcgacagccaccatgacaatcagtctgcagtggctgagcttgatcgcctctataaggagctgcagctaagaaacaaattgaatcaagagcagaatgccaagctacaacaacagagggagtgtttgaataagcgtaattcagaagtggcagtcatggataagcgtgttaatgagctgagggaccggctgtggaagaagaaggcagctctacagcaaaaagaaaatctaccagtttcatctgatggaaatcttccccagcaagccgcgtcagccccaagccgtgtggctgcagtaggtccctatatccagtcgtctactatgcctcggatgccctcaaggcctgaattgctggtgaagccagccctgccggatggttccttggtcattcaggcttcagaggggccgatgaaaatacagacactgcccaacatgagatctggggctgcttcacaaactaaaggctctaaaatccatccagttggccctgattggagtccttcaaatgcagatcttttcccaagccaaggctctgcttctgtacctcaaagcactgggaatgctctggatcaagttgatgatggagaggttccgctgagggagaaagagaagaaagtgcgtccgttctcaatgtttgatgcagtagaccagtccaatgccccaccttcctttggtactctgaggaagaaccagagcagtgaagatatcttgcgggatgctcaggttgcaaataaaaatgtggctaaagtaccacctcctgttcctacaaaaccaaaacagattaatttgccttattttggacaaactaatcagccaccttcagacattaagccagacggaagttctcagcagttgtcaacagttgttccgtccatgggaactaaaccaaaaccagcagggcagcagccgagagtgctgctatctcccagcataccttcggttggccaagaccagaccctttctccaggttctaagcaagaaagtccacctgctgctgccgtccggccctttactccccagccttccaaagacaccttacttccacccttcagaaaaccccagaccgtggcagcaagttcaatatattccatgtatacgcaacagcaggcgccaggaaaaaacttccagcaggctgtgcagagcgcgttgaccaagactcataccagagggccacacttttcaagtgtatatggtaagcctgtaattgctgctgcccagaatcaacagcagcacccagagaacatttattccaatagccagggcaagcctggcagtccagaacctgaaacagagcctgtttcttcagttcaggagaaccatgaaaacgaaagaattcctcggccactcagcccaactaaattactgcctttcttatctaatccttaccgaaaccagagtgatgctgacctagaagccttacgaaagaaactgtctaacgcaccaaggcctctaaagaaacgtagttctattacagagccagagggtcctaatgggccaaatattcagaagcttttatatcagaggaccaccatagcggccatggagaccatctctgtcccatcatacccatccaagtcagcttctgtgactgccagctcagaaagcccagtagaaatccagaatccatatttacatgtggagcccgaaaaggaggtggtctctctggttcctgaatcattgtccccagaggatgtggggaatgccagtacagagaacagtgacatgccagctccttctccaggccttgattatgagcctgagggagtcccagacaacagcccaaatctccagaataacccagaagaaccaaatccagaggctccacatgtgcttgatgtgtacctggaggagtaccctccatacccacccccaccatacccatctggggagcctgaagggcccggagaagactcggtgagcatgcgcccgcctgaaatcaccgggcaggtctctctgcctcctggtaaaaggacaaacttgcgtaaaactggctcagagcgtatcgctcatggaatgagggtgaaattcaacccccttgctttactgctagattcgtctttggagggagaatttgaccttgtacagagaattatttatgaggttgatgacccaagcctccccaatgatgaaggcatcacggctcttcacaatgctgtgtgtgcaggccacacagaaatcgttaagttcctggtacagtttggtgtaaatgtaaatgctgctgatagtgatggatggactccattacattgtgctgcctcatgtaacaacgtccaagtgtgtaagtttttggtggagtcaggagccgctgtgtttgccatgacctacagtgacatgcagactgctgcagataagtgcgaggaaatggaggaaggctacactcagtgctcccaatttctttatggagttcaggagaagatgggcataatgaataaaggagtcatttatgcgctttgggattatgaacctcagaatgatgatgagctgcccatgaaagaaggagactgcatgacaatcatccacagggaagacgaagatgaaatcgaatggtggtgggcgcgccttaatgataaggagggatatgttccacgtaacttgctgggactgtacccaagaattaaaccaagacaaaggagcttggcctgaaacttccacacagaattttagtcaatgaagaattaatctctgttaagaagaagtaatacgattatttttggcaaaaatttcacaagacttattttaatgacaatgtagcttgaaagcgatgaagaatgtctctagaagagaatgaaggattgaagaattcaccattagaggacatttagcgtgatgaaataaagcatctacgtcagcaggccatactgtgttggggcaaaggtgtcccgtgtagcactcagataagtatacagcgacaatcctgttttctacaagaatcctgtctagtaaataggatcatttattgggcagttgggaaatcagctctctgtcctgttgagtgttttcagcagctgctcctaaaccagtcctcctgccagaaaggaccagtgccgtcacatcgctgtctctgattgtccccggcaccagcaggcccttggggggctcacctgaaggctcgaaggcactgcacacttgtatattgtcagtgaagaactgttagttggttgtcagtgaacaataactttattatatgagtttttgtagcatcttaagaattatacatatgtttgaaatattgaaactaagctacggtaccagtaattagatgtagaatcttgtttgtaggctgaattttaatctgtatttattgtcttttgtatctcagaaattagaaacttgctacagacttacccgtaatatttgtcaagatcatagctgactttaaaaacagttgtaataaactttttgatgctaaaaaaaaaaaaaaaaaaaaaaaaaaaaaaaaaaaaaaaaaaaaaaaaaaaaaaaaaaaaaaaaaaaaaaaaaaaaa

SEQ ID NO: 810 - DNA, 4534 bp, Homo sapiens
gtcacgagcgtcgaagagacaaagccgcgtcagggggcccggccggggcgggggagcccggggcttgttggtgccccagcccgcgcggagggcccttcggacccgcgcgccgccgctgccgccgccgccgcctcgcaacaggtccgggcggcctcgctctccgctcccctcccccgcatccgcgaccctccggggcacctcagctcggccggggccgcagtctggccacccgcttccatgcggttcgggtccaagatgatgccgatgtttcttaccgtgtatctcagtaacaatgagcagcacttcacagaagttccagttactccagaaacaatatgcagagacgtggtggatctgtgcaaagaacccggcgagagtgattgccatttggctgaagtgtggtgtggctctgtagagatagagtttcatcatgttggccaggatggtctcgatctcctgaccttgtgatccgcctgcctcggcctcccaaagtgctggattacaggtgtgagccaccacgatcagcctctagtgtttaaaaaagaacgtccagttgcggataatgagcgaatgtttgatgttcttcaacgatttggaagtcagaggaacgaagttcgcttcttccttcgtcatgaacgcccccctggcagggacattgtgagtggaccaagatctcaggatccaagtttaaaaagaaatggtgtaaaagttcctggtgaatatcgaagaaaggagaacggtgttaatagtcctaggatggatctgactcttgctgaacttcaggaaatggcatctcgccagcagcaacagattgaagcccagcaacaattgctggcaactaaggaacagcgcttaaagtttttgaaacaacaagatcagcgacaacagcaacaagttgctgagcaggagaaacttaaaaggctaaaagaaatagctgagaatcaggaagctaagctaaaaaaagtgagagcacttaaaggccacgtggaacagaagagactaagcaatgggaaacttgtggaggaaattgaacagatgaataatttgttccagcaaaaacagagggagctcgtcctggctgtgtcaaaagtagaagaactgaccaggcagctagagatgctcaagaacggcaggatcgacagccaccatgacaatcagtctgcagtggctgagcttgatcgcctctataaggagctgcagctaagaaacaaattgaatcaagagcagaatgccaagctacaacaacagagggagtgtttgaataagcgtaattcagaagtggcagtcatggataagcgtgttaatgagctgagggaccggctgtggaagaagaaggcagctctacagcaaaaagaaaatctaccagtttcatctgatggaaatcttccccagcaagccgcgtcagccccaagccgtgtggctgcagtaggtccctatatccagtcatctactatgcctcggatgccctcaaggcctgaattgctggtgaagccagccctgccggatggttccttggtcattcaggcttcagaggggccgatgaaaatacagacactgcccaacatgagatctggggctgcttcacaaactaaaggctctaaaatccatccagttggccctgattggagtccttcaaatgcagatcttttcccaagccaaggctctgcttctgtacctcaaagcactgggaatgctctggatcaagttgatgatggagaggttccgctgagggagaaagagaagaaagtgcgtccgttctcaatgtttgatgcagtagaccagtccaatgccccaccttcctttggtactctgaggaagaaccagagcagtgaagatatcttgcgggatgctcaggttgcaaataaaaatgtggctaaagtaccacctcctgttcctacaaaaccaaaacagattaatttgccttattttggacaaactaatcagccaccttcagacattaagccagacggaagttctcagcagttgtcaacagttgttccgtccatgggaactaaaccaaaaccagcagggcagcagccgagagtgctgctatctcccagcataccttcggttggccaagaccagaccctttctccaggttctaagcaagaaagtccacctgctgctgccgtccggccctttactccccagccttccaaagacaccttacttccacccttcagaaaaccccagaccgtggcagcaagttcaatatattccatgtatacgcaacagcaggcgccaggaaaaaacttccagcaggctgtgcagagcgcgttgaccaagactcataccagagggccacacttttcaagtgtatatggtaagcctgtaattgctgctgcccagaatcaacagcagcacccagagaacatttattccaatagccagggcaagcctggcagtccagaacctgaaacagagcctgtttcttcagttcaggagaaccatgaaaacgaaagaattcctcggccactcagcccaactaaattactgcctttcttatctaatccttaccgaaaccagagtgatgctgacctagaagccttacgaaagaaactgtctaacgcaccaaggcctctaaagaaacgtagttctattacagagccagagggtcctaatgggccaaatattcagaagcttttatatcagaggaccaccatagcggccatggagaccatctctgtcccatcatacccatccaagtcagcttctgtgactgccagctcagaaagcccagtagaaatccagaatccatatttacatgtggagcccgaaaaggaggtggtctctctggttcctgaatcattgtccccagaggatgtggggaatgccagtacagagaacagtgacatgccagctccttctccaggccttgattatgagcctgagggagtcccagacaacagcccaaatctccagaataacccagaagaaccaaatccagaggctccacatgtgcttgatgtgtacctggaggagtaccctccatacccacccccaccatacccatctggggagcctgaagggcccggagaagactcggtgagcatgcgcccgcctgaaatcaccgggcaggtctctctgcctcctggtaaaaggacaaacttgcgtaaaactggctcagagcgtatcgctcatggaatgagggtgaaattcaacccccttgctttactgctagattcgtctttggagggagaatttgaccttgtacagagaattatttatgaggttgatgacccaagcctgcccaatgatgaaggcatcacggctcttcacaatgctgtgtgtgcaggccacacagaaatcgttaagttcctggtacagtttggtgtaaatgtaaatgctgctgatagtgatggatggactccattacattgtgctgcctcatgtaacaacgtccaagtgtgtaagtttttggtggagtcaggagccgctgtgtttgccatgacctacagtgacatgcagactgctgcagataagtgcgaggaaatggaggaaggctacactcagtgctcccaatttctttatggagttcaggagaagatgggcataatgaataaaggagtcatttatgcgctttgggattatgaacctcagaatgatgatgagctgcccatgaaagaaggagactgcatgacaatcatccacagggaagacgaagatgaaatcgaatggtggtgggcgcgccttaatgataaggagggatatgttccacgtaacttgctgggactgtacccaagaattaaaccaagacaaaggagcttggcctgaaacttccacacagaattttagtcaatgaagaattaatctctgttaagaagaagtaatacgattatttttggcaaaaatttcacaagacttattttaatgacaatgtagcttgaaagcgatgaagaatgtctctagaagagaatgaaggattgaagaattcaccattagaggacatttagcgtgatgaaataaagcatctacgtcagcaggccatactgtgttggggcaaaggtgtcccgtgtagcactcagataagtatacagcgacaatcctgttttctacaagaatcctgtctagtaaataggatcatttattgggcagttgggaaatcagctctctgtcctgttgagtgttttcagcagctgctcctaaaccagtcctcctgccagaaaggaccagtgccgtcacatcgctgtctctgattgtccccggcaccagcaggccttggggctcactgaaggctcgaaggcactgcacaccttgtatattgtcagtgaagaacgttagttggttgtcagtgaacaataactttattatatgagtttttgtagcatcttaagaattatacatatgtttgaaatattgaaactaagctacagtaccagtaattagatgtagaatcttgtttgtaggctgaattttaatctgtatttattgtcttttgtatctcagaaattagaaacttgctacagacttacccgtaatatttgtcaagatcatagctgactttaaaaacagttgtaataaactttttgatgct

SEQ ID NO: 811 - DNA, 3252 bp, Homo sapiens
cgcacggcctggtttgcacccctggtttagggtcttcggccccggctctggcgtccctggctgccaagcctgaggcccgcagtcctactcccgccgagacccgccgctccggtcctgccccgaactgcccacggccggcagcgcttccaggccctgaaaaaaactctcttcctgtgtctggccagaggtatagagagagacaggttcaactctaaggcctgaaaaggaacaaggcccaccggaagcaatggccactgtccctggcctccagcccctgccaaccttggagcaggacctggaacaggaagagatcctgattgtgaaggtggaggaggacttctgcttggaagaggagccctccgtggagacggaggaccccagccctgagactttccgccagctcttccggctcttctgctaccaggaggtggctgggccccgggaggccctgagccgcctctgggagctgtgctgccgctggctgcggccggagctgcgcaccaaggagcagatcctggagctgctggtgctggagcagttcctgactgtgctgccgggggagatccaggctcgggtacgcgagcagcagccggagagcggtgaggaggccgtggtcctcgtggaagggctgcagcggaagcccaggaaacacaggcagcggggctcagagctgctttctgatgacgaggtgcccctcgggatagggggacagttcttaaaacaccaggcagaggctcagccagaggatctgtccctggaggaagaggctcgattctccagccagcagcccccagcccagctgagccacaggccacagaggggcccgctgttgtggccagagagaggccctccagctccccggcatcaggagatggcgtcagcctcgcccttcctttcggcctggtcccaggtgcccgtgaacttggaggacgtggctgtatacctttctggggaggagccaagatgcatggacccagctcagcgggacgcgccgctggagaatgaaggacctgggatccagttggaggacggcggtgatggcagggaggatgccccgttgagaatggagtggtaccgagtgctctcggcacgatgccaggggcctggccacccgctcccaggtcagaggccagccccagtcaggggcttggtcaggcctgatcagccaagaggcggccccccaccaggaagacgggcttcccatggggctgacaagccgtacacctgccccgaatgtggcaaaggcttcagcaagacgtcccacttgaccaagcaccagcgcacacacacgggcgagcggccttacaagtgcctagtctgtgggaagggctttagcgaccgctccaacttcagcacgcaccagagggtgcacacaggcgagaagccctacccgtgccccgagtgtgggaagcgcttcagccagagctccagcctggtcatccaccgcaggacacacagcggggagcggccctatgcctgcacccagtgcgggaagcgcttcaacaacagctcgcacttcagcgcccaccgccggacgcacacaggtgagaagccctacacctgcccggcctgtggccggggcttccgccggggcaccgacctgcacaagcaccagcggacccacatgggggcaggctccttgccgacgctccagccggtggctcctggaggccccggtgcaaaagcctgatcaccaggcctgaaactccctttccaggactctcatccctgggcacagaattcaggaaactgctagacagcctggtccgaaagcattgccagctgcccgtttcctcccatggcccagtatgaggccagcaggggacatttgggatgcccaggccgcagaggaagctgggcactgggtgcagaacaagggcaaggacaggctctgagtgtccagtggcagccagaacaggtgacacagagcaggggcttcagccacagagacacactcaggaggccagaagccgacactcaaggtgttcgtggggctggctcctgaagggcctgggagggtccatcagctgcctccagcatccagtggctgctggcatacagcctcatccccacgtcccaacccctctcctgtgtgtctgtgaccctgtgcgctgtctctgtgtgtaccccccacctgctcccccccccttttttttttgagacggggccttgctgtgtcccccaggcgggaatacagtgccatgatcatagctcactgcagcctcgaatccctgggctcaagtgttcctcctgcctcatcctcctgagtagctggggttacaggtgtgtgccgccatgcccagtctcttttttggtagggccaccactcactgggtttagggtcccccaatacactgtgacctcatcttaactaattatatcatcaaaacccgtgtttccaaataaggtcacattctgaggtctgggtgcacatgaatttgagggacccctcgtctgctgcagggagccctgctgtaccccagccttcccaggacgtggtctccagcttcttcatcctgccagagtttccaaatggagcccggggctctgcagcattccagtcccctttgcagatccatagctgctctgcagggcggaagacacctggggcgggaaagcacccctgagttccatcttcctgacatgttgcctgggatgtgacgggcctgacatctccccagggccggggcccagggctgcgtttgctcctggccccttagtgtctggaatgtggccttccacggttgccccactttgtctttctaaggtaagaagccttcaccttccagcttttgtctggcctgtgctgcgtgggagccactggtctgtgcacatccacggtgggtgagtggccaagacaagcagtgtgatagagtccttggtgggtttagtcatctcggaagtcgtagggcagctatggaaaccactgggttctggaacgttccagccaggcagtggttgttcctcataggtaggtggccttggccttcatcccagcctgggatgctccattgcatttgtcacctagtcactgtatatacgtgcacatttgaccttttggcacagcccaggttccaggtgcgtgacctgccctttttctcattcccttaactgacattatttagtgtcagaggccgagcacagtggctcccacctataatcctagcactttgggaggccaacgcgggtggattgcttgagcccaggagttcaagagcagcctgggcaatatagaaagacctcttccctacc

SEQ ID NO: 812 - DNA, 2206 bp, Homo sapiens
ggaggaggaggaggaggaggaagaagaggtagcggcaaggtcgcggtctgaggttccggtgctcgccgccgcccagctcccagccgaggctttctcaaccgcgtcaataaaaggccgccccgacccgcccccgcgccccgcagccctgccggacaccccgggctgcagctgagcgggcgcagacgggccgaggcgggcgccgggcgcgcagggaccgagggaccgagtgctccccatgagcgcacgtgggccgggcggtccgcaagcccggctgagagcgcgccatggggcaggcgggctgcaaggggctctgcctgtcgctgttcgactacaagaccgagaagtatgtcatcgccaagaacaagaaggtgggcctgctgtaccggctgctgcaggcctccatcctggcgtacctggtcgtatgggtgttcctgataaagaagggttaccaagacgtcgacacctccctgcagagtgctgtcatcaccaaagtcaagggcgtggccttcaccaacacctcggatcttgggcagcggatctgggatgtcgccgactacgtcattccagcccagggagagaacgtcttttttgtggtcaccaacctgattgtgacccccaaccagcggcagaacgtctgtgctgagaatgaaggcattcctgatggcgcgtgctccaaggacagcgactgccacgctggggaagcggttacagctggaaacggagtgaagaccggccgctgcctgcggagagagaacttggccaggggcacctgtgagatctttgcctggtgcccgttggagacaagctccaggccggaggagccattcctgaaggaggccgaagacttcaccattttcataaagaaccacatccgtttccccaaattcaacttctccaaaagcaatgtgatggacgtcaaggacagatctttcctgaaatcatgccactttggccccaagaaccactactgccccatcttccgactgggctccgtgatccgctgggccgggagcgacttccaggatatagccctggagggtggcgtgataggaattaatattgaatggaactgtgatcttgataaagctgcctctgagtgccaccctcactattcttttagccgtctggacaataaactttcaaagtctgtctcctccgggtacaacttcagatttgccagatattaccgagacgcagccggggtggagttccgcaccctgatgaaagcctacgggatccgctttgacgtgatggtgaacggcaagggtgctttcttctgcgacctggtactcatctacctcatcaaaaagagagagttttaccgtgacaagaagtacgaggaagtgaggggcctagaagacagttcccaggaggccgaggacgaggcatcggggctggggctatctgagcagctcacatctgggccagggctgctggggatgccggagcagcaggagctgcaggagccacccgaggcgaagcgtggaagcagcagtcagaaggggaacggatctgtgtgcccacagctcctggagccccacaggagcacgtgaattgcctctgcttacgttcaggccctgtcctaaacccagccgtctagcacccagtgatcccatgcctttgggaatcccaggatgctgcccaacgggaaatttgtacattgggtgctatcaatgccacatcacagggaccagccatcacagagcaaagtgacctccacgtctgatgctggggtcatcaggacggacccatcatggctgtctttttgccccaccccctgccgtcagttcttcctttctccgtggctggcttcccgcactagggaacgggttgtaaatggggaacatgacttccttccggagtccttgagcacctcagctaaggaccgcagtgccctgtagagttcctagattacctcactgggaatagcattgtgcgtgtccggaaaagggctccatttggttccagcccactcccctctgcaagtgccgcagcttccctcagagcatactctccagtggatccaagtactctctctcctaaagacaccaccttcctgccagctgtttgcccttaggccagtacacagaattaaagtgggggagatggcagacgctttctgggacctgcccaagatatgtattctctgacactcttatttggtcataaaacaataaatggtgtcaatttcaaaaaaaaaaaaaaa

SEQ ID NO: 813 - DNA, 2150 bp, Homo sapiens
ggaggaggaggaggaggaggaagaagaggtagcggcaaggtcgcggtctgaggttccggtgctcgccgccgcccagctcccagccgaggctttctcaaccgcgtcaataaaaggccgccccgacccgcccccgcgccccgcagccctgccggacaccccgggctgcagctgagcgggcgcagacgggccgaggcgggcgccgggcgcgcagggaccgagggaccgagtgctccccatgagcgcacgtgggccgggcggtccgcaagcccggctgagagcgcgccatggggcaggcgggctgcaaggggctctgcctgtcgctgttcgactacaagaccgagaagtatgtcatcgccaagaacaagaaggtgggcctgctgtaccggctgctgcaggcctccatcctggcgtacctggtcgtatgggtgttcctgataaagaagggttaccaagacgtcgacacctccctgcagagtgctgtcatcaccaaagtcaagggcgtggccttcaccaacacctcggatcttgggcagcggatctgggatgtcgccgactacgtcattccagcccagaatgaaggcattcctgatggcgcgtgctccaaggacagcgactgccacgctggggaagcggttacagctggaaacggagtgaagaccggccgctgcctgcggagagagaacttggccaggggcacctgtgagatctttgcctggtgcccgttggagacaagctccaggccggaggagccattcctgaaggaggccgaagacttcaccattttcataaagaaccacatccgtttccccaaattcaacttctccaacaatgtgatggacgtcaaggacagatctttcctgaaatcatgccactttggccccaagaaccactactgccccatcttccgactgggctccgtgatccgctgggccgggagcgacttccaggatatagccctggagggtggcgtgataggaattaatattgaatggaactgtgatcttgataaagctgcctctgagtgccaccctcactattcttttagccgtctggacaataaactttcaaagtctgtctcctccgggtacaacttcagatttgccagatattaccgagacgcagccggggtggagttccgcaccctgatgaaagcctacgggatccgctttgacgtgatggtgaacggcaagggtgctttcttctgcgacctggtactcatctacctcatcaaaaagagagagttttaccgtgacaagaagtacgaggaagtgaggggcctagaagacagttcccaggaggccgaggacgaggcatcggggctggggctatctgagcagctcacatctgggccagggctgctggggatgccggagcagcaggagctgcaggagccacccgaggcgaagcgtggaagcagcagtcagaaggggaacggatctgtgtgcccacagctcctggagccccacaggagcacgtgaattgcctctgcttacgttcaggccctgtcctaaacccagccgtctagcacccagtgatcccatgcctttgggaatcccaggatgctgcccaacgggaaatttgtacattgggtgctatcaatgccacatcacagggaccagccatcacagagcaaagtgacctccacgtctgatgctggggtcatcaggacggacccatcatggctgtctttttgccccaccccctgccgtcagttcttcctttctccgtggctggcttcccgcactagggaacgggttgtaaatggggaacatgacttccttccggagtccttgagcacctcagctaaggaccgcagtgccctgtagagttcctagattacctcactgggaatagcattgtgcgtgtccggaaaagggctccatttggttccagcccactcccctctgcaagtgccgcagcttccctcagagcatactctccagtggatccaagtactctctctcctaaagacaccaccttcctgccagctgtttgcccttaggccagtacacagaattaaagtgggggagatggcagacgctttctgggacctgcccaagatatgtattctctgacactcttatttggtcataaaacaataaatggtgtcaatttcaaaaaaaaaaaaaaaaaaaaaaaaaaaaaaaaaa

SEQ ID NO: 814 - DNA, 958 bp, Homo sapiens
ggaggaggaggaggaggaggaagaagaggtagcggcaaggtcgcggtctgaggttccggtgctcgccgccgcccagctcccagccgaggctttctcaaccgcgtcaataaaaggccgccccgacccgcccccgcgccccgcagccctgccggacaccccgggctgcagctgagcgggcgcagacgggccgaggcgggcgccgggcgcgcagggaccgagggaccgagtgctccccatgagcgcacgtgggccgggcggtccgcaagcccggctgagagcgcgccatggggcaggcgggctgcaaggggctctgcctgtcgctgttcgactacaagaccgagaagtatgtcatcgccaagaacaagaaggtgggcctgctgtaccggctgctgcaggcctccatcctggcgtacctggtcgtatgggtgttcctgataaagaagggttaccaagacgtcgacacctccctgcagagtgctgtcatcaccaaagtcaagggcgtggccttcaccaacacctcggatcttgggcagcggatctgggatgtcgccgactacgtcattccagcccagggagagaacgtcttttttgtggtcaccaacctgattgtgacccccaaccagcggcagaacgtctgtgctgagaatgaaggcattcctgatggcgcgtgctccaaggacagcgactgccacgctggggaagcggttacagctggaaacggagtgaagaccggccgctgcctgcggagagagaacttggccaggggcacctgtgagatctttgcctggtgcccgttggagacaagctccaggccggagtgagtggctgcagcctcaggaccctgaggggtttcccagccccgtgcggtgggtcccagcctgagggtggagtcctgcccactctgggagcctcacgctgagggaggagtcaggctgtcccagcgaggcccgacggcctc

SEQ ID NO: 815 - DNA, 4259 bp, Homo sapiens
gagtccccggcgtgcagtggagcctcgctgggggaaatgacagcttggaccatgggcgcccgcggtctggacaagcgaggaagtttctttaagctcattgacacaattgcctcggagatcggagaactgaaacaggagatggtgcggacagatgtcaacctggaaaatggcctggaacccgctgaaacccacagcatggtaagacacaaggatggtggctattccgaggaagaggacgtgaagacctgtgcccgggactcaggctatgacagcctctccaacaggctcagcatcttggaccggctcctccacacccaccccatatggctgcagctgagtctgagtgaggaggaggcagcagaggtcctgcaggcccagcctccggggatcttcctggttcataaatctaccaagatgcagaagaaagtcctctccctccgcctgccctgtgaatttggggccccactcaaggaatttgccataaaggaaagcacatacaccttttccctggaaggctcaggaatcagtttcgcagatttattccggctcattgctttctactgcatcagcagggatgttctaccatttaccttgaagttgccttatgccatttcaacagccaagtcggaggctcagcttgaagaactggcccagatgggactaaatttctggagctccccagctgacagcaaacccccgaaccttccacctccccataggcctctttcctccgacggtgtctgtcctgcctccctgcgtcagctctgccttataaatggagtgcattctatcaaaaccaggacgccttcagagctggagtgcagccagaccaacggggccctgtgctttattaatccccttttcttgaaagtgcacagccaggacctcagtggaggcctgaaacggccgagcacaaggactcccaacgcgaatggcacggagcggactcggtcccccccacccaggcccccgccacccgctattaatagtctccacacaagccctcggctggccaggactgaaacccagacgagcatgccagaaacagtcaaccataacaaacatgggaacgtagctctgcctggaacgaaaccaactcccatccctccaccccggctgaagaagcaggcttcttttctggaagcagagggcggtgcaaagaccttgagcggcggccggccgggcgcaggcccggagctggagctgggcacagctggcagcccaggtggggccccgcctgaggccgccccgggggattgcacaagggccccgccgcccagctctgaatcacggcccccgtgccatggaggccggcagcggctgagcgacatgagcatttctacttcctcctccgactcgctggagttcgaccggagcatgcctctgtttggctacgaggcggacaccaacagcagcctggaggactacgagggggaaagtgaccaagagaccatggcgccccccatcaagtccaaaaagaaaaggagcagctccttcgtgctgcccaagctcgtcaagtcccagctgcagaaggtgagcggggtgttcagctccttcatgaccccggagaagcggatggtccgcaggatcgccgagctttcccgggacaaatgcacctacttcgggtgcttagtgcaggactacgtgagcttcctgcaggagaacaaggagtgccacgtgtccagcaccgacatgctgcagaccatccggcagttcatgacccaggtcaagaactatttgtctcagagctcggagctggacccccccatcgagtcgctgatccctgaagaccaaatagatgtggtgctggaaaaagccatgcacaagtgcatcttgaagcccctcaaggggcacgtggaggccatgctgaaggactttcacatggccgatggctcatggaagcaactcaaggagaacctgcagcttgtgcggcagaggaatccgcaggagctgggggtcttcgccccgacccctgattttgtggatgtggagaaaatcaaagtcaagttcatgaccatgcagaagatgtattcgccggaaaagaaggtcatgctgctgctgcgggtctgcaagctcatttacacggtcatggagaacaactcagggaggatgtatggcgctgatgacttcttgccagtcctgacctatgtcatagcccagtgtgacatgcttgaattggacactgaaatcgagtacatgatggagctcctagacccatcgctgttacatggagaaggaggctattacttgacaagcgcatatggagcactttctctgataaagaatttccaagaagaacaagcagcgcgactgctcagctcagaaaccagagacaccctgaggcagtggcacaaacggagaaccaccaaccggaccatcccctctgtggacgacttccagaattacctccgagttgcatttcaggaggtcaacagtggttgcacaggaaagaccctccttgtgagaccttacatcaccactgaggatgtgtgtcagatctgcgctgagaagttcaaggtgggggaccctgaggagtacagcctctttctcttcgttgacgagacatggcagcagctggcagaggacacttaccctcaaaaaatcaaggcggagctgcacagccgaccacagccccacatcttccactttgtctacaaacgcatcaagaacgatccttatggcatcattttccagaacggggaagaagacctcaccacctcctagaagacaggcgggacttcccagtggtgcatccaaaggggagctggaagccttgccttcccgcttctacatgcttgagcttgaaaagcagtcacctcctcggggacccctcagtgtagtgactaagccatccacaggccaactcggccaagggcaactttagccacgcaaggtagctgaggtttgtgaaacagtaggattctcttttggcaatggagaattgcatctgatggttcaagtgtcctgagattgtttgctacctacccccagtcaggttctaggttggcttacaggtatgtatatgtgcagaagaaacacttaagatacaagttcttttgaattcaacagcagatgcttgcgatgcagtgcgtcaggtgattctcactcctgtggatggcttcatccctgccttccttcctttctttttccttttttttttttttttttttttttttacaaagagccttcatgtttttatatatttcatagaaatttttatagcagttgcaggtaaactgtcaggattggttttaaaatatttttgtaactttaaaatattctataattatgcatgtgattttaacatttaatattcaaaaataaatctcttgctggatttgagagtattgcatttttaaagtctctcttctgtaactggatgttttggcaactttgtggggagagactgctggatttcttaaagcaacgtattcctgacactggccacagaatgcctttggaaatcggatgtactgttctcttgttcacgtttagtggtgttttgctgttttgttttttaaacaaatgatgctgagaataaggagagaaatgaatgtagagagaggtagagagagaaatatgaactctaacaaaggactgaggagtgcagtctgctggttcaggctcttcaaaagatgtagaaaaagagatagaaggaaccacctatgcttaaaatactgtaaatatgcagtgaggtttggcaaaatctattccatgtgtgatttgcttgtagaaacaattttgaaagccccttgaggaaaataaaaatcaagaagaacacttttctcccttttccatacaaattaaaacttaacagcatcaaattattgggaccagaaaccaagtaatgtataatgtggcttttgttgagttaaataagatgctatataatggagaagaatttgaaaatgcacaaaaaaatcaatctacattatcagaacctgcagtgaaattaaacttatgttaaataaaaccagtttgcaggtgcacaaactatgagggtcttgtatccacgtaacacaggtagttacaaaaacatgttattgtactgtgtaaagatgcatagtcatctcatttggttggctttgtaccttgtaccttttttagccttggcttttgttgaactagaaccctcagcacatactgtgttgtacttttgtaaatgattttttaaatggaattttgcacataatacattgtaatactgtatgataatcatgtgtgaaaataatttttgaaatatcaaaaaaaaaaaaaaa

SEQ ID NO: 816 - DNA, 3434 bp, Homo sapiens
agtccccacagctgcgccggtgactgaggggccgggcagtggagaagtggtggcggcgggcggcgggcggcaaaggagcagccatgagggccgggcccagtcaccgaccgtgctgaggagtcatggaagagtttttaaaccagtgtgagccactgccccatgttgtgttgatgccaatctgccatgctagcctgtctaccagggccaggtgacctgtcctttcagcctctttctcacacgcagatgaacactggacttcagaaatgggacactacacagaaaatgagaactgctcactatcctaccccagccgaattggatgcgtatgctaagaaggtcgcaaacaacccactgactataaaaatcttccccaacagtgtgaaggttccccagcggaaacacgttcgtcgtactgtgaacggcctcgacacatcagcccagcgctacagcccctacccgacacaggctgccaccaaggcaggcctgcttgccattgtcaaagtgccagccaaaagcatactcaaggactttgacggcacccgagcccggttgctccctgaggccatcatgaaccccccagtggcaccctatgctactgtggcacccagcactttagcccacccccaggcccaggctctggcccgccagcaggccctgcagcatgcacagaccctggcccatgcccctccccagacgctgcagcaccctcagggtatcccgccaccccaggcactgtcccaccctcagagcctccagcagcctcagggcctgggccaccctcagcccatggcccaaacccagggcttggtccaccctcaggccctggctcaccagggtctccagcacccccacaatcccttgctgcatggaggccggaagatgccagactcagatgcccccccgaatgtgaccgtgtctacctcaactatccccctttcaatggcggccactctgcagcacagccggcctccggacctgagtagcatcgtgcaccagatcaaccagttttgccagacgagggcaggcatcagcactacctcagtgtgtgagggccagatcgccaaccccagccccattagtcgcagtctgctcatcaatgcaagcacccgggtgtcgacccacagcgtccccacaccaatgccttcatgtgtggtcaatcccatggagcacacccacgcggccaccgccgcgttgcctgctgcaggtcctgtcaacctgcccacaggcatctctcgcgtccccactggctaccctagcgacctcaagccagtcacctggaaccagcaccagctggcccacctacagcagatgtgcagcgaggctagtgggacgccagcccctggcctgacaggcaagcatgcggcaggacgcgagttggcagggcctggctttgtgggcaaggcccctgcctacccgcaggaactctgcctggcgcagtccttccatctgaagccacccctggaaaagccgaccccatccccaccagtcaacggcatggcagccccattggcctaccccaatggtcactacttccaacccctgtggaacaacattctgcccactcccaatagcgacagctcggggtctcaggaccttgccatgccgttccacggtgggcagcccacaggtgcacccctcgactgtgcggcagctcccggggcccactaccgagcagggaccgggggcggtccagtggcaagccagaacagcttgatgcaaacagtggattacctaagtggggatttccaacaggcctgcttccgagaacagagcctggccatgctgagcaaggcccaccgagcccctggcaaccgagcccccgatcccacagagagtcgaagtcttcatattctgcacccagggtatagataggtagccctgctgccctccacgtgcaacacatcatacatcaccctcctaggtttagtcttttaagtaactggatagtttcaaagtttcactgctccagtgtgatcattcttagatgtctaagaaagggaatttggtgggatctaagtggggacagaaggggtcctctcgtcctcccctccagcaacttttggttttatgttagaacctaaccctaagcccaggcttttctctccactgactgcctgtcagctagtctctccaccttggccatttccagccagctcccacccatcttttcttgaatctcttcctgtttcccttaggacgactgaggtgtgggctgacggaatgccctagttgaggtagtataggtgctcaggcccctaatccagacctctacctgttgctaccccccttcccctccctccaggactaagaagcaagatttcccaggtgctctgaaagctaattacttactcatcggaggatctcaaatcaaagctgacccagtcttcatatccttcaagttcctttccattcctcaaggctttgttttgtgtctatattgatcccacagccactgcacttgcccttgccacacttgatctcaagggcatcttggaagtatttgaccatttcttgagatatggggggaaaaagtctttgtattggcatcttggttccagactcccctttccaaacctagaaaaatacagtgacctttgagcatacccaagatccctttctcactgttgcctgtcccctaactcacctccccacagcccctatcctttccccctcaacaaaaacaaaatctaccttacttgaggaattaggtaggtaaggaatgatcacattggagtttgggattaaaaacaccaaaaaaaaaaaaatgcatttggttctctctacactggctaagaatattgctctacactgtaagttttaaacgttacgtttctgtatgaatgtagtgtgggtttgagtagcattgtgtgtgagtggccccacaggtagattcaccctctagtgcagcccctcagtttaatgaaggaaaaaaaaaacaaacacaaagccttaagctctttgagtacttcctttaccaaatgagcatggttctaacacctggagctgggcctacattggaaacaagcccctcctgccctctgtccattcttagagcataccttcatccactccatgctcagcacgtctcatcccaagcgacaattagttggctagaaacacttttctgtaattttaaacttagactgttttgttacaaatttttgcaccattctgttaaagatgcagaattgggcttttttattttttacagatgaaataagcccttacctttcctcttgtctctggggaatgtcagctgatggttcttatttaaggttttgcattttgttcactatccactactgttcgttagccagaaattctctagtgatctgaagcaatgtgactgaagaccagttttaagttatgtgttggcaagttgccttatatttaaaaggaaaaagaaaaaaaaaaaagcctgattgtgttatgcc

SEQ ID NO: 817 - DNA, 579 bp, Homo sapiens
acgaggggaaagggcgcagggtttgaaacatggcggacgacgtagaccagcaacaaactaccaacactgtagaggagcccctggatcttatcaggctcagcctagatgagcgaatttatgtgaaaatgagaaatgaccgagagcttcgaggcagattacatgcttatgatcaacatttaaatatgatcttgggagatgtggaagaaactgtgactactatagaaattgatgaagaaacatatgaagagatatataaatcaacgaaacggaatattccaatgctctttgtccggggagatggcgttgtcctggttgcccctccactgagagttggctgaaacaaagaatttgtcctgtatggaaaacgggagactttgtacagtggcctctctaaaagtacaaaacattcataagagaaacctgcatacattttgatattaagaaataattccggggattcttccactcctgaaatgagttgatttgcagataactcacaacttcttaagctaaatggtattttcatttttctcaagctctccaataaatatgaccaccaaaaaaaaaaaaaaaaaaaaa

SEQ ID NO: 818 - DNA, 368 bp, Homo sapiens
cgcctttgcctccaaggctttgctggcttgtgcggcatcctgctccgtctgcaggttgtgcttccggtgcggaggtcagggacaagatggtgccaccggtgcaggtctctccgctcatcaagctcggccgctactccgccctgttcctcggtgtggcctacggagccacgcgctacaattacctaaaacctcgggcagaagaggagaggaggatagcagcagaagagaagaagaagcaggatgaactgaaacggattgccagagaattggcagaagatgacagcatattaaagtgagtgaccctgcgacccactctttggaccagcagcggatgaataaagcttcctgtgttgtgtgataaaaaaaaa

SEQ ID NO: 819 - DNA, 3551 bp, Homo sapiens
gcgcctccgcccctcgctcgctcgctccttcccgccctccccgcagcgccggccgagccggcttcccctcagtctctcatgaatattgagcggcccctgttgtatttcccgagctccattgcggaagctgaggctcgccatattgtgcggcggcgccggcgtccgcggcagctgataccagagtcttgctccggccgcggccagcggagccctgggctggggcaggagccgcaatgtctcaggctgtgcagacaaacggaactcaaccattaagcaaaacatgggaactcagtttatatgagttacaacgaacacctcaggaggcaataacagatggcttagaaattgtggtttcacctcgaagtctacacagtgaattaatgtgcccaatttgtttggatatgttgaagaacaccatgactacaaaggagtgtttacatcgtttttgtgcagactgcatcatcacagcccttagaagtggcaacaaagaatgtcctacctgtcggaaaaaactagtttccaaaagatcactaaggccagacccaaactttgatgcactcatcagcaaaatttatccaagtcgtgatgagtatgaagctcatcaagagagagtattagccaggatcaacaagcacaataatcagcaagcactcagtcacagcattgaggaaggactgaagatacaggccatgaacagactgcagcgaggcaagaaacaacagattgaaaatggtagtggagcagaagataatggtgacagttcacactgcagtaatgcatccacacatagcaatcaggaagcaggccctagtaacaaacggaccaaaacatctgatgattctgggctagagcttgataataacaatgcagcaatggcaattgatccagtaatggatggtgctagtgaaattgaattagtattcaggcctcatcccacacttatggaaaaagatgacagtgcacagacgagatacataaagacttctggtaacgccactgttgatcacttatccaagtatctggctgtgaggttagctttagaagaacttcgaagcaaaggtgaatcaaaccagatgaaccttgatacagccagtgagaagcagtataccatttatatagcaacagccagtggccagttcactgtattaaatggctctttttctttggaattggtcagtgagaaatactggaaagtgaacaaacccatggaactttattacgcacctacaaaggagcacaaatgagcctttaaaaaccaattctgagactgaacttttttatagcctatttctttaatattaaagatgtactggcattacttttatggacagatcttggatatgttgttcaattttctttctgagccagactagtttacgctattcaaatcttttcccctttatttaagatttcctttttggaagggactgcaattattcagtatttttttctttcctttaaaaaaatatatctgaagtttcttgtgtttttttttttccccacaaagtgtgtttccacttggagcaccattttgacccaggaatttttcatagtttctgtattcttataagattcagttggctgtccttttcctgctcccctcaaaagatttttagtcatacagaatgttaaatattatgtattctgactttttttttcccccggagtcttgtatatttatagttttctatataaactgtagtatcttcatgaagacccaaggctcaaatttactgtccttaaaaacaattctcataggattattcttttcatggtattttcttccataatatctcattttaaaaagaagttctttatgaacttagtgtccattgtcatgcaatgtttttttttttccattctttttccctgtaattttggaatttctggtcctgggaagaatcaaacaaaatcttaagttctatgagaacttggttcattgacatattctgctgaagaaagaaaaattaaattggtagtaaaatatagtcttcaagtatacgtttgagagtgcttttttttgtattagttctgctgtcacttcatttcctgtattatatgtgatgtttttccccattaaaataccagagataatggagatattttgcactttagccttgatgaaaagtacaagatatgttcaaagcttccctaatttttttcttatttgtagccacataagtttcaagaataacatggcacacagaacaatggaaaaaagtttgtttccattggaaaattatatcattttgggttgccacatcagtttataaatttggcgctcttttaattacactctgtagaaggttaatagagcttgagccctgctttaatatgtagtgaaagataattctgtagaaaaacgtcagccagtagggtaaagtcattctactgttcttaatttttatattgaggaacaatattgggtgtttgggagccagaaagctttgttgacagatcagaaataagattgacttgggtgttatatttcatctctctccagactctaggtatatttccaactttatatatcacagtatttaaaaagacatgtttgcattgagaaattaaccctaaagggttttcaatagggtgtagacctccagtacctttgtaactaaagtctgtctagtcattgtaaatatttatctgtcagttttgacagattggggccagcttgatgttttaaatcttcagcccggtatgaaaacttaaaggtatatattcaattttttaccattttatggaaaatatttaaaatctgtttttacagggttttttttttttttttttttttgtaatctgtgccatgaaatttgaaaaccaccaaaaatcaagggaacttttatatattcaattccttttctggtgtaatgttaaagttgtatagattattaatgcatgcccactgaatataaccctggttttgtgataaaactgcttagattttgttgatgacattagattagtagttgcattaaataactaaattcccattgtgattaattgaaattttgtctttaagcagagagttatttgtgactataagctttgtgcttagagaatgtatgtgtttttatctgtcagtatgggaggatataaactgcatcattagtgaaattattggttgtgtaatcctttgtgaaatataattctaggtatttgatagggtattgagtgtattttgtgtgtgtgtggatgtgtgttttggggtacggggagaggcgatgctattggccatcactaccaaccagggtttcaaaaagtattacctaagtaatttcttttatcactatctcaactgaggaagaaaaggctcaccacaagtggtgtgaaggctttgggtacttagttctaaatttttttatggtaacatatacatagccacatttacagttttaaccattttaaggcatgtaattcagtggggttaggtacattcacaatgttgtgtaatgatcaccgctgtctacttgtaaaactttttcatcaccccaaacagaaactctgtgtgcaattaaagtaatgcatttctcttcttcttaacccct

SEQ ID NO: 820 - DNA, 1308 bp, Homo sapiens
gtcagccgctgtccccttagccgcgatgccgctggagaacctggaggaggagggtctgcccaagaaccccgacttgcgtatcgcgcagctgcgcttcctgctcagcctgcccgagcaccgcggagacgctgccgtgcgcgacgagctgatggcggccgtccgcgataacaacatggctccttactatgaagccttgtgcaaatccctcgactggcagatagacgtggacctactcaataaaatgaagaaggcaaatgaagatgagttgaagcgtttggatgaggagctggaagatgcagagaagaatctaggagagagcgaaattcgcgatgcaatgatggcaaaggccgagtacctctgccggataggtgacaaagagggagctctgacagcctttcgcaagacatatgacaaaactgtggccctgggtcaccgattggatattgtattctatctccttaggattggcttattttatatggataatgatctcatcacacgaaacacagaaaaggccaaaagcttaatagaagaaggaggagactgggacaggagaaaccgcctaaaagtgtatcagggtctttattgtgtggctattcgtgatttcaaacaggcagctgaactcttccttgacactgtttcaacatttacatcctatgaactcatggattataaaacatttgtgacttatactgtctatgtcagtatgattgccttagaaagaccagatctcagggaaaaggtcattaaaggagcagagattcttgaagtgttgcacagtcttccagcagttcggcagtatctgttttcactctatgaatgccgttactctgttttcttccaatcattagcggttgtggaacaggaaatgaaaaaggactggctttttgcccctcattatcgatactatgtaagagaaatgagaattcatgcatacagtcagctgctggaatcatataggtcattaacccttggctatatggcagaagcgtttggtgttggtgtggaattcattgatcaggaactgtccaggtttattgctgccgggagactacactgcaaaatagataaagtgaatgaaatagtagaaaccaacagacctgatagcaagaactggcagtaccaagaaactatcaagaaaggagatctgctactaaacagagttcaaaaactttccagagtaattaatatgtaaagccatgtaactaacaaaggatttgctttagagataattatttggaatttttatagcttacttcacaatgtgcccaggtcagctgtataaaataaatactgcattgttgtttc

SEQ ID NO: 821 - DNA, 6801 bp, Homo sapiens
tgacgtagagggccggaggtggcggcggcggcggcggcggcggcggcggcggcggatgcctgcgtcccaggctcgcgggcggcaggcccggacttgtgcatcacggacaattttgctgagggagatttcactatggcggattatgccttgttagaagattgcccttacgtggacgattgtgtctttgctgctgaatttatgaccgatgattatgttcgtgtgactcagctttactgtgatggggtgggtaagcaatataaagattatgtccaaagtgagaggaatttagaatttgacatctgcagtatatggtgtagtaaaccaatttctgtcctgcaagattattgtgatgccattaaaataaacatcttctggccacttctgtttcaacatcaaaacagttctgtaatatcacgattgcatccctgtgtggacgccaacaattcacgtgcttccgagataaatttgaagagattacaacatcttgagttgatggaagatattgtggatttggcaaagaaagctgctaatgattcactccttattggaggcttattgagaattggttataaaatagaaaataaaatcttggcaatggaagaagctctgaattggataaaatatgcaggcgatgtaacaattctaactaaattaggatcaattgacaattgttggcctatgttaagtattttctttactgaatacaagtaccacataactaaaattgtaatggaagactgcaatttgcttgaagaacttaaaacccaaagttgtatggattgtatagagcaaggagaactaatgaaaatgaaaggaaatgaagagttttccaaagaaagatttgatatagctattatctattacaccagagccattgaatatagacctgaaaaccaccttctttatggtaaccgagctctttgttttcttcgtactggacagtttagaaatgcacttggtgatggaaagagagccactattctgaagaacacttggccaaagggtcattatcgttattgtgatgctctttctatgctgggggaatataactgggccctgcaagcaaacataacagctcaaaaactctgtaaaaatgaccctgagggaatcaaggatctaattcagcagcatgtaaagttacaaaaacaaatagaagacctacaaggtcgaacagcaaataagaatccaattaaagccttttatgaaaacagggcctacacacctaggagtttatcagcacctgtatttagtacttcacttaactttgtggagaaggaaagagatttcagaaaaattaatcacgaaatggctaacggtggtaatcagaatctaaaggtgatggatgaggcattgatggtagatgattgtgactgtcatcctgaattttcaccaccatcaagtcagcctccgaaacataaaggaaaacaaaaatctcgaaacaatgaatcagaaaagttcagttctagttcacaattgactttaccagcagatttgaagaacatcttggagaaacagttttctaaatcttccagaggtgcacaccaggattttgctaatataatgacaatgctgagaagcttaattcaagatggctatacagccttattggagcagcgttgccgcagtgccgcacatgcctttacagagttgctgaatggtttagatcctcaaaaaataaagcaattgaatctggccatgattaactatgtcttggttgtctatggacttgccatttcactccttggaataggacagcctgaagaactatctgaagctgaaaaccagtttaagaggattattgaacactaccacaatgagggacttgattgcttggcctactgtggaattggaaaagtatatttgaaaaaaaacagatttctagaagctctcaatcactttgagaaagcaagaaccttgatttatcgtcttcctggagtgttaacttggcccacaagtaatgtgattattgaagagtctcagccagaaaaaataaagatgctgttagagaaatttgttgaagaatgcaagttccctccagtgccagatgccatttgttgctatcagaagtgctgtggatattctaagatccagatatacataactgatccagactttaagggttttatacgcatcagctgttgccagtactgtaaaatagaatttcacatgaattgctggaagaagttaaaaaccacaacctttaatgataaaattgacaaggattttctacaaggaatatgtcttacccctgactgtgaaggtgtcatttctaagattatcatcttcagcagtggtggtcaagttaaatgtgaatttgaacacaaggtcataaaagaaaaggttcctccaagacctattctgaaacagaaatgttctagcctagagaaactaagactgaaagaagacaaaaaattgaagagaaagatccaaaaaaaagaagcaaaaaaattagcacaagaaagaatggaggaggacttaagagaaagtaatccacccaaaaacgaagagcagaaagaaactgtagacaatgttcagcattgtcagttccttgatgacagaattctacagtgtataaagcagtatgctgacaagattaaatccggcatatggaatacagccacgcttctcaaagaattactttcttggaaagttttgagcacagaggactatacaacctgtttttcaagcagaaattttctaaatgaagcagtggactatgttattcgtcacttgattcaagaaaagaacagagtaaagacaagaatatttctgcatgttttgagtgagcttaaagaagtggagcccaaattagccgcctggatccgaaaacttaatagctttggcttagatgccacaggacctttcttttctcggtatgaagcatctcttaaacagcttgattttagcatcatgactttcctctggaatgagaaatatggtcacaaactagactctatagaaggaaagcaacttgattatttctttgagccaacatcatcgaaggaagcccgctgtttaatatggctgctagaagaacacagagacaagttcccagcattacatagtgctttagatgaattctttgatataatggacagccgctgtactgtgttaaggaaacaagacagtggcgaagcaccgtttagttctaccaaggtgaaaaacaaaggcaagaaaaagaaaccaaaggattcaaagcctatgttagttgggtctggaacaacttcagtaactccaaataatgagatcatcacttcaagtgaagaccatagcaatcaaaattcagatactgcaggcccatttgcagtgcctgaccatcttcggcaagacgtagaagaatttgaagctctctatgaccaacacagtaatgaatatgttgtccgcaataagaagctatgggacatgaacccaaaacaaaaatgttcaactctatatgattacttctctcagttgttggaggaacatggtcccttggacatgagtcacaagatgttctctgaagaatatgagtttttcccagaagaaactcgaccaatactagaaaaagcaggaggtttaaaatcttttctcttgggatgtccccgttttgttgtgattgacaactgtattgcattgaagaaagttgcatcacggctcaagaaaaaaagaaagaagaaaaacattaaaacaaaagtagaagacatttcaaaagcaggagagtatttacaagttaaactaccacttaattcagctgctagggaatttaaaccagatgtaaagtctaaaccagtatcaggttcatcttcagcaccagcttctgaagatgtgaaacccaaacctttgtctgcaaattctcccaagccagcttgtgaagatgtgaaggccaaaccagtatccgataattcttctagacaagtttctgaggatgggaaacccaaagggttctcttctaattctcccaaaccaggctctgaggatgcaaattacaagcgagtctcctctaattctcccaaaccggttcttgaggatgtgaaaccaacttattgggctcaatcccatttggtcacaggatactgtacgtatcttcctttccagagatttgataacacccggacatcgccagcatacataaatgtgttaccaggtttgccccagtacaccagcatatatacacccttggtcagcctttctcctgaatatcagctaccaagatcagtaccagtggtgccgtcttttgtagccaatgacagagcagataaaaatgctactgcctattttgagggtcatcatttgaatgctgagaatgctgctggtcaccagattgcctccgaaacacagatccttgaggattcttcgttaatatctgtaaagtcacagtgcagcacaggtgatgctcatacagtcctgagtgagtctaacagaaaagatgggcactgtggaaattctaacaacaaatgtgaagtaattccagaaagcaccagtgcagtaacaaacattccacaggtgcagatggttgccatacaggtatcttggaacataacacaccaagaagtcaatactgagccatataatccttttgagaaacaacaaggggaaatttcacggattgaaaaggagtaccaagtattacaagaccaacttaaagaagcgtatgaaaattatgagcagataaaacttaagggcttagaagagaccagggacctggaagaaaagttgaaaaggcacttagaagaaaacaagatatcaaagacagaattagattggttgcttcaagatttggaaagagaaattaaaaaatggcaagaggaaaaaaaagaaatccaaaaaacactaaaatcactgaagaagaaaattaaaaaggtttcaaatgccaatgaaatgtatacccagaaaaatgatggaaacgataaggaacatgaattacatctggatcagtcccttgaaatcagcaacacacttacaaacgagaaaatgaaaatagaagagtgtataaagaaagggaaaaaggattatgaagagagtcatcagagagctgtggctgcagaggtatccgtacttgaaaactggaaggagagtgaagtgtataagctacagatcatgcagtcacaagcagaagcctatctgaagaagctggagctgattagccatgatcctgcagcatatcctgacatggagtccgatatatgttcatgggaattgtttctttctaatgttacaaaagaaactgagaaagcaaagtatcagtttgaagaacaaattaaggcaattaaaaatggttctcggctcagtgaactttctaaagtgcagatttctgagctttcatttcctgcctgtaacacggttcatcctgagttactccctgagtcttcaggccatgatgaccaagggtttatgacttccgcaagcgatgtgactggaaaccaagcagcacttcacagggatcccagtgtgttctctgccggcgattccccaggggaggctccttctgcactgttgccagggccacccccctctcagcctgaagccactcagctgccagggccaaaaggggctggccaggcagctctgtcagagcaaagccctgcggctgatcagaagcagcctgttcctccagggtgtgctgcatgttcaagccagtctccaaaaaagccattcaatagtattattgagcacctgtcagtggtattcccatgttacaacagcactgagcttgctggttttattaaaaaagtgagaagcaaaaacaagaactcactttcaggattgagtattgatgaaattgtccaaagagtgacagaacacattctagatgaacagaaaaagaaaaagccaaacccaggaaaggacaagaggacttatgagcccagctctgccgcccacgtgaccaggtcctcccagggcccacccttggcggttgttgcaccatcacccaaaaccaaggggcagaaagcagaagatgtccctgtgagggttgcactgggtgcaagttcctgtgaaatatgtcacgaggtgttcaaatcaaaaaacgtgcgtgtgctcaaatgtgggcacaagtatcacaaagggtgttttaagcagtggcttaaagggcagagcgcttgcccagcctgccagacttgtgatctcctgtcagaagagtagcctgcaccttctggaagaggctggcccagtgagaatcgggagccgccttcctgctcctctaggtagtcacacttcactaaagcgtcatccgccagcgtgttgaatcggaagaatgacaatttcctaccattggtgtaaaaagcaaacatctgaagacccttgtgcattgtgtgttacaaagctaaatccatggaaatcgttaatatcattgatattaagtaatttccccactctgagtgaatactttgatgatggccaagcagtggctaacaaaatgatggctaccacactcatgggtcgcttgggctgtgcagggctctttgaggtgggtagtttcttttggaaagtactgtgagcgcctcaaagcagtattctagtgataagaattcttaacatattcggccgggcgcggtggctcacgcctgtaatcccagtactttgggaggccgaggcgggcggatcacctgagatcaggagtttgagaccagcctcaacatggagaaaccccgtctctactaaaaacacaaaattagccaggcatggtggtgcatgcccataatcccagctactcaggaggctgaggcaggagaattgcttgaacctcggaggcgcaggttgtggtgagccgagattgcgccattgcacgccagcctgggcaacaagagcgaaactctgtctcaa

SEQ ID NO: 822 - DNA, 1638 bp, Homo sapiens
atgaagggggtcagagcagcgattggagccgagagctggaagcgccttaaagagactgcgcgctttaaggtgggagagaactggaggcaggaactgcgggttatctaccagtgcttcgtgtggtgtggaaccccagagaccaggaaaagcaaggcaaagtcctgcatctgccatgtgtgtggcacccatctgaacagactccactcttgcctttcctgtgtcttctttggctgcttcacggagaaacacattcacgagcacgcagagacgaaacaacacaacttagcagtagacctgtattacggaggtatatactgctttatgtgtaaggactatgtatatgacaaagacattgagcaaattgccaaagaagagcaaggagaagctttgaaattacaagcctccacctcaacagaggtttctcaccagcagtgttcagtgccaggccttggtgagaaattcccaacctgggaaacaaccaaaccagaattagaactgctggggcacaacccgaggagaagaagaatcacctccagctttacgatcggtttaagaggactcatcaatcttggcaacacgtgctttatgaactgcattgtccaggccctcacccacacgccgatactgagagatttctttctctctgacaggcaccgatgtgagatgccgagtcccgagttgtgtctggtctgtgagatgtcgtcgctgtttcgggagttgtattctggaaacccgtctcctcatgtgccctataagttactgcacctggtgtggatacatgcccgccatttagcagggtacaggcaacaggatgcccacgagttcctcattgcagcgttagatgtcctgcacaggcactgcaaaggtgatgatgtcgggaaggcggccaacaatcccaaccactgtaactgcatcatagaccaaatcttcacaggtggcctgcagtctgatgtcacctgtcaagcctgccatggcgtctccaccacgatagacccatgctgggacattagtttggacttgcctggctcttgcacctccttctggcccatgagcccagggagggagagcagtgtgaacggggaaagccacataccaggaatcaccaccctcacggactgcttgcggaggtttacgaggccagagcacttaggaagcagtgccaaaatcaaatgtggtagttgccaaagctaccaggaatctaccaaacagctcacaatgaataaattacctgtcgttgcctgttttcatttcaaacggtttgaacattcagcgaaacagaggcgcaagatcactacatacatttcctttcctctggagctggatatgacgccgtttatggcctcaagtaaagagagcagaatgaatggacaattgcagctgccaaccaatagtggaaacaacgaaaataagtattccttgtttgctgtggttaatcaccaaggaaccttggagagtggccactataccagcttcatccggcaccacaaggaccagtggttcaagtgtgatgatgccgtcatcactaaggccagtattaaggacgtactggacagtgaagggtatttactgttctatcacaaacaggtgctagaacatgagtcagaaaaagtgaaagaaatgaacacacaagcctactga

SEQ ID NO: 823 - DNA, 1638 bp, Homo sapiens; identical to SEQ ID NO: 822

SEQ ID NO: 824 - DNA, 3328 bp, Homo sapiens
gttttggcaggagcgggagaattctgcggagcctgcgggacggcggcggtggcgccgtaggcagccgggacagtgttgtacagtgttttgggcatgcacgtgatactcacacagtggcttctgctcaccaacagatgaagacagatgcaccaacgagggtctggaatggtctggagtggtctggaaagcagggtcagatacccctggaaaactgaagcccgtggagcagtgatctctacaggactgcttcaaggctgatgggaaccaccctgtagaggtccatctgcgttcagacccagacgatgccagagctatgactgggcctgcaggtgtggcgccgaggggagatcagccatggagcagccacaggaggaagcccctgaggtccgggaagaggaggagaaagaggaagtggcagaggcagaaggagccccagagctcaatgggggaccacagcatgcacttccttccagcagctacacagacctctcccggagctcctcgccaccctcactgctggaccaactgcagatgggctgtgacggggcctcatgcggcagcctcaacatggagtgccgggtgtgcggggacaaggcatcgggcttccactacggtgttcatgcatgtgaggggtgcaagggcttcttccgtcgtacgatccgcatgaagctggagtacgagaagtgtgagcgcagctgcaagattcagaagaagaaccgcaacaagtgccagtactgccgcttccagaagtgcctggcactgggcatgtcacacaacgctatccgttttggtcggatgccggaggctgagaagaggaagctggtggcagggctgactgcaaacgaggggagccagtacaacccacaggtggccgacctgaaggccttctccaagcacatctacaatgcctacctgaaaaacttcaacatgaccaaaaagaaggcccgcagcatcctcaccggcaaagccagccacacggcgccctttgtgatccacgacatcgagacattgtggcaggcagagaaggggctggtgtggaagcagttggtgaatggcctgcctccctacaaggagatcagcgtgcacgtcttctaccgctgccagtgcaccacagtggagaccgtgcgggagctcactgagttcgccaagagcatccccagcttcagcagcctcttcctcaacgaccaggttacccttctcaagtatggcgtgcacgaggccatcttcgccatgctggcctctatcgtcaacaaggacgggctgctggtagccaacggcagtggctttgtcacccgtgagttcctgcgcagcctccgcaaacccttcagtgatatcattgagcctaagtttgaatttgctgtcaagttcaacgccctggaacttgatgacagtgacctggccctattcattgcggccatcattctgtgtggagaccggccaggcctcatgaacgttccacgggtggaggctatccaggacaccatcctgcgtgccctcgaattccacctgcaggccaaccaccctgatgcccagtacctcttccccaagctgctgcagaagatggctgacctgcggcaactggtcaccgagcacgcccagatgatgcagcggatcaagaagaccgaaaccgagacctcgctgcaccctctgctccaggagatctacaaggacatgtactaacggcggcacccaggcctccctgcagactccaatggggccagcactggaggggcccacccacatgacttttccattgaccagctctcttcctgtctttgttgtctccctctttctcagttcctctttcttttctaattcctgttgctctgtttcttcctttctgtaggtttctctcttcccttctcccttgccctccctttctctctccaccccccacgtctgtcctcctttcttattctgtgagatgttttgtattatttcaccagcagcatagaacaggacctctgcttttgcacaccttttccccaggagcagaagagagtggggcctgccctctgccccatcattgcacctgcaggcttaggtcctcacttctgtctcctgtcttcagagcaaaagacttgagccatccaaagaaacactaagctctctgggcctgggttccagggaaggctaagcatggcctggactgactgcagccccctatagtcatggggtccctgctgcaaaggacagtgggcaggaggccccaggctgagagccagatgcctccccaagactgtcattgcccctccgatgctgaggccacccactgacccaactgatcctgctccagcagcacacctcagccccactgacacccagtgtccttccatcttcacactggtttgccaggccaatgttgctgatggcccctccagcacacacacataagcactgaaatcactttacctgcaggctccatgcacctcccttccctccctgaggcaggtgagaacccagagagaggggcctgcaggtgagcaggcagggctgggccaggtctccggggaggcaggggtcctgcaggtcctggtgggtcagcccagcacctgctcccagtgggagcttcccgggataaactgagcctgttcattctgatgtccatttgtcccaatagctctactgccctccccttcccctttactcagcccagctggccacctagaagtctccctgcacagcctctagtgtccggggaccttgtgggaccagtcccacaccgctggtccctgccctcccctgctcccaggttgaggtgcgctcacctcagagcagggccaaagcacagctgggcatgccatgtctgagcggcgcagagccctccaggcctgcaggggcaaggggctggctggagtctcagagcacagaggtaggagaactggggttcaagcccaggcttcctgggtcctgcctggtcctccctcccaaggagccattctgtgtgtgactctgggtggaagtgcccagcccctgcccctacgggcgctgcagcctcccttccatgccccaggatcactctctgctggcaggattcttcccgctccccacctacccagctgatgggggttggggtgcttcctttcaggccaaggctatgaagggacagctgctgggacccacctccccctccccggccacatgccgcgtccctgccccgacccgggtctggtgctgaggatacagctcttctcagtgtctgaacaatctccaaaattgaaatgtatatttttgctaggagccccagcttcctgtgtttttaatataaatagtgtacacagactgacgaaactttaaataaatgggaattaaatatttaaaaaaaaaa

SEQ ID NO: 825 - DNA, 2846 bp, Homo sapiens
ggcggaagtggctccgggactgcggagaacatattgtgatgttcgtgcctcagagctaaaactatgagtgaatttcggattcaccatgacgtcaatgaactgcttagcctgctgcgtgtccacggaggagatggggctgaggtctacattgacctgcttcaaaagaacaggaccccgtacgtcactaccactgtctctgctcacagtgccaaggttaaaattgcagagttttctcgtactccagaagactttctaaagaaatatgatgaactgaaatctaaaaatacaaggaaccttgacccgctggtgtacctgttgtcaaagctcacggaagacaaagagactctgcagtacttacaacagaatgcaaaagaaagagctgagcttgcagccgctgctgtgggcagcagtaccaccagcatcaacgtccctgccgcggcctccaagatctccatgcaggagcttgaggaactgaggaagcagcttggcagcgtggccacaggctccacgctgcagcagtctctggaacttaaaagaaagatgcttcgagacaagcagaacaaaaaaaattcaggccagcacctccccatcttcccagcatgggtgtatgagagacctgccctgatcggggatttcctgattggtgctggcatcagcacagacaccgctttgccgataggcacgttgcccctggcctcgcaggagtcggccgtggtggaggacctgctgtacgtgctggtgggcgtggacgggaggtacgtcagtgctcagcccctggctgggaggcagagccggaccttcctcgtggaccccaacctggacctgtccatcagggagctggtgcacaggatcctcccagtggccgccagctactccgctgtgaccaggttcattgaagagaagtcttccttcgagtacgggcaggtgaaccacgccctggcggccgccatgcgcaccctggtgaaggagcacctgattctggtgtcacagctggagcagctgcacaggcagggcctcctttcgctgcagaagctctggttctacatccagccagccatgcgcaccatggacatcctggcctccctcgccacctcggtggacaaaggcgaatgtcttggggggtccacgctgagcctgctccacgacaggagcttcagctacacaggggacagccaggcgcaggagctatgcctgtacctaaccaaggcggccagtgctccctacttcgaggttctggagaagtggatctacaggggcatcatccacgacccatacagtgagtttatggtcgaggagcacgagctgcggaaggagaggatccaggaggattacaacgacaagtactgggaccagcggtacaccatcgtccagcagcagatcccgtccttcctgcagaaaatggcggacaagatcctcagcacaggaaaatatctaaatgtggtcagagagtgtggccatgacgtcacctgcccggtggctaaagagatcatctacacgttaaaagagcgggcgtatgtggagcagatcgagaaggcgtttaactacgccagcaaggtgctgctggacttcctgatggaggagaaggagctggtggctcacctcaggtccatcaagcgctacttcctcatggaccagggcgacttcttcgtgcacttcatggacctcgcggaggaggagctccggaagccggtggaggacatcacgccccctcgcctggaagcgctcctggagctggcgctgcgcatgagcacggccaacactgaccccttcaaggacgacctcaagatcgacctgatgccccatgacctcatcactcagctcttgcgcgtcctggccatcgagaccaagcaggagaaggcgatggcgcacgccgaccccacggagctggcgctgagcggcctggaggccttctctttcgactacatcgtcaagtggcccctttcgctcatcatcaacaggaaagccctcactcgctaccagatgctcttcaggcacatgttctattgcaagcacgtggagcggcagctctgcagcgtctggatcagcaacaaaaccgccaagcagcactcgctgcactccgcccagtggtttgctggggctttcactctgcggcagcgaatgctcaacttcgtccagaatattcaatactacatgatgttcgaagtgatggaaccgacctggcacatcctggagaaaaacctgaaatccgcctccaacattgacgacgtccttggccaccacacaggcttcctggacacctgcctgaaggactgcatgctcaccaaccccgagctgctgaaggtcttctccaagctcatgtctgtgtgcgtcatgttcaccaactgcatgcagaaatttacacagagcatgaaattagatggcgagctgggcgggcagacgctggagcacagcaccgtcctggggctgcccgcaggggccgaggagcgggcccggaaggagctcgccaggaagcacctggctgagcacgcagacactgtgcagctggtgtccggcttcgaggccaccatcaacaagtttgacaagaacttctcagcccacctgctggacctcctggcccggctgagcatctatagcaccagtgactgtgagcacggcatggccagcgtcatctccaggcttgacttcaatggtttctacacggagcgcctggagcgcctgtctgcagagaggagccagaaggccaccccccaagtgcctgtcctgcgggggcccccggctcctgcacccagggtcgcagtcaccgcacagtgagccctggctgtgacaggaaggaagggtgtggggtcagcagggactggtgcaaatgggtccagaattttcaaatc

SEQ ID NO: 826 - DNA, 2911 bp, Homo sapiens
aatcggtggccgccggacacccgcggcgaaggcggctcgggctcgggctccggatgtgctaggtgtgggccggcccccacccgaccctgacaagtgaccatggatcctggagccgggtcagagacatctctgactgtcaatgagcaggtcatcgtgatgtcaggtcatgagaccatccgagtgctggaagtcggagtggatgcccaactccctgctgaggaagagagcaaaggactggagggtgtggccgccgagggctcccagagcggagaccctgctgaagccagtcaagctgctggtgaagctgggccagacaacctgggctcctctgcagaggcaactgtgaagtcacccccggggatccctccgagccctgcccctgccattgccaccttcagccaagccccaagccagcctcaggcatcgcagaccctgacgccactggctgtacaagctgccccccagtattgcaggtcaagtggctggtcagcaggggctggccgtgtggacaattcctacagcaactgtggctgccctcccaggactgaccgctgcttctcctacggggggagtgttcaagccacctttagccggtctccaagcagctgctgtgctgaacaccgctcttccggcaccggtacaagctgccgcaccagtacaggcctcctcgacggcccaaccccggccaccagcccagccccagacgctgttccagacccagccgctgctgcagaccacacctgccatcctcccgcagcccactgctgccaccgctgctgcccctacccccaagccagtggacacccccccacagatcaccgtccagcctgcaggcttcgcatttagcccaggaatcatcagtgctgcttccctcgggggacagacccagatcctggggtccctcactacagctccagtcattaccagcgccattcccagcatgccagggatcagcagtcagatcctcaccaatgctcagggacaggttattggaacccttccatgggtagtgaactcagctagtgtggcggccccagcaccagcccaaagcctgcaggtccaggccgtgaccccccagctgttgttgaacgcccagggccaggtgattgcgaccctggctagcagccccctgcctccacctgtggctgtccggaagccaagcacacctgagtcccctgctaagagtgaggtgcagcccatccagcccacaccaaccgtgccccagcctgctgtggtcattgccagcccagctccagccgccaagccatctgcctctgctcctatcccaattacctgctcagagacccccaccgtcagccagttggtgtccaagccacatactccaagtctggatgaggatgggatcaacttagaagagatccgggagtttgccaagaactttaagatccggcggctctcgctgggccttacacagacccaggtgggtcaggctctgactgcaacggaaggtccagtctacagccagtcagccatctgccggttcgagaagctagacatcacacccaagagtgcccagaagctaaagccggtgctggaaaagtggctaaacgaagctgaactgcggaaccaggaaggccagcagaacctgatggagtttgtgggaggcgagccctccaagaaacgcaaacgccgcacctccttcaccccccaggccatagaggctctcaatgcctattttgagaagaacccactgcccacaggccaggagatcactgaaattgctaaggagctcaactacgaccgtgaggtagtgcgggtctggttctgcaatcggcgccagacgctcaagaacaccagcaagctgaacgtctttcagatcccttagggctcagcccctggccctgtgttctagcactttgtccatttcccgtggcatccggctgcagccactgccatgacagcacctgtcattttgccacgtgcagctgtgctcaccccaggtcatcagactccaccgtgtgcatgtgcatcaatgtccctcttttctcccacacatctcacatcatggggaggccagagggggccacacgagagctccaggctctgggctggtcactccgaagaagaggatttgtgacgtcacttagagaagcaccttgctagcatggtttctgaagggtgaattctggtggggaaccagaaactccctgtctttggggcagggctaaagcagctcctaaggatcactggccattagctcttgcttttgatggcattctctttccaccttgtcttctcctttgctcctctgtgttagtgtggcaggtatgacaactcatccagtggaaacacagcctcacactgcccttccgccccccacactttgcctgcaggtgcaccgaaaggacctgggagataaaattcaaaaaagtgtgatgtgctgctcagaaggtcagactccatgtctgccttgacctcaaggtcagaaggttcccaaacccctggggctggaacatgggatctcctcttccacctcttcctggttcctttgcggggaaaattgcactaaaacagaaccttttcttaatccatgttggaaggaagcaacagtgaactctacctgttctggagttctcctgggtctgcagaaggttgggaatttagaaaataaggctgttctttcatattttaatttaatctctgtcaatggccatccctcccacaaaaaaacgtgggttaagagaacttgcagactggatatgcaagcaaacgggcaactctggagaaaaataaggaaaggaatgctgactttctctttctttctcttgtccccacacccattcccaacccaatactggggccttctcaaaaggagcaaattaaacaataaaccagacagcaaggccctgggggaaaggacaacatcctgaaataaatgatggagcccagg

SEQ ID NO: 827 - DNA, 2150 bp, Homo sapiens
ctcgagccacgaaggccccgctgtcctgtctagcagatacttgcacggtttacagaaattcggtccctgggtcgtgtcaggaaactggaaaaaaggtcataagcatgaagcgcagttcagtttccagcggtggtgctggccgcctctccatgcaggagttaagatcccaggatgtaaataaacaaggcctctatacccctcaaaccaaagagaaaccaacctttggaaagttgagtataaacaaaccgacatctgaaagaaaagtctcgctatttggcaaaagaactagtggacatggatcccggaatagtcaacttggtatattttccagttctgagaaaatcaaggacccgagaccacttaatgacaaagcattcattcagcagtgtattcgacaactctgtgagtttcttacagaaaatggttatgcacataatgtgtccatgaaatctctacaagctccctctgttaaagacttcctgaagatcttcacatttctttatggcttcctgtgcccctcatacgaacttcctgacacaaagtttgaagaagaggttccaagaatctttaaagaccttgggtatccttttgcactatccaaaagctccatgtacacagtgggggctcctcatacatggcctcacattgtggcagccttagtttggctaatagactgcatcaagatacatactgccatgaaagaaagctcacctttatttgatgatgggcagccttggggagaagaaactgaagatggaattatgcataataagttgtttttggactacaccataaaatgctatgagagttttatgagtggtgccgacagctttgatgagatgaatgcagagctgcagtcaaaactgaaggatttatttaatgtggatgcttttaagctggaatcattagaagcaaaaaacagagcattgaatgaacagattgcaagattggaacaagaaagagaaaaagaaccgaatcgtctagagtcgttgagaaaactgaaggcttccttacaaggagatgttcaaaagtatcaggcatacatgagcaatttggagtctcattcagccattcttgaccagaaattaaatggtctcaatgaggaaattgctagagtagaactagaatgtgaaacaataaaacaggagaacactcgactacagaatatcattgacaaccagaagtactcagttgcagacattgagcgaataaatcatgaaagaaatgaattgcagcagactattaataaattaaccaaggacctggaagctgaacaacagaagttgtggaatgaggagttaaaatatgccagaggcaaagaagcgattgaaacacaattagcagagtatcacaaattggctagaaaattaaaacttattcctaaaggtgctgagaattccaaaggttatgactttgaaattaagtttaatcccgaggctggtgccaactgccttgtcaaatacagggctcaagtttatgtacctcttaaggaactcctgaatgaaactgaagaagaaattaataaagccctaaataaaaaaatgggtttggaggatactttagaacaattgaatgcaatgataacagaaagcaagagaagtgtgagaactctgaaagaagaagttcaaaagctggatgatctttaccaacaaaaaattaaggaagcagaggaagaggatgaaaaatgtgccagtgagcttgagtccttggagaaacacaagcacctgctagaaagtactgttaaccaggggctcagtgaagctatgaatgaattagatgctgttcagcgggaataccaactagttgtgcaaaccacgactgaagaaagacgaaaagtgggaaataacttgcaacgtctgttagagatggttgctacacatgttgggtctgtagagaaacatcttgaggagcagattgctaaagttgatagagaatatgaagaatgcatgtcagaagatctctcggaaaatattaaagagattagagataagtatgagaagaaagctactctaattaagtcttctgaagaatgaagataaaatgttgatcatgtatatatatccatagtgaataaaattgtctcagtaaaaaaaaaaaaaaaaaaaaaaaaaaaaaaaaaaaaaaaaaaaaaaaaaaaaaaaaaaaaaaaa

SEQ ID NO: 828 - DNA, 3130 bp, Homo sapiens
gcggagcgcggcgcgcgcggcggttgggccgttggctgttcggccctgggatccgccgccactccgcgatcagaccgctctgtgccgcgagccgccgtgagcactcggattcaagccggcgccaacgagtccgggggcatcgcccgcagcggccaagctcatggccggctgagcgggacgccgcctccgcctcagccaccgccgccgccgccgcctcctcctcctcagccggcggcggcccgggcccagcaaccatggctgaagactactgggacgggcgcctgcggcgaacaggaggagaaggaggtcgcgcggcctcatcccgggccgccgccccaggcgccgccgcgccggccccgcggctctgaggttgctcgcgcgcccccgccgatcgccatggatcggatgaagaagatcaaacggcagctgtcaatgacactccgaggtggccgaggcatagacaagaccaatggtgcccctgagcagataggcctggatgagagtggtggtggtggcggcagtgaccctggagaggcccccacacgtgctgctcctggggaacttcgttctgcacggggcccactcagctctgcaccagagattgtgcacgaggacttgaagatggggtctgatggggagagtgaccaggcttcagccacgtcctcggatgaggtgcagtctccagtgagagtgcgtatgcgcaaccatcccccacgcaagatctccactgaggacatcaacaagcgcctatcactaccagctgacatccggctgcctgagggctacctggagaagctgaccctcaatagccccatctttgacaagcccctcagccgccgcctccgtcgtgtcagcctatctgagattggctttgggaaactggagacctacattaagctggacaaactgggcgagggtacctatgccaccgtctacaaaggcaaaagcaagctcacagacaaccttgtggcactcaaggagatcagactggaacatgaagagggggcaccctgcaccgccatccgggaagtgtccctgctcaaggacctcaaacacgccaacatcgttacgctacatgacattatccacacggagaagtccctcacccttgtctttgagtacctggacaaggacctgaagcagtacctggatgactgtgggaacatcatcaacatgcacaacgtgaaactgttcctgttccagctgctccgtggcctggcctactgccaccggcagaaggtgctacaccgagacctcaagccccagaacctgctcatcaacgagaggggagagctcaagctggctgactttggcctggcccgagccaagtcaatcccaacaaagacatactccaatgaggtggtgacactgtggtaccggccccctgacatcctgcttgggtccacggactactccactcagattgacatgtggggtgtgggctgcatcttctatgagatggccacaggccgtcccctctttccgggctccacggtggaggaacagctacacttcatcttccgtatcttaggaaccccaactgaggagacgtggccaggcatcctgtccaacgaggagttcaagacatacaactaccccaagtaccgagccgaggcccttttgagccacgcaccccgacttgatagcgacggggccgacctcctcaccaagctgttgcagtttgagggtcgaaatcggatctccgcagaggatgccatgaaacatccattcttcctcagtctgggggagcggatccacaaacttcctgacactacttccatatttgcactaaaggagattcagctacaaaaggaggccagccttcggtcttcgtcgatgcctgactcaggcaggccagctttccgcgtggtggacaccgagttctaagccacagaccgaggccccagcaggcagcggctggagggatgccacacccctcacagggcagcccccaactacatcttccctgcttactctctgcctacctgcctgagccatgttcacctgcccacttgtcccctgctgcctgcccaaacaccccaccattggcctgtcaacccacccattggcctgtctgctgggtgctaacaaagctctcatcactccttcacttggtctgtctgtctctgtcttggtagttgccggtggacagcatggccgtgccagcctcccacactgaggccaggtctaccccccatcataccagcccccaggaccactaccccacggccagccaggggtccagagctagcccaggctggggatctcgactcagacaagatggtgacaatgccttgagtctgaggcatcctctgcctgctttcctgcctgccccacctgcctcatattgtgtgggcctttttttgtttgtttcattcattgtttttttttttttaattattttaaatgagatttttgttttttttaaatgcaatatctctgtatacagactggctgggccccaccccctgcgtgtggccctcccacagtattttgtgcaatgaagccctgctcccagcctttcagagacagggacacagcccctatttggaaccctgatcatcaccagaccctgggattggctatgggaaagcatgccacagccactcgccttcctacccccgcccgccatccccagttgcagggggatctggggactaccagagactctgggaaatggacaaggtggggggccccactctttctctcctgcagtcccgtagctggggcctccttccttctcagggtctccccagcccagtccccttgctcccatcccactcggtgctgttgggtaggggccctgccaggaactgaccagctcagcgaggagccataatgtgcatatgtgcacaagcagggttgggggaggggggtgtgaggggttgtgcccaggtgttgccccctatctcctggggagggtgaggcagggcagggacagtctccagggtcagtccctggatgggtggttacctccccttcctccaccctaagccctggggccctgaaatggggtgggagggcaggggtgggagccctcctagtgggtttggggggttgggttcctgaatgcaccataatcgctgtatgaaatattaaaaagtctaaagtgaaaaaaaaaaaaaaaaaa

SEQ ID NO: 829 - DNA, 3172 bp, Homo sapiens
ggagggggcagttgggcggggataggccgtcctagctaaggtggtaaaggccaataactcttcaggctgcctctcctcgaaaagtcatcttctcgcgaacctttaaaatgccttcctccccaagcacctcaagggactagaactgagtgcttcatttgtcttttttcctccttgcaaaagtcccgtttgccaccatggggatgtaccaagtgagaccgagtagggggaacgagtggtgattgacgcgccaggttactggccactgctcacctaggcgctagcaaacttctgccaagatcggaactgagtactaaacagcctccacagttctccctggtgccgtctccggcttggcgccgcatcctcctctgggctcgcgatggccgcgtcccctcccgctgcggacgggtcctttggtacatgcagtccgagatcgccatggatcggatgaagaagatcaaacggcagctgtcaatgacactccgaggtggccgaggcatagacaagaccaatggtgcccctgagcagataggcctggatgagagtggtggtggtggcggcagtgaccctggagaggcccccacacgtgctgctcctggggaacttcgttctgcacggggcccactcagctctgcaccagagattgtgcacgaggacttgaagatggggtctgatggggagagtgaccaggcttcagccacgtcctcggatgaggtgcagtctccagtgagagtgcgtatgcgcaaccatcccccacgcaagatctccactgaggacatcaacaagcgcctatcactaccagctgacatccggctgcctgagggctacctggagaagctgaccctcaatagccccatctttgacaagcccctcagccgccgcctccgtcgtgtcagcctatctgagattggctttgggaaactggagacctacattaagctggacaaactgggcgagggtacctatgccaccgtctacaaaggcaaaagcaagctcacagacaaccttgtggcactcaaggagatcagactggaacatgaagagggggcaccctgcaccgccatccgggaagtgtccctgctcaaggacctcaaacacgccaacatcgttacgctacatgacattatccacacggagaagtccctcacccttgtctttgagtacctggacaaggacctgaagcagtacctggatgactgtgggaacatcatcaacatgcacaacgtgaaactgttcctgttccagctgctccgtggcctggcctactgccaccggcagaaggtgctacaccgagacctcaagccccagaacctgctcatcaacgagaggggagagctcaagctggctgactttggcctggcccgagccaagtcaatcccaacaaagacatactccaatgaggtggtgacactgtggtaccggccccctgacatcctgcttgggtccacggactactccactcagattgacatgtggggtgtgggctgcatcttctatgagatggccacaggccgtcccctctttccgggctccacggtggaggaacagctacacttcatcttccgtatcttaggaaccccaactgaggagacgtggccaggcatcctgtccaacgaggagttcaagacatacaactaccccaagtaccgagccgaggcccttttgagccacgcaccccgacttgatagcgacggggccgacctcctcaccaagctgttgcagtttgagggtcgaaatcggatctccgcagaggatgccatgaaacatccattcttcctcagtctgggggagcggatccacaaacttcctgacactacttccatatttgcactaaaggagattcagctacaaaaggaggccagccttcggtcttcgtcgatgcctgactcaggcaggccagctttccgcgtggtggacaccgagttctaagccacagaccgaggccccagcaggcagcggctggagggatgccacacccctcacagggcagcccccaactacatcttccctgcttactctctgcctacctgcctgagccatgttcacctgcccacttgtcccctgctgcctgcccaaacaccccaccattggcctgtcaacccacccattggcctgtctgctgggtgctaacaaagctctcatcactccttcacttggtctgtctgtctctgtcttggtagttgccggtggacagcatggccgtgccagcctcccacactgaggccaggtctaccccccatcataccagcccccaggaccactaccccacggccagccaggggtccagagctagcccaggctggggatctcgactcagacaagatggtgacaatgccttgagtctgaggcatcctctgcctgctttcctgcctgccccacctgcctcatattgtgtgggcctttttttgtttgtttcattcattgtttttttttttttaattattttaaatgagatttttgttttttttaaatgcaatatctctgtatacagactggctgggccccaccccctgcgtgtggccctcccacagtattttgtgcaatgaagccctgctcccagcctttcagagacagggacacagcccctatttggaaccctgatcatcaccagaccctgggattggctatgggaaagcatgccacagccactcgccttcctacccccgcccgccatccccagttgcagggggatctggggactaccagagactctgggaaatggacaaggtggggggccccactctttctctcctgcagtcccgtagctggggcctccttccttctcagggtctccccagcccagtccccttgctcccatcccactcggtgctgttgggtaggggccctgccaggaactgaccagctcagcgaggagccataatgtgcatatgtgcacaagcagggttgggggaggggggtgtgaggggttgtgcccaggtgttgccccctatctcctggggagggtgaggcagggcagggacagtctccagggtcagtccctggatgggtggttacctccccttcctccaccctaagccctggggccctgaaatggggtgggagggcaggggtgggagccctcctagtgggtttggggggttgggttcctgaatgcaccataatcgctgtatgaaatattaaaaagtctaaagtgaaaaaaaaaaaaaaaaaa

SEQ ID NO: 830 - DNA, 2890 bp, Homo sapiens
cggaagttgaccggggtgcggagctcctgggctgcagctcctggagtttccgaggttcgtgcgcgtctggtggcggcggcgtgatgttctcggcaggagcggagagtttgctccaccaggccagggagatccaggacgaggagctgaagaagttctgttcccggatctgtaaactgctgcaggcggaggacttggggccggacaccctcgactccctgcagaggctcttcctcatcatctcagccacgaagtacagccggaggctggagaagacatgcgtagacctgctgcaggccaccctcggcctgcctgcatgccccgagcagctccaggtgctttgcgccgccatcctgcgagagatgtccccctctgacagcctcagcctggcctgggaccacacgcagaacagccggcagctgagcctggtggcctccgttctcttggcccagggtgacagaaacgaggaggtcagagccgtgggccagggcgtgctacgagcgctggagagccggcagcctgagggacccagcctcagacacctcctccccgtcatggccaaggtcgtggtcctcagcccgggcaccctccaggaggaccaggccaccctgctcagcaagcggctggtcgactggctgcgctacgccagcctccagcaagggctcccacactccggcggcttcttctccacgcccagggcccggcagccgggccccgtcaccgaggtggacggggcggtagccacagacttcttcacggtgctctccagcggccaccgcttcacagacgaccagtggctgaacgtgcaggccttctctatgctgcgggcgtggctgctgcacagcggccccgagggcccgggcaccctggacacagatgacaggtcagagcaggagggctccactctgtcggtgatctccgccacctcctctgccggccgcctgctgccgccccgggagcggcttcgggaggtggccttcgagtactgccagcgcctcattgagcaaagtaaccgacgagccctgaggaagggggactccgacctgcagaaagcttgcctggtggaggccgtgctggtgctggacgtgctgtgccggcaggacccgtccttcctgtaccgaagtctctcctgcctgaaggccctgcacgggcgggtgcgcggggacccggcctctgtgcgggtgctgctgcccctcgcccacttcttcctgagccacggggaagcggctgcagtggactcggaagccgtctaccagcacctgttcaccaggatcccggtggagcagttccacagccccatgctggcctttgaattcatccagttctgcagggacaacctccacctgttcagcgggcacctcagcaccctcagattgagcttccccaacctctttaagttcctggcctggaacagcccacccctcacctccgagtttgtggcgctcctcccggccctggtggacgctggcacagccctggagatgctgcacgcgctgctggacctgccctgcttgacggcggtgctggacctgcagctcaggtcagcaccggctgcatccgagaggccactctgggacacctctctcagggcccccagctgcctggaggccttccgggacccgcagttccagggtcttttccaatacctgctgcgccccaaggccagtggcgccactgagaggttggcgccactccaccagctgctgcagcccatggccggctgtgcccgcgtggcccagtgtgcccaggccgtgcccacgctgctgcaggcattcttctcagcagtgacccaggtggctgacgggtccctgatcaaccagctggcgctgctgctcctgggcaggagcgactcgctctacccggccccagggtacgctgccggtgtgcacagtgtgctgagttctcagttcctggccctgtgtacgctgaaaccctccctggtggtggagctggcaagagacctgctggagttcctgggcagcgtgaatggtctctgcagcagggcgagcctcgtcaccagcgtggtgtgggccatcggcgagtacctgtcggtgacctacgatcggaggtgcaccgtggagcagatcaacaagttcttcgaagccctggaggctctgctattcgaggtcacccagtgccgcccctctgctgccctgcccaggtgtcccccccaggtggtcaccgtgctgatgaccacgctgacgaagctggcctcccggagccaagatctgatccccagggcctctttattgctgtcaaagatgaggaccctggctcacagtccagccaccagctccacgcacagcgaggagggcgcggaagccatccgtacccgggccacagagctgctgaccctgctgaagatgcctagcgtggcccagtttgtgctcacacccagcacggaggtgtgcagcccccgctatcaccgcgatgccaacacggccctgcccctggccctgcgcacggtcagccggctggtggagagggaggccggcctcatgccagggtgaagggacagtggccagggacttcggtgcagattaagagcctgggcagccagcttgctactgaggccaggctgataggagctcaggagggcgcgggagtcctgggagaggaggcaaggcccacggtgggcttggcaccctcacagacacgcggggctggcccccctgctcaccctctgggctttgtctccgagccttttgctcccaggcaacactgagctgagctgaggggtgccatggagcggctctgattggaggcttgaggccctgtggctgggtcgggtggaggctgctgggtctgtttcctagtcttttgtttttggacagttgatgggcaagaagagctgcagtaaaagtaaatctcctttaataagcgtctgtatgaa

SEQ ID NO: 831 - DNA, 1893 bp, Homo sapiens
cccgaaatcagactgctgccttggaccgggacagctcgcggcccccgagagctctagccgtcgaggagctgcctggggacgtttgccctggggccccagcctggcccgggtcaccctggcatgaggagatgggcctgttgctcctggtcccgttgctcctgctgcccggctcctacggactgcccttctacaacggcttctactactccaacagcgccaacgaccagaacctaggcaacggtcatggcaaagacctccttaatggagtgaagctggtggtggagacacccgaggagaccctgttcacctaccaaggggccagtgtgatcctgccctgccgctaccgctacgagccggccctggtctccccgcggcgtgtgcgtgtcaaatggtggaagctgtcggagaacggggccccagagaaggacgtgctggtggccatcgggctgaggcaccgctcctttggggactaccaaggccgcgtgcacctgcggcaggacaaagagcatgacgtctcgctggagatccaggatctgcggctggaggactatgggcgttaccgctgtgaggtcattgacgggctggaggatgaaagcggtctggtggagctggagctgcggggtgtggtctttccttaccagtcccccaacgggcgctaccagttcaacttccacgagggccagcaggtctgtgcagagcaggctgcggtggtggcctcctttgagcagctcttccgggcctgggaggagggcctggactggtgcaacgcgggctggctgcaggatgccacggtgcagtaccccatcatgttgccccggcagccctgcggtggcccgggcctggcacctggcgtgcgaagctacggcccccgccaccgccgcctgcaccgctatgatgtattctgcttcgctactgccctcaaggggcgggtgtactacctggagcaccctgagaagctgacgctgacagaggcaagggaggcctgccaggaagatgatgccacgatcgccaaggtgggacagctctttgccgcctggaagttccatggcctggaccgctgcgacgctggctggctggcagatggtagcgtccgctaccctgtggttcacccgcatcctaactgtgggcccccagagcctggggtccgaagctttggcttccccgacccgcagagccgcttgtacggtgtttactgctaccgccagcactaggacctggggccctcccctgccgcattccctcactggctgtgtatttattgagtggttcgttttcccttgtgggttggagccattttaactgtttttatacttctcaatttaaattttctttaaacatttttttactattttttgtaaagcaaacagaacccaatgcctccctttgctcctggatgccccactccaggaatcatgcttgctcccctgggccatttgcggttttgtgggcttctggagggttccccgccatccaggctggtctccctcccttaaggaggttggtgcccagagtgggcggtggcctgtctagaatgccgccgggagtccgggcatggtgggcacagttctccctgcccctcagcctgggggaagaagagggcctcgggggcctccggagctgggctttgggcctctcctgcccacctctacttctctgtgaagccgctgaccccagtctgcccactgaggggctagggctggaagccagttctaggcttccaggcgaaagctgagggaaggaagaaactcccctccccgttccccttcccctctcggttccaaagaatctgttttgttgtcatttgtttctcctgtttccctgtgtggggaggggccctcaggtgtgtgtactttggacaataaatggtgctatgactgccttccgccatcccca

SEQ ID NO: 832 - DNA, 699 bp, Homo sapiens
catccggtgtggtcgacgggtcctccaagagtttggggcgcggaccggagtaccttgcgtgcagttatgtcggcgtcggtagtgtctgtcatttcgcggttcttagaagagtacttgagctccactccgcagcgtctgaagttgctggacgcgtacctgctgtatatactgctgaccggggcgctgcagttcggttactgtctcctcgtggggaccttccccttcaactcttttctctcgggcttcatctcttgtgtggggagtttcatcctagcggtttgcctgagaatacagatcaacccacagaacaaagcggatttccaaggcatctccccagagcgagcctttgctgattttctctttgccagcaccatcctgcaccttgttgtcatgaactttgttggctgaatcattctcatttacttaattgaggagtaggagactaaaagaatgttcactctttgaatttcctggataagagttctggagatggcagcttattggacacatggattttcttcagatttgacacttactgctagctctgctttttatgacaggagaaaagcccagagttcactgtgtgtcagaacaactttctaacaaacatttattaatccagcctctgcctttcattaaatgtaaccttttgctttccaaattaaagaactccatgccactcctcaaaaaaaaaaaaaa

SEQ ID NO: 833 - DNA, 3663 bp, Homo sapiens
ggcggcggcggcggcgcggactgggtgcgcggcgcagcgtcctgtgttggaatgtgcggctgccgcgagctcgcggcgcagcagcggagcgagcgccgccgaggcccggggccccagaccctggcggcggctgcggcagccgagacggcagggcgaggcccggaggcctgagcaccctctgcagccccactcctgggccttcttggtccacgacggccccagcacccaactttaccaccctcccccacctctcccccgaaactccagcaacaaagaaaagtagtcggagaaggagcggcgactcagggtcgcccgcccctcctcaccgaggaaggccgaatacagttatggccacccaggtaatggggcagtcttctggaggaggagggctgtttaccagcagtggcaacattggaatggccctgcctaacgacatgtatgacttgcatgacctttccaaagctgaactggccgcacctcagcttattatgctggcaaatgtggccttaactggggaagtaaatggcagctgctgtgattacctggtcggtgaagaaagacagatggcagaactgatgccggttggggataacaacttttcagatagtgaagaaggagaaggacttgaagagtctgctgatataaaaggtgaacctcatggactggaaaacatggaactgagaagtttggaactcagcgtcgtagaacctcagcctgtatttgaggcatcaggtgctccagatatttacagttcaaataaagatcttccccctgaaacacctggagcggaggacaaaggcaagagctcgaagaccaaaccctttcgctgtaagccatgccaatatgaagcagaatctgaagaacagtttgtgcatcacatcagagttcacagtgctaagaaattttttgtggaagagagtgcagagaagcaggcaaaagccagggaatctggctcttccactgcagaagagggagatttctccaagggccccattcgctgtgaccgctgcggctacaatactaatcgatatgatcactatacagcacacctgaaacaccacaccagagctggggataatgagcgagtctacaagtgtatcatttgcacatacacaacagtgagcgagtatcactggaggaaacatttaagaaaccattttccaaggaaagtatacacatgtggaaaatgcaactatttttcagacagaaaaaacaattatgttcagcatgttagaactcatacaggagaacgcccatataaatgtgaactttgtccttactcaagttctcagaagactcatctaactagacatatgcgtactcattcaggtgagaagccatttaaatgtgatcagtgcagttatgtggcctctaatcaacatgaagtaacccgccatgcaagacaggttcacaatgggcctaaacctcttaattgcccacactgtgattacaaaacagcagatagaagcaacttcaaaaaacatgtagagctacatgtgaacccacggcagttcaattgccctgtatgtgactatgcagcttccaagaagtgtaatctacagtatcacttcaaatctaagcatcctacttgtcctaataaaacaatggatgtctcaaaagtgaaactaaagaaaaccaaaaaacgagaggctgacttgcctgataatattaccaatgaaaaaacagaaatagaacaaacaaaaataaaaggggatgtggctggaaagaaaaatgaaaagtccgtcaaagcagagaaaagagatgtctcaaaagagaaaaagccttctaataatgtgtcagtgatccaggtgactaccagaactcgaaaatcagtaacagaggtgaaagagatggatgtgcatacaggaagcaattcagaaaaattcagtaaaactaagaaaagcaaaaggaagctggaagttgacagccattctttacatggtcctgtgaatgatgaggaatcttcaacaaaaaagaaaaagaaggtagaaagcaaatccaaaaataatagtcaggaagtgccaaagggtgacagcaaagtggaggagaataaaaagcaaaatacttgcatgaaaaaaagtacaaagaagaaaactctgaaaaataaatcaagtaagaaaagcagtaagcctcctcagaaggaacctgttgagaagggatctgctcagatggaccctcctcagatggggcctgctcccacagaggcggttcagaaggggcccgttcaggtggagctgccacctcccatggagcatgctcagatggagggtgcccagatacggcctgctcctgacgagcctgttcagatggaggtggttcaggaggggcctgctcagaaggagctgctgcctcccgtggagcctgctcagatggtgggtgcccaaattgtacttgctcacatggagctgcctcctcccatggagactgctcagacggaggttgcccaaatggggcctgctcccatggaacctgctcagatggaggttgcccaggtagaatctgctcccatgcaggtggtccagaaggagcctgttcagatggagctgtctcctcccatggaggtggtccagaaggagcctgttcagatagagctgtctcctcccatggaggtggtccagaaggaacctgttaagatagagctgtctcctcccatagaggtggtccagaaggagcctgttcagatggagttgtctcctcccatgggggtggttcagaaggagcctgctcagagggagccacctcctcccagagagcctccccttcacatggagccaatttccaaaaagcctcctctccgaaaagataaaaaggaaaagtctaacatgcagagtgaaagggcacggaaggagcaagtccttattgaagttggcttagtgcctgttaaagatagctggcttctaaaggaaagtgtaagcacagaggatctctcaccaccatcaccaccactgccaaaggaaaatttaagagaagaggcatcaggagaccaaaaattactcaacacaggtgaaggaaataaagaagcccctcttcagaaagtaggagcagaagaggcagatgagagcctacctggtcttgctgctaatatcaacgaatctacccatatttcatcctctggacaaaacttgaatacgccagagggtgaaactttaaatggtaaacatcagactgacagtatagtttgtgaaatgaaaatggacactgatcagaacacaagagagaatctcactggtataaattcaacagttgaagaaccagtttcaccaatgcttcccccttcagcagtagaagaacgtgaagcagtgtccaaaactgcactggcatcacctcctgctacaatggcagcaaatgagtctcaggaaattgatgaagatgaaggcatccacagccatgaaggaagtgacctaagtgacaacatgtcagagggtagtgatgattctggattgcatggggctcggccagttccacaagaatctagcagaaaaaatgcaaaggaagccttggcagtcaaagcggctaagggagattttgtttgtatcttctgtgatcgttctttcagaaagggaaaagattacagcaaacacctcaatcgccatttggttaatgtgtactatcttgaagaagcagctcaagggcaggagtaatgaaactttgaacaaggtttca

SEQ ID NO: 834 - DNA, 1056 bp, Homo sapiens
tctctggctgtcacccggcttggccccttccacacccaactggggcaagcctgacccggcgacaggaggcatgaggggcccccggccgaaatgacagtgctggcgccagcctggagcccaacaacctatctcctcctgctgctgctgctgagctcgggactcagtgggacccaggactgctccttccaacacagccccatctcctccgacttcgctgtcaaaatccgtgagctgtctgactacctgcttcaagattacccagtcaccgtggcctccaacctgcaggacgaggagctctgcgggggcctctggcggctggtcctggcacagcgctggatggagcggctcaagactgtcgctgggtccaagatgcaaggcttgctggagcgcgtgaacacggagatacactttgtcaccaaatgtgcctttcagcccccccccagctgtcttcgcttcgtccagaccaacatctcccgcctcctgcaggagacctccgagcagctggtggcgctgaagccctggatcactcgccagaacttctcccggtgcctggagctgcagtgtcagcccgactcctcaaccctgccacccccatggagtccccggcccctggaggccacagccccgacagccccgcagccccctctgctcctcctactgctgctgcccgtgggcctcctgctgctggccgctgcctggtgcctgcactggcagaggacgcggcggaggacaccccgccctggggagcaggtgccccccgtccccagtccccaggacctgctgcttgtggagcactgacctggccaaggcctcatcctggggaggatactgaggcacacagaggggagtcaccagccagaggatgcatagcctggacacagaggaagttggctagaggccggtcccttccttgggcccctctcattccctccccagaatggaggcaacgccagaatccagcaccggccccatttacccaactctgtacaaagcccttgtccccatgaaattgtatataaatcatccttttctaccaaaaaaaaaaaaaaaaaaaaa

SEQ ID NO: 835 - DNA, 899 bp, Homo sapiens
gtcagagctggagggccgggcaccgcggccatggagggtcaacgctggctgccgctggaggccaatcccgaggtcaccaaccagtttcttaaacaattaggtctacatcctaactggcaattcgttgatgtatatggaatggatcctgaactccttagcatggtaccaagaccagtctgtgcagtcttacttctctttcctattacagaaaagtatgaagtattcagaacagaagaggaagaaaaaataaaatctcagggacaagatgttacatcatcagtatatttcatgaagcaaacaatcagcaatgcctgtggaacaattggactgattcatgctattgcaaacaataaagacaagatgcactttgaatctggatcaaccttgaaaaaattcctggaggaatctgtgtcaatgagccctgaagaacgagccagatacctggagaactatgatgccatccgagttactcatgagaccagtgcccatgaaggtcagactgaggcaccaagtatagatgagaaagtagatcttcattttattgcattagttcatgtagatgggcatctctatgaattagatgggcggaagccatttccaattaaccatggtgaaactagtgatgaaactttattagaggatgccatagaagtttgcaagaagtttatggagcgcgaccctgatgaactaagatttaatgcgattgctctttctgcagcatagcttgtcaataatggaaacaccaaaaactgtattatttgcaactaaattttctctgccatacactaactcaaaaattttgatattttcattaacttgatgattaaactttatgtgagttaaaaaaaaaaaaaaaaaaaaaaaaaaaaaaaaaaaaaaaaaaaaaaaaaaaaaaaaaa

SEQ ID NO: 836 - DNA, 1703 bp, Homo sapiens
gcgcgtgccgcgagaacagagtggacggagcgtaggagagaccgaaaaggctgggggtgggagtagcggatttgaagcacttgttggcctacagaggtgtggcaagcagagcacctcagaactcaggcgtactgcccgccgcccgagccctgcgagggccgatagcgagggtgtggcccttatctgcacccagcagagcgccggcggggtttccgcatgggccggaccgtggtcgtgctgggcggaggcatcagcggcttggccgccagttaccacctgagccgggccccctgcccccctaaggtggtcctagtggagagcagtgagcgtctgggaggctggattcgctccgttcgaggccctaatggtgctatctttgagcttggacctcggggaattaggccagcgggagccctaggggcccggaccttgctcctggtttctgagcttggcttggattcagaagtgctgcctgtccggggagaccacccagctgcccagaacaggttcctctacgtgggcggtgccctgcatgccctacccactggcctcagggggctactccgcccttcaccccccttctccaaacctctgttttgggctgggctgagggagctgaccaagccccggggcaaagagcctgatgagactgtgcacagttttgcccagcgccgccttggacctgaggtggcgtctctagccatggacagtctctgccgtggagtgtttgcaggcaacagccgtgagctcagcatcaggtcctgctttcccagtctcttccaagctgagcaaacccatcgttccatattactgggcctgctgctgggggcagggcggaccccacagccagactcagcactcattcgccaggccttggctgagcgctggagccagtggtcacttcgtggaggtctagagatgttgcctcaggcccttgaaacccacctgactagtaggggggtcagtgttctcagaggccagccggtctgtgggctcagcctccaggcagaagggcgctggaaggtatctctaagggacagcagtctggaggctgaccacgttattagtgccattccagcttcagtgctcagtgagctgctccctgctgaggctgcccctctggctcgtgccctgagtgccatcactgcagtgtctgtagctgtggtgaatctgcagtaccaaggagcccatctgcctgtccagggatttggacatttggtgccatcttcagaagatccaggagtcctgggaatcgtgtatgactcagttgctttccctgagcaggacgggagcccccctggcctcagagtgactgtgatgctgggaggttcctggttacagacactggaggctagtggctgtgtcttatctcaggagctgtttcaacagcgggcccaggaagcagctgctacacaattaggactgaaggagatgccgagccactgcttggtccatctacacaagaactgcattccccagtatacactaggtcactggcaaaaactagagtcagctaggcaattcctgactgctcacaggttgcccctgactctggctggagcctcctatgagggagttgctgttaatgactgtatagagagtgggcgccaggcagcagtcagtgtcctgggcacagaacctaacagctgatccccaactctcattcatgaaaataaaaattgctggagcttggcaaaaaaaaa

SEQ ID NO: 837 - DNA, 1185 bp, Homo sapiens
acagccttgcagcgtctccggaagtggaggcgggagcggcacggcagccactgcttggggtagcgggagggcagactctgggcgccactcccgggccggtcatgaacgggccggcggacggcgaagtggactacaaaaaaaaataccggaatctgaagcggaagctcaagttcctcatctacgagcacgagtgcttccaggaggagctgaggaaagcgcaaaggaaattactgaaggtgtcccgggacaagagtttcctcctagaccgacttctgcagtacgagaacgtggatgaagactcttcggactcagatgccactgcatcatcagataacagcgagacggaggggacacccaagttgtctgacacaccggcccctaagaggaagagaagccctccgctggggggcgccccctctccctccagcctctccctgcctccttcaacagggtttccccttcaggcctccggggtcccctccccatacctgagctcgctggcctcctcccgctaccccccattcccttctgactacctggccctgcagctgcccgagcccagtcccctgaggcccaagcgggagaaacggccccgcctgccccggaaactcaagatggcggtgggaccccccgactgccctgtgggagggccgctgaccttccctggccggggttctggggctggggtcgggacaaccctgacccccctcccaccccctaagatgcccccccccacgatcctgagcacggtccctcggcagatgttcagcgatgcaggtagcggggacgatgccttggatggagacgatgacctggtgatcgacatcccggagtgaccgtgacatcacgccatgcccaccacggccccgcccggcgccctccccgtgccagcacacacgagtccagcttcctcggaggtgtttattgatgcccagctgccatgctccggccactgacacaaccagaaaaggcgtaaacatgcacgggtgtcccccaggagggtggcaggggccctgccttcaaaccccggccccctccaggggacagttatttaaacgagtggccgggagcatctgccacctgctggggaggcagagaccctgcaatggccacctctttaaaagggctgctgtacagggctaggttttttcaatgaagtttctgtattaaaggagtggctctggg

SEQ ID NO: 838 - DNA, 1354 bp, Homo sapiens
gggcgcagcgccgagattgattcaccttcacctgtgctgcactccagctgacccaagtaggaagccagacgagctgtaaaacatgaacggaagagtggattatttggtcactgaggaagagatcaatcttaccagagggccctcagggctgggcttcaacatcgtcggtgggacagatcagcagtatgtctccaacgacagtggcatctacgtcagccgcatcaaagaaaatggggctgcggccctggatgggcggctccaggagggtgataagatcctttcggcaaatggccaagacctaaagaacctgctgcaccaggatgctgtagacctctttcgtaatgcaggctatgctgtgtctctgagagtgcagcacaggttacaggtgcagaatggacctataggacatcgaggtgaaggggacccaagtggtattcccatatttatggtgctggtgccagtgtttgccctcaccatggtagcagcctgggctttcatgagataccggcaacaactttgaaaaacttgctctctttcaatactcccaatgaagatacatttcactcaccctccacccctgctattctgccatgtctttccctctctctgcatagccagatttgaagtgactgatacccaccccaaaccttgctgttcacagtctccaattcttcatattctaatgggaaagtaaaggtattgtttgaaggaaaactgaagaaaagacttggcttagaacaaatgaggagttatatattttactaggacttttgatagaaattcagctacaacccaaagagagaaagattgagtcttcctgtcaccataggcaataccttttttcttagctggcatgccataaaggccagctatgtgatattagaggaagaaaggatttttctttttaatgatcttccttgggaaattattgtggcctttatttaatttctaactacgtacctgggtgcctatatcgacaaagagtgagaagagcatttttacctttttaaaaaagcaaatacatatatacacatacgtatgcaaatattatagtataatagtgatccctatggagaattaaaggtgagaaagctactttgtggtgtctaggtttctgataaaagggatgatcttaactgaagaatttaaagagatacttaaacagagcaaatgtagtaggaacaagggagtgagccttataagaggacgttcagtctcatttattaaaataataactgagactgggagaggtggctcatgcctgtaaatcccagcactttggtagcctgaagtgggagattgcttgagtccaggagaccagcctgggcaacatagcaaaacctcatctctattt

SEQ ID NO: 839 - DNA, 3683 bp, Homo sapiens
aaggccgaaagtcttcggagcttgcgccagtctcttcgcggcgtccaccacttagacgcaagttgctgaagccggccggggagaaggtgttgttgccggagctgagaccgggcggccacagtccgcagggatgaacctcgagttgctggagtcctttgggcagaactatccagaggaagctgatggaactttggattgtatcagcatggctttgacttgcacctttaacaggtggggcacactgcttgcagttggctgtaatgatggccgaattgtcatctgggatttcttgacaagaggcattgctaaaataattagtgcacacatccatccagtgtgttctttatgctggagccgagatggtcataaactcgtgagtgcttccactgataacatagtgtcacagtgggatgttctttcaggcgactgtgaccagaggtttcgattcccttcacccatcttaaaagtccaatatcatccacgagatcagaacaaggttctcgtgtgtcccatgaaatctgctcctgtcatgttgaccctttcagattccaaacatgttgttctgccggtggacgatgactccgatttgaacgttgtggcatcttttgataggcgaggggaatatatttatacgggaaacgcaaaaggcaagattttggtcctaaaaacagattctcaggatcttgttgcttccttcagagtgacaactggaacaagcaataccacagccattaagtcaattgagtttgcccggaaggggagttgctttttaattaacacggcagatcgaataatcagagtttatgatggcagagaaatcttaacatgtggaagagatggagagcctgaacctatgcagaaattgcaggatttggtgaataggaccccatggaagaaatgttgtttctctggggatggggaatacatcgtggcaggttctgcccggcagcatgccctgtacatctgggagaagagcattggcaacctggtgaagattctccatgggacgagaggagaactcctcttggatgtagcttggcatcctgttcgacccatcatagcatccatttccagtggagtggtatctatctgggcacagaatcaagtagaaaactggagtgcatttgcaccagacttcaaagaattggatgaaaatgtagaatacgaagaaagggaatcagagtttgatattgaagatgaagataagagtgagcctgagcagacaggggctgatgctgcagaagatgaggaagtggatgtcaccagcgtggaccctattgctgccttctgtagcagtgatgaagagctggaagattcaaaggctctattgtatttacccattgcccctgaggtagaagacccagaagaaaatccttacggccccccaccggatgcagtccaaacctccttgatggatgaaggggctagttcagagaagaagaggcagtcctcagcagatgggtcccagccacctaagaagaaacccaaaacaaccaatatagaacttcaaggagtaccaaatgatgaagtccatccactactgggtgtgaagggggatggcaaatccaagaagaagcaagcaggccggcctaaaggatcaaaaggtaaagagaaagattctccatttaaaccgaaactctacaaaggggacagaggtttacctctggaaggatcagcgaagggtaaagtgcaggcggaactcagccagcccttgacagcaggaggagcaatctcagaactgttatgaagaccttcgaagttcttcattctttctcactttgccatcatgtggcctctggacactgtggtcagtcatttgaaaattgactttaatttaaaacaaaggcctgtgcctcccacccaggaggtgggagggtgaattttatgtttaaatgaagaagtgaattatggaagaagagtatacgaccttcccttccctttcaagcataagtccaaatagactctcaggaatgaagatttgtgaagacatcagataggaattttgactcatttaaactttgatgcttagttatgttgctggagaaaagatacttatgttttgctcatctaacttcattgtacccagcgtcattttgacatgtcatttcctatctcccatttgccttcggtcctcaatgcatgtctttgagtgacttcttatctgaaattttgctactggtatcctaggaaagcttttgttggatactctcattttaaacttctcctctccccagatacctcctatatttccatattgtgtgcaaaggatgggcagaaaagaaagtgcttgaaagatttcaaattttcagaaagggaacaacgaaggccctctcttcctctcataccacgttttgctcaagaagctgggctgtaacaattcagggttttcccttgttttcctctcattgcatgtttccctccaatattggttcattgtcatcaatcatggtttttgaagatagctagttttatccatctccagcaaagaatcatcaatagtttatattgctttacctgtgctggcttccagagatggaaacaaacccaggtgtctctcaacaagctacttttttactggggtgggggaatctatgcaaggagtaaagtaaaaccatccagaatcaaagcagcaaccacatagttcaaatcaaagatcaaggtgaattttttgtatcactgcctgtggaaatctatcctcatcagtcattgcatttttccctgcctatacctgtgctcctttttcttactgtgttttcagtcacttcctttctgtgaaaggttgcttagctttttttttgacatttgttgttctttataaaaataacagattggatagatgtgtacatttggtgtttgaaattctctgaaaatcccattaggaaaccaggtgtgaaaagggctcagtagcttctctgagtggcgtttttagctgactggaagtgcttaatctggatcgtcttttttttttttttttttttttcaatattttaaaaggagaatttaaatactgtgcttactgtgaaatatatcagttggtgagccgggcgtggtgggtcacgcctgtaatcccagcactttgggaggccaaggcgggttgatcacccgaggtcaggagttcaagaccagcctggccaacgtggtgaaagcctgtatctattaaaagacaaaaattagctgggcgtggtagtacatgcctgtaatcccagctacactggaggctgagtcaggagaatcacttgaacgtgggaggcagaggttgcagtgagtggagatcgcaccactgccctccagcctaggtgacagaatgagactctatctcaaaaaaaaaaaaaaaatgatatcagttggtggatgctcctataggtagccaaacacattgattacctgttagattttaggatagaaatcaaagtagagcacgtcagcaagagcctctttgtctcactccatcatttaaaaccagtatattcagtagttgaagaaagagctctccctgagtcagttgcaaaacgtctatatttttagatgccactacttttttcttaaatattcattttgagactgtcatgagttagaccagtggttgagattagtagatggctcactagacatgtttttgttttgcagacattatatccattccagtcctctgcactgtacactgcagcagtgtgcaaactatg

SEQ ID NO: 840 - DNA, 1808 bp, Homo sapiens
agcctagttacagattgcactgcgtcagactgttccacacccagaagacgtcaggtgacttcagtcctgctgcagttgtgcagcagaggagactgcagacttcggttgaggaaacgggtatttcatgtctcagggagtaggtttgtgcagttacagcttttctgttggtatgcataattaataattggagctgcaaagcagatcgtgacaagagatggacggtcagaagaaaaattggaaggacaaggttgttgacctcctgtactggagagacattaagaagactggagtggtgtttggtgccagcctattcctgctgctttcattgacagtattcagcattgtgagcgtaacagcctacattgccttggccctgctctctgtgaccatcagctttaggatatacaagggtgtgatccaagctatccagaaatcagatgaaggccacccattcagggcatatctggaatctgaagttgctatatctgaggagttggttcagaagtacagtaattctgctcttggtcatgtgaactgcacgataaaggaactcaggcgcctcttcttagttgatgatttagttgattctctgaagtttgcagtgttgatgtgggtatttacctatgttggtgccttgtttaatggtctgacactactgattttggctctcatttcactcttcagtgttcctgttatttatgaacggcatcaggcacagatagatcattatctaggacttgcaaataagaatgttaaagatgctatggctaaaatccaagcaaaaatccctggattgaagcgcaaagctgaatgaaaacgcccaaaataattagtaggagttcatctttaaaggggatattcatttgattatacgggggagggtcagggaagaacgaaccttgacgttgcagtgcagtttcacagatcgttgttagatctttatttttagccatgcactgttgtgaggaaaaattacctgtcttgactgccatgtgttcatcatcttaagtattgtaagctgctatgtatggatttaaaccgtaatcatatctttttcctatctatctgaggcactggtggaataaaaaacctgtatattttactttgttgcagatagtcttgccgcatcttggcaagttgcagagatggtggagctagaaaaaaaaaaaaaaaagcccttttcagtttgtgcactgtgtatggtccgtgtagattgatgcagattttctgaaatgaaatgtttgtttagacgagatcataccggtaaagcaggaatgacaaagcttgcttttctggtatgttctaggtgtattgtgacttttactgttatattaattgccaatataagtaaatatagattatatatgtatagtgtttcacaaagcttagacctttaccttccagccaccccacagtgcttgatatttcagagtcagtcattggttatacatgtgtagttccaaagcacataagctagaagaagaaatatttctaggagcactaccatctgttttcaacatgaaatgccacacacatagaactccaacatcaatttcattgcacagactgactgtagttaattttgtcacagaatctatggactgaatctaatgcttccaaaaatgttgtttgtttgcaaatatcaaacattgttatgcaagaaattattaattacaaaatgaagatttataccattgtggtttaagctgtactgaactaaatctgtggaatgcattgtgaactgtaaaagcaaagtatcaataaagcttatagacttaaaaaaaaaaaaaaaaaaaaaaaaaaaaaaa

SEQ ID NO: 841 - DNA, 4871 bp, Homo sapiens
agtccctgccctcccctggggagggtgagtcacgccaaactgggcggagagtccgctggcctcactcctagctcatctgggcggcggcggcaagtggggacagggcgggtggcgcatcaccggcgcggaggcaggaggagcagtctcattgttccgggagccgtcaccacagtaggtccctcggctcagtcggcccagcccctctcagtcctccccaacccccacaaccgcccgcggctctgagacgcggccccggcggcggcggcagcagctgcagcatcatctccaccctccagccatggaagacctggaccagtctcctctggtctcgtcctcggacagcccaccccggccgcagcccgcgttcaagtaccagttcgtgagggagcccgaggacgaggaggaagaagaggaggaggaagaggaggacgaggacgaagacctggaggagctggaggtgctggagaggaagcccgccgccgggctgtccgcggccccagtgcccaccgcccctgccgccggcgcgcccctgatggacttcggaaatgacttcgtgccgccggcgccccggggacccctgccggccgctccccccgtcgccccggagcggcagccgtcttgggacccgagcccggtgtcgtcgaccgtgcccgcgccatccccgctgtctgctgccgcagtctcgccctccaagctccctgaggacgacgagcctccggcccggcctccccctcctcccccggccagcgtgagcccccaggcagagcccgtgtggaccccgccagccccggctcccgccgcgcccccctccaccccggccgcgcccaagcgcaggggctcctcgggctcagtggatgagaccctttttgctcttcctgctgcatctgagcctgtgatacgctcctctgcagaaaatatggacttgaaggagcagccaggtaacactatttcggctggtcaagaggatttcccatctgtcctgcttgaaactgctgcttctcttccttctctgtctcctctctcagccgcttctttcaaagaacatgaataccttggtaatttgtcaacagtattacccactgaaggaacacttcaagaaaatgtcagtgaagcttctaaagaggtctcagagaaggcaaaaactctactcatagatagagatttaacagagttttcagaattagaatactcagaaatgggatcatcgttcagtgtctctccaaaagcagaatctgccgtaatagtagcaaatcctagggaagaaataatcgtgaaaaataaagatgaagaagagaagttagttagtaataacatccttcataatcaacaagagttacctacagctcttactaaattggttaaagaggatgaagttgtgtcttcagaaaaagcaaaagacagttttaatgaaaagagagttgcagtggaagctcctatgagggaggaatatgcagacttcaaaccatttgagcgagtatgggaagtgaaagatagtaaggaagatagtgatatgttggctgctggaggtaaaatcgagagcaacttggaaagtaaagtggataaaaaatgttttgcagatagccttgagcaaactaatcacgaaaaagatagtgagagtagtaatgatgatacttctttccccagtacgccagaaggtataaaggatcgttcaggagcatatatcacatgtgctccctttaacccagcagcaactgagagcattgcaacaaacatttttcctttgttaggagatcctacttcagaaaataagaccgatgaaaaaaaaatagaagaaaagaaggcccaaatagtaacagagaagaatactagcaccaaaacatcaaacccttttcttgtagcagcacaggattctgagacagattatgtcacaacagataatttaacaaaggtgactgaggaagtcgtggcaaacatgcctgaaggcctgactccagatttagtacaggaagcatgtgaaagtgaattgaatgaagttactggtacaaagattgcttatgaaacaaaaatggacttggttcaaacatcagaagttatgcaagagtcactctatcctgcagcacagctttgcccatcatttgaagagtcagaagctactccttcaccagttttgcctgacattgttatggaagcaccattgaattctgcagttcctagtgctggtgcttccgtgatacagcccagctcatcaccattagaagcttcttcagttaattatgaaagcataaaacatgagcctgaaaaccccccaccatatgaagaggccatgagtgtatcactaaaaaaagtatcaggaataaaggaagaaattaaagagcctgaaaatattaatgcagctcttcaagaaacagaagctccttatatatctattgcatgtgatttaattaaagaaacaaagctttctgctgaaccagctccggatttctctgattattcagaaatggcaaaagttgaacagccagtgcctgatcattctgagctagttgaagattcctcacctgattctgaaccagttgacttatttagtgatgattcaatacctgacgttccacaaaaacaagatgaaactgtgatgcttgtgaaagaaagtctcactgagacttcatttgagtcaatgatagaatatgaaaataaggaaaaactcagtgctttgccacctgagggaggaaagccatatttggaatcttttaagctcagtttagataacacaaaagataccctgttacctgatgaagtttcaacattgagcaaaaaggagaaaattcctttgcagatggaggagctcagtactgcagtttattcaaatgatgacttatttatttctaaggaagcacagataagagaaactgaaacgttttcagattcatctccaattgaaattatagatgagttccctacattgatcagttctaaaactgattcattttctaaattagccagggaatatactgacctagaagtatcccacaaaagtgaaattgctaatgccccggatggagctgggtcattgccttgcacagaattgccccatgacctttctttgaagaacatacaacccaaagttgaagagaaaatcagtttctcagatgacttttctaaaaatgggtctgctacatcaaaggtgctcttattgcctccagatgtttctgctttggccactcaagcagagatagagagcatagttaaacccaaagttcttgtgaaagaagctgagaaaaaacttccttccgatacagaaaaagaggacagatcaccatctgctatattttcagcagagctgagtaaaacttcagttgttgacctcctgtactggagagacattaagaagactggagtggtgtttggtgccagcctattcctgctgctttcattgacagtattcagcattgtgagcgtaacagcctacattgccttggccctgctctctgtgaccatcagctttaggatatacaagggtgtgatccaagctatccagaaatcagatgaaggccacccattcagggcatatctggaatctgaagttgctatatctgaggagttggttcagaagtacagtaattctgctcttggtcatgtgaactgcacgataaaggaactcaggcgcctcttcttagttgatgatttagttgattctctgaagtttgcagtgttgatgtgggtatttacctatgttggtgccttgtttaatggtctgacactactgattttggctctcatttcactcttcagtgttcctgttatttatgaacggcatcaggcacagatagatcattatctaggacttgcaaataagaatgttaaagatgctatggctaaaatccaagcaaaaatccctggattgaagcgcaaagctgaatgaaaacgcccaaaataattagtaggagttcatctttaaaggggatattcatttgattatacgggggagggtcagggaagaacgaaccttgacgttgcagtgcagtttcacagatcgttgttagatctttatttttagccatgcactgttgtgaggaaaaattacctgtcttgactgccatgtgttcatcatcttaagtattgtaagctgctatgtatggatttaaaccgtaatcatatctttttcctatctatctgaggcactggtggaataaaaaacctgtatattttactttgttgcagatagtcttgccgcatcttggcaagttgcagagatggtggagctagaaaaaaaaaaaaaaaagcccttttcagtttgtgcactgtgtatggtccgtgtagattgatgcagattttctgaaatgaaatgtttgtttagacgagatcataccggtaaagcaggaatgacaaagcttgcttttctggtatgttctaggtgtattgtgacttttactgttatattaattgccaatataagtaaatatagattatatatgtatagtgtttcacaaagcttagacctttaccttccagccaccccacagtgcttgatatttcagagtcagtcattggttatacatgtgtagttccaaagcacataagctagaagaagaaatatttctaggagcactaccatctgttttcaacatgaaatgccacacacatagaactccaacatcaatttcattgcacagactgactgtagttaattttgtcacagaatctatggactgaatctaatgcttccaaaaatgttgtttgtttgcaaatatcaaacattgttatgcaagaaattattaattacaaaatgaagatttataccattgtggtttaagctgtactgaactaaatctgtggaatgcattgtgaactgtaaaagcaaagtatcaataaagcttatagacttaaaaaaaaaaaaaaaaaaaaaaaaaaaaaaa

SEQ ID NO: 842 - DNA, 2414 bp, Homo sapiens
agtccctgccctcccctggggagggtgagtcacgccaaactgggcggagagtccgctggcctcactcctagctcatctgggcggcggcggcaagtggggacagggcgggtggcgcatcaccggcgcggaggcaggaggagcagtctcattgttccgggagccgtcaccacagtaggtccctcggctcagtcggcccagcccctctcagtcctccccaacccccacaaccgcccgcggctctgagacgcggccccggcggcggcggcagcagctgcagcatcatctccaccctccagccatggaagacctggaccagtctcctctggtctcgtcctcggacagcccaccccggccgcagcccgcgttcaagtaccagttcgtgagggagcccgaggacgaggaggaagaagaggaggaggaagaggaggacgaggacgaagacctggaggagctggaggtgctggagaggaagcccgccgccgggctgtccgcggccccagtgcccaccgcccctgccgccggcgcgcccctgatggacttcggaaatgacttcgtgccgccggcgccccggggacccctgccggccgctccccccgtcgccccggagcggcagccgtcttgggacccgagcccggtgtcgtcgaccgtgcccgcgccatccccgctgtctgctgccgcagtctcgccctccaagctccctgaggacgacgagcctccggcccggcctccccctcctcccccggccagcgtgagcccccaggcagagcccgtgtggaccccgccagccccggctcccgccgcgcccccctccaccccggccgcgcccaagcgcaggggctcctcgggctcagtggttgttgacctcctgtactggagagacattaagaagactggagtggtgtttggtgccagcctattcctgctgctttcattgacagtattcagcattgtgagcgtaacagcctacattgccttggccctgctctctgtgaccatcagctttaggatatacaagggtgtgatccaagctatccagaaatcagatgaaggccacccattcagggcatatctggaatctgaagttgctatatctgaggagttggttcagaagtacagtaattctgctcttggtcatgtgaactgcacgataaaggaactcaggcgcctcttcttagttgatgatttagttgattctctgaagtttgcagtgttgatgtgggtatttacctatgttggtgccttgtttaatggtctgacactactgattttggctctcatttcactcttcagtgttcctgttatttatgaacggcatcaggcacagatagatcattatctaggacttgcaaataagaatgttaaagatgctatggctaaaatccaagcaaaaatccctggattgaagcgcaaagctgaatgaaaacgcccaaaataattagtaggagttcatctttaaaggggatattcatttgattatacgggggagggtcagggaagaacgaaccttgacgttgcagtgcagtttcacagatcgttgttagatctttatttttagccatgcactgttgtgaggaaaaattacctgtcttgactgccatgtgttcatcatcttaagtattgtaagctgctatgtatggatttaaaccgtaatcatatctttttcctatctatctgaggcactggtggaataaaaaacctgtatattttactttgttgcagatagtcttgccgcatcttggcaagttgcagagatggtggagctagaaaaaaaaaaaaaaaagcccttttcagtttgtgcactgtgtatggtccgtgtagattgatgcagattttctgaaatgaaatgtttgtttagacgagatcataccggtaaagcaggaatgacaaagcttgcttttctggtatgttctaggtgtattgtgacttttactgttatattaattgccaatataagtaaatatagattatatatgtatagtgtttcacaaagcttagacctttaccttccagccaccccacagtgcttgatatttcagagtcagtcattggttatacatgtgtagttccaaagcacataagctagaagaagaaatatttctaggagcactaccatctgttttcaacatgaaatgccacacacatagaactccaacatcaatttcattgcacagactgactgtagttaattttgtcacagaatctatggactgaatctaatgcttccaaaaatgttgtttgtttgcaaatatcaaacattgttatgcaagaaattattaattacaaaatgaagatttataccattgtggtttaagctgtactgaactaaatctgtggaatgcattgtgaactgtaaaagcaaagtatcaataaagcttatagacttaaaaaaaaaaaaaaaaaaaaaaaaaaaaaaa

SEQ ID NO: 843 - DNA, 2471 bp, Homo sapiens
agtccctgccctcccctggggagggtgagtcacgccaaactgggcggagagtccgctggcctcactcctagctcatctgggcggcggcggcaagtggggacagggcgggtggcgcatcaccggcgcggaggcaggaggagcagtctcattgttccgggagccgtcaccacagtaggtccctcggctcagtcggcccagcccctctcagtcctccccaacccccacaaccgcccgcggctctgagacgcggccccggcggcggcggcagcagctgcagcatcatctccaccctccagccatggaagacctggaccagtctcctctggtctcgtcctcggacagcccaccccggccgcagcccgcgttcaagtaccagttcgtgagggagcccgaggacgaggaggaagaagaggaggaggaagaggaggacgaggacgaagacctggaggagctggaggtgctggagaggaagcccgccgccgggctgtccgcggccccagtgcccaccgcccctgccgccggcgcgcccctgatggacttcggaaatgacttcgtgccgccggcgccccggggacccctgccggccgctccccccgtcgccccggagcggcagccgtcttgggacccgagcccggtgtcgtcgaccgtgcccgcgccatccccgctgtctgctgccgcagtctcgccctccaagctccctgaggacgacgagcctccggcccggcctccccctcctcccccggccagcgtgagcccccaggcagagcccgtgtggaccccgccagccccggctcccgccgcgcccccctccaccccggccgcgcccaagcgcaggggctcctcgggctcagtggatgagaccctttttgctcttcctgctgcatctgagcctgtgatacgctcctctgcagttgttgacctcctgtactggagagacattaagaagactggagtggtgtttggtgccagcctattcctgctgctttcattgacagtattcagcattgtgagcgtaacagcctacattgccttggccctgctctctgtgaccatcagctttaggatatacaagggtgtgatccaagctatccagaaatcagatgaaggccacccattcagggcatatctggaatctgaagttgctatatctgaggagttggttcagaagtacagtaattctgctcttggtcatgtgaactgcacgataaaggaactcaggcgcctcttcttagttgatgatttagttgattctctgaagtttgcagtgttgatgtgggtatttacctatgttggtgccttgtttaatggtctgacactactgattttggctctcatttcactcttcagtgttcctgttatttatgaacggcatcaggcacagatagatcattatctaggacttgcaaataagaatgttaaagatgctatggctaaaatccaagcaaaaatccctggattgaagcgcaaagctgaatgaaaacgcccaaaataattagtaggagttcatctttaaaggggatattcatttgattatacgggggagggtcagggaagaacgaaccttgacgttgcagtgcagtttcacagatcgttgttagatctttatttttagccatgcactgttgtgaggaaaaattacctgtcttgactgccatgtgttcatcatcttaagtattgtaagctgctatgtatggatttaaaccgtaatcatatctttttcctatctatctgaggcactggtggaataaaaaacctgtatattttactttgttgcagatagtcttgccgcatcttggcaagttgcagagatggtggagctagaaaaaaaaaaaaaaaagcccttttcagtttgtgcactgtgtatggtccgtgtagattgatgcagattttctgaaatgaaatgtttgtttagacgagatcataccggtaaagcaggaatgacaaagcttgcttttctggtatgttctaggtgtattgtgacttttactgttatattaattgccaatataagtaaatatagattatatatgtatagtgtttcacaaagcttagacctttaccttccagccaccccacagtgcttgatatttcagagtcagtcattggttatacatgtgtagttccaaagcacataagctagaagaagaaatatttctaggagcactaccatctgttttcaacatgaaatgccacacacatagaactccaacatcaatttcattgcacagactgactgtagttaattttgtcacagaatctatggactgaatctaatgcttccaaaaatgttgtttgtttgcaaatatcaaacattgttatgcaagaaattattaattacaaaatgaagatttataccattgtggtttaagctgtactgaactaaatctgtggaatgcattgtgaactgtaaaagcaaagtatcaataaagcttatagacttaaaaaaaaaaaaaaaaaaaaaaaaaaaaaaa

SEQ ID NO: 844 - DNA, 4129 bp, Homo sapiens
gtgctcgtggggagctggccgagtggaaaacgtccacattgacccaaccgcagtgaagggagagcgcctccagtggtgtggtgcgtggagaaatgggaaggagagagttctgatgagaccctttttgctcttcctgctgcatctgagcctgtgatacgctcctctgcagaaaatatggacttgaaggagcagccaggtaacactatttcggctggtcaagaggatttcccatctgtcctgcttgaaactgctgcttctcttccttctctgtctcctctctcagccgcttctttcaaagaacatgaataccttggtaatttgtcaacagtattacccactgaaggaacacttcaagaaaatgtcagtgaagcttctaaagaggtctcagagaaggcaaaaactctactcatagatagagatttaacagagttttcagaattagaatactcagaaatgggatcatcgttcagtgtctctccaaaagcagaatctgccgtaatagtagcaaatcctagggaagaaataatcgtgaaaaataaagatgaagaagagaagttagttagtaataacatccttcataatcaacaagagttacctacagctcttactaaattggttaaagaggatgaagttgtgtcttcagaaaaagcaaaagacagttttaatgaaaagagagttgcagtggaagctcctatgagggaggaatatgcagacttcaaaccatttgagcgagtatgggaagtgaaagatagtaaggaagatagtgatatgttggctgctggaggtaaaatcgagagcaacttggaaagtaaagtggataaaaaatgttttgcagatagccttgagcaaactaatcacgaaaaagatagtgagagtagtaatgatgatacttctttccccagtacgccagaaggtataaaggatcgttcaggagcatatatcacatgtgctccctttaacccagcagcaactgagagcattgcaacaaacatttttcctttgttaggagatcctacttcagaaaataagaccgatgaaaaaaaaatagaagaaaagaaggcccaaatagtaacagagaagaatactagcaccaaaacatcaaacccttttcttgtagcagcacaggattctgagacagattatgtcacaacagataatttaacaaaggtgactgaggaagtcgtggcaaacatgcctgaaggcctgactccagatttagtacaggaagcatgtgaaagtgaattgaatgaagttactggtacaaagattgcttatgaaacaaaaatggacttggttcaaacatcagaagttatgcaagagtcactctatcctgcagcacagctttgcccatcatttgaagagtcagaagctactccttcaccagttttgcctgacattgttatggaagcaccattgaattctgcagttcctagtgctggtgcttccgtgatacagcccagctcatcaccattagaagcttcttcagttaattatgaaagcataaaacatgagcctgaaaaccccccaccatatgaagaggccatgagtgtatcactaaaaaaagtatcaggaataaaggaagaaattaaagagcctgaaaatattaatgcagctcttcaagaaacagaagctccttatatatctattgcatgtgatttaattaaagaaacaaagctttctgctgaaccagctccggatttctctgattattcagaaatggcaaaagttgaacagccagtgcctgatcattctgagctagttgaagattcctcacctgattctgaaccagttgacttatttagtgatgattcaatacctgacgttccacaaaaacaagatgaaactgtgatgcttgtgaaagaaagtctcactgagacttcatttgagtcaatgatagaatatgaaaataaggaaaaactcagtgctttgccacctgagggaggaaagccatatttggaatcttttaagctcagtttagataacacaaaagataccctgttacctgatgaagtttcaacattgagcaaaaaggagaaaattcctttgcagatggaggagctcagtactgcagtttattcaaatgatgacttatttatttctaaggaagcacagataagagaaactgaaacgttttcagattcatctccaattgaaattatagatgagttccctacattgatcagttctaaaactgattcattttctaaattagccagggaatatactgacctagaagtatcccacaaaagtgaaattgctaatgccccggatggagctgggtcattgccttgcacagaattgccccatgacctttctttgaagaacatacaacccaaagttgaagagaaaatcagtttctcagatgacttttctaaaaatgggtctgctacatcaaaggtgctcttattgcctccagatgtttctgctttggccactcaagcagagatagagagcatagttaaacccaaagttcttgtgaaagaagctgagaaaaaacttccttccgatacagaaaaagaggacagatcaccatctgctatattttcagcagagctgagtaaaacttcagttgttgacctcctgtactggagagacattaagaagactggagtggtgtttggtgccagcctattcctgctgctttcattgacagtattcagcattgtgagcgtaacagcctacattgccttggccctgctctctgtgaccatcagctttaggatatacaagggtgtgatccaagctatccagaaatcagatgaaggccacccattcagggcatatctggaatctgaagttgctatatctgaggagttggttcagaagtacagtaattctgctcttggtcatgtgaactgcacgataaaggaactcaggcgcctcttcttagttgatgatttagttgattctctgaagtttgcagtgttgatgtgggtatttacctatgttggtgccttgtttaatggtctgacactactgattttggctctcatttcactcttcagtgttcctgttatttatgaacggcatcaggcacagatagatcattatctaggacttgcaaataagaatgttaaagatgctatggctaaaatccaagcaaaaatccctggattgaagcgcaaagctgaatgaaaacgcccaaaataattagtaggagttcatctttaaaggggatattcatttgattatacgggggagggtcagggaagaacgaaccttgacgttgcagtgcagtttcacagatcgttgttagatctttatttttagccatgcactgttgtgaggaaaaattacctgtcttgactgccatgtgttcatcatcttaagtattgtaagctgctatgtatggatttaaaccgtaatcatatctttttcctatctatctgaggcactggtggaataaaaaacctgtatattttactttgttgcagatagtcttgccgcatcttggcaagttgcagagatggtggagctagaaaaaaaaaaaaaaaagcccttttcagtttgtgcactgtgtatggtccgtgtagattgatgcagattttctgaaatgaaatgtttgtttagacgagatcataccggtaaagcaggaatgacaaagcttgcttttctggtatgttctaggtgtattgtgacttttactgttatattaattgccaatataagtaaatatagattatatatgtatagtgtttcacaaagcttagacctttaccttccagccaccccacagtgcttgatatttcagagtcagtcattggttatacatgtgtagttccaaagcacataagctagaagaagaaatatttctaggagcactaccatctgttttcaacatgaaatgccacacacatagaactccaacatcaatttcattgcacagactgactgtagttaattttgtcacagaatctatggactgaatctaatgcttccaaaaatgttgtttgtttgcaaatatcaaacattgttatgcaagaaattattaattacaaaatgaagatttataccattgtggtttaagctgtactgaactaaatctgtggaatgcattgtgaactgtaaaagcaaagtatcaataaagcttatagacttaaaaaaaaaaaaaaaaaaaaaaaaaaaaaaa

SEQ ID NO: 845 - DNA, 3083 bp, Homo sapiens
cagaggcgcgcctggcggatctgagtgtgttgcccgggcagcggcgcgcgggaccaacgcaaggagcagctgacagacgaagaaaagtgctggacaggaagggagaattctgacgccaacatgcagcgaagtatcatgtcatttttccaccccaagaaagagggtaaagcaaagaagcctgagaaggaggcatccaatagcagcagagagacggagccccctccaaaggcggcactgaaggagtggaatggagtggtgtccgagagtgactctccggtgaagaggccagggaggaaggcggcccgggtcctgggcagcgaaggggaagaggaggatgaagcccttagccctgctaaaggccagaagcctgccctggactgctcacaggtctccccgccccgtcctgccacatctcctgagaacaatgcttccctctctgacacctctcccatggacagttccccatcagggattccgaagcgtcgcacagctcggaagcagctcccgaaacggaccattcaggaagtcctggaagagcagagtgaggacgaggacagagaagccaagaggaagaaggaggaggaagaagaggagaccccgaaagaaagcctcacagaggctgaagtggcaacagagaaggaaggagaagacggggaccagcccaccacgcctcccaagcccctaaagacctccaaagcagagaccccgacggaaagcgtttcagagcctgaggtggccacgaagcaggaactgcaggaggaggaagagcagaccaagcctccccgcagagctcccaagacgctcagcagcttcttcaccccccggaagccagcagtcaaaaaagaagtgaaggaagaggagccaggggctccaggaaaggagggagctgctgagggacccctggatccatctggttacaatcctgccaagaacaactatcatcccgtggaagatgcctgctggaaaccgggccagaaggttccttacctggctgtggcccggacgtttgagaagatcgaggaggtgtctgctcggctccggatggtggagacgctgagcaacttgctgcgctccgtggtggccctgtcgcctccagacctcctccctgtcctctacctcagcctcaaccaccttgggccaccccagcagggcctggagcttggcgtgggtgatggtgtccttctcaaggcagtggcccaggccacaggtcggcagctggagtccgtccgggctgaggcagccgagaaaggcgacgtggggctggtggccgagaacagccgcagcacccagaggctcatgctgccaccacctccgctcactgcctccggggtcttcagcaagttccgcgacatcgccaggctcactggcagtgcttccacagccaagaagatagacatcatcaaaggcctctttgtggcctgccgccactcagaagcccggttcatcgctaggtccctgagcggacggctgcgccttgggctggcagagcagtcggtgctggctgccctctcccaggcagtgagcctcacgcccccgggccaagaattcccaccagccatggtggatgctgggaagggcaagacagcagaggccagaaagacgtggctggaggagcaaggcatgatcctgaagcagacgttctgcgaggttcccgacctggaccgaattatccccgtgctgctggagcacggcctggaacgtctcccggagcactgcaagctgagcccagggattcccctgaaaccaatgttggcccatcccacccggggcatcagcgaggtcctgaaacgctttgaggaggcagctttcacctgcgaatacaaatatgacgggcagagggcacagatccacgccctggaaggcggggaggtgaagatcttcagcaggaatcaggaagacaacactgggaagtacccggacatcatcagccgcatccccaagattaaactcccatcggtcacatccttcatcctggacaccgaagccgtggcttgggaccgggaaaagaagcagatccagccattccaagtgctcaccacccgcaaacgcaaggaggtggatgcgtctgagatccaggtgcaggtgtgtttgtacgccttcgacctcatctacctcaatggagagtccctggtacgtgagcccctttcccggcgccggcagctgctccgggagaactttgtggagacagagggcgagtttgtcttcgccacctccctggacaccaaggacatcgagcagatcgccgagttcctggagcagtcagtgaaagactcctgcgaggggctgatggtgaagaccctggatgttgatgccacctacgagatcgccaagagatcgcacaactggctcaagctgaagaaggactaccttgatggcgtgggtgacaccctggacctggtggtgatcggcgcctacctgggccgggggaagcgggccggccggtacgggggcttcctgctggcctcctacgacgaggacagtgaggagctgcaggccatatgcaagcttggaactggcttcagtgatgaggagctggaggagcatcaccagagcctcaaggcgctggtgctgcccagcccacgcccttacgtgcggatagatggcgctgtgattcccgaccactggctggaccccagcgctgtgtgggaggtgaagtgcgctgacctctccctctctcccatctaccctgctgcgcggggcctggtggatagtgacaagggcatctcccttcgcttccctcggtttattcgagtccgtgaagacaagcagccggagcaggccaccaccagtgctcaggtggcctgtttgtaccggaagcaaagtcagattcagaaccaacaaggcgaggactcaggctctgaccctgaagatacctactaagccctcgccctcctagggcctgggtacagggcatgagttggacggaccccagggttattattgcctttgctttttagcaaatctgctgtggcaggctgtggattttgagagtcaggggaggggtgtgtgtgtgagggggtggcttactccggagtctgggattcatcccgtcatttctttcaataaataattattggatagct

SEQ ID NO: 846 - DNA, 2924 bp, Homo sapiens
ggcttctggttcggcccacctctgaaggttccagaatcgatagtgaattcgtggttccaagtttggagcttttagctgccagccctggcccatcatgtagctgcagcacagccttccctaacgttgcaactgggggaaaaatcactttccagtctgttttgcaaggtgtgcatttccatcttgattccctgaaagtccatctgctgcatcggtcaagagaaactccacttgcatgaagattgcacgcctgcagcttgcatctttgttgcaaaactagctacagaagagaagcaaggcaaagtcttttgtgctcccctcccccatcaaaggaaaggggaaaatgtctcagtcgaaaggcaagaagcgaaaccctggccttaaaattccaaaagaagcatttgaacaacctcagaccagttccacaccacctcgagatttagactccaaggcttgcatttctattggaaatcagaactttgaggtgaaggcagatgacctggagcctataatggaactgggacgaggtgcgtacggggtggtggagaagatgcggcacgtgcccagcgggcagatcatggcagtgaagcggatccgagccacagtaaatagccaggaacagaaacggctactgatggatttggatatttccatgaggacggtggactgtccattcactgtcaccttttatggcgcactgtttcgggagggtgatgtgtggatctgcatggagctcatggatacatcactagataaattctacaaacaagttattgataaaggccagacaattccagaggacatcttagggaaaatagcagtttctattgtaaaagcattagaacatttacatagtaagctgtctgtcattcacagagacgtcaagccttctaatgtactcatcaatgctctcggtcaagtgaagatgtgcgattttggaatcagtggctacttggtggactctgttgctaaaacaattgatgcaggttgcaaaccatacatggcccctgaaagaataaacccagagctcaaccagaagggatacagtgtgaagtctgacatttggagtctgggcatcacgatgattgagttggccatccttcgatttccctatgattcatggggaactccatttcagcagctcaaacaggtggtagaggagccatcgccacaactcccagcagacaagttctctgcagagtttgttgactttacctcacagtgcttaaagaagaattccaaagaacggcctacatacccagagctaatgcaacatccatttttcaccctacatgaatccaaaggaacagatgtggcatcttttgtaaaactgattcttggagactaaaaagcagtggacttaatcggttgaccctactgtggattggtgggtttcggggtgaagcaagttcactacagcatcaatagaaagtcatctttgagataatttaaccctgcctctcagagggttttctctcccaattttctttttactccccctcttaagggggccttggaatctatagtatagaatgaactgtctagatggatgaattatgataaaggcttaggacttcaaaaggtgattaaatatttaatgatgtgtcatatgagtcctcaagcttctcagacttctcttattctttacaaaatgaatgcattggccctgacaaaaaggtgctacggtagtgatgaaattataagtagatttgtagtttgtcccatttattattttaatatttatgtttaagtgcttggttgaaaagattccattttatacaagaagggagattcaaaaaaaaaatataaggttgggttagcaatatttatagggcttttattttttaagttcaattgtgtctgtggtccagaagaaattatttaatatgcatctttgagaatattataaaaatatcaaaaaggagctcttcttgtgaaatgtctgttccagctgttgtgactgctgccatttttggaaacatctgcccaatcctgggtgatcaccacatcttttaggggaagtgacaagatgctctggtcatactctttttcccaactttggaaaacataaaaatcactcatataacagctcaaagagtaaaacatttggttcttctgacacttgtggtatagtattagtggaaagtgatttgtaatatgattttatatccacctacctattcatctacctgtgtgtatgtgtgtgtttgtgtgtctatttggcaattcacaagtcctgccaagtggtttctatgagcatctctgtttggtaaggaggacaattgtcagttttgagggggacatgtgttaaatcacagaaaaaaatggtgccttcttctgcgtttgtccctcctgccatgtgtaagttgtaaggattgcctttgtagttaatgtactctttggctttgtttgtttgttttcttcttcagtgaagcagccttactattcatagaagggctagaataggagaaaatgaaaggtagtgagtaattctttgataagatgaggaaataatgggaaaggttgaattaattcctgggcatggactaccagatgaccacaagttgcgttgaggccgcatctttcttcagcagcgtgcaatagctggctcctctataggagatgagcttcattgggagttcctagcaagttgactaaacagcaaaagttctttctcgtgggtaaatatacccacaggttctatgatttgtagctctaggtttcttgatgatcaaggagtgaagtaattgacagggaaaatatagacctatgataaataaccaggaagcattgcttttggacaaggaagaacagagggttttgattttaaaaagaagaaaaaaaaaccttattttttctttcttggcctcaagttcaatatggagaggattgcttccctgaatcctctcttccttccccttttagag

SEQ ID NO: 847 - DNA, 2820 bp, Homo sapiens
gcagagtgttgctgtgtgtgcttgtgatttgtattttatttgatgtaaacgtgaaggcagagtattttctaacactgtaattcaactaggttttgtgtctcctggatctatttttttttcttgttgttctgaggagctgatatacttggaaatattaggtttaagatatgcagatgtccaacttatatacatagtcaagggtttagagtctggagacaggaggctggcaatttcaactagggggcaggtcaggcaagaagcgaaaccctggccttaaaattccaaaagaagcatttgaacaacctcagaccagttccacaccacctcgagatttagactccaaggcttgcatttctattggaaatcagaactttgaggtgaaggcagatgacctggagcctataatggaactgggacgaggtgcgtacggggtggtggagaagatgcggcacgtgcccagcgggcagatcatggcagtgaagcggatccgagccacagtaaatagccaggaacagaaacggctactgatggatttggatatttccatgaggacggtggactgtccattcactgtcaccttttatggcgcactgtttcgggagggtgatatgtggatctgcatggagctcatggatacatcactagataaattctacaaacaagttattgataaaggccagacaattccagaggacatcttagggaaaatagcagtttctattgtaaaagcattagaacatttacatagtaagctgtctgtcattcacagagacgtcaagccttctaatgtactcatcaatgctctcggtcaagtgaagatgtgcgattttggaatcagtggctacttggtggactctgttgctaaaacaattgatgcaggttgcaaaccatacatggcccctgaaagaataaacccagagctcaaccagaagggatacagtgtgaagtctgacatttggagtctgggcatcacgatgattgagttggccatccttcgatttccctatgattcatggggaactccatttcagcagctcaaacaggtggtagaggagccatcgccacaactcccagcagacaagttctctgcagagtttgttgactttacctcacagtgcttaaagaagaattccaaagaacggcctacatacccagagctaatgcaacatccatttttcaccctacatgaatccaaaggaacagatgtggcatcttttgtaaaactgattcttggagactaaaaagcagtggacttaatcggttgaccctactgtggattggtgggtttcggggtgaagcaagttcactacagcatcaatagaaagtcatctttgagataatttaaccctgcctctcagagggttttctctcccaattttctttttactccccctcttaagggggccttggaatctatagtatagaatgaactgtctagatggatgaattatgataaaggcttaggacttcaaaaggtgattaaatatttaatgatgtgtcatatgagtcctcaagcttctcagacttctcttattctttacaaaatgaatgcattggccctgacaaaaaggtgctacggtagtgatgaaattataagtagatttgtagtttgtcccatttattattttaatatttatgtttaagtgcttggttgaaaagattccattttatacaagaagggagattcaaaaaaaaaatataaggttgggttagcaatatttatagggcttttattttttaagttcaattgtgtctgtggtccagaagaaattatttaatatgcatctttgagaatattataaaaatatcaaaaaggagctcttcttgtgaaatgtctgttccagctgttgtgactgctgccatttttggaaacatctgcccaatcctgggtgatcaccacatcttttaggggaagtgacaagatgctctggtcatactctttttcccaactttggaaaacataaaaatcactcatataacagctcaaagagtaaaacatttggttcttctgacacttgtggtatagtattagtggaaagtgatttgtaatatgattttatatccacctacctattcatctacctgtgtgtatgtgtgtgtttgtgtgtctatttggcaattcacaagtcctgccaagtggtttctatgagcatctctgtttggtaaggaggacaattgtcagttttgagggggacatgtgttaaatcacagaaaaaaatggtgccttcttctgcgtttgtccctcctgccatgtgtaagttgtaaggattgcctttgtagttaatgtactctttggctttgtttgtttgttttcttcttcagtgaagcagccttactattcatagaagggctagaataggagaaaatgaaaggtagtgagtaattctttgataagatgaggaaataatgggaaaggttgaattaattcctgggcatggactaccagatgaccacaagttgcgttgaggccgcatctttcttcagcagcgtgcaatagctggctcctctataggagatgagcttcattgggagttcctagcaagttgactaaacagcaaaagttctttctcgtgggtaaatatacccacaggttctatgatttgtagctctaggtttcttgatgatcaaggagtgaagtaattgacagggaaaatatagacctatgataaataaccaggaagcattgcttttggacaaggaagaacagagggttttgattttaaaaagaagaaaaaaaaaccttattttttctttcttggcctcaagttcaatatggagaggattgcttccctgaatcctctcttccttccccttttagag

SEQ ID NO: 848 - DNA, 2117 bp, Homo sapiens
tgcccacgcccccttcagatcctttgctccggagagagacctgtccgagcagaggcctggactacatctcccggcgtgcctggcagtgtggtggcctctgtgcgccgtctgcactcgttgcaggcgacgatgcagagggctgtaagtgtggtggcccgtctgggctttcgcctgcaggcattccccccggccttgtgtcgtccacttagttgcgcacaggaggtgctccgcaggacaccgctctatgacttccacctggcccacggcgggaaaatggtggcgtttgcgggttggagtctgccagtgcagtaccgggacagtcacactgactcgcacctgcacacacgccagcactgctcgctctttgacgtgtctcatatgctgcagaccaagatacttggtagtgaccgggtgaagctgatggagagtctagtggttggagacattgcagagctaagaccaaaccaggggacactgtcgctgtttaccaacgaggctggaggcatcttagatgacttgattgtaaccaatacttctgagggccacctgtatgtggtgtccaacgctggctgctgggagaaagatttggccctcatgcaggacaaggtcagggagcttcagaaccagggcagagatgtgggcctggaggtgttggataatgccctgctagctctgcaaggccccactgcagcccaggtactacaggccggcgtggcagatgacctgaggaaactgcccttcatgaccagtgctgtgatggaggtgtttggcgtgtctggctgccgcgtgacccgctgtggctacacaggagaggatggtgtggagatctcggtgccggtagcgggggcagttcacctggcaacagctattctgaaaaacccagaggtgaagctggcagggctggcagccagggacagcctgcgcctggaggcaggcctctgcctgtatgggaatgacattgatgaacacactacacctgtggagggcagcctcagttggacactggggaagcgccgccgagctgctatggacttccctggagccaaggtcattgttccccagctgaagggcagggtgcagcggaggcgtgtggggttgatgtgtgagggggcccccatgcgggcacacagtcccatcctgaacatggagggtaccaagattggtactgtgactagtggctgcccctccccctctctgaagaagaatgtggcgatgggttatgtgccctgcgagtacagtcgtccagggacaatgctgctggtagaggtgcggcggaagcagcagatggctgtagtcagcaagatgccctttgtgcccacaaactactataccctcaagtgaagctggctcagggtggggctgtcccttccaggagttttgcccctacaaggggttagtcaagaagctgaggcagaactcactgggggtgggcagttaaggtggaggctgattctaattgtctggttgaggggccacaccacctattccccccacctaactcatgccattccagcttccttcaggaccctgcttctgagtgacggaccagctcacacaatgtcttgtttcagtccatgatcccactgacctactcttgcctgctggagggtaatgagaagctttggttctgccatctctcccactctgccaggtgctggctgtggagcaaaggctcacctttgtggagaggataaaacctgcccaacctacctcaccatggtttttcacattgcaaagggtaataacatgggcagtgcggacttaggctaccccctccagtttgctttccgtaaatgcaaattgtccttactgcaagtcaggaatgattgctgactcacagtagggctgctatgcctgtgtgtaaacttggggatggctgagggaacatagactcactcttccacattcccaagttggtctagtgtgctgcccagtagcaaaccatggcagactcaccacctattctgagttccagggctgctgtagggcagggtgggcttcctcccagacttgccttaccctgggctgatctttgcccctggtatgcattaatggactccactgaatcctgaaaaaaaaattaaacttccttcttacttgccaaaaaaaaaaaaaaa

SEQ ID NO: 849 - DNA, 2614 bp, Homo sapiens
tggcgctaggcagcttcagccggaccgggtaggggtcctcgctcgctagcttgctgtttctcggagaagctcccgagtgtccggcctagaggccatgagaaggcagtgggggtctgccatgagggcggccgagcaggcgggctgcatggtgagcgcctcccgggccggacagcccgaggcgggcccgtggagctgcagcggggtaatcctgagccgtagcccgggcctggtgctttgccacgggggcatcttcgtccccttcctgcgagctggcagcgaagtcctggccgcggccggcgccgtcttcctgcctggcgacagttgcagggacgacctgcgcctgcacgtgcagtgggccccaacggccgcgggtcccgggggcggcgcggagcggggccgcccagggctgtgcacgccccagtgcgcgagcctcgagcccggcccacctgccccgtcccgcgggcgtcccctgcagccccggcttcctgctgagctgctgctgctgctgagctgcccggccttctgggcccacttcgcgcgcctcttcggggacgaggcagcggaacagtggcgcttctcgagcgcggcgcgggatgacgaagtgtcggaggacgaggaggcggatcaactgagagcgctgggctggtttgcgctgctgggcgtgcggctaggccaggaggaggtggaggaggagcgcgggccagccatgggcggtgtcgcctctcggggccgtgcccaagggtgcgccattgctggtctgcggctcccctttcggcgccttctgccccgacatctttctcaacacgctgagctgcggggtgctcagcaacgtggccggcccactgctgcttaccgacgcacgctgccttcccggcaccgagggcggcggcgtgttcaccgcgcggcccgcgggggcgctggtggcgctggtggtggcgccgctctgttggaaggccggcgaatgggtgggcttcacgctgctctgcgccgccgccccccttttccgcgccgcccgcgacgcgcttcaccgcctgccgcacagcaccgctgccctggccgcccttctgccgccagaggtgggcgtcccgtggggtctgcccctccgagactccgggcccctgtgggcagccgcggcagtgttggtggagtgcggcaccgtatggggctccggagtggctgtggcaccccgccttgtagtgacctgtcggcacgtgtcccctcgggaagcagccagggtcctggtgcgctccaccacccccaagagtgtggccatctggggccgtgtggtatttgccactcaggagacatgtccctatgacatagcagtggtgagcctggaggaggacctggatgatgtccccatccctgtgcccgctgagcacttccatgaaggcgaggctgtgagtgtggtgggctttggcgtctttggccagtcttgcgggccctcggtgacctcaggcatcctttcggctgtggtgcaggtgaatggcacgcccgtaatgctgcagaccacgtgtgctgtgcacagcggctccagtgggggacccctcttctccaaccactcaggaaacctccttggcataatcaccagcaacacccgggacaataatacgggggccacctacccccacctgaacttcagcattcccatcacggtgctccagccggccctgcagcagtacagccagacccaagacctaggtggcctccgtgagctggaccgcgctgctgagccagtcagggtggtgtggcggttgcagcggcccctggcagaggccccgcggagcaagctctgaggctgtgttaccacctttggaaagaagagtgacctttttctgctgtaggaagtgatgttgaggtgacggtggcctcaggattcagggcccagcccctgcaggggcccaggctgcctctcatctccacccactgactgcagactgggctttgggctctggggcaaacttctcttcagccccatggatccttaacctggcagcccgttttggggtgctttcttgagcccccagttctctgtcccctagcactagactcagctgtattgtttttccttctggggagcccactccaactgcacagaagttctgggcctgacaggtagattccagctggaaggcaggcccgtgcctggttttgcgtctgttcccctgagggccatcgtcatcctggagcttcaatggggccttggctcctgtctgcctctcagtcagagtcagggctgacaaaggactcagcttccttagcatctcagcagaaaccttgctctgaagaccagagacagaagggacagaaacaggagtgcctcctgctgtgccaggcccatgggcagtgcaggcagatccctgaaggtcagcactcctgggtcttcatatgccaacaggggcgctcttgacactgtgccttcattttccagcccacagcctgggtctcagggatcttgaggggtagaacatgtctggttggggcttgggaataaacatgatctattgaaaaaaaaaaaaaaaaaaaaaaaaaaaaaaaaaaaaaaaaaaaaaaaaaaaaaaaaaaaaaaaaaaaaaaaaaaaaaaaaaaaaaaaaaaaaaaaaaaaaaaaaaaa

SEQ ID NO: 850 - DNA, 2110 bp, Homo sapiens
ggatccaagctattgtcctgcccatggcttcccatctcaggacgctctctggccgctatcatcccagcagtggagttcagcccactactctgaaccagccgcaggtggctgctatgggactgaagccatgaatggtgccggccctggccccgccgcagccgccccggtcccagtcccggtcccggtcccggactggcggcagttctgcgagctgcatgcgcaggcggccgccgtggactttgcgcacaagttctgccgtttcctgcgggacaacccagcttacgacacgcccgacgccggcgcctccttctcccgccacttcgccgccaacttcctggacgtcttcggcgaggaggtgcgccgcgtgctggtggctgggccgacgactcggggcgcggccgtgagcgcagaggccatggagccggagctcgcggacacctctgcactcaaggcggcgtcctacggccactcgcggagctcggaggacgtgtccacgcacgcggccaccaaggcccgcgttcgcaagggcttctcgctgcgcaacatgagcctgtgcgtggtggacggcgtgcgcgacatgtggcaccggcgcgcctcgcccgagcccgacgcggcagctgccccgcgcaccgccgagccccgcgacaagtggacgcggcgcctgaggctgtcgcggacgctggctgccaaggtggagctggtggacattcaacgcgagggggcgctgcgcttcatggtggccgacgacgcggccgcgggctccgggggctcggctcagtggcagaagtgccgcctgctcctgcgcagggctgtggccgaggaacgcttccgcctggagttcttcgtgccgcccaaagcctccaggcccaaggtcagcatcccactgtcagccatcattgaggtccgcaccaccatgcccctggaaatgccagagaaggataacacattcgtcctcaaggtagagaatggagccgaatacatcttggagaccatcgactctctgcagaagcactcgtgggtagctgacatccagggctgcgtggaccccggtgacagtgaggaagacaccgagctctcctgtacccgaggaggctgtctggccagccgcgtggcctcctgcagctgtgagctcctgactgatgcagtcgacctgccccgccccccagagacgacagccgtgggtgcagtggtgacagccccccacagccgaggtcgagatgccgtcagagaatccctgatccacgtcccgctagagacctttctgcagaccctggaatccccgggcggcagcggcagtgacagcaataacacaggggaacagggtgcagagacggatcccgaggctgaacccgagctggagctatccgactacccatggttccacgggacactgtcccgggtcaaggctgctcaactggttctggcaggggggccccggaaccacggcctcttcgtgatccgccaaagtgagactcggcctggggagtacgtgctgaccttcaacttccagggcaaggccaagcacctgcgcctgtccctgaacggccacggccagtgtcacgtacagcatctgtggttccagtctgtgcttgacatgctccgccacttccacacacaccccatcccactggagtcagggggctcggccgacatcacccttcgcagctatgtgcgggcccaggaccccccaccagagccgggccccacgccccctgccgcgcccgcgtccccggcctgctggagcgactcgcccggccagcactacttctccagcctcgccgcggccgcctgcccgcctgcctcgccctccgacgccgccggcgcctcctcgtcttccgcctcgtcgtcctctgccgcgtcggggcccgcccccccgcgccccgtcgagggccagctcagcgcgcggagccgcagcaacagcgccgagcgcctgctggaggccgtggccgccaccgccgccgaggagcccccggaggccgcgcccggccgcgcgcgcgccgtggagaaccagtactccttctactagcccgcggcgccgcccgggtgggacacgccaagctcttcagtgaagacacgatgttattaaaagcctgttttagggactgcaaaa

SEQ ID NO: 851 - DNA, 3263 bp, Homo sapiens
gagagagctgagagccaggactcagtgctgagcttggtgtcccaccgccacaaggaggcagggaagaaacccactagtcccagctcctggggtggcacagacattgcaactggccctgcctgtgggtcctaggggcccttggctaccaggaggctaagaacactgctcatgaatgacagtgagccctgaaagctctgggggtgtcacccagtcccacaagcctgcatcccctgcagtggagatgggctcagctcctggacgtgccacagacagaaagcataacatacactcgccaggaagagcctttgcctgactcagggcagctcagagtgtggggcagaaggtgaccagccagctcagggcaggagatgcagagcacagccaattacctgtggcacacagatgacctgctggggcagggggccactgccagtgtgtacaaggcccgcaacaagaaatccggagagctggttgctgtgaaggtcttcaacactaccagctacctgcggccccgcgaggtgcaggtgagggagtttgaggtcctgcggaagctgaaccaccagaacatcgtcaagctctttgcggtggaggagacgggcggaagccggcagaaggtactggtgatggagtactgctccagtgggagcctgctgagtgtgctggagagccctgagaatgcctttgggctgcctgaggatgagttcctggtggtgctgcgctgtgtggtggccggcatgaaccacctgcgggagaacggcattgtgcatcgcgacatcaagccggggaacatcatgcgcctcgtaggggaggaggggcagagcatctacaagctgacagacttcggcgctgcccgggagctggatgatgatgagaagttcgtctcggtctatgggactgaggagtacctgcatcccgacatgtatgagcgggcggtgcttcgaaagccccagcaaaaagcgttcggggtgactgtggatctctggagcattggagtgaccttgtaccatgcagccactggcagcctgcccttcatcccctttggtgggccacggcggaacaaggagatcatgtaccggatcaccacggagaagccggctggggccattgcaggtgcccagaggcgggagaacgggcccctggagtggagctacaccctccccatcacctgccagctgtcactggggctgcagagccagctggtgcccatcctggccaacatcctggaggtggagcaggccaagtgctggggcttcgaccagttctttgcggagaccagtgacatcctgcagcgagttgtcgtccatgtcttctccctgtcccaggcagtcctgcaccacatctatatccatgcccacaacacgatagccattttccaggaggccgtgcacaagcagaccagtgtggccccccgacaccaggagtacctctttgagggtcacctctgtgtcctcgagcccagcgtctcagcacagcacatcgcccacacgacggcaagcagccccctgaccctcttcagcacagccatccctaaggggctggccttcagggaccctgctctggacgtccccaagttcgtccccaaagtggacctgcaggcggattacaacactgccaagggcgtgttgggcgccggctaccaggccctgcggctggcacgggccctgctggatgggcaggagctaatgtttcgggggctgcactgggtcatggaggtgctccaggccacatgcagacggactctggaagtggcaaggacatccctcctctacctcagcagcagcctgggaactgagaggttcagcagcgtggctggaacgcctgagatccaggaactgaaggcggctgcagaactgaggtccaggctgcggactctagcggaggtcctctccagatgctcccaaaatatcacggagacccaggagagcctgagcagcctgaaccgggagctggtgaagagccgggatcaggtacatgaggacagaagcatccagcagattcagtgctgtttggacaagatgaacttcatctacaaacagttcaagaagtctaggatgaggccagggcttggctacaacgaggagcagattcacaagctggataaggtgaatttcagtcatttagccaaaagactcctgcaggtgttccaggaggagtgcgtgcagaagtatcaagcgtccttagtcacacacggcaagaggatgagggtggtgcacgagaccaggaaccacctgcgcctggttggctgttctgtggctgcctgtaacacagaagcccagggggtccaggagagtctcagcaagctcctggaagagctatctcaccagctccttcaggaccgagcaaagggggctcaggcctcgccgcctcccatagctccttaccccagccctacacgaaaggacctgcttctccacatgcaagagctctgcgaggggatgaagctgctggcatctgacctcctggacaacaaccgcatcatcgaacggctaaatagagtcccagcacctcctgatgtctgagctccatggggcacatgaggcatcctgaagcattagaatgattccaacactgctcttctgcaccatgagaccaacccagggcaagatcccatcccatcacatcagcctacctccctcctggctgctggccaggatgtcgccagcattaccttccactgcctttctccctgggaagcagcacagctgagactgggcaccaggccacctctgttgggacccacaggaaagagtgtggcagcaactgcctggctgacctttctatcttctctaggctcaggtactgctcctccatgcccatggctgggccgtggggagaagaagctctcatacgccttcccactccctctggtttataggacttcactccctagccaacaggagaggaggcctcctggggtttccccagggcagtaggtcaaacgacctcatcacagtcttccttcctcttcaagcgtttcatgttgaacacagctctctccgctcccttgtgatttctgagggtcaccactgccagcctcaggcaacatagagagcctcctgttctttctatgcttggtctgactgagcctaaagttgagaaaatgggtggccaaggccagtgccagtgtcttggggcccctttggctctccctcactctctgaggctccagctggtcctgggacatgcagccaggactgtgagtctgggcaggtccaaggcctgcaccttcaagaagtggaataaatgtggcctttgcttctgtt

SEQ ID NO: 852 - DNA, 1605 bp, Homo sapiens
ccagtcctgccgcccggtaacaaaaccggggttcccgccacacgcacccggtagggctcaggacgctttatcggcgacaatggctggctgaatgggaggcctgaggtcctgaaggaaccgggggtgctggcgaccgggacctcgaggccgctgctggggaggacgctggccagcgtgcagggggcggaggcggggcgtgccgggaggctcccatctcccgccccgcacaacccgggcagggccgccgctccgccgccgccgcagatccggctctcaccctcggctcccgaggccccgcggcgcctccttctgcggactctgcgggaccctccccggcaggcgctgtgccctggagaaggcacagtggctcaggcatggccgcggggacggcggcgcggaaggcagcgccggtgctggaggcccccccgcagcaggagcagctctctcatacaaagctttctgcagaagacacatggaacctgcagcaggagaggatgtacaagatgcaccggggccacgattccatgcacgtggaaatgatcttgatcttcctctgcgttctggtcattgcccagatagtgctggttcagtggagacagaggcatggccgatcctacaatctggtgaccttgttgcagatgtgggttgtccccttatatttcacgataaaattatactggtggcggtttctgtctatgtgggggatgttctccgttattaccagttacatcctcttcagagctacccgaaaacccctctcaggaaggacaccacgattggtctacaaatggtttcttttgatctacaaactcagctatgcatttggtgttgtgggttacttggcgatcatgtttacaatgtgtggattcaatctgtttttcaaaatcaaagctagagattccatggattttggcattgtgtctttgttctacggcctctactatggagtaatggggagagactttgccgagatctgctcagactacatggcttccactatagggttctacagtgtcagccggttgcctacaaggagcttatcggacaatatctgtgcagtctgtgggcagaagatcattgtggagcttgatgaagaagggctcattgaaaacacctaccagctttcctgtaatcatgtctttcatgaattctgcatccgaggttggtgtatcgttgggaaaaagcagacttgcccttactgcaaagagaaagttgatttgaagaggatgatcagtaatccctgggagcgcacacattttctgtatggacaaatcctggattggcttcgttatttggtggcctggcaacctgtggtgataggaatagttcaaggcattaactattcactagggctggaataggacagcagaccccagaagcaacatactgcatggttgaaatccttggtccaacatttaatattaatttttttaattttagagatgatcccaagtgtttagaaaactaagtaaactttgttgtcaagcaatttgtccatgtggaaagaatttaaagagaagctgaacaatggaataaacaaataaagcatgttttttcatctttcccattaaaaaaaaaaaaaaaaaaaaaaaaaaaaaaaaaaaa

SEQ ID NO: 853 - DNA, 451 bp, Homo sapiens
gcattcttcaggtcatctgaaccttctgagaaaacatggtcaacgtcttgaaaggagtgcttatagaatgtgatcctgccatgaagcagtttctgctgtacttggatgagtccaatgccctggggaagaagttcatcattcaagacattgatgacactcacgtctttgtaatagcagaattggttaatgtcctccaggagcgagtgggtgaattaatggaccaaaatgctttttcccttacccagaaatgaaaatactcaatatggaccatttaggaattataagcagcaactgtgaaagacttgccactcaatatcttaggtgactgattagacatagagggttgttttaggagcatgccacgggaaagactgagggatcatgatcatttgttcagaaaaaaagcccctgaactgattttgttaccatagaatttaaaaaaaaaaaaaaa

SEQ ID NO: 854 - DNA, 2262 bp, Homo sapiens
gggggctttgcggctgtcgtcaagcgcggcgttgggccggcgggcgggggctgaggggctgccatggcggcggcgggccggctcccgagctcctgggccctcttctcgccgctcctcgcagggcttgcactactgggagtcgggccggtcccagcgcgggcgctgcacaacgtcacggccgagctctttggggccgaggcctggggcacccttgcggctttcggggacctcaactccgacaagcagacggatctcttcgtgctgcgggaaagaaatgacttaatcgtctttttggcagaccagaatgcaccctattttaaacccaaagtaaaggtatctttcaagaatcacagtgcattgataacaagtgtagtccctggggattatgatggagattctcaaatggatgtccttctgacatatcttcccaaaaattatgccaagagtgaattaggagctgttatcttctggggacaaaatcaaacattagatcctaacaatatgaccatactcaataggacttttcaagatgagccactaattatggatttcaatggtgatctaattcctgatatttttggtatcacaaatgaatccaaccagccacagatactattaggagggaatttatcatggcatccagcattgaccactacaagtaaaatgcgaattccacattctcatgcatttattgatctgactgaagattttacagcagatttattcctgacgacattgaatgccaccactagtaccttccagtttgaaatatgggaaaatttggatggaaacttctctgtcagtactatattggaaaaacctcaaaatatgatggtggttggacagtcagcatttgcagactttgatggagatggacacatggatcatttactgccaggctgtgaagataaaaattgccaaaagagtaccatctacttagtgagatctgggatgaagcagtgggttccagtcctacaagatttcagcaataagggcacactctggggctttgtgccatttgtggatgaacagcaaccaactgaaataccaattccaattacccttcatattggagactacaatatggatggctatccagacgctctggtcatactaaagaacacatctggaagcaaccagcaggcctttttactggagaacgtcccttgtaataatgcaagctgtgaagaggcgcgtcgaatgtttaaagtctactgggagctgacagacctaaatcaaattaaggatgccatggttgccaccttctttgacatttacgaagatggaatcttggacattgtagtgctaagtaaaggatatacaaagaatgattttgccattcatacactaaaaaataactttgaagcagatgcttattttgttaaagttattgttcttagtggtctgtgttctaatgactgtcctcgtaagataacaccctttggagtgaatcaacctggaccttatatcatgtatacaactgtagatgcaaatgggtatctgaaaaatggatcagctggccaactcagccaatccgcacatttagctctccaactaccatacaacgtgcttggtttaggtcggagcgcaaattttcttgaccatctctacgttggtattccccgtccatctggagaaaaatctatacgaaaacaagagtggactgcaatcattccaaattcccagctaattgtcattccataccctcacaatgtccctcgaagttggagtgccaaactgtatcttacaccaagtaatattgttctgcttactgctatagctctcatcggtgtctgtgttttcatcttggcaataattggcattttacattggcaggaaaagaaagcagatgatagagaaaaacgacaagaagcccaccggtttcattttgatgctatgtgacttgcctttaatattacataatggaatggctgttcacttgattagttgaaacacaaattctggcttgaaaaaataggggagattaaatattatttataaatgatgtatcccatggtaattattggaaagtattcaaataaatatggtttgaatatgtcacaaggtctttttttttaaagcactttgtatataaaaatttgggttctctattctgtagtgctgtacatttttgttcctttgtggaatgtgttgcatgtactccagtgtttgtgtatttataatcttatttgcatcatgatgatggaaaaagttgtgtaaataaaaataattaaaaaaaaaaaaaaaaaaaaaaaaaaaaaa

SEQ ID NO: 855 - DNA, 8595 bp, Homo sapiens
ggaatcggacgccccaggcatatacaagctgagtttcagccatggaaaaactccatgggcatgtgtctgcccatccagacatcctctccttggagaaccggtgcctggctatgctccctgacttacagcccttggagaaactacatcagcatgtatctacccactcagatatcctctccttgaagaaccagtgcctagccacgcttcctgacctgaagaccatggaaaaaccacatggatatgtgtctgcccacccagacatcctctccttggagaaccagtgcctggccacactttctgacctgaagaccatggagaaaccacatggacatgtttctgcccacccagacatcctctccttggagaaccggtgcctggccaccctctctagtctaaagagcactgtgtctgccagccccttgttccagagtctacagatatctcacatgacgcaagctgatttgtaccgtgtgaacaacagcaattgcctgctctctgagcctccaagttggagggctcagcatttctctaagggactagacctttcaacctgccctatagccctgaaatccatctctgccacagagacagctcaggaagcaactttgggtcgttggtttgattcagaagagaagaaaggggcagagacccaaatgccttcttatagtctgagcttgggagaggaggaggaggtggaggatctggccgtgaagctcacctctggagactctgaatctcatccagagcctactgaccatgtccttcaggaaaagaagatggctctactgagcttgctgtgctctactctggtctcagaagtaaacatgaacaatacatctgaccccaccctggctgccatttttgaaatctgtcgtgaacttgccctcctggagcctgagtttatcctcaaggcatctttgtatgccaggcagcagctgaacgtccggaatgtggccaataacatcttggccattgctgctttcttgccggcgtgtcgcccccacctgcgacgatatttctgtgccattgtccagctgccttctgactggatccaggtggctgagctttaccagagcctggctgagggagataagaataagctggtgcccctgcccgcctgtctccgtactgccatgacggacaaatttgcccagtttgacgagtaccagctggctaagtacaaccctcggaagcaccgggccaagagacacccccgccggccaccccgctctccagggatggagcctccattttctcacagatgttttccaaggtacatagggtttctcagagaagagcagagaaagtttgagaaggccggtgatacagtgtcagagaaaaagaatcctccaaggttcaccctgaagaagctggttcagcgactgcacatccacaagcctgcccagcacgttcaagccctgctgggttacagatacccctccaacctacagctcttttctcgaagtcgccttcctgggccttgggattctagcagagctgggaagaggatgaagctgtctaggccagagacctgggagcgggagctgagcctacgggggaacaaagcgtcggtctgggaggaactcattgaaaatgggaagcttcccttcatggccatgcttcggaacctgtgcaacctgctgcgggttggaatcagttcccgccaccatgagctcattctccagagactccagcatgcgaagtcggtgatccacagtcggcagtttccattcagatttcttaacgcccatgatgccattgatgccctcgaggctcaactcagaaatcaagcattgccctttccttcgaatataacactgatgaggcggatactaactagaaatgaaaagaaccgtcccaggcggaggtttctttgccacctaagccgtcagcagcttcggatggcaatgaggatacctgtgttgtatgagcagctcaagagggagaagctgagagtacacaaggccagacagtggaaatatgatggtgagatgctgaacaggtaccgacaggccctagagacagctgtgaacctctctgtgaagcacagcctgcccctgctgccaggccgcactgtcttggtctatctgacagatgctaatgcagacaggctctgtccaaagagcaacccacaagggcccccgctgaactatgcactgctgttgattgggatgatgatcacgagggcggagcaggtggacgtcgtgctgtgtggaggtgacactctgaagactgcagtgcttaaggcagaagaaggcatcctgaagactgccatcaagctccaggctcaagtccaggagtttgatgaaaatgatggatggtccctgaatacttttgggaaatacctgctgtctctggctggccaaagggttcctgtggacagggtcatcctccttggccaaagcatggatgatggaatgataaatgtggccaaacagctttactggcagcgtgtgaattccaagtgcctctttgttggtatcctcctaagaagggtacaatacctgtcaacagatttgaatcccaatgatgtgacactctcaggctgtactgatgcgatactgaagttcattgcagagcatggggcctcccatcttctggaacatgtgggccaaatggacaaaatattcaagattccaccacccccaggaaagacaggggtccagtctctccggccactggaagaggacactccaagccccttggctcctgtttcccagcaaggatggcgcagcatccggcttttcatttcatccactttccgagacatgcatggggagcgggacctgctgctgaggtctgtgctgccagcactgcaggcccgagcggcccctcaccgtatcagccttcacggaatcgacctccgctggggcgtcactgaggaggagacccgtaggaacagacaactggaagtgtgccttggggaggtggagaacgcacagctgtttgtggggattctgggctcccgttatggatacattccccccagctacaaccttcctgaccatccacacttccactgggcccagcagtacccttcagggcgctctgtgacagagatggaggtgatgcagttcctgaaccggaaccaacgtctgcagccctctgcccaagctctcatctacttccgggattccagcttcctcagctctgtgccagatgcctggaaatctgactttgtttctgagtctgaagaggccgcacgtcggatctcagaactgaagagctacctaagcagacagaaagggatcacctgccgcagatacccctgtgagtgggggggtgtggcagctggccggccctatgttggcgggctggaggagtttgggcagttggttctgcaggatgtatggaatatgatccagaagctctacctgcagcctggggccctgctggagcagccagtgtccatcccagacgatgacttggtccaggccaccttccagcagctgcagaagccaccgagtcctgcccggccacgccttcttcaggacacagtgcaacggctgatgctgccccacggaaggctgagcctggtgacggggcagtcaggacagggcaagacagccttcctggcatctcttgtgtcagccctgcaggctcctgatggggccaaggtggcatcattagtcttcttccacttttctggggctcgtcctgaccagggtcttgccctcactctgctcagacgcctctgtacctatctgcgtggccaactaaaagagccaggtgccctccccagcacctaccgaagcctggtgtgggagctgcagcagaggctgctgcccaagtctgctgagtccctgcatcctggccagacccaggtcctgatcatcgatggggctgataggttagtggaccagaatgggcagctgatttcagactggatcccaaagaagcttccccggtgtgtacacctggtgctgagtgtgtctagtgatgcaggcctaggggagacccttgagcagagccagggtgcccacgtgctggccttggggcctctggaggcctctgctcgggcccggctggtgagagaggagctggccctgtacgggaagcggctggaggagtcaccatttaacaaccagatgcgactgctgctggtgaagcgggaatcaggccggccgctctacctgcgcttggtcaccgatcacctgaggctcttcacgctgtatgagcaggtgtctgagagactccggaccctgcctgccactgtccccctgctgctgcagcacatcctgagcacactggagaaggagcacgggcctgatgtccttccccaggccttgactgccctagaagtcacacggagtggtttgactgtggaccagctgcacggagtgctgagtgtgtggcggacactaccgaaggggactaagagctgggaagaagcagtggctgctggtaacagtggagacccctaccccatgggcccgtttgcctgcctcgtccagagtctgcgcagtttgctaggggagggccctctggagcgccctggtgcccggctgtgcctccctgatgggcccctgagaacagcagctaaacgttgctatgggaagaggccagggctagaggacacggcacacatcctcattgcagctcagctctggaagacatgtgacgctgatgcctcaggcaccttccgaagttgccctcctgaggctctgggagacctgccttaccacctgctccagagcgggaaccgtggacttctttcgaagttccttaccaacctccatgtggtggctgcacacttggaattgggtctggtctctcggctcttggaggcccatgccctctatgcttcttcagtccccaaagaggaacaaaagctccccgaggctgacgttgcagtgtttcgcaccttcctgaggcagcaggcttcaatcctcagccagtacccccggctcctgccccagcaggcagccaaccagcccctggactcacctctttgccaccaagcctcgctgctctcccggagatggcacctccaacacacactacgatggcttaataaaccccggaccatgaaaaatcagcaaagctccagcctgtctctggcagtttcctcatcccctactgctgtggccttctccaccaatgggcaaagagcagctgtgggcactgccaatgggacagtttacctgttggacctgagaacttggcaggaggagaagtctgtggtgagtggctgtgatggaatctctgcttgtttgttcctctccgatgatacactctttcttactgccttcgacgggctcctggagctctgggacctgcagcatggttgtcgggtgctgcagactaaggctcaccagtaccaaatcactggctgctgcctgagcccagactgccggctgctagccaccgtgtgcttgggaggatgcctaaagctgtgggacacagtccgtgggcagctggccttccagcacacctaccccaagtccctgaactgtgttgccttccacccagaggggcaggtaatagccacaggcagctgggctggcagcatcagcttcttccaggtggatgggctcaaagtcaccaaggacctgggggcacccggagcctctatccgtaccttggccttcaatgtgcctgggggggttgtggctgtgggccggctggacagtatggtggagctgtgggcctggcgagaaggggcacggctggctgccttccctgcccaccatggctttgttgctgctgcgcttttcctgcatgcgggttgccagttactgacggctggagaggatggcaaggttcaggtgtggtcagggtctctgggtcggccccgtgggcacctgggttccctttctctctctcctgccctctctgtggcactcagcccagatggtgatcgggtggctgttggatatcgagcggatggcattaggatctacaaaatctcttcaggttcccagggggctcagggtcaggcactggatgtggcagtgtccgccctggcctggctaagccccaaggtattggtgagtggtgcagaagatgggtccttgcagggctgggcactcaaggaatgctcccttcagtccctctggctcctgtccagattccagaagcctgtgctaggactggccacttcccaggagctcttggcttctgcctcagaggatttcacagtgcagctgtggccaaggcagctgctgacgcggccacacaaggcagaagactttccctgtggcactgagctgcggggacatgagggccctgtgagctgctgtagtttcagcactgatggaggcagcctggccaccgggggccgggatcggagtctcctctgctgggacgtgaggacacccaaaacccctgttttgatccactccttccctgcctgtcaccgtgactgggtcactggctgtgcctggaccaaagataacctactgatatcctgctccagtgatggctctgtggggctctgggacccagagtcaggacagcggcttggtcagttcctgggtcatcagagtgctgtgagcgctgtggcagctgtggaggagcacgtggtgtctgtgagccgggatgggaccttgaaagtgtgggaccatcaaggcgtggagctgaccagcatccctgctcactcaggacccattagccactgtgcagctgccatggagccccgtgcagctggacagcctgggtcagagcttctggtggtaaccgtcgggctagatggggccacacggttatggcatccactcttggtgtgccaaacccacaccctcctgggacacagcggcccagtccgtgctgctgctgtttcagaaacctcaggcctcatgctgaccgcctctgaggatggttctgtacggctctggcaggttcctaaggaagcagatgacacatgtataccaaggagttctgcagccgtcactgctgtggcttgggcaccagatggttccatggcagtatctggaaatcaagctggggaactaatcttgtggcaggaagctaaggctgtggccacagcacaggctccaggccacattggtgctctgatctggtcctcggcacacaccttttttgtcctcagtgctgatgagaaaatcagcgagtggcaagtgaaactgcggaagggttcggcacccggaaatttgagtcttcacctgaaccgaattctacaggaggacttaggggtgctgacaagtctggattgggctcctgatggtcactttctcatcttggccaaagcagatttgaagttactttgcatgaagccaggggatgctccatctgaaatctggagcagctatacagaaaatcctatgatattgtccacccacaaggagtatggcatatttgtcctgcagcccaaggatcctggagttctttctttcttgaggcaaaaggaatcaggagagtttgaagagaggctgaactttgatataaacttagagaatcctagtaggaccctaatatcgataactcaagccaaacctgaatctgagtcctcatttttgtgtgccagctctgatgggatcctatggaacctggccaaatgcagcccagaaggagaatggaccacaggtaacatgtggcagaaaaaagcaaacactccagaaacccaaactccagggacagacccatctacctgcagggaatctgatgccagcatggatagtgatgccagcatggatagtgagccaacaccacatctaaagacacggcagcgtagaaagattcactcgggctctgtcacagccctccatgtgctacctgagttgctggtgacagcttcgaaggacagagatgttaagctatgggagagacccagtatgcagctgctgggcctgttccgatgcgaagggtcagtgagctgcctggaaccttggctgggcgctaactccaccctgcagcttgccgtgggagacgtgcagggcaatgtgtactttctgaattgggaatgaagatgtgccactcgggaataatgataccccttgtgctagagatgcaaagcctgaagacactggtagcttttaataattataaaattaataatttcttgataattataaaaatgaagtgtcaaaaaatctcaagtgtaggcctgcctgtgttctcatgtggatttagaacaggaggatattctatgtgtatgtatatgtacattctaatgtgtgtctcttcttattcaacattaatccttactagaaccacaagaaagtgaatgaaatctttagtaggtactcttttgaaactaggttttagaattcttgcatcactcgcgggccctaggaccctaggatgccattcttgccaggaggaggaatgagagtgatgttggccaacattcaatttgaacagagcatggaagacctttcagttcatcgggaaagaatgagggagggagaataagtcagtcatgcatcagggcatttagaaagagctatgtttctgtcacagagacagcccttttctcagaactacccagaggaggccgggcatggtggctcacgcttgtaatcccagcactttgggaggccgaggtgggcagatcacgaggtcaggagatcaagaccatcctggctaacatagtgaaaccctgtctctactaaaaaatacaaaaagttagccagg

SEQ ID NO: 856 - DNA, 1919 bp, Homo sapiens
cgagaagcagcggcccggggcgactgagcggacaaacggaagtgtaggttacggtctgagacatcaccgccaagctgggcatcggggagatggccgagactgaccccaagaccgtgcaggacctcacctcggtggtgcagacactcctgcagcagatgcaagataaatttcagaccatgtctgaccagatcattgggagaattgatgatatgagtagtcgcattgatgatctggaaaagaatatcgcggacctcatgacacaggctggggtggaagaactggaaagtgaaaacaagatacctgccacgcaaaagagttgaaggttgctaataatttatactggaatctggcatttttccaagccaagagaagatcgaatggctttttgcagctaactactatgtgtagacaggttttatattataaagtatgcattcttatcacctagtatatagttagtttgtagagtgatttccccccagtttcttgaacatggtatcttcacatcttggaccttggtcagttgtgctattcattattaaacactaaaactttggcggttcttgcataacattgtcagattttttagtgtatttctgtgaagtcattttttttcttgtcattccttttgtagtagttgctgtttggataaaagttgatgtgtgattttttattaaacaaatagtaaacccttcaattatagttagtcttggtgaagtaagatgtttgtagactttagagttctttaattcttggcacaacgtgactgttgagctaacaccaaatagtgtgttggcaatacttttcaaatggctgaaaacacctaaaaattgttcattcagaaatatctgtcactgctctgttgccaaaactcagaatagaacttagacgtatgtctgagtccctgagatcacatgctaaagtcgatgaaaagtaaccactgccactgtcttgtgtcagaacttttacagtacagaaaataacagaatagccttctgtaatgaggcgtttgttagagttttgcatgagattctaatacttcagtaggaccctacctacgtggttcatctacaatggttaccataaaaaatctggcaggattttaaaactcaatcagtctttcctttgagctagtgacttgaaaagaaagagagaaggaaaagagaccatattaagtccatgccagttgcttggctagaatatgatcaacgacttgtagtagactcaagtttttaaaaaacactattttacttaaactgtttcttatctaaattcttgcagagtgtcaatgttatcattgattatagaagacagggataatacctttatctctggccactcaaaaatgcagtgccaggagtgctaaacctagaggccaatactgatgacctggaaggtgatccatatgattgtcaccacaaagtgcttttacacaaaaacttgaaaatttgaaaaacatgatttttttaagtttctcatctcaccagtcttggtgtttatattgcaaatctatcaaagtaagaaataatttgtgctgtatacaaattacatggggaacataaaggagtgagatccttctgtgataaaatgaattcaccactctggttacccaactacagaacctcctttgatcaggccagtaggttgtgatgcaggctggagcccccgaatgccccacacacactgcagcattgaccagaccatccgaaacctgcgtccctggtgatgttctcaagcctcggaagtggcaaatggaaatgatatggccggttgcggttgtaggagagttgtgacttaggcaggagtcgacctcctcaagtaatggaacgatttcaaaggcaggctgccctgaccaaaaatatctgccatgaataaaggtgcctgaaatcctaaaaaaaaaaaagaaaaaaaaaaaaaaa

SEQ ID NO: 857 - DNA, 3060 bp, Homo sapiens
ggtagtaacagattatgggcaacagtccttttaattaatctaccgtcatcatggctaatgaggactgtcccaaggctgctgatagtcctttttcatcagataaacatgcccaactcatcttggcccaaatcaataagatgagaaatggacagcatttctgtgatgtgcagctgcaagttggacaggaaagttttaaagctcatcggctggttttggctgccagcagtccttactttgcagctttgttcactggaggaatgaaagagtcctcaaaagatgttgtaccgattctaggaattgaagcaggaatctttcagatacttctagatttcatttacacaggtatagtgaacataggtgtgaataatgtccaggagttgattattgcagcagacatgctacagttgactgaagttgttcatctttgctgtgaatttctgaaaggacaaattgatccactgaactgcattggaatttttcagttctctgagcaaattgcctgccatgatctcttggaattctcagaaaactacattcatgtccatttcttggaggttcatagtggagaagagttcctggcacttacgaaagatcagctgatcaaaattttgcgaagtgaagagcttagcattgaggatgaataccaggtcttcttagctgcaatgcaatggattctgaaagatttgggaaaaagaagaaaacatgtggtggaagtgctagacccaattcgattccctttattacctcctcagagacttttaaagtatatagaaggagtatccgattttaatcttcgtgttgcattgcaaacacttctgaaagagtactgtgaagtatgcaaatctcccaaagagaacaagttttgtagttttctgcagacatctaaggttcgacctcggaagaaagcaagaaagtacctgtatgcagtaggtggatatactcggttgcaggggggtcgctggagtgatagcagagccctcagctgtgtagaacgttttgacacctttagccagtactggaccactgtgtcttcacttcatcaggctcgaagtgggctgggagtaacagttctgggagggatggtctacgctattggaggtgaaaaggattcaatgatttttgattgtactgaatgctatgatccagttactaaacagtggacaactgtagcttcgatgaatcatccccgctgcggcttaggagtgtgtgtgtgttatggggctatctatgctttgggtggatgggttggagctgagatagggaacaccattgaacgatttgatcctgatgaaaataaatgggaagtagttggtaacatggctgtgtcacgctactactttgggtgctgtgaaatgcaaggtttaatttatgtaattgggggcatcagcaatgaaggaatagaacttcgttcttttgaagtctatgatccactttctaagcgttggtctccacttcctccaatgggaaccaggagagcatatcttggtgtggctgcactcaatgactgcatctattctgttggaggatggaatgagacccaagatgctcttcatactgtagaaaaatattcctttgaagaggaaaagtgggttgaagttgcctcaatgaaagtgcctagagcaggcatgtgtgttgtggcagtcaatggtcttctgtatgtttctggaggtcgatcttccagccatgattttttggctccaggtaccttggactcagttgaagtttataaccctcattcagatacatggacagaaattggtaacatgatcaccagtcgttgtgaagggggcgttgctgtgctatgaaatataaagcataacagagcacaaggaacattttgaaaatgcaggacctgaccttttgcaaagcaaacatagatttggtgataagaccctctgattctgtgagttttccatgtatttggtagataaatgactaacgaggctgggcgcagtggcctcatgcctataatcccagcactttggaaggctgaggcagggggatcgcttgagcccaggaatttgaggttgtagtgagctacgatcatgccactgcactccactctgggcaacagaatgagatcctgtctcttaaagaaaaaaaataaactcaagaatgatttttctaaaaatatgagtgagaatggatatggaatatatcccaattaataaagagctcacacagatttgccaggtttactaataatagaaatgccatttatgctgtagaattctccagtttaagtgtagacaactcctattttacaaatttgtagaaattatttactagaagcttcctggcaaatagtccctttagctacttctccagtgcagtataaattgtaacataaaactttatgtgatataggaatagtgtcaatgacacagtttaaagacctctatattcacaattatatccagagcataattttccatggccatagtttgagccacagagaaagccaatgaaatagattcctacttttatttaatgccaagagttttcactagccccaaactttttattggcagcagatatcctaggaggggtgtttgggaaatatctagctattttaatagatagatacctttttgcttgatgataagtttttgcttgctcatattttttgtcttgatcctgagaatgcaagtaaggaattaataggaggttcttagtgaccagatgttgtaatgggctatacagtccagcaggcagtatgcacctagaaatttctcccttttttaggctgggcatggtggctcacgcctgtagtcccagcactttgagaggccgaggtgagacgggaagatggcttgaactcgggagttcgagactagcctgggcaacgtgatgagactccgtctctaccaaaaaatatataaaaattagccgggcgttgtggcttgtacctgtggtcccatctgcttgggaggctgaggttgcaggatcgcttgagcccaggaggtcagggctgcagtgagccgagattgtgccactgcacaccggcctgggtgacagcatgagaacctgtctcaaaaaaaaaaaaaaaaaaaaaaaaaa

SEQ ID NO: 858 - DNA, 4761 bp, Homo sapiens
cagagcagaccgctagcaggaggcaggatgtgatagtctaagaccctggaagctgacggccagagggagggaagggtggtcacagaggagaggcaaagcaacgggaggtggaggatcctggaggtgtctgcaaggagaatacacagcagcgaggggctgcagaagcggacccagcgacttctgcgctgacgcggggcgggcgggagagaggaagagaggggagcgcggtggcgctgcgagctggccccgccggggaaggggctgccatgtcccgtgagcggcccccgggcaccgacattccccgcaacctgagcttcatcgccgcgctaacggagcgcgcctactaccgtagccagcggcccagcctcgaggaggagccggaggaggagccaggcgagggcgggacgcggttcggggcccgatcccgcgctcacgcaccgagtcggggccgccgggcccgatctgcaccagccggaggcggcggggcccgggcgccccgcagccgtagcccagacacccgcaagagagtgcgtttcgccgacgcactggggttggagctggctgtcgtgcgccgcttccgtcccggtgagctgccccgggtgccccgccacgtgcagatccaattgcagagggacgccctccgccacttcgcgccctgccagccccgcgcccgcggcctccaggaggcgcgcgccgccctggagccggccagcgagcccggcttcgccgcccgcttgctgacgcagcgcatctgcctggaacgcgccgaggcgggcccgctgggcgtggccgggagcgcgcgcgtggtggacctggcctacgagaagcgcgtgagcgtgcgctggagcgccgacggctggcggagccaacgcgaggcgccagccgcctacgccggtccggccccgcccccgccgcgcgccgaccgcttcgccttccgcctgcccgcgccgccgattgggggcgccctgctcttcgccttgcgctaccgtgtgacaggtcacgagttctgggacaacaacggcggccgtgactatgctctacgtgggcccgagcacccgggcagtggcggagctccggagccgcagggctggatccactttatctgagacgaggcgcctgcggccgacggcggaaaacaccaaaggcacccgggggcggggcgacccgatgtggcggggaggagtaggagagaccaggattggcgggagcggtccaagggagtcaagccggggagggcgaaaagggaacctggccactgctccttggtccttggcattatgacgggattcccttgtcacctctgacagttcctggctgcggtgtccgcggactggctggggagtgatgacagaagggatggaaaccctattttcttttctccaagaccatggttggtctgcttccctcactcgggctccttgacagtcttctagaagagagaaggaggaaaagaagcagttcctgatgttacaaatgaacaaggatctcccagccttagtctttgagaaaagatggctgaaagagaggaactctccaagtcattccgcaaacaaatgcccatttaaacatcatccttgtcttgtgaagaaaacaggaagaatgtcatgtaccatgtggatcaccttcagttcaaagttgcagcaaagtgaagaaagaaactactggaagccacccagcaatgcactgtttagtcatcaattaggagcccatgggaggataatagggagactgggtggaggctcagtgtgtaataatctcttgtctaatgtatgtgtgtcactgccatgttgtatgaacaatagtgagggctcacatttacttaacacttgtgtgcgcaaatctgggtttttcttcctttccagaactatgactcgatcataaaatctgttttgtttgcatgcatgcccaaaacaaccctgtaagtagaacattgtcattatctctgttttagagatgaggaaacaggctcagagaagctcagaaatttgttcaagatcgcacagctagtaaatggcagaagtaggattgtgaacccagggaatctccagagcctctgtgtaaccatgatgttatattttttttcctctttaaaaacaaaatttaaaaccttgctataatctcttattaggaaatgatcatagtttctgactgtgctctgccttcccatcctgccaatctcctggactggcttggagaagacagggggcccccgagcttcatctgtgactcgaaggagtttgctgctgtctcctgtgtcagtgtcccatctatgcaggatcagcacaggacccccctcaccttcccacttacactctagcctttccatacattggaattctctcctggccctagccagcgctccacacctgttggtgtgccacctccctccctcttcccccactggccttgaacaggcaaaccccctaatgtcgccactaggttgggtccgtgactaggacacctgctagagggtctgtgcttgggccttttctaggaatcccgatgttactgggtaagtgccaactctgtgggcagaatgctaatgataatcctgttccctgacctctttctcagaagtaccctggctcactctccccaatctcagctttatagaacaacattttggtcttgattattcccatatcaagctgccccagggcttcggtaagctgttagttgccccactgcctcaaggctgggtctggctgagctacttcttaggcacacaaatagtgggtgtctccttggaacctgacacaaaactatcagtgctaccaagccttgtaaaatagggaggaaactaatatttcttgagtggcttctgagtgcctggtgctttcgcggctctctggagagattccttgccctgatggctttggtgtgtactcctctcccaggacttcagcactgagattttcccaaccccctggcttttcctcaccttgggttgagttgatccggcactaccacaaaccccaccatctgcaaaccaaccaagattaggcagtatgccctttccgtcttgcactgctcttccaaaacttccatctgtatttctcacaccctcagtaagcaaagctgagtgtgcatggacagagctgcatccactgctttctcccagcgggtgcagtctaatctgacacggggaacactaggagtttagcggaatcttcagccaccctattaatgtgttacgcattaggcattgtagtggaaactcctctgatggctcatgactatatgaacaggagcaatttggaatataacatgtcagctgtggactgggaagtgccgtgagagaaaacactacctgggtcataggcttgggtccctgaggcaacccagcagggacactgttgcccattcctctcatccagactgcaggtgtcttcctacacctccctgtcccatagcctccgtcctgttttttgtttgtttgtttttctttgtgaatgtagaaaaacatttcatcatgagccctagctcctcagttttccacctaacacccacattcccttgtttctaactgccgtgtttttctggagcctgctgggatctttgcagtttgcaggtcatagaatcagacatgaaaaggcttctcttccgacgtcattggttcctggctcctttacagatgagaacacaggtccagaggtgagaaatgactctagcagggtcatagaatttgttagtgcagctcaagatgggacttaaactcaggcctcctgatcacccattcccaggctaggaaacaggtctctgctcggtgtggtggttcatacctgtaatcgcaacactttgggaggctgaggcaggagcattgcttgagcccaggagttcgagaccagtctgagcaacatagtgggaccctgtctctacaaaaacttttaaaattagctgggcatggtggcacacatctgtattcccagctactcaggaagctgagacaggaggatcgcttgagcccaggagttggaggttactgagctatgatcgcaccactgcactccagcttggtgacagtgagaccctcaaaaaaaaaaagaaaagaaagaggtctctacacaagcccgtgattcttcatggcaagggataacatcagaaatgtttcattttctgctattagtttccattcctttccccatccaggcataaagagaaacaaaagacaatgatggtattctctgtgtcctcagctttggcacttttgttgatgttgctaaggagcagtgaccttgctaaaaagactgaataatccacccactgaatagctaacctggggaggaaatgaaaatttcctttgtggatctccccaaatccattgttgtcaccaggccctcccagaacctcctcagttccttcacagtgcaaccctgtgtacttggcccgcaacccaatagtattgtgcctcacttcaccttccatgggcaactgccctcccttctggacataaaacctcatattttaaataaagttgaaatatgaaaagaaagtatgtcataagatattcagaagtattgtgtgttttgggctaagggcagcaagagactcagaggcaagattccctccttgactcaatttcttggtcaccttgttttttgtgtgtgtgtgtccagaaaaatttaataagtttgcttaaattattataaagttgaaccactgaaatgttcactgaaacattttgacttgcattaatgctttacttccccacctacatttacattaaaaattcacacacaaatgaaaattgaaaactgacaa

SEQ ID NO: 859 - DNA, 4761 bp, Homo sapiens
cagagcagaccgctagcaggaggcaggatgtgatagtctaagaccctggaagctgacggccagagggagggaagggtggtcacagaggagaggcaaagcaacgggaggtggaggatcctggaggtgtctgcaaggagaatacacagcagcgaggggctgcagaagcggacccagcgacttctgcgctgacgcggggcgggcgggagagaggaagagaggggagcgcggtggcgctgcgagctggccccgccggggaaggggctgccatgtcccgtgagcggcccccgggcaccgacattccccgcaacctgagcttcatcgccgcgctaacggagcgcgcctactaccgtagccagcggcccagcctcgaggaggagccggaggaggagccaggcgagggcgggacgcggttcggggcccgatcccgcgctcacgcaccgagtcggggccgccgggcccgatctgcaccagccggaggcggcggggcccgggcgccccgcagccgtagcccagacacccgcaagagagtgcgtttcgccgacgcactggggttggagctggctgtcgtgcgccgcttccgtcccggtgagctgccccgggtgccccgccacgtgcagatccaattgcagagggacgccctccgccacttcgcgccctgccagccccgcgcccgcggcctccaggaggcgcgcgccgccctggagccggccagcgagcccggcttcgccgcccgcttgctgacgcagcgcatctgcctggaacgcgccgaggcgggcccgctgggcgtggccgggagcgcgcgcgtggtggacctggcctacgagaagcgcgtgagcgtgcgctggagcgccgacggctggcggagccaacgcgaggcgccagccgcctacgccggtccggccccgcccccgccgcgcgccgaccgcttcgccttccgcctgcccgcgccgccgattgggggcgccctgctcttcgccttgcgctaccgtgtgacaggtcacgagttctgggacaacaacggcggccgtgactatgctctacgtgggcccgagcacccgggcagtggcggagctccggagccgcagggctggatccactttatctgagacgaggcgcctgcggccgacggcggaaaacaccaaaggcacccgggggcggggcgacccgatgtggcggggaggagtaggagagaccaggattggcgggagcggtccaagggagtcaagccggggagggcgaaaagggaacctggccactgctccttggtccttggcattatgacgggattcccttgtcacctctgacagttcctggctgcggtgtccgcggactggctggggagtgatgacagaagggatggaaaccctattttcttttctccaagaccatggttggtctgcttccctcactcgggctccttgacagtcttctagaagagagaaggaggaaaagaagcagttcctgatgttacaaatgaacaaggatctcccagccttagtctttgagaaaagatggctgaaagagaggaactctccaagtcattccgcaaacaaatgcccatttaaacatcatccttgtcttgtgaagaaaacaggaagaatgtcatgtaccatgtggatcaccttcagttcaaagttgcagcaaagtgaagaaagaaactactggaagccacccagcaatgcactgtttagtcatcaattaggagcccatgggaggataatagggagactgggtggaggctcagtgtgtaataatctcttgtctaatgtatgtgtgtcactgccatgttgtatgaacaatagtgagggctcacatttacttaacacttgtgtgcgcaaatctgggtttttcttcctttccagaactatgactcgatcataaaatctgttttgtttgcatgcatgcccaaaacaaccctgtaagtagaacattgtcattatctctgttttagagatgaggaaacaggctcagagaagctcagaaatttgttcaagatcgcacagctagtaaatggcagaagtaggattgtgaacccagggaatctccagagcctctgtgtaaccatgatgttatattttttttcctctttaaaaacaaaatttaaaaccttgctataatctcttattaggaaatgatcatagtttctgactgtgctctgccttcccatcctgccaatctcctggactggcttggagaagacagggggcccccgagcttcatctgtgactcgaaggagtttgctgctgtctcctgtgtcagtgtcccatctatgcaggatcagcacaggacccccctcaccttcccacttacactctagcctttccatacattggaattctctcctggccctagccagcgctccacacctgttggtgtgccacctccctccctcttcccccactggccttgaacaggcaaaccccctaatgtcgccactaggttgggtccgtgactaggacacctgctagagggtctgtgcttgggccttttctaggaatcccgatgttactgggtaagtgccaactctgtgggcagaatgctaatgataatcctgttccctgacctctttctcagaagtaccctggctcactctccccaatctcagctttatagaacaacattttggtcttgattattcccatatcaagctgccccagggcttcggtaagctgttagttgccccactgcctcaaggctgggtctggctgagctacttcttaggcacacaaatagtgggtgtctccttggaacctgacacaaaactatcagtgctaccaagccttgtaaaatagggaggaaactaatatttcttgagtggcttctgagtgcctggtgctttcgcggctctctggagagattccttgccctgatggctttggtgtgtactcctctcccaggacttcagcactgagattttcccaaccccctggcttttcctcaccttgggttgagttgatccggcactaccacaaaccccaccatctgcaaaccaaccaagattaggcagtatgccctttccgtcttgcattgctcttccaaaacttccatctgtatttctcacaccctcagtaagcaaagctgagtgtgcatggacagagctgcatccactgctttctcccagcgggtgcagtctaatctgacacggggaacactaggagtttagcggaatcttcagccaccctattaatgtgttacgcattaggcattgtagtggaaactcctctgatggctcatgactatatgaacaggagcaatttggaatataacatgtcagctgtggactgggaagtgccgtgagagaaaacactacctgggtcataggcttgggtccctgaggcaacccagcagggacactgttgcccattcctctcatccagactgcaggtgtcttcctacacctccctgtcccatagcctccgtcctgttttttgtttgtttgtttttctttgtgaatgtagaaaaacatttcatcatgagccctagctcctcagttttccacctaacacccacattcccttgtttctaactgccgtgtttttctggagcctgctgggatctttgcagtttgcaggtcatagaatcagacatgaaaaggcttctcttccgacgtcattggttcctggctcctttacagatgagaacacaggtccagaggtgagaaatgactctagcagggtcatagaatttgttagtgcagctcaagatgggacttaaactcaggcctcctgatcacccattcccaggctaggaaacaggtctctgctcggtgtggtggttcatacctgtaatcgcaacactttgggaggctgaggcaggagcattgcttgagcccaggagttcgagaccagtctgagcaacatagtgggaccctgtctctacaaaaacttttaaaattagctgggcatggtggcacacatctgtattcccagctactcaggaagctgagacaggaggatcgcttgagcccaggagttggaggttactgagctatgatcgcaccactgcactccagcttggtgacagtgagaccctcaaaaaaaaaaagaaaagaaagaggtctctacacaagcccgtgattcttcatggcaagggataacatcagaaatgtttcattttctgctattagtttccattcctttccccatccaggcataaagagaaacaaaagacaatgatggtattctctgtgtcctcagctttggcacttttgttgatgttgctaaggagcagtgaccttgctaaaaagactgaataatccacccactgaatagctaacctggggaggaaatgaaaatttcctttgtggatctccccaaatccattgttgtcaccaggccctcccagaacctcctcagttccttcacagtgcaaccctgtgtacttggcccgcaacccaatagtattgtgcctcacttcaccttccatgggcaactgccctcccttctggacataaaacctcatattttaaataaagttgaaatatgaaaagaaagtatgtcataagatattcagaagtattgtgtgttttgggctaagggcagcaagagactcagaggcaagattccctccttgactcaatttcttggtcaccttgttttttgtgtgtgtgtgtccagaaaaatttaataagtttgcttaaattattataaagttgaaccactgaaatgttcactgaaacattttgacttgcattaatgctttacttccccacctacatttacattaaaaattcacacacaaatgaaaattgaaaactgacaa

SEQ ID NO: 860 - DNA, 5146 bp, Homo sapiens
ccatgctcaagtgcatcccgctgtggcgctgcaaccggcacgtggagtcggtggacaagcggcactgttcgctgcaggccgtgccggaggagatctaccgctacagccgcagcctggaggagctgctgctcgacgccaaccagctgcgcgagctgcccaagccttttttccggctgctgaacttgcgcaagctgggcctgagcgacaacgagatccagcggttgcctcccgaggtggccaacttcatgcagctggtggagctggacgtgtcccggaacgatatccctgagatcccggagagcatcaagttctgcaaggctctggagatcgcggacttcagcgggaaccccctctccaggctccctgatggcttcactcagctgcgcagcctggctcacctggccctgaatgatgtgtctctgcaggcactgcccggggacgtgggcaacctcgccaacctggtgaccctggagctccgggagaacctgctcaagtccctgccagcgtccctgtcatttctggtcaagctggaacagctggatctgggaggcaacgatctggaagtgctgccagacactctgggggctctgcccaatcttcgggagctgtggcttgaccggaaccagctgtcagcactgcccccggagctcgggaacctgcggcgcctggtgtgcctggacgtgtcggaaaaccggctggaggagctgcctgctgagctcggcgggctggtgctgctcactgacctgctgctgtcccagaacctgctgcggaggctgcccgacggcatcggtcagctgaagcagctatccatcctaaaggtagaccagaatcggctgtgcgaggtgactgaggccatcggggactgtgagaacctctctgagctgatcctcacggagaacctgctgatggccctgccccgctccctgggaaagctgactaagctgaccaacctcaacgtggaccggaaccacctcgaggcgctgccgcccgagatcgggggctgtgtggcactcagcgtcctctccttgagggacaaccgcctggccgtcctgccaccagagctggcccacacgacagagctgcacgtgctggacgtggcggggaaccgcctgcagagtctgccgttcgcgctcacccacctcaatctcaaggccctgtggctggcagagaaccaggcgcagcccatgctccggttccagacggaggatgatgcccggaccggcgagaaggtgctcacctgctacttgctgccccagcagcccccactcagcctcgaggatgctgggcagcaggggagcctctcggagacctggagcgatgccccgccgagccgcgtcagcgtcatccagttcctggaggcccccataggtgatgaggacgctgaggaagctgcagctgagaagcggggcctacagcgccgggccacacctcaccccagcgagctcaaggtgatgaagaggagcatcgaggggcggcggagcgaggcctgcccttgccagccagactctgggtcgcccttgcctgcagaggaggagaagcggctgagtgccgagtctggcctgagtgaagactctcgcccatctgccagcacagtctctgaggctgagcccgagggcccgtcggctgaggcacagggtgggagccagcaggaagccacgactgctggcggggaggaagacgccgaagaggactaccaggagcccacggtgcatttcgcagaggacgcactgctgcccggggatgacagggagatcgaggaggggcagcctgaggccccctggaccctgccaggcgggaggcagcggctcatccgcaaggacacacctcactacaaaaagcacttcaagatctccaagctgccccagcccgaggccgttgtggctctgctgcagggcatgcagcctgatggggagggccctgtggctcccgggggctggcacaatggcccccacgcaccctgggctcctcgggcccagaaggaggaggaggaggaggaagagggtagtcctcaggaggaggaggaagaggaggaggaggaaaacagggctgaagaggaagaggccagcactgaggaggaggacaaggagggggccgtggtttctgcgccctctgtcaagggagtgtcgtttgaccaggccaataacctgctgatagagcctgctcgcattgaggaggaagagctgaccctcaccatcctgcggcagactgggggcctgggcatcagcattgcgggcggcaagggctccacaccctataagggggacgacgagggcatattcatctctcgggtgtccgaggaaggccctgcggcccgggctggagtccgtgtgggtgacaagctcctggaggtgaatggtgtggctctgcagggcgccgagcaccacgaggccgtggaggcgctccggggggccggcactgccgtgcagatgcgagtgtggcgggagcgcatggtggagcctgagaacgcggtcaccatcacgccgctgcggcccgaggatgattacagcccccgagagcggcggggaggggggctgcgcctgcccctgctcccgcctgagagccccgggcccctccgtcagcgccacgtggcctgcctggcacgcagcgagagggggctgggcttcagcattgctggtgggaaaggctccacaccctacagggctggtgatgcgggcatcttcgtctcccgcattgccgagggcggtgctgctcaccgcgcgggcacactgcaggttggcgaccgcgtcctctctattaatggagtggacgtgactgaggccaggcatgaccacgccgtctccctgctgaccgctgcctcccccaccatcgccctgctgttggagcgggaggctgggggccctcttcctcccagccctctgccacattcctcaccccccaccgctgctgttgccaccaccagcataaccactgccacccccggggtgcctgggttgccgagcctggcccccagcctgctggctgccgcgttggaagggccatacccagtggaggagatccgtctgccaagagctgggggccctctggggcttagtattgtcggaggctccgaccattccagccacccgtttggtgtccaggagcctggtgtgttcatctccaaggtgctcccgcggggcctggccgctcgcagcggcctgcgggttggggaccgcatcctggcagtgaacgggcaagacgtgcgggatgccacgcaccaagaagcagtcagtgccctgctccggccctgcctggagctgtcgctgctggtgcggagggacccggcacccccgggcctacgggaactgtgcatccagaaggcacctggggagaggctgggcatcagcatccgcgggggtgccaggggccacgctggcaacccccgcgaccccacagacgagggcatcttcatctccaaggtgagccccacgggggcagccgggcgcgacggtcggctgcgtgtgggtttgcggctgttggaggtgaaccagcagagcctgctgggcctgacgcacggcgaggcggtgcagctgctccgcagtgtgggcgacaccctcaccgtgctggtctgtgacggcttcgaggccagcaccgacgcagccctggaggtgtccccaggtgtcattgccaacccctttgcggcaggcatcggccaccggaacagcctggagagcatctcttccatcgaccgggagctgagccctgagggcccaggcaaggagaaggagctgcctggacagaccctgcactgggggcccgaggccacagaagccgcaggtcggggtctgcagcccctgaagctggactaccgcgccctggccgccgtgcccagcgctggcagcgtgcagagggtaccgtctggagcagctggagggaagatggctgaatctccctgctcccctagtggccagcagccgccctccccgccttctccggatgagctgcccgccaatgtgaagcaggcctacagggccttcgcggccgtgcccacttctcacccgcctgaggatgcccctgcccagccccccacgcctgggcctgcagcctccccggagcagctgtccttccgggagcggcagaagtactttgagctggaggtgcgcgtgccccaggccgagggcccccctaagcgcgtgtccctggtgggtgctgacgacctgcggaagatgcaggaggaggaagccagaaaactacagcagaagagagcgcagatgctgcgggaggcggcagaggctggggccgaagcgaggctcgccctggacggggagacgctgggcgaggaggaacaggaggatgagcagccaccctgggccagcccgagccccacctcaaggcagagcccggcgtcccccccgcccctgggaggtggcgccccggtgcggacggccaaagctgaacggcgccaccaggagcggctgcgcgtgcagagtccggagccaccggcacccgagcgtgccctgtcccctgccgagctccgggccctggaggccgagaagcgtgcgctgtggagggcagccaggatgaagtcattggaacaggacgctctccgagcacagatggtcctcagcaggtcccaggaaggccggggcacgcgggggcccctggagcgactggccgaggccccttcccctgcgcccaccccgtcgcccacccctgtggaagacctcggcccccagaccagcacctccccgggacgcctgtcaccggactttgctgaggagttgaggtccctggaaccatctcccagccctggcccgcaggaggaggatggagaagtggctctggtgcttctgggcaggccctcacccggcgctgtgggccctgaagatgtggcactgtgcagcagccgccgccccgtaaggcctgggcgccgtggcctgggccctgtgccctcctagaggagcaggcacctcccccagacttggggtgggggccctgccagctccagcaccacccttgccccaagtcttttaacctgggtgttagcattttaaagagaccccacaggagttctggcctgtgactaactaactgccccaccccagccgagacctcggcgagactgtaactagtgatgtttgtacaaccaaagactctattttgtggtttaaggagaataaagttgactacattttaaaaaaaaaaaaaa

SEQ ID NO: 861 - DNA, 5221 bp, Homo sapiens
ccatgctcaagtgcatcccgctgtggcgctgcaaccggcacgtggagtcggtggacaagcggcactgttcgctgcaggccgtgccggaggagatctaccgctacagccgcagcctggaggagctgctgctcgacgccaaccagctgcgcgagctgcccaagccttttttccggctgctgaacttgcgcaagctgggcctgagcgacaacgagatccagcggttgcctcccgaggtggccaacttcatgcagctggtggagctggacgtgtcccggaacgatatccctgagatcccggagagcatcaagttctgcaaggctctggagatcgcggacttcagcgggaaccccctctccaggctccctgatggcttcactcagctgcgcagcctggctcacctggccctgaatgatgtgtctctgcaggcactgcccggggacgtgggcaacctcgccaacctggtgaccctggagctccgggagaacctgctcaagtccctgccagcgtccctgtcatttctggtcaagctggaacagctggatctgggaggcaacgatctggaagtgctgccagacactctgggggctctgcccaatcttcgggagctgtggcttgaccggaaccagctgtcagcactgcccccggagctcgggaacctgcggcgcctggtgtgcctggacgtgtcggaaaaccggctggaggagctgcctgctgagctcggcgggctggtgctgctcactgacctgctgctgtcccagaacctgctgcggaggctgcccgacggcatcggtcagctgaagcagctatccatcctaaaggtagaccagaatcggctgtgcgaggtgactgaggccatcggggactgtgagaacctctctgagctgatcctcacggagaacctgctgatggccctgccccgctccctgggaaagctgactaagctgaccaacctcaacgtggaccggaaccacctcgaggcgctgccgcccgagatcgggggctgtgtggcactcagcgtcctctccttgagggacaaccgcctggccgtcctgccaccagagctggcccacacgacagagctgcacgtgctggacgtggcggggaaccgcctgcagagtctgccgttcgcgctcacccacctcaatctcaaggccctgtggctggcagagaaccaggcgcagcccatgctccggttccagacggaggatgatgcccggaccggcgagaaggtgctcacctgctacttgctgccccagcagcccccactcagcctcgaggatgctgggcagcaggggagcctctcggagacctggagcgatgccccgccgagccgcgtcagcgtcatccagttcctggaggcccccataggtgatgaggacgctgaggaagctgcagctgagaagcggggcctacagcgccgggccacacctcaccccagcgagctcaaggtgatgaagaggagcatcgaggggcggcggagcgaggcctgcccttgccagccagactctgggtcgcccttgcctgcagaggaggagaagcggctgagtgccgagtctggcctgagtgaagactctcgcccatctgccagcacagtctctgaggctgagcccgagggcccgtcggctgaggcacagggtgggagccagcaggaagccacgactgctggcggggaggaagacgccgaagaggactaccaggagcccacggtgcatttcgcagaggacgcactgctgcccggggatgacagggagatcgaggaggggcagcctgaggccccctggaccctgccaggcgggaggcagcggctcatccgcaaggacacacctcactacaaaaagcacttcaagatctccaagctgccccagcccgaggccgttgtggctctgctgcagggcatgcagcctgatggggagggccctgtggctcccgggggctggcacaatggcccccacgcaccctgggctcctcgggcccagaaggaggaggaggaggaggaagagggtagtcctcaggaggaggaggaagaggaggaggaggaaaacagggctgaagaggaagaggccagcactgaggaggaggacaaggagggggccgtggtttctgcgccctctgtcaagggagtgtcgtttgaccaggccaataacctgctgatagagcctgctcgcattgaggaggaagagctgaccctcaccatcctgcggcagactgggggcctgggcatcagcattgcgggcggcaagggctccacaccctataagggggacgacgagggcatattcatctctcgggtgtccgaggaaggccctgcggcccgggctggagtccgtgtgggtgacaagctcctggaggtgaatggtgtggctctgcagggcgccgagcaccacgaggccgtggaggcgctccggggggccggcactgccgtgcagatgcgagtgtggcgggagcgcatggtggagcctgagaacgcggtcaccatcacgccgctgcggcccgaggatgattacagcccccgagagcggcggggaggggggctgcgcctgcccctgctcccgcctgagagccccgggcccctccgtcagcgccacgtggcctgcctggcacgcagcgagagggggctgggcttcagcattgctggtgggaaaggctccacaccctacagggctggtgatgcgggcatcttcgtctcccgcattgccgagggcggtgctgctcaccgcgcgggcacactgcaggttggcgaccgcgtcctctctattaatggagtggacgtgactgaggccaggcatgaccacgccgtctccctgctgaccgctgcctcccccaccatcgccctgctgttggagcgggaggctgggggccctcttcctcccagccctctgccacattcctcaccccccaccgctgctgttgccaccaccagcataaccactgccacccccggggtgcctgggttgccgagcctggcccccagcctgctggctgccgcgttggaagggccatacccagtggaggagatccgtctgccaagagctgggggccctctggggcttagtattgtcggaggctccgaccattccagccacccgtttggtgtccaggagcctggtgtgttcatctccaaggtgctcccgcggggcctggccgctcgcagcggcctgcgggttggggaccgcatcctggcagtgaacgggcaagacgtgcgggatgccacgcaccaagaagcagtcagtgccctgctccggccctgcctggagctgtcgctgctggtgcggagggacccggcacccccgggcctacgggaactgtgcatccagaaggcacctggggagaggctgggcatcagcatccgcgggggtgccaggggccacgctggcaacccccgcgaccccacagacgagggcatcttcatctccaaggtgagccccacgggggcagccgggcgcgacggtcggctgcgtgtgggtttgcggctgttggaggtgaaccagcagagcctgctgggcctgacgcacggcgaggcggtgcagctgctccgcagtgtgggcgacaccctcaccgtgctggtctgtgacggcttcgaggccagcaccgacgcagccctggaggtgtccccaggtgtcattgccaacccctttgcggcaggcatcggccaccggaacagcctggagagcatctcttccatcgaccgggagctgagccctgagggcccaggcaaggagaaggagctgcctggacagaccctgcactgggggcccgaggccacagaagccgcaggtcggggtctgcagcccctgaagctggactaccgcgccctggccgccgtgcccagcgctggcagcgtgcagagggtaccgtctggagcagctggagggaagatggctgaatctccctgctcccctagtggccagcagccgccctccccgccttctccggatgagctgcccgccaatgtgaagcaggcctacagggccttcgcggccgtgcccacttctcacccgcctgaggatgcccctgcccagccccccacgcctgggcctgcagcctccccggagcagctgtccttccgggagcggcagaagtactttgagctggaggtgcgcgtgccccaggccgagggcccccctaagcgcgtgtccctggtgggtgctgacgacctgcggaagatgcaggaggaggaagccagaaaactacagcagaagagagcgcagatgctgcgggaggcggcagaggctggggccgaagcgaggctcgccctggacggggagacgctgggcgaggaggaacaggaggatgagcagccaccctgggccagcccgagccccacctcaaggcagagcccggcgtcccccccgcccctgggaggtggcgccccggtgcggacggccaaagctgaacggcgccaccaggagcggctgcgcgtgcagagtccggagccaccggcacccgagcgtgccctgtcccctgccgagctccgggccctggaggccgagaagcgtgcgctgtggagggcagccaggatgaagtcattggaacaggacgctctccgagcacagatggtcctcagcaggtcccaggaaggccggggcacgcgggggcccctggagcgactggccgaggccccttcccctgcgcccaccccgtcgcccacccctgtggaagacctcggcccccagaccagcacctccccgggacgcctgcccttgtctggaaagaagtttgactacagggcctttgcggccctgccttcttccagacctgtctatgacatccagtcaccggactttgctgaggagttgaggtccctggaaccatctcccagccctggcccgcaggaggaggatggagaagtggctctggtgcttctgggcaggccctcacccggcgctgtgggccctgaagatgtggcactgtgcagcagccgccgccccgtaaggcctgggcgccgtggcctgggccctgtgccctcctagaggagcaggcacctcccccagacttggggtgggggccctgccagctccagcaccacccttgccccaagtcttttaacctgggtgttagcattttaaagagaccccacaggagttctggcctgtgactaactaactgccccaccccagccgagacctcggcgagactgtaactagtgatgtttgtacaaccaaagactctattttgtggtttaaggagaataaagttgactacattttaaaaaaaaaaaaaa

SEQ ID NO: 862 - DNA, 2448 bp, Homo sapiens
cgagcgccgagcggtcgatcgccgtagctcccgcagcctgcgatctccagtctgtggctcctaccagccattgtaggccaataatccgttatggagcatgcctttaccccgttggagcccctgctttccactgggaatttgaagtactgccttgtaattcttaatcagcctttggacaactattttcgtcatctttggaacaaagctcttttaagagcctgtgccgatggaggtgccaaccgcttatatgatatcaccgaaggagagagagaaagctttttgcctgaattcatcaatggagactttgattctattaggcctgaagtcagagaatactatgctactaagggatgtgagctcatttcaactcctgatcaagaccacactgactttactaagtgccttaaaatgctccaaaagaagatagaagaaaaagacttaaaggttgatgtgatcgtgacactgggaggccttgctgggcgttttgaccagattatggcatctgtgaataccttgttccaagcgactcacatcactccttttccaattataataatccaagaggaatcgctgatctacctgctccaaccaggaaagcacaggttgcatgtagacactggaatggagggtgattggtgtggccttattcctgttggacagccttgtatgcaggttacaaccacaggcctcaagtggaacctcacaaatgatgtgcttgcttttggaacattggtcagtacttccaatacctacgacgggtctggtgttgtgactgtggaaactgaccacccactcctctggaccatggccatcaaaagctaacctgttgactggcatccataagtgtgcctctgccttatctcatttctcaacagttcattgctcaacaagaacgattcacctgggtttgcaagaatctaaacctctctaggggaagcccactgggtttaaagatgttagtgtttagataatacaggtaacattataaatgacagatctcaattttatagtagtgggaaagatacatgctaagaaagcaaataagctctattatattcggttggaacctaatgggaatcattccactatacaattcagtactgattattcttcttacattattaatcattccatttatcctagaaaattgtttttaatttgaatcagagaaaactgttgaggttcctcttggagtctagaacatccttaaatgtctaacaacaagggctacctctgagtaccttttagtattagttttctgtatatgatatatattatcttatactgaaaaaaaattcctttcagattggggtgttagaagtgcaccaggtcactctgaccttattactgtctttggtattgtcttaaataaatcaagaatcattgacctaattgttaaatttaaaaataggtagttagcaataggtggaaagagaaatgatgtgaaagataaatgatgattcgtggagccctactcacacattaacccccaaattcaaaagtaagaatgcaaaagtctagagggggtaacagtctgcatcatcatcacaacctaaatggagaaagctgtgcagaggaaacttaagcataaaaattgaattcgtttctgacataccttagactgaaaaactgttggttcatccagaagtgtattcatattaccagaaaatgagtttgtctatggggatacatgaacttcatatactaaggagcctaactccaaagcctgcgttctcatcccagtctgatattcacctaagtttccggacccttttccttagctgtaaaatggaagcggttggactgatggtgtctgaggttctttcccacactgaaattctaaatattgacacttagcagtcatagggctgataatacacacagttactgacttagcctaaacaacctggtgcatcgaaatgtattcacctttcttttgtaaagagaccatcttctatcttctttccacctttctctgttttatgaaaccaactgttgacatacaaaccatgattgaaggagaacctgtccaacatgttttatgtacacaaatccctatgttgctataagaaaagtgaaagtaactgttttcttcttggtgctatgacagtgtgagactcaggttgtctgtagagaatgaaaggagcagtggcccgcgtgattgtggcatttaaggagcagtggcccatgtgactgtggcattttcggcacttttcattactttctgcttgaccggaagttgaggcttagctatgtttccatcttcagtttctgaagactagttatatattccttactagaaatatattcataatatataaaagaaatatatctgtgattttaaaattttgctaccaaagaatgcatgttctgtgtgccctgaaaatgttaccagtgttaataaatggatacttatcgaaaaaaaaaaaaaaaaaaaaaaaaaaaaaa

SEQ ID NO: 863 - DNA, 2263 bp, Homo sapiens
tagcgagggacgcgtaggtgtcttcataagatgccggggcagcggcgcgcgctttcccccaagatggcgtccatgcgggagagcgacacgggcctgtggctgcacaacaagctgggggccacggacgagctgtgggcgccgcccagcatcgcgtccctgctcacggccgcggtcatcgacaacatccgtctctgcttccatggcctctcgtcggcagtgaagctcaagttgctactcgggacgctgcacctcccgcgccgcacggtggacgagatgaagggcgccctaatggagatcatccagctcgccagcctcgactcggacccctgggtgctcatggtcgccgacatcttgaagtcctttccggacacaggctcgcttaacctggagctggaggagcagaatcccaacgttcaggatattttgggagaacttagagaaaaggtgggtgagtgtgaagcgtctgccatgctgccactggagtgccagtacttgaacaaaaacgccctgacgaccctcgcgggacccctcactcccccggtgaagcattttcagttaaagcggaaacccaagagcgccacgctgcgggcggagctgctgcagaagtccacggagaccgcccagcagttgaagcggagcgccggggtgcccttccacgccaagggccgggggctgctgcggaagatggacaccaccaccccactcaaaggcatcccgaagcaggcgcccttcagaagccccacggcgcccagcgtcttcagccccacagggaaccggacccccatcccgccttccaggacgctgctgcggaaggaacgaggtgtgaagctgctggacatctctgagctggatatggttggcgctggccgagaggcgaagcggagaaggaagactctcgatgcggaggtggtggagaagccggccaaggaggaaacggtggtggagaacgccaccccggactacgcagccggcctggtgtccacgcagaaacttgggtccctgaacaatgagcctgcgctgccctccacgagctaccttccctccacgcccagcgtggttcccgcctcctcctacatccccagctccgagacgcccccagccccatcttcccgggaagccagccgcccaccagaggagcccagcgccccgagccccacgttgccagcgcagttcaagcagcgggcgcccatgtacaacagcggcctgagccctgccacacccacgcctgcggcgcccacctcgcctctgacacccaccacacctccggctgtcgcccctaccactcagacacccccggttgccatggtggccccgcagacccaggcccctgctcagcagcagcctaagaagaacctgtccctcacgagagagcagatgttcgctgcccaggagatgttcaagacggccaacaaagtcacgcggcccgagaaggccctcatcctgggcttcatggccggctcccgagagaacccgtgccaggagcagggggacgtgatccagatcaagctgagcgagcacacggaggacctgcccaaggcggacggccagggtagcacaaccatgctggtggacacagtgtttgagatgaactatgccacgggccagtggacgcgcttcaagaagtacaagcccatgaccaatgtgtcctagaaccacctgcctcacagctggccgtcacttgtgggggtccacgggacgatggctttgccagcttaaagtaaccggatggcggacacctggcccccgaggtcccccggccgccgccctgctgctgacccagcctgttttaagttctggatgcatttctctggggtatttggggcttatttttaaaattttaatatgggttcttttttgtgtgatttaaagacactttttggactcaacgttacatttttgaatgtagtaagtaaattaaccaaaaaagttacaacttcctaattttagtgacagctctgcctgtttgttagactcttactttttaaaatcttttctattttccctcgctggggcagtgccctcctacccccagggttgaggggaccaaggtggcacggtggtactgggggtgcggcagggacacccgaccacaccagagcgtgggagacggtgggccttgtcccctgcctgtgcctgcctgggagttttgtattcatcttttgtatagttgtggacatttaagacagtctttgggtacctattttcattgtaaaactatctgaaccattaaagtcgagcttttctaaagaaaaaaaaaaaaaaa

SEQ ID NO: 864 - DNA, 6704 bp, Homo sapiens
gtgggataaaggaatgaggttcagaaaggggcagggagttgcccgcagccgcaccgcacgtcttcagcccgaccgttgtcctgacctctctgtcccgtcccctgcccagtctcaccatggccttctggacacagctgatgctgctgctctggaagaatttcatgtatcgccggagacagccggtccagctcctggtcgaattgctgtggcctctcttcctcttcttcatcctggtggctgttcgccactcccacccgcccctggagcaccatgaatgccacttcccaaacaagccactgccatcggcgggcaccgtgccctggctccagggtctcatctgtaatgtgaacaacacctgctttccgcagctgacaccgggcgaggagcccgggcgcctgagcaacttcaacgactccctggtctcccggctgctagccgatgcccgcactgtgctgggaggggccagtgcccacaggacgctggctggcctagggaagctgatcgccacgctgagggctgcacgcagcacggcccagcctcaaccaaccaagcagtctccactggaaccacccatgctggatgtcgcggagctgctgacgtcactgctgcgcacggaatccctggggttggcactgggccaagcccaggagcccttgcacagcttgttggaggccgctgaggacctggcccaggagctcctggcgctgcgcagcctggtggagcttcgggcactgctgcagagaccccgagggaccagcggccccctggagttgctgtcagaggccctctgcagtgtcaggggacctagcagcacagtgggcccctccctcaactggtacgaggctagtgacctgatggagctggtggggcaggagccagaatccgccctgccagacagcagcctgagccccgcctgctcggagctgattggagccctggacagccacccgctgtcccgcctgctctggagacgcctgaagcctctgatcctcgggaagctactctttgcaccagatacaccttttacccggaagctcatggcccaggtcaaccggaccttcgaggagctcaccctgctgagggatgtccgggaggtgtgggagatgctgggaccccggatcttcaccttcatgaacgacagttccaatgtggccatgctgcagcggctcctgcagatgcaggatgaaggaagaaggcagcccagacctggaggccgggaccacatggaggccctgcgatcctttctggaccctgggagcggtggctacagctggcaggacgcacacgctgatgtggggcacctggtgggcacgctgggccgagtgacggagtgcctgtccttggacaagctggaggcggcaccctcagaggcagccctggtgtcgcgggccctgcaactgctcgcggaacatcgattctgggccggcgtcgtcttcttgggacctgaggactcttcagaccccacagagcacccaaccccagacctgggccccggccacgtgcgcatcaaaatccgcatggacattgacgtggtcacgaggaccaataagatcagggacaggttttgggaccctggcccagccgcggaccccctgaccgacctgcgctacgtgtggggcggcttcgtgtacctgcaagacctggtggagcgtgcagccgtccgcgtgctcagcggcgccaacccccgggccggcctctacctgcagcagatgccctatccgtgctatgtggacgacgtgttcctgcgtgtgctgagccggtcgctgccgctcttcctgacgctggcctggatctactccgtgacactgacagtgaaggccgtggtgcgggagaaggagacgcggctgcgggacaccatgcgcgccatggggctcagccgcgcggtgctctggctaggctggttcctcagctgcctcgggcccttcctgctcagcgccgcactgctggttctggtgctcaagctgggagacatcctcccctacagccacccgggcgtggtcttcctgttcttggcagccttcgcggtggccacggtgacccagagcttcctgctcagcgccttcttctcccgcgccaacctggctgcggcctgcggcggcctggcctacttctccctctacctgccctacgtgctgtgtgtggcttggcgggaccggctgcccgcgggtggccgcgtggccgcgagcctgctgtcgcccgtggccttcggcttcggctgcgagagcctggctctgctggaggagcagggcgagggcgcgcagtggcacaacgtgggcacccggcctacggcagacgtcttcagcctggcccaggtctctggccttctgctgctggacgcggcgctctacggcctcgccacctggtacctggaagctgtgtgcccaggccagtacgggatccctgaaccatggaattttccttttcggaggagctactggtgcggacctcggccccccaagagtccagccccttgccccaccccgctggacccaaaggtgctggtagaagaggcaccgcccggcctgagtcctggcgtctccgttcgcagcctggagaagcgctttcctggaagcccgcagccagccctgcgggggctcagcctggacttctaccagggccacatcaccgccttcctgggccacaacggggccggcaagaccaccaccctgtccatcttgagtggcctcttcccacccagtggtggctctgccttcatcctgggccacgacgtccgctccagcatggccgccatccggccccacctgggcgtctgtcctcagtacaacgtgctgtttgacatgctgaccgtggacgagcacgtctggttctatgggcggctgaagggtctgagtgccgctgtagtgggccccgagcaggaccgtctgctgcaggatgtggggctggtctccaagcagagtgtgcagactcgccacctctctggtgggatgcaacggaagctgtccgtggccattgcctttgtgggcggctcccaagttgttatcctggacgagcctacggctggcgtggatcctgcttcccgccgcggtatttgggagctgctgctcaaataccgagaaggtcgcacgctgatcctctccacccaccacctggatgaggcagagctgctgggagaccgtgtggctgtggtggcaggtggccgcttgtgctgctgtggctccccactcttcctgcgccgtcacctgggctccggctactacctgacgctggtgaaggcccgcctgcccctgaccaccaatgagaaggctgacactgacatggagggcagtgtggacaccaggcaggaaaagaagaatggcagccagggcagcagagtcggcactcctcagctgctggccctggtacagcactgggtgcccggggcacggctggtggaggagctgccacacgagctggtgctggtgctgccctacacgggtgcccatgacggcagcttcgccacactcttccgagagctagacacgcggctggcggagctgaggctcactggctacgggatctccgacaccagcctcgaggagatcttcctgaaggtggtggaggagtgtgctgcggacacagatatggaggatggcagctgcgggcagcacctatgcacaggcattgctggcctagacgtaaccctgcggctcaagatgccgccacaggagacagcgctggagaacggggaaccagctgggtcagccccagagactgaccagggctctgggccagacgccgtgggccgggtacagggctgggcactgacccgccagcagctccaggccctgcttctcaagcgctttctgcttgcccgccgcagccgccgcggcctgttcgcccagatcgtgctgcctgccctctttgtgggcctggccctcgtgttcagcctcatcgtgcctcctttcgggcactacccggctctgcggctcagtcccaccatgtacggtgctcaggtgtccttcttcagtgaggacgccccaggggaccctggacgtgcccggctgctcgaggcgctgctgcaggaggcaggactggaggagcccccagtgcagcatagctcccacaggttctcggcaccagaagttcctgctgaagtggccaaggtcttggccagtggcaactggaccccagagtctccatccccagcctgccagtgtagccagcccggtgcccggcgcctgctgcccgactgcccggctgcagctggtggtccccctccgccccaggcagtgaccggctctggggaagtggttcagaacctgacaggccggaacctgtctgacttcctggtcaagacctacccgcgcctggtgcgccagggcctgaagactaagaagtgggtgaatgaggtcaggtacggaggcttctcgctggggggccgagacccaggcctgccctcgggccaagagttgggccgctcagtggaggagttgtgggcgctgctgagtcccctgcctggcggggccctcgaccgtgtcctgaaaaacctcacagcctgggctcacagcctggacgctcaggacagtctcaagatctggttcaacaacaaaggctggcactccatggtggcctttgtcaaccgagccagcaacgcaatcctccgtgctcacctgcccccaggccgggcccgccacgcccacagcatcaccacactcaaccaccccttgaacctcaccaaggagcagctgtttgaggctgcattgatggcctcctcggtggacgtcctcgtctccatctgtgtggtctttgccatgtcctttgtcccggccagcttcactcttgtcctcattgaggagcgagtcacccgagccaagcacctgcagctcatggggggcctgtcccccaccctctactggcttggcaactttctctgggacatgtgtaactacttggtgccagcatgcatcgtggtgctcatctttctggccttccagcagagggcatatgtggcccctgccaacctgcctgctctcctgctgttgctactactgtatggctggtcgatcacaccgctcatgtacccagcctccttcttcttctccgtgcccagcacagcctatgtggtgctcacctgcataaacctctttattggcatcaatggaagcatggccacctttgtgcttgagctcttctctgatcagaagctgcaggaggtgagccggatcttgaaacaggtcttccttatcttcccccacttctgcttgggccgggggcttattgacatggtgcggaaccaggccatggctgatgcctttgagcgcttgggagacaggcagttccagtcacccctgcgctgggaggtggtcggcaagaacctcttggccatggtgatacaggggcccctcttccttctcttcacactactgctgcagcaccgaagccaactcctgccacagcccagggtgaggtctctgccactcctgggagaggaggacgaggatgtagcccgtgaacgggagcgggtggtccaaggagccacccagggggatgtgttggtgctgaggaacttgaccaaggtataccgtgggcagaggatgccagctgttgaccgcttgtgcctggggattccccctggtgagtgttttgggctgctgggtgtgaatggagcagggaagacgtccacgtttcgcatggtgacgggggacacattggccagcaggggcgaggctgtgctggcaggccacagcgtggcccgggaacccagtgctgcgcacctcagcatgggatactgccctcaatccgatgccatctttgagctgctgacgggccgcgagcacctggagctgcttgcgcgcctgcgcggtgtcccggaggcccaggttgcccagaccgctggctcgggcctggcgcgtctgggactctcatggtacgcagaccggcctgcaggcacctacagcggagggaacaaacgcaagctggcgacggccctggcgctggttggggacccagccgtggtgtttctggacgagccgaccacaggcatggaccccagcgcgcggcgcttcctttggaacagccttttggccgtggtgcgggagggccgttcagtgatgctcacctcccatagcatggaggagtgtgaagcgctctgctcgcgcctagccatcatggtgaatgggcggttccgctgcctgggcagcccgcaacatctcaagggcagattcgcggcgggtcacacactgaccctgcgggtgcccgccgcaaggtcccagccggcagcggccttcgtggcggccgagttccctgggtcggagctgcgcgaggcacatggaggccgcctgcgcttccagctgccgccgggagggcgctgcgccctggcgcgcgtctttggagagctggcggtgcacggcgcagagcacggcgtggaggacttttccgtgagccagacgatgctggaggaggtattcttgtacttctccaaggaccaggggaaggacgaggacaccgaagagcagaaggaggcaggagtgggagtggaccccgcgccaggcctgcagcaccccaaacgcgtcagccagttcctcgatgaccctagcactgccgagactgtgctctgagcctccctcccctgcggggccgcggggaggccctgggaatggcaagggcaaggtagagtgcctaggagccctggactcaggctggcagaggggctggtgccctggagaaaataaagagaaggctggagagaagccgtggtggtgaaa

SEQ ID NO: 865 - DNA, 6174 bp, Homo sapiens
atggtctgcctgggaactggccagagcgctggacccctagtgagtgttcaaaatcattgtcccccttgtggtctttctccccaggaatccctggggttggcactgggccaagcccaggagcccttgcacagcttgttggaggccgctgaggacctggcccaggagctcctggcgctgcgcagcctggtggagcttcgggcactgctgcagagaccccgagggaccagcggccccctggagttgctgtcagaggccctctgcagtgtcaggggacctagcagcacagtgggcccctccctcaactggtacgaggctagtgacctgatggagctggtggggcaggagccagaatccgccctgccagacagcagcctgagccccgcctgctcggagctgattggagccctggacagccacccgctgtcccgcctgctctggagacgcctgaagcctctgatcctcgggaagctactctttgcaccagatacaccttttacccggaagctcatggcccaggtcaaccggaccttcgaggagctcaccctgctgagggatgtccgggaggtgtgggagatgctgggaccccggatcttcaccttcatgaacgacagttccaatgtggccatgctgcagcggctcctgcagatgcaggatgaaggaagaaggcagcccagacctggaggccgggaccacatggaggccctgcgatcctttctggaccctgggagcggtggctacagctggcaggacgcacacgctgatgtggggcacctggtgggcacgctgggccgagtgacggagtgcctgtccttggacaagctggaggcggcaccctcagaggcagccctggtgtcgcgggccctgcaactgctcgcggaacatcgattctgggccggcgtcgtcttcttgggacctgaggactcttcagaccccacagagcacccaaccccagacctgggccccggccacgtgcgcatcaaaatccgcatggacattgacgtggtcacgaggaccaataagatcagggacaggttttgggaccctggcccagccgcggaccccctgaccgacctgcgctacgtgtggggcggcttcgtgtacctgcaagacctggtggagcgtgcagccgtccgcgtgctcagcggcgccaacccccgggccggcctctacctgcagcagatgccctatccgtgctatgtggacgacgtgttcctgcgtgtgctgagccggtcgctgccgctcttcctgacgctggcctggatctactccgtgacactgacagtgaaggccgtggtgcgggagaaggagacgcggctgcgggacaccatgcgcgccatggggctcagccgcgcggtgctctggctaggctggttcctcagctgcctcgggcccttcctgctcagcgccgcactgctggttctggtgctcaagctgggagacatcctcccctacagccacccgggcgtggtcttcctgttcttggcagccttcgcggtggccacggtgacccagagcttcctgctcagcgccttcttctcccgcgccaacctggctgcggcctgcggcggcctggcctacttctccctctacctgccctacgtgctgtgtgtggcttggcgggaccggctgcccgcgggtggccgcgtggccgcgagcctgctgtcgcccgtggccttcggcttcggctgcgagagcctggctctgctggaggagcagggcgagggcgcgcagtggcacaacgtgggcacccggcctacggcagacgtcttcagcctggcccaggtctctggccttctgctgctggacgcggcgctctacggcctcgccacctggtacctggaagctgtgtgcccaggccagtacgggatccctgaaccatggaattttccttttcggaggagctactggtgcggacctcggccccccaagagtccagccccttgccccaccccgctggacccaaaggtgctggtagaagaggcaccgcccggcctgagtcctggcgtctccgttcgcagcctggagaagcgctttcctggaagcccgcagccagccctgcgggggctcagcctggacttctaccagggccacatcaccgccttcctgggccacaacggggccggcaagaccaccaccctgtccatcttgagtggcctcttcccacccagtggtggctctgccttcatcctgggccacgacgtccgctccagcatggccgccatccggccccacctgggcgtctgtcctcagtacaacgtgctgtttgacatgctgaccgtggacgagcacgtctggttctatgggcggctgaagggtctgagtgccgctgtagtgggccccgagcaggaccgtctgctgcaggatgtggggctggtctccaagcagagtgtgcagactcgccacctctctggtgggatgcaacggaagctgtccgtggccattgcctttgtgggcggctcccaagttgttatcctggacgagcctacggctggcgtggatcctgcttcccgccgcggtatttgggagctgctgctcaaataccgagaaggtcgcacgctgatcctctccacccaccacctggatgaggcagagctgctgggagaccgtgtggctgtggtggcaggtggccgcttgtgctgctgtggctccccactcttcctgcgccgtcacctgggctccggctactacctgacgctggtgaaggcccgcctgcccctgaccaccaatgagaaggctgacactgacatggagggcagtgtggacaccaggcaggaaaagaagaatggcagccagggcagcagagtcggcactcctcagctgctggccctggtacagcactgggtgcccggggcacggctggtggaggagctgccacacgagctggtgctggtgctgccctacacgggtgcccatgacggcagcttcgccacactcttccgagagctagacacgcggctggcggagctgaggctcactggctacgggatctccgacaccagcctcgaggagatcttcctgaaggtggtggaggagtgtgctgcggacacagatatggaggatggcagctgcgggcagcacctatgcacaggcattgctggcctagacgtaaccctgcggctcaagatgccgccacaggagacagcgctggagaacggggaaccagctgggtcagccccagagactgaccagggctctgggccagacgccgtgggccgggtacagggctgggcactgacccgccagcagctccaggccctgcttctcaagcgctttctgcttgcccgccgcagccgccgcggcctgttcgcccagatcgtgctgcctgccctctttgtgggcctggccctcgtgttcagcctcatcgtgcctcctttcgggcactacccggctctgcggctcagtcccaccatgtacggtgctcaggtgtccttcttcagtgaggacgccccaggggaccctggacgtgcccggctgctcgaggcgctgctgcaggaggcaggactggaggagcccccagtgcagcatagctcccacaggttctcggcaccagaagttcctgctgaagtggccaaggtcttggccagtggcaactggaccccagagtctccatccccagcctgccagtgtagccagcccggtgcccggcgcctgctgcccgactgcccggctgcagctggtggtccccctccgccccaggcagtgaccggctctggggaagtggttcagaacctgacaggccggaacctgtctgacttcctggtcaagacctacccgcgcctggtgcgccagggcctgaagactaagaagtgggtgaatgaggtcaggtacggaggcttctcgctggggggccgagacccaggcctgccctcgggccaagagttgggccgctcagtggaggagttgtgggcgctgctgagtcccctgcctggcggggccctcgaccgtgtcctgaaaaacctcacagcctgggctcacagcctggacgctcaggacagtctcaagatctggttcaacaacaaaggctggcactccatggtggcctttgtcaaccgagccagcaacgcaatcctccgtgctcacctgcccccaggccgggcccgccacgcccacagcatcaccacactcaaccaccccttgaacctcaccaaggagcagctgtttgaggctgcattgatggcctcctcggtggacgtcctcgtctccatctgtgtggtctttgccatgtcctttgtcccggccagcttcactcttgtcctcattgaggagcgagtcacccgagccaagcacctgcagctcatggggggcctgtcccccaccctctactggcttggcaactttctctgggacatgtgtaactacttggtgccagcatgcatcgtggtgctcatctttctggccttccagcagagggcatatgtggcccctgccaacctgcctgctctcctgctgttgctactactgtatggctggtcgatcacaccgctcatgtacccagcctccttcttcttctccgtgcccagcacagcctatgtggtgctcacctgcataaacctctttattggcatcaatggaagcatggccacctttgtgcttgagctcttctctgatcagaagctgcaggaggtgagccggatcttgaaacaggtcttccttatcttcccccacttctgcttgggccgggggcttattgacatggtgcggaaccaggccatggctgatgcctttgagcgcttgggagacaggcagttccagtcacccctgcgctgggaggtggtcggcaagaacctcttggccatggtgatacaggggcccctcttccttctcttcacactactgctgcagcaccgaagccaactcctgccacagcccagggtgaggtctctgccactcctgggagaggaggacgaggatgtagcccgtgaacgggagcgggtggtccaaggagccacccagggggatgtgttggtgctgaggaacttgaccaaggtataccgtgggcagaggatgccagctgttgaccgcttgtgcctggggattccccctggtgagtgttttgggctgctgggtgtgaatggagcagggaagacgtccacgtttcgcatggtgacgggggacacattggccagcaggggcgaggctgtgctggcaggccacagcgtggcccgggaacccagtgctgcgcacctcagcatgggatactgccctcaatccgatgccatctttgagctgctgacgggccgcgagcacctggagctgcttgcgcgcctgcgcggtgtcccggaggcccaggttgcccagaccgctggctcgggcctggcgcgtctgggactctcatggtacgcagaccggcctgcaggcacctacagcggagggaacaaacgcaagctggcgacggccctggcgctggttggggacccagccgtggtgtttctggacgagccgaccacaggcatggaccccagcgcgcggcgcttcctttggaacagccttttggccgtggtgcgggagggccgttcagtgatgctcacctcccatagcatggaggagtgtgaagcgctctgctcgcgcctagccatcatggtgaatgggcggttccgctgcctgggcagcccgcaacatctcaagggcagattcgcggcgggtcacacactgaccctgcgggtgcccgccgcaaggtcccagccggcagcggccttcgtggcggccgagttccctgggtcggagctgcgcgaggcacatggaggccgcctgcgcttccagctgccgccgggagggcgctgcgccctggcgcgcgtctttggagagctggcggtgcacggcgcagagcacggcgtggaggacttttccgtgagccagacgatgctggaggaggtattcttgtacttctccaaggaccaggggaaggacgaggacaccgaagagcagaaggaggcaggagtgggagtggaccccgcgccaggcctgcagcaccccaaacgcgtcagccagttcctcgatgaccctagcactgccgagactgtgctctgagcctccctcccctgcggggccgcggggaggccctgggaatggcaagggcaaggtagagtgcctaggagccctggactcaggctggcagaggggctggtgccctggagaaaataaagagaaggctggagagaagccgtggtggtgaaa

SEQ ID NO: 866 - DNA, 2988 bp, Homo sapiens
cagaggcccagagtggctcgcctggagtctctgtggcgcggtttcctgtacctgccttgggatccggagggaggaagctgggacacccgggagtcaggaaatggactcggtggcttttgaggatgtagatgtgaacttcacccaggaggagtgggctttgctagatccttcccagaagaatctctacagagatgtgatgtgggaaaccatgaggaatctggcctctatagggaaaaaatggaaggaccagaacattaaagatcactacaaacaccgagggagaaatctaagaagtcatatgttagaaagactctatcaaactaaggatggtagtcagcgtggaggaatttttagccagtttgcaaatcagaatctgagcaagaaaatccctggagtgaaactctgtgaaagcattgtatatggagaagtcagcatgggtcagtcatcccttaatagacacatcaaagatcacagtggacatgaaccaaaggaatatcaggaatatggagagaagccagatacacgtaaccagtgttggaaacccttcagttctcaccactcctttcgaacacatgagataattcacactggagagaaactctatgattgtaaggaatgtggaaaaaccttcttttctctcaaaagaattagaagacacatcatcacacacagtggatatacaccatataaatgtaaggtgtgtgggaaagcttttgattatcccagtagatttcgaacacatgaaagaagtcacactggagagaaaccctatgaatgtcaggaatgtggaaaagccttcacttgtatcacaagtgttcgaagacacatgataaagcacactggagatggaccttataaatgtaaggtatgtgggaaaccctttcattctctgagttcatttcaagtgcatgaaagaattcacactggagaaaaaccctttaaatgtaagcaatgtggtaaagccttcagttgttccccaaccttacgaatacatgaaagaacccatactggagagaaaccttatgaatgcaagcagtgtgggaaggccttcagttatctcccctcccttcgactacatgaaagaattcacactggtgagaaacccttcgtatgtaaacaatgtggtaaagcctttagatctgccagtacctttcaaatacatgaaaggactcacactggagaaaaaccttatgaatgtaaggaatgtggggaagcattcagttgtatcccaagtatgcgaagacacatgataaaacatactggagaaggaccttataaatgtaaggtatgtgggaaaccctttcattctctgagtccatttcgaatacatgaaagaactcacactggagagaaaccttatgtatgtaaacattgtggtaaagctttcgtttcttcaacatcaattcgaatacatgaaagaactcatactggagagaaaccctatgagtgtaagcaatgtgggaaagccttcagttatctcaactcctttcgaacacatgaaatgattcacactggtgagaaaccctttgaatgtaagcgatgtggtaaagcctttagatcttctagttcctttcgactacatgaaaggactcacactggacagaaaccctatcattgcaaggaatgtgggaaagcctattcttgccgtgccagctttcagagacacatgttaacacatgctgaagatggaccaccttataaatgcatgtgggaaagcctttaatgctctgggttcatgtcagatacattaaaatactcactgaagagaagccctatgaatgtaagtaacgtgggaaagcatgaaattctgtcagtgccttttttaatacatgaaagaattctagagagaagccatatacatgtaagtaacatgggaaagctttcaatcattttagttcctttcaaatacatgaaagaactcatcatggagaaaaccaaacaaatgctttttggaaaggaacccatatttgagagaaaccctgggtaaagggtgtaggaaaggttttgtcatcacacaaccctgtcacacatgaatgtgtagtggagagaaccttggtaaatgtaaagagtgtgggagagcctttagtcattttagttccacttgaagccatgaaagaacacacaaaagagaaagctcttgaatataagcaatgtccacacgtttttagccagcccacatgctttcaacaacatgtaagaatgtaccctggatcaaaacactataaatgtgaaaactacaaggaaggttttccattatacttttaaagtcatttgagggctctggctctgtggctttgtgggttaaagtacttgtctggcaaacaggagatgctggatttcaatcccagcagggcctcactagttgaggtattgaatttgaacagatgttttggctctggctgggtgtggtggctcacacctgtaatcccagcactttgggaggctgaggcaggaggatcacttgaggtcaggagtttgagaccagtgtgcaaaacatagcaagacctcatctcagaaaaaaaaaaaaagtcatttgaaaacttctaatacagcaaaatcctataaatgtaagtacttcaaaaagcctcatgcatagcgggtcatgtagtctctagaaaatacataacctgatggaaatgtagaagctatatgtatattttgttaattagtggctcatatttaaaatagttctctgactatggatttcaaatgcttaatctcacaaagaaatgttaaattgatataatcctgtaagtaatctgaaagcaatagtgcatgaatttcataggtagtgttgttttaggtcagtaaataaaatatttgtctttccattttgaaatgtgtttaatccaacaatgaatttaaatgtgtttctcatattcaggtatgttaaattgtatatggttgcttaattgttctgtgattgaggaccactgaaaaataagtcttaataaatgttggtatgaacctaaaaaaaaaaaaaaaaaa

SEQ ID NO: 867 - DNA, 4538 bp, Homo sapiens
tggtgtggggagacgctggtcctccccgtcctcccatagcgcttattgcctcaccctcaccccctaggggccggatccaaaggcgctgcactccccaagccttggggcatcagccaggaaggtttcctacctcctaattcaggggcaggactcctcttttccccccacggggaaaagaggcagaaacttaggggtttccctcctttcttagggtcagacgctcttagggtccacttcttcaggggcggaagcctctcctacccttcccataggggcacaggcctttaccccactgtacttcggagccaacgcctttccctcagcactgccaccccagagtcaggacccagaggactgtgccttcgcccccaacgcaggcgcggccttttggagaggagggaggagtggagaggacaggggcccttgctctcccctccccaacttgttcctcttgccccccagtccctggcaatccagagatcccgatatctaggactgtccatccatccactccctgaccttttcccggctcctggctgcagccatggagttgcagaagggaaaaggggcggcagcagcagcagctgcttcgggagcagcgggaggtggaggaggaggagcgggagcaggagccccaggaggggggaggctgctactttcaaccagtttggatgccaaggatgagttagaggagagattggaaaggtgtatgagcattgtgacatcgatgactgctggtgtctcggagagagaagccaatgatgccctcaatgcgtatgtgtgcaaaggcctcccccagcatgaagaaatctgcctgggcctgtttactctcatcctcactgaacctgcccaagcccagaagtgttaccgggacttagctctggtgagtcgtgatggcatgaatattgtcctgaataaaatcaaccagatacttatggagaagtacctgaagctgcaggatacctgccgtactcagttggtgtggttggtacgggaactggtgaagagtggggttctgggagccgatggtgtttgtatgacgtttatgaagcagattgcaggtggagatgttacagccaaaaatatctggttggcagaaagtgttctggatatcctgacagagcaaagggagtgggtcctgaagagcagcatcctcattgccatggctgtttacacgtacctccgcctcatcgtggaccaccatgggactgcccagctccaggccctgcgacagaaggaagtagacttctgcatctcactgcttcgggaacggttcatggaatgtctgatgattggtcgggatctcgtaagactacttcagaatgttgctaggataccagaatttgaactgctttggaaagatattatccataatcctcaggccttgagtcctcagttcacaggtatcctacagcttcttcagtcaagaacatcccgaaaattcctagcatgtcgtctaaccccggacatggagactaaactcctcttcatgacatcccgggtgcgatttggtcaacaaaagcgataccaagattggttccagcgccagtacctgtcaactccagatagtcagtctctgcgctgtgacctcattcgctacatctgtggggtagtccacccttctaatgaagtactgagttcagatatcttgccccggtgggccatcattggttggctcctgacaacgtgcacgtcaaatgtcgctgcctccaatgccaagctggctttgttttatgactggctgttctttagtccagacaaggatagcattatgaacatagaaccagccatcctggtcatgcaccactccatgaagccccacccagccatcactgccacactcctggacttcatgtgccgcatcattcccaacttctatccaccattggagggccacgtgcggcagggtgtcttttcctccctcaaccacattgtggagaaacgggtcttggcacacctagctcccctgtttgacaaccctaagttggataaggagctgcgggcaatgctgagagagaagtttcctgagttctgcagctcaccctccccacctgtggaagtcaaaattgaggagccagtttccatggagatggacaaccatatgtcggataaggatgagagttgctatgacaatgcagaggcagccttcagtgacgatgaagaggatctcaacagcaaaggaaagaagagggagtttcgcttccaccctatcaaggagacagttgtggaggagccagttgatatcaccccttaccttgaccagttggatgagtccctgagggacaaagtactccagctacagaaggggagtgatacggaggcccagtgtgaggtcatgcaggaaattgtggaccaggtcctggaggaagactttgactcggagcagctgtctgtccttgcttcctgcctacaggagctcttcaaggcccactttcgaggggaggtcctgcctgaggagattactgaggagtccctggaggagtctgtaggaaagcctctgtacctaatatttaggaacctatgtcagatgcaggaagacaacagcagcttctctctacttctagaccttctctccgagctatatcagaagcagcccaagattggctaccacctgctctactacctgagggccagcaaagccgccgcagggaagatgaacctgtacgagtcatttgcccaggctacccagctgggcgatctgcacacctgcctgatgatggacatgaaggcctgccaggaggacgatgtgcggctcctgtgccacctcacgccctccatctacacagagtttccagatgaaaccttgaggagcggagagctgctgaacatgatcgtggctgttattgactctgcacagctccaggagctggtctgccacgtgatgatgggtaacctggttatgtttcgaaaagactcagttctcaacatactcattcagagcctagactgggagacctttgagcagtattgtgcctggcagctctttctggcccacaatattcccctggagaccataatccccatcctgcagcacctcaaatacaaggagcacccagaggccctgtcctgcctactgcttcaactccgaagagaaaagcccagcgaggagatggtgaagatggtgctgagccggccctgccatcctgacgaccagttcaccaccagcatcctgcggcactggtgcatgaaacatgacgagctgctggccgagcacatcaagtccctgctcatcaagaacaacagcctgcctcgcaagagacagagcctgaggagctctagcagcaagctggcccagctgactctggagcagatcctggagcacttggacaatctgcggctcaacctgaccaacaccaagcagaacttttttagccagacgccaattctccaggcgctgcagcatgtccaagcgagctgtgacgaagcccacaagatgaaattcagtgatctcttctccctggcggaggaatatgaggactcttccaccaagccacccaagagccggcgaaaagcagctctgtccagccctcgaagtcgaaagaatgccacacagccccccaatgccgaagaagagtcgggctccagcagtgcttcagaagaggaagacacgaaaccgaagcctaccaagcggaaacgaaaagggtcctctgcagtgggctctgacagtgactgaggccctgcattccccatcccacccccggctggactgccctctccttcttggtgattcaaaggttaatagaggctgaggagattgcaggggaaacacccttgctgcatccccaagctcccccggtggaaggaggagctttctcctctggctgagtttgagaagctgccatgcagcccctagccccttccctcctcctggggcctccagcccctcacactgctgttcccagtgatatttgggatctgactgaagccagaggctctgtaaaatcagaccatagtggaagtcctcagccccctggccccttccgcaatctcctcccccagtctcccaaagagccatttcaacagagaagggaaatgacaaaggggcagctggccagataagctaggatgagagcagagactcagtgtgtgggtgtcccttcctgcttccccttcaggtcttggtttgttctgaagggacgttttatagtcactatccacatgccagtgtgaaatgggcatctatgacgtggtcagggtgtccattcctaatcatggggcagatgccacaagcattcagaaaggagtctgaaagggtggccacagccccacgtggtgtgccctggaggcttaggttggtctgaggttggcacctcaatctacaccagagcccagggagtcccagaggcaagtttcacagaattgtcaaatgatcccatttccttgagtctgtttttttttttgtttttttttgttttttttttggcagagataatcgtgtcttaaaagttgtttttaaatgacaataaaacaagccagaatgtcaaaaaaaaaaaaaaaaaaaaaaaaaaaaaaaaaaaaaaaaaaaaaaaaaaaaaaaa

SEQ ID NO: 868 - DNA, 1075 bp, Homo sapiens
cagagctgctgtcatggcggccgctctgtggggcttctttcccgtcctgctgctgctgctgctatcgggggatgtccagagctcggaggtgcccggggctgctgctgagggatcgggagggagtggggtcggcataggagatcgcttcaagattgaggggcgtgcagttgttccaggggtgaagcctcaggactggatctcggcggcccgagtgctggtagacggagaagagcacgtcggtttccttaagacagatgggagttttgtggttcatgatataccttctggatcttatgtagtggaagttgtatctccagcttacagatttgatcccgttcgagtggatatcacttcgaaaggaaaaatgagagcaagatatgtgaattacatcaaaacatcagaggttgtcagactgccctatcctctccaaatgaaatcttcaggtccaccttcttactttattaaaagggaatcgtggggctggacagactttctaatgaacccaatggttatgatgatggttcttcctttattgatatttgtgcttctgcctaaagtggtcaacacaagtgatcctgacatgagacgggaaatggagcagtcaatgaatatgctgaattccaaccatgagttgcctgatgtttctgagttcatgacaagactcttctcttcaaaatcatctggcaaatctagcagcggcagcagtaaaacaggcaaaagtggggctggcaaaaggaggtagtcaggccgtccagagctggcatttgcacaaacacggcaacactgggtggcatccaagtcttggaaaaccgtgtgaagcaactactataaacttgagtcatcccgacgttgatctcttacaactgtgtatgttaactttttagcacatgttttgtacttggtacacgagaaaacccagctttcatcttttgtctgtatgaggtcaatattgatgtcactgaattaattacagtgtcctatagaaaatgccattaataaattatatgaactactatacattatgtatattaattaaaacatcttaatccagaaaaaaaaaaaaaaaaaaaaaaaa

SEQ ID NO: 869 - DNA, 2787 bp, Homo sapiens
ggtgtccggagccgcggacctagagatcccagaagccacagcgcagcggcccggcccgccactatttccaggctctgcggggcaggggccgccgcccaccgcccgccgccatggggctgaaggccgcccagaagacgctgttcccgctgcgctccatcgacgacgtggtgcgcctgtttgctgccgagctgggccgagaggagccggacctggtgctcctttccttggtgctgggcttcgtggagcattttctggctgtcaaccgcgtcatccctaccaacgttcccgagctcaccttccagcccagccccgcccccgacccgcctggcggcctcacctactttcccgtggccgacctgtctatcatcgccgccctctatgcccgcttcaccgcccagatccgaggcgccgtcgacctgtccctctatcctcgagaagggggtgtctccagccgtgagctggtgaagaaggtctccgatgtcatatggaacagcctcagccgctcctacttcaaggatcgggcccacatccagtccctcttcagcttcatcacaggctggagcccagtaggcaccaaattggacagctccggtgtggcctttgctgtggttggggcctgccaggccctgggtctccgggatgtccacctcgccctgtctgaggatcatgcctgggtagtgtttgggcccaatggggagcagacagctgaggtcacctggcacggcaagggcaacgaggaccgcaggggccagacagtcaatgccggtgtggctgagcggagctggctgtacctgaaaggatcatacatgcgctgtgaccgcaagatggaggtggcgttcatggtgtgtgccatcaacccttccattgacctgcacaccgactcgctggagcttctgcagctgcagcagaagctgctctggctgctctatgacctgggacatctggaaaggtaccccatggccttagggaacctggcagatctagaggagctggagcccacccctggccggccagacccactcaccctctaccacaagggcattgcctcagccaagacctactatcgggatgaacacatctacccctacatgtacctggctggctaccactgtcgcaaccgcaatgtgcgggaagccctgcaggcctgggcggacacggccactgtcatccaggactacaactactgccgggaagacgaggagatctacaaggagttctttgaagtagccaatgatgtcatccccaacctgctgaaggaggcagccagcttgctggaggcgggcgaggagcggccgggggagcaaagccagggcacccagagccaaggttccgccctccaggaccctgagtgcttcgcccacctgctgcgattctacgacggcatctgcaaatgggaggagggcagtcccacgcctgtgctgcacgtgggctgggccacctttcttgtgcagtccctaggccgttttgagggacaggtgcggcagaaggtgcgcatagtgagccgagaggccgaggcggccgaggccgaggagccgtggggcgaggaagcccgggaaggccggcggcggggcccacggcgggagtccaagccagaggagcccccgccgcccaagaagccagcactggacaagggcctgggcaccggccagggtgcagtgtcaggacccccccggaagcctcctgggactgtcgctggcacagcccgaggccctgaaggtggcagcacggctcaggtgccagcacccgcagcatcaccaccgccggagggtccagtgctcactttccagagtgagaagatgaagggcatgaaggagctgctggtggccaccaagatcaactcgagcgccatcaagctgcaactcacggcacagtcgcaagtgcagatgaagaagcagaaagtgtccacccctagtgactacactctgtctttcctcaagcggcagcgcaaaggcctctgaactactggggacttcggaccgcttgtggggacccaggctccgccttagtcccccaactctgagcccatgttctgcccccagcccaaaggggacaggcctcacctctacccaaaccctaggttcccggtcccgagtacagtctgtatcaaacccacgattttctccagctcagaacccagggctctgccccagtcgttagaatataggtctcttctcccagaatcccagccggccaatggaaacctcacgctgggtcctaattaccagtctttaaaggcccagcccctagaaacccaagctcctcctcggaaccgctcacctagagccagaccaacgttactcagggctcctcccagcttgtaggagctgaggtttcacccttaacccaagggagcacaggtcccacctccagcccggggagcctaggaccactcagcccctaggagtatatttccgcacttcagaattccatatcttgcgaatccaagctccctgccccaaataacttcagtcctgcttccagaatttggaaatcctagtttcctctccttcgtatcccgagtctgggacacaaaactccgcccccagcctatgagcatcctgagccccgccctcttcctgacgaaactggccccggatcagagcaggacctcccttccgaccctctgggaacctcccagaggtccagcccatctcggagcatcccggaggaaatctgcagaggggttaggagtgggtgacaagagcctgatctcttcctgttttgtacatagatttatttttcagttccaagaaagatgaatacattttgttaaaaaaaaaaaaaaaa

SEQ ID NO: 870 - DNA, 2772 bp, Homo sapiens
ggtgtccggagccgcggacctagagatcccagaagccacagcgcagcggcccggcccgccactatttccaggctctgcggggcaggggccgccgcccaccgcccgccgccatggggctgaaggccgcccagaagacgctgttcccgctgcgctccatcgacgacgtggtgcgcctgtttgctgccgagctgggccgagaggagccggacctggtgctcctttccttggtgctgggcttcgtggagcattttctggctgtcaaccgcgtcatccctaccaacgttcccgagctcaccttccagcccagccccgcccccgacccgcctggcggcctcacctactttcccgtggccgacctgtctatcatcgccgccctctatgcccgcttcaccgcccagatccgaggcgccgtcgacctgtccctctatcctcgagaagggggtgtctccagccgtgagctggtgaagaaggtctccgatgtcatatggaacagcctcagccgctcctacttcaaggatcgggcccacatccagtccctcttcagcttcatcacaggcaccaaattggacagctccggtgtggcctttgctgtggttggggcctgccaggccctgggtctccgggatgtccacctcgccctgtctgaggatcatgcctgggtagtgtttgggcccaatggggagcagacagctgaggtcacctggcacggcaagggcaacgaggaccgcaggggccagacagtcaatgccggtgtggctgagcggagctggctgtacctgaaaggatcatacatgcgctgtgaccgcaagatggaggtggcgttcatggtgtgtgccatcaacccttccattgacctgcacaccgactcgctggagcttctgcagctgcagcagaagctgctctggctgctctatgacctgggacatctggaaaggtaccccatggccttagggaacctggcagatctagaggagctggagcccacccctggccggccagacccactcaccctctaccacaagggcattgcctcagccaagacctactatcgggatgaacacatctacccctacatgtacctggctggctaccactgtcgcaaccgcaatgtgcgggaagccctgcaggcctgggcggacacggccactgtcatccaggactacaactactgccgggaagacgaggagatctacaaggagttctttgaagtagccaatgatgtcatccccaacctgctgaaggaggcagccagcttgctggaggcgggcgaggagcggccgggggagcaaagccagggcacccagagccaaggttccgccctccaggaccctgagtgcttcgcccacctgctgcgattctacgacggcatctgcaaatgggaggagggcagtcccacgcctgtgctgcacgtgggctgggccacctttcttgtgcagtccctaggccgttttgagggacaggtgcggcagaaggtgcgcatagtgagccgagaggccgaggcggccgaggccgaggagccgtggggcgaggaagcccgggaaggccggcggcggggcccacggcgggagtccaagccagaggagcccccgccgcccaagaagccagcactggacaagggcctgggcaccggccagggtgcagtgtcaggacccccccggaagcctcctgggactgtcgctggcacagcccgaggccctgaaggtggcagcacggctcaggtgccagcacccgcagcatcaccaccgccggagggtccagtgctcactttccagagtgagaagatgaagggcatgaaggagctgctggtggccaccaagatcaactcgagcgccatcaagctgcaactcacggcacagtcgcaagtgcagatgaagaagcagaaagtgtccacccctagtgactacactctgtctttcctcaagcggcagcgcaaaggcctctgaactactggggacttcggaccgcttgtggggacccaggctccgccttagtcccccaactctgagcccatgttctgcccccagcccaaaggggacaggcctcacctctacccaaaccctaggttcccggtcccgagtacagtctgtatcaaacccacgattttctccagctcagaacccagggctctgccccagtcgttagaatataggtctcttctcccagaatcccagccggccaatggaaacctcacgctgggtcctaattaccagtctttaaaggcccagcccctagaaacccaagctcctcctcggaaccgctcacctagagccagaccaacgttactcagggctcctcccagcttgtaggagctgaggtttcacccttaacccaagggagcacaggtcccacctccagcccggggagcctaggaccactcagcccctaggagtatatttccgcacttcagaattccatatcttgcgaatccaagctccctgccccaaataacttcagtcctgcttccagaatttggaaatcctagtttcctctccttcgtatcccgagtctgggacacaaaactccgcccccagcctatgagcatcctgagccccgccctcttcctgacgaaactggccccggatcagagcaggacctcccttccgaccctctgggaacctcccagaggtccagcccatctcggagcatcccggaggaaatctgcagaggggttaggagtgggtgacaagagcctgatctcttcctgttttgtacatagatttatttttcagttccaagaaagatgaatacattttgttaaaaaaaaaaaaaaaa

SEQ ID NO: 871 - DNA, 2750 bp, Homo sapiens
gctccgggcggcgtgcgccgcggtgcctagtgtgggatgtaagcgcggaggccgccgcccaccgcccgccgccatggggctgaaggccgcccagaagacgctgttcccgctgcgctccatcgacgacgtggtgcgcctgtttgctgccgagctgggccgagaggagccggacctggtgctcctttccttggtgctgggcttcgtggagcattttctggctgtcaaccgcgtcatccctaccaacgttcccgagctcaccttccagcccagccccgcccccgacccgcctggcggcctcacctactttcccgtggccgacctgtctatcatcgccgccctctatgcccgcttcaccgcccagatccgaggcgccgtcgacctgtccctctatcctcgagaagggggtgtctccagccgtgagctggtgaagaaggtctccgatgtcatatggaacagcctcagccgctcctacttcaaggatcgggcccacatccagtccctcttcagcttcatcacaggctggagcccagtaggcaccaaattggacagctccggtgtggcctttgctgtggttggggcctgccaggccctgggtctccgggatgtccacctcgccctgtctgaggatcatgcctgggtagtgtttgggcccaatggggagcagacagctgaggtcacctggcacggcaagggcaacgaggaccgcaggggccagacagtcaatgccggtgtggctgagcggagctggctgtacctgaaaggatcatacatgcgctgtgaccgcaagatggaggtggcgttcatggtgtgtgccatcaacccttccattgacctgcacaccgactcgctggagcttctgcagctgcagcagaagctgctctggctgctctatgacctgggacatctggaaaggtaccccatggccttagggaacctggcagatctagaggagctggagcccacccctggccggccagacccactcaccctctaccacaagggcattgcctcagccaagacctactatcgggatgaacacatctacccctacatgtacctggctggctaccactgtcgcaaccgcaatgtgcgggaagccctgcaggcctgggcggacacggccactgtcatccaggactacaactactgccgggaagacgaggagatctacaaggagttctttgaagtagccaatgatgtcatccccaacctgctgaaggaggcagccagcttgctggaggcgggcgaggagcggccgggggagcaaagccagggcacccagagccaaggttccgccctccaggaccctgagtgcttcgcccacctgctgcgattctacgacggcatctgcaaatgggaggagggcagtcccacgcctgtgctgcacgtgggctgggccacctttcttgtgcagtccctaggccgttttgagggacaggtgcggcagaaggtgcgcatagtgagccgagaggccgaggcggccgaggccgaggagccgtggggcgaggaagcccgggaaggccggcggcggggcccacggcgggagtccaagccagaggagcccccgccgcccaagaagccagcactggacaagggcctgggcaccggccagggtgcagtgtcaggacccccccggaagcctcctgggactgtcgctggcacagcccgaggccctgaaggtggcagcacggctcaggtgccagcacccgcagcatcaccaccgccggagggtccagtgctcactttccagagtgagaagatgaagggcatgaaggagctgctggtggccaccaagatcaactcgagcgccatcaagctgcaactcacggcacagtcgcaagtgcagatgaagaagcagaaagtgtccacccctagtgactacactctgtctttcctcaagcggcagcgcaaaggcctctgaactactggggacttcggaccgcttgtggggacccaggctccgccttagtcccccaactctgagcccatgttctgcccccagcccaaaggggacaggcctcacctctacccaaaccctaggttcccggtcccgagtacagtctgtatcaaacccacgattttctccagctcagaacccagggctctgccccagtcgttagaatataggtctcttctcccagaatcccagccggccaatggaaacctcacgctgggtcctaattaccagtctttaaaggcccagcccctagaaacccaagctcctcctcggaaccgctcacctagagccagaccaacgttactcagggctcctcccagcttgtaggagctgaggtttcacccttaacccaagggagcacaggtcccacctccagcccggggagcctaggaccactcagcccctaggagtatatttccgcacttcagaattccatatcttgcgaatccaagctccctgccccaaataacttcagtcctgcttccagaatttggaaatcctagtttcctctccttcgtatcccgagtctgggacacaaaactccgcccccagcctatgagcatcctgagccccgccctcttcctgacgaaactggccccggatcagagcaggacctcccttccgaccctctgggaacctcccagaggtccagcccatctcggagcatcccggaggaaatctgcagaggggttaggagtgggtgacaagagcctgatctcttcctgttttgtacatagatttatttttcagttccaagaaagatgaatacattttgttaaaaaaaaaaaaaaaa

SEQ ID NO: 872 - DNA, 2738 bp, Homo sapiens
gctccgggcggcgtgcgccgcggtgcctagtgtgggatgccgccgcccaccgcccgccgccatggggctgaaggccgcccagaagacgctgttcccgctgcgctccatcgacgacgtggtgcgcctgtttgctgccgagctgggccgagaggagccggacctggtgctcctttccttggtgctgggcttcgtggagcattttctggctgtcaaccgcgtcatccctaccaacgttcccgagctcaccttccagcccagccccgcccccgacccgcctggcggcctcacctactttcccgtggccgacctgtctatcatcgccgccctctatgcccgcttcaccgcccagatccgaggcgccgtcgacctgtccctctatcctcgagaagggggtgtctccagccgtgagctggtgaagaaggtctccgatgtcatatggaacagcctcagccgctcctacttcaaggatcgggcccacatccagtccctcttcagcttcatcacaggctggagcccagtaggcaccaaattggacagctccggtgtggcctttgctgtggttggggcctgccaggccctgggtctccgggatgtccacctcgccctgtctgaggatcatgcctgggtagtgtttgggcccaatggggagcagacagctgaggtcacctggcacggcaagggcaacgaggaccgcaggggccagacagtcaatgccggtgtggctgagcggagctggctgtacctgaaaggatcatacatgcgctgtgaccgcaagatggaggtggcgttcatggtgtgtgccatcaacccttccattgacctgcacaccgactcgctggagcttctgcagctgcagcagaagctgctctggctgctctatgacctgggacatctggaaaggtaccccatggccttagggaacctggcagatctagaggagctggagcccacccctggccggccagacccactcaccctctaccacaagggcattgcctcagccaagacctactatcgggatgaacacatctacccctacatgtacctggctggctaccactgtcgcaaccgcaatgtgcgggaagccctgcaggcctgggcggacacggccactgtcatccaggactacaactactgccgggaagacgaggagatctacaaggagttctttgaagtagccaatgatgtcatccccaacctgctgaaggaggcagccagcttgctggaggcgggcgaggagcggccgggggagcaaagccagggcacccagagccaaggttccgccctccaggaccctgagtgcttcgcccacctgctgcgattctacgacggcatctgcaaatgggaggagggcagtcccacgcctgtgctgcacgtgggctgggccacctttcttgtgcagtccctaggccgttttgagggacaggtgcggcagaaggtgcgcatagtgagccgagaggccgaggcggccgaggccgaggagccgtggggcgaggaagcccgggaaggccggcggcggggcccacggcgggagtccaagccagaggagcccccgccgcccaagaagccagcactggacaagggcctgggcaccggccagggtgcagtgtcaggacccccccggaagcctcctgggactgtcgctggcacagcccgaggccctgaaggtggcagcacggctcaggtgccagcacccgcagcatcaccaccgccggagggtccagtgctcactttccagagtgagaagatgaagggcatgaaggagctgctggtggccaccaagatcaactcgagcgccatcaagctgcaactcacggcacagtcgcaagtgcagatgaagaagcagaaagtgtccacccctagtgactacactctgtctttcctcaagcggcagcgcaaaggcctctgaactactggggacttcggaccgcttgtggggacccaggctccgccttagtcccccaactctgagcccatgttctgcccccagcccaaaggggacaggcctcacctctacccaaaccctaggttcccggtcccgagtacagtctgtatcaaacccacgattttctccagctcagaacccagggctctgccccagtcgttagaatataggtctcttctcccagaatcccagccggccaatggaaacctcacgctgggtcctaattaccagtctttaaaggcccagcccctagaaacccaagctcctcctcggaaccgctcacctagagccagaccaacgttactcagggctcctcccagcttgtaggagctgaggtttcacccttaacccaagggagcacaggtcccacctccagcccggggagcctaggaccactcagcccctaggagtatatttccgcacttcagaattccatatcttgcgaatccaagctccctgccccaaataacttcagtcctgcttccagaatttggaaatcctagtttcctctccttcgtatcccgagtctgggacacaaaactccgcccccagcctatgagcatcctgagccccgccctcttcctgacgaaactggccccggatcagagcaggacctcccttccgaccctctgggaacctcccagaggtccagcccatctcggagcatcccggaggaaatctgcagaggggttaggagtgggtgacaagagcctgatctcttcctgttttgtacatagatttatttttcagttccaagaaagatgaatacattttgttaaaaaaaaaaaaaaaa

SEQ ID NO: 873 - DNA, 3174 bp, Homo sapiens
caatccctgagtatctcgggaaggaggtgtccggagccgcggacctagagatcccagaagccacagcgcagcggcccggcccgccactatttccaggctctgcggggcaggggtgggcccagactccacttcccggcgggtagtgcgaccctaggggcgggacttcatgtcccagcaggctccgggcggcgtgcgccgcggtgcctagtgtgggatgtaagcgcggaggtgggcgagggggaccgaggccaggactctccttggggtttgggggcttgacctgggtgcgctttctggacagactttacagccccgggggcacagtcgtagagagggggcggggcggccattggggctcctcattggggtgcttggggcgcaccccatcgggtaccgggcgtcccggaattgtgggggacaaaaaggctctgcagtctcggctgaggggtctcaccgacaaaagaaggggaagccgccgccgcccaccgcccgccgccatggggctgaaggccgcccagaagacgctgttcccgctgcgctccatcgacgacgtggtgcgcctgtttgctgccgagctgggccgagaggagccggacctggtgctcctttccttggtgctgggcttcgtggagcattttctggctgtcaaccgcgtcatccctaccaacgttcccgagctcaccttccagcccagccccgcccccgacccgcctggcggcctcacctactttcccgtggccgacctgtctatcatcgccgccctctatgcccgcttcaccgcccagatccgaggcgccgtcgacctgtccctctatcctcgagaagggggtgtctccagccgtgagctggtgaagaaggtctccgatgtcatatggaacagcctcagccgctcctacttcaaggatcgggcccacatccagtccctcttcagcttcatcacaggctggagcccagtaggcaccaaattggacagctccggtgtggcctttgctgtggttggggcctgccaggccctgggtctccgggatgtccacctcgccctgtctgaggatcatgcctgggtagtgtttgggcccaatggggagcagacagctgaggtcacctggcacggcaagggcaacgaggaccgcaggggccagacagtcaatgccggtgtggctgagcggagctggctgtacctgaaaggatcatacatgcgctgtgaccgcaagatggaggtggcgttcatggtgtgtgccatcaacccttccattgacctgcacaccgactcgctggagcttctgcagctgcagcagaagctgctctggctgctctatgacctgggacatctggaaaggtaccccatggccttagggaacctggcagatctagaggagctggagcccacccctggccggccagacccactcaccctctaccacaagggcattgcctcagccaagacctactatcgggatgaacacatctacccctacatgtacctggctggctaccactgtcgcaaccgcaatgtgcgggaagccctgcaggcctgggcggacacggccactgtcatccaggactacaactactgccgggaagacgaggagatctacaaggagttctttgaagtagccaatgatgtcatccccaacctgctgaaggaggcagccagcttgctggaggcgggcgaggagcggccgggggagcaaagccagggcacccagagccaaggttccgccctccaggaccctgagtgcttcgcccacctgctgcgattctacgacggcatctgcaaatgggaggagggcagtcccacgcctgtgctgcacgtgggctgggccacctttcttgtgcagtccctaggccgttttgagggacaggtgcggcagaaggtgcgcatagtgagccgagaggccgaggcggccgaggccgaggagccgtggggcgaggaagcccgggaaggccggcggcggggcccacggcgggagtccaagccagaggagcccccgccgcccaagaagccagcactggacaagggcctgggcaccggccagggtgcagtgtcaggacccccccggaagcctcctgggactgtcgctggcacagcccgaggccctgaaggtggcagcacggctcaggtgccagcacccgcagcatcaccaccgccggagggtccagtgctcactttccagagtgagaagatgaagggcatgaaggagctgctggtggccaccaagatcaactcgagcgccatcaagctgcaactcacggcacagtcgcaagtgcagatgaagaagcagaaagtgtccacccctagtgactacactctgtctttcctcaagcggcagcgcaaaggcctctgaactactggggacttcggaccgcttgtggggacccaggctccgccttagtcccccaactctgagcccatgttctgcccccagcccaaaggggacaggcctcacctctacccaaaccctaggttcccggtcccgagtacagtctgtatcaaacccacgattttctccagctcagaacccagggctctgccccagtcgttagaatataggtctcttctcccagaatcccagccggccaatggaaacctcacgctgggtcctaattaccagtctttaaaggcccagcccctagaaacccaagctcctcctcggaaccgctcacctagagccagaccaacgttactcagggctcctcccagcttgtaggagctgaggtttcacccttaacccaagggagcacaggtcccacctccagcccggggagcctaggaccactcagcccctaggagtatatttccgcacttcagaattccatatcttgcgaatccaagctccctgccccaaataacttcagtcctgcttccagaatttggaaatcctagtttcctctccttcgtatcccgagtctgggacacaaaactccgcccccagcctatgagcatcctgagccccgccctcttcctgacgaaactggccccggatcagagcaggacctcccttccgaccctctgggaacctcccagaggtccagcccatctcggagcatcccggaggaaatctgcagaggggttaggagtgggtgacaagagcctgatctcttcctgttttgtacatagatttatttttcagttccaagaaagatgaatacattttgttaaaaaaaaaaaaaaaa

SEQ ID NO: 874 - DNA, 3181 bp, Homo sapiens
tatatttatgtatatgcacatacacacaaaattaggcgggagtggtggcgcacgcctgtgatcacagctactcgggaggctgaggcacgagaatcgcttgagcccgtgaagtcgaggctgcagtgagcccagatcgagccactgcattccagcctgggcgaaagagaaagaccgtgtctcaaaacaaacaaacaaaagctactcttagcacgtgttagagtatctcgcgggcggaagtgggaaacgagtgctgcacacagagtaggcatctttatatgttaacagacactgatacccagctaaagcggctgaacacatttactctctggcagtgtttaaaagtatctgtttttctcatattgttttattttaattttttctggatcaagcaacctgatctttttcctcataacttgccgaccgacccgtgacagcaaaaccggcagaagctcggcgacctcccaccccgagtctgcaggtagccgccgcccaccgcccgccgccatggggctgaaggccgcccagaagacgctgttcccgctgcgctccatcgacgacgtggtgcgcctgtttgctgccgagctgggccgagaggagccggacctggtgctcctttccttggtgctgggcttcgtggagcattttctggctgtcaaccgcgtcatccctaccaacgttcccgagctcaccttccagcccagccccgcccccgacccgcctggcggcctcacctactttcccgtggccgacctgtctatcatcgccgccctctatgcccgcttcaccgcccagatccgaggcgccgtcgacctgtccctctatcctcgagaagggggtgtctccagccgtgagctggtgaagaaggtctccgatgtcatatggaacagcctcagccgctcctacttcaaggatcgggcccacatccagtccctcttcagcttcatcacaggctggagcccagtaggcaccaaattggacagctccggtgtggcctttgctgtggttggggcctgccaggccctgggtctccgggatgtccacctcgccctgtctgaggatcatgcctgggtagtgtttgggcccaatggggagcagacagctgaggtcacctggcacggcaagggcaacgaggaccgcaggggccagacagtcaatgccggtgtggctgagcggagctggctgtacctgaaaggatcatacatgcgctgtgaccgcaagatggaggtggcgttcatggtgtgtgccatcaacccttccattgacctgcacaccgactcgctggagcttctgcagctgcagcagaagctgctctggctgctctatgacctgggacatctggaaaggtaccccatggccttagggaacctggcagatctagaggagctggagcccacccctggccggccagacccactcaccctctaccacaagggcattgcctcagccaagacctactatcgggatgaacacatctacccctacatgtacctggctggctaccactgtcgcaaccgcaatgtgcgggaagccctgcaggcctgggcggacacggccactgtcatccaggactacaactactgccgggaagacgaggagatctacaaggagttctttgaagtagccaatgatgtcatccccaacctgctgaaggaggcagccagcttgctggaggcgggcgaggagcggccgggggagcaaagccagggcacccagagccaaggttccgccctccaggaccctgagtgcttcgcccacctgctgcgattctacgacggcatctgcaaatgggaggagggcagtcccacgcctgtgctgcacgtgggctgggccacctttcttgtgcagtccctaggccgttttgagggacaggtgcggcagaaggtgcgcatagtgagccgagaggccgaggcggccgaggccgaggagccgtggggcgaggaagcccgggaaggccggcggcggggcccacggcgggagtccaagccagaggagcccccgccgcccaagaagccagcactggacaagggcctgggcaccggccagggtgcagtgtcaggacccccccggaagcctcctgggactgtcgctggcacagcccgaggccctgaaggtggcagcacggctcaggtgccagcacccgcagcatcaccaccgccggagggtccagtgctcactttccagagtgagaagatgaagggcatgaaggagctgctggtggccaccaagatcaactcgagcgccatcaagctgcaactcacggcacagtcgcaagtgcagatgaagaagcagaaagtgtccacccctagtgactacactctgtctttcctcaagcggcagcgcaaaggcctctgaactactggggacttcggaccgcttgtggggacccaggctccgccttagtcccccaactctgagcccatgttctgcccccagcccaaaggggacaggcctcacctctacccaaaccctaggttcccggtcccgagtacagtctgtatcaaacccacgattttctccagctcagaacccagggctctgccccagtcgttagaatataggtctcttctcccagaatcccagccggccaatggaaacctcacgctgggtcctaattaccagtctttaaaggcccagcccctagaaacccaagctcctcctcggaaccgctcacctagagccagaccaacgttactcagggctcctcccagcttgtaggagctgaggtttcacccttaacccaagggagcacaggtcccacctccagcccggggagcctaggaccactcagcccctaggagtatatttccgcacttcagaattccatatcttgcgaatccaagctccctgccccaaataacttcagtcctgcttccagaatttggaaatcctagtttcctctccttcgtatcccgagtctgggacacaaaactccgcccccagcctatgagcatcctgagccccgccctcttcctgacgaaactggccccggatcagagcaggacctcccttccgaccctctgggaacctcccagaggtccagcccatctcggagcatcccggaggaaatctgcagaggggttaggagtgggtgacaagagcctgatctcttcctgttttgtacatagatttatttttcagttccaagaaagatgaatacattttgttaaaaaaaaaaaaaaaa

SEQ ID NO: 875 - DNA, 3053 bp, Homo sapiens
tatatttatgtatatgcacatacacacaaaattaggcgggagtggtggcgcacgcctgtgatcacagctactcgggaggctgaggcacgagaatcgcttgagcccgtgaagtcgaggctgcagtgagcccagatcgagccactgcattccagcctgggcgaaagagaaagaccgtgtctcaaaacaaacaaacaaaagctactcttagcacgtgttagagtatctcgcgggcggaagtgggaaacgagtgctgcacacagacaacctgatctttttcctcataacttgccgaccgacccgtgacagcaaaaccggcagaagctcggcgacctcccaccccgagtctgcaggtagccgccgcccaccgcccgccgccatggggctgaaggccgcccagaagacgctgttcccgctgcgctccatcgacgacgtggtgcgcctgtttgctgccgagctgggccgagaggagccggacctggtgctcctttccttggtgctgggcttcgtggagcattttctggctgtcaaccgcgtcatccctaccaacgttcccgagctcaccttccagcccagccccgcccccgacccgcctggcggcctcacctactttcccgtggccgacctgtctatcatcgccgccctctatgcccgcttcaccgcccagatccgaggcgccgtcgacctgtccctctatcctcgagaagggggtgtctccagccgtgagctggtgaagaaggtctccgatgtcatatggaacagcctcagccgctcctacttcaaggatcgggcccacatccagtccctcttcagcttcatcacaggctggagcccagtaggcaccaaattggacagctccggtgtggcctttgctgtggttggggcctgccaggccctgggtctccgggatgtccacctcgccctgtctgaggatcatgcctgggtagtgtttgggcccaatggggagcagacagctgaggtcacctggcacggcaagggcaacgaggaccgcaggggccagacagtcaatgccggtgtggctgagcggagctggctgtacctgaaaggatcatacatgcgctgtgaccgcaagatggaggtggcgttcatggtgtgtgccatcaacccttccattgacctgcacaccgactcgctggagcttctgcagctgcagcagaagctgctctggctgctctatgacctgggacatctggaaaggtaccccatggccttagggaacctggcagatctagaggagctggagcccacccctggccggccagacccactcaccctctaccacaagggcattgcctcagccaagacctactatcgggatgaacacatctacccctacatgtacctggctggctaccactgtcgcaaccgcaatgtgcgggaagccctgcaggcctgggcggacacggccactgtcatccaggactacaactactgccgggaagacgaggagatctacaaggagttctttgaagtagccaatgatgtcatccccaacctgctgaaggaggcagccagcttgctggaggcgggcgaggagcggccgggggagcaaagccagggcacccagagccaaggttccgccctccaggaccctgagtgcttcgcccacctgctgcgattctacgacggcatctgcaaatgggaggagggcagtcccacgcctgtgctgcacgtgggctgggccacctttcttgtgcagtccctaggccgttttgagggacaggtgcggcagaaggtgcgcatagtgagccgagaggccgaggcggccgaggccgaggagccgtggggcgaggaagcccgggaaggccggcggcggggcccacggcgggagtccaagccagaggagcccccgccgcccaagaagccagcactggacaagggcctgggcaccggccagggtgcagtgtcaggacccccccggaagcctcctgggactgtcgctggcacagcccgaggccctgaaggtggcagcacggctcaggtgccagcacccgcagcatcaccaccgccggagggtccagtgctcactttccagagtgagaagatgaagggcatgaaggagctgctggtggccaccaagatcaactcgagcgccatcaagctgcaactcacggcacagtcgcaagtgcagatgaagaagcagaaagtgtccacccctagtgactacactctgtctttcctcaagcggcagcgcaaaggcctctgaactactggggacttcggaccgcttgtggggacccaggctccgccttagtcccccaactctgagcccatgttctgcccccagcccaaaggggacaggcctcacctctacccaaaccctaggttcccggtcccgagtacagtctgtatcaaacccacgattttctccagctcagaacccagggctctgccccagtcgttagaatataggtctcttctcccagaatcccagccggccaatggaaacctcacgctgggtcctaattaccagtctttaaaggcccagcccctagaaacccaagctcctcctcggaaccgctcacctagagccagaccaacgttactcagggctcctcccagcttgtaggagctgaggtttcacccttaacccaagggagcacaggtcccacctccagcccggggagcctaggaccactcagcccctaggagtatatttccgcacttcagaattccatatcttgcgaatccaagctccctgccccaaataacttcagtcctgcttccagaatttggaaatcctagtttcctctccttcgtatcccgagtctgggacacaaaactccgcccccagcctatgagcatcctgagccccgccctcttcctgacgaaactggccccggatcagagcaggacctcccttccgaccctctgggaacctcccagaggtccagcccatctcggagcatcccggaggaaatctgcagaggggttaggagtgggtgacaagagcctgatctcttcctgttttgtacatagatttatttttcagttccaagaaagatgaatacattttgttaaaaaaaaaaaaaaaa

SEQ ID NO: 876 - DNA, 9926 bp, Homo sapiens
cgcctcccctcagtttgccccctttagccttccacctttcccttctcctctctcgcatttccgccagtcagcttacccgctggccgcctcctgacaagcgggagggatccgccgtggacccagggaagcggaggagcctggcggccaccccctcttccccacttccctgcactctcatcgctctcggcctcggcctcggcctccgacacgagaaagatgctggtttcgagttttggagatccttgttttttatggaacacagttctgtaaaattttcataagattccttggcaataacatacgcttgtgatggaccctagaaatactgctatgttaggattgggttctgattccgaaggtttttcaagaaagagtccttctgccatcagtactggcacattggtcagtaagagagaagtagagctagaaaaaaacacaaaggaggaagaggaccttcgcaaacggaatcgagaaagaaacatcgaagctgggaaagatgatggtttgactgatgcacagcaacagttttcagtgaaagaaacaaacttttcagagggaaatttaaaattgaaaattggcctccaggctaagagaactaaaaaacctccaaagaacttggagaactatgtatgtcgacctgccataaaaacaactattaagcacccaaggaaagcacttaaaagtggaaagatgacggatgaaaagaatgaacactgtccttcaaaacgagacccttcaaagttgtacaagaaagcagatgatgttgcagccattgaatgccagtctgaagaagtcatccgtcttcattcacagggagaaaacaatcctttgtctaagaagctgtctccagtacactcagaaatggcagattatattaatgcaacgccatctactcttcttggtagccgggatcctgatttaaaggacagagcattacttaatggaggaactagtgtaacagaaaagttggcacagctgattgctacctgtcctccttccaagtcttccaagacaaaaccgaagaagttaggaactggcactacagcaggattggttagcaaggatttgatcaggaaagcaggtgttggctctgtagctggaataatacataaggacttaataaaaaagccaaccatcagcacagcagttggattggtaactaaagatcctgggaaaaagccagtgtttaatgcagcagtaggattggtcaataaggactctgtgaaaaaactgggaactggcactacagcggtattcattaataaaaacttaggcaaaaagccaggaactatcactacagtaggactgctaagcaaagattcaggaaagaagctaggaattggtattgttccaggtttagtgcataaagagtctggcaagaagttaggacttggcactgtggttggactggttaataaagatttgggaaagaaattgggttctactgttggcctagtggccaaggactgtgcaaagaagattgtagcaagttcagcaatgggattggttaataaggacattggaaagaaactaatgagttgtcctttggcaggtctgatcagtaaagatgccataaaccttaaagccgaagcactgctccccactcaggaaccgcttaaggcttcttgtagtacaaacatcaataatcaggaaagtcaggaactttctgaatccctgaaagatagtgccaccagcaaaacttttgaaaagaatgttgtacggcagaataaagaaagcatattggaaaagttctcagtacgaaaagaaatcattaatttggagaaagaaatgtttaatgaaggaacatgcattcagcaagacagtttctcatccagtgaaaagggatcttatgaaacctcaaagcatgaaaagcagcctcctgtatattgcacttctccggactttaaaatgggaggtgcttctgatgtatctaccgctaaatccccattcagtgcagtaggagaaagcaatctcccttccccatcacctactgtatctgttaatcctttaaccagaagtccccctgaaacttcttcacagttggctcctaatccattacttttaagttctactacagaactaatcgaagaaatttctgaatctgttggaaagaaccagtttacttctgaaagtacccacttgaacgttggtcataggtcagttggtcatagtataagtattgaatgtaaagggattgataaagaggtaaatgattcaaaaactacccatatagatattccaagaataagctcttcccttggaaaaaagccaagtttgacttctgaatccagcattcatactattactccttcagttgttaacttcactagtttatttagtaataagccttttttaaaactgggtgcagtatctgcatcagacaaacactgccaagttgctgaaagcctaagtactagtttgcagtccaaaccattaaaaaaaagaaaaggaagaaaacctcggtggactaaagtggtggcaagaagcacatgccggtctccaaaagggctagaattagaaagatcagagctttttaaaaacgtttcatgtagctcactatcaaatagtaattctgagccagccaagtttatgaaaaacattggacccccttcatttgtagatcatgacttccttaaacgccgattgccaaagttgagcaaatccacagctccatctcttgctctcttagctgatagtgaaaaaccatctcataagtcttttgctactcacaaactatcctccagtatgtgtgtctctagtgaccttttgtctgatatttataagcccaaaagaggaaggcctaaatctaaggagatgcctcaactggaagggccacctaaaaggactttaaaaatccctgcttctaaagtgttttctttacagtctaaggaagaacaagaacccccaattttacagccagaaattgaaatcccttccttcaaacaaggtctgtctgtgtctccttttccaaaaaagagaggcaggcctaagaggcaaatgaggtcaccagtcaagatgaagccacctgtactgtcagtggctccatttgttgccactgaaagtccaagcaagctagaatctgaaagtgacaaccatagaagtagcagtgatttctttgagagcgaggatcaacttcaggatccagatgacctagatgacagtcataggccaagtgtctgtagtatgagtgaccttgagatggaaccagataaaaaaattaccaagagaaacaatggacaattaatgaaaacaattatccgcaaaataaataaaatgaagactttaaagagaaagaaactgttgaatcagattctttcaagttctgtagaatcaagtaataaagggaaagtgcaatccaaactccataatacggtatcaagtcttgctgccacatttggctctaaattgggccaacagataaatgtcagcaagaaaggaaccatttatataggaaagagaagaggtcgcaaaccaaaaactgtcttaaatggtattctttctggtagtcctactagccttgctgttcttgagcaaacagctcaacaggcagctgggtcagcattaggacagattcttcccccattactgccttcatctgctagtagttctgagattcttccatcacctatttgctctcagtcttctgggactagtggaggtcagagccctgtaagtagtgatgcaggttttgttgaacccagttcagtgccatatttgcatttacactccagacagggcagtatgattcagactcttgcaatgaagaaggcctcaaaggggaggaggcggttatctcctcctactttgttgccaaattctccttcgcacttgagtgaactcacatctctaaaagaagctactccttccccaatcagtgagtctcatagtgatgagaccattcccagtgatagtggaattggaacagataataacagcacatcagacagggcagagaaattttgtgggcaaaaaaagaggaggcattcttttgagcatgtttctctgattccccctgaaacctctacagtgctaagcagtcttaaagaaaaacataaacacaaatgtaagcgcaggaatcatgattacctcagctatgacaagatgaaaaggcagaaacgaaaacggaaaaagaaatatccccagcttcgaaatagacaggatccagactttattgcagagctggaggaactaataagtcgcctaagtgaaattcggatcactcatcgaagtcatcattttatcccccgagatcttctgccaactatctttcgaatcaactttaatagtttctatacacatccttctttccccttagaccctttgcactacattcgaaaacctgacttaaaaaagaaaagagggagaccccctaagatgagggaggcaatggctgaaatgccttttatgcacagccttagttttcctctttctagtactggattctatccatcttatggtatgccttactctccttcaccccttacagctgctcccataggattaggttactatggaaggtatcctcccactctttatccacctcctccatctccttctttcaccacgccacttccacctccttcctatatgcatgctggtcatttacttctcaatcctgccaaataccataagaaaaagcataagctacttcgacaggaggcctttcttacaaccagcaggactcccctcctttccatgagtacctaccccagtgttcctcctgagatggcctatggttggatggttgagcacaaacacaggcaccgtcacaaacacagagaacaccgttcttctgaacaaccccaggtttctatggacactggctcttcccgatctgtcctggaatctttgaagcgctatagatttggaaaggatgctgttggagagcgatataagcataaggaaaagcaccgttgtcacatgtcctgccctcatctctctccttcaaaaagcttaataaacagagaggaacagtgggtccaccgagagccttcagaatctagtccattggccttgggattgcagacacctttacagattgactgttcagaaagttctccaagcttatcccttggaggattcactcccaactctgagccagccagcagtgatgaacatacaaaccttttcacaagtgcaataggcagctgcagagtttcaaaccctaactccagtggccggaagaaattaactgacagccctggactcttttctgcacaggacacttcactaaatcggcttcacagaaaggagtcactgccttctaacgaaagggcagtacagactttggcaggctcccagccaacctctgataaaccctcccagcggccatcagagagcacaaattgtagccctacccggaaaaggtcttcatctgagagtacttcttcaacagtaaacggagttccctctcgaagtccaagattagttgcttctggggatgactctgtggatagtctgctgcagcggatggtacaaaatgaggaccaagagcccatggagaaaagtattgatgctgtgattgcaactgcctctgcaccaccttcttccagtccaggccgtagccacagcaaggaccgaaccctgggaaaaccagacagccttttagtgcctgcagtcgcaagtgactcttgcaataatagcatctcactcctatctgaaaagttgacaagcagctgttccccccatcatatcaagagaagtgtagtggaagctatgcaacgccaagctcggaaaatgtgcaattacgacaaaatcttggccacaaagaaaaacctagaccatgtcaataaaatcttaaaagccaaaaaacttcaaaggcaggccaggacagggaataactttgtgaaacgtaggccaggtcgacctcggaaatgtccccttcaggctgtcgtatcaatgcaagcattccaggctgctcagtttgtcaacccagaattgaacagagacgaggaaggagcagcactgcacctcagtcctgacacagttacagatgtaattgaggctgttgttcagagtgtaaatctgaacccagaacataaaaaggggttgaagagaaaaggttggctattggaagaacagaccagaaaaaagcagaagccattaccagaggaagaagagcaagagaataataaaagctttaatgaagcaccagttgagattcccagtccttctgaaaccccagctaaaccttctgaacctgaaagtaccttgcagcctgtgctttctctcatcccaagggaaaagaagcccccacgtcccccaaagaagaagtatcagaaagcagggctgtattctgacgtttacaaaactacagacccaaagagtcgattgatccaattaaagaaagagaagctggagtatactccaggagagcatgaatatggattatttccagcgcccattcatgttgtgttttttgtttcaggaaagtatctaagacaaaagagaattgacttccagcttccttatgatatcctttggcagtggaaacacaatcagctatacaaaaagccagatgtcccactatataagaaaattcgttcaaatgtctacgttgatgtcaaacccctttctggttacgaagctaccacctgtaactgtaagaagccagatgatgacaccaggaagggctgtgttgatgactgcctcaatagaatgatctttgctgagtgttcccccaacacttgcccatgtggcgagcaatgctgtaaccagaggatacagaggcatgaatgggtgcaatgtctagaacgatttcgagctgaggaaaaaggttggggaatcagaaccaaagagcccctaaaagctgggcagttcatcattgaatacctaggggaggtcgtcagtgaacaggagttcaggaacaggatgattgagcagtatcataatcacagtgaccactactgcctgaacctggatagtgggatggtgattgacagttaccgcatgggaaatgaggcccgattcatcaaccatagctgtgacccaaattgtgaaatgcagaaatggtctgttaatggagtataccggattggactctatgctcttaaagacatgccagctgggactgaactcacttatgattataactttcattccttcaatgtggaaaaacagcaactttgtaagtgtggctttgagaaatgtcgaggaatcatcggaggcaagagtcagcgtgtgaatggactcaccagcagcaaaaacagccagcccatggccacacacaaaaaatctggacggtcaaaagagaagagaaagtctaagcacaagctgaagaaaaggagaggccatctctctgaggaacccagtgaaaatatcaacaccccaactagattgaccccccaattacagatgaagccaatgtccaatcgtgaaaggaactttgtgttaaagcatcatgtattcttggtccgaaactgggagaagattcgtcaaaaacaggaggaagtaaagcacaccagtgataatattcactcagcatcattatatacccgttggaatgggatctgccgagatgatgggaatatcaagtctgatgtcttcatgacccagttctctgccctgcagacagctcgatctgttcgaacaagacggttggcagctgcagaggaaaatattgaagtggctcgggcagcccgcctagcccagatcttcaaagaaatttgtgatggtatcatctcttataaagattcttcccggcaagcactggcagctccacttttgaaccttcccccaaagaaaaagaatgctgattattatgagaagatctctgatcccctagatcttatcaccatagagaagcagatcctcactggttactataagacagtggaagcttttgatgctgacatgctcaaagtctttcggaatgctgagaagtactatgggcgtaaatccccagttgggagagatgtttgtcgtctacgaaaggcctattacaatgcccggcatgaggcatcagcccagattgatgagattgtgggagagacagcaagtgaggcagacagcagtgagacctcagtctctgaaaaggagaatgggcatgagaaggacgacgatgttattcgctgtatctgtggcctctacaacgatgaaggtctcatgatccagtgtgacaagtgcatggtatggcagcactgtgattgtatgggagtgaactcagatgtggagcactacctttgtgagcagtgtgacccaaggcctgtggacagggaggttcccatgatccctcggccccactatgcccaacctggctgtgtctacttcatctgtttgctccgagatgacttgctgcttcgtcagggtgactgtgtgtatctgatgagggatagtcggcgcacccctgatggccacccggtccgtcagtcctatcgactgttatctcacattaaccgacataaacttgacatctttcgcattgagaagctttggaagaatgaaaaagaggaacggtttgcctttggtcaccattatttccgtccccacgaaacacaccactctccatcccgtcggttctatcataatgaactatttcgggtgccactctatgagatcattcccttggaggctgtagtggggacctgctgtgtgttggacctttatacgtattgtaaagggagacccaaaggagtaaaggagcaagatgtgtacatctgtgattatcggcttgacaagtcagcacacctgttttacaagatccaccggaaccgctatcctgtctgcaccaaaccctatgcttttgatcacttccccaagaagctcactcccaaaaaagatttctcgcctcattacgtcccagacaactacaagaggaatggaggacgatcatcctggaagtctgagcgctcaaagccacccctaaaagacttgggccaggaggatgatgctctacccttgattgaagaggttctagccagtcaagagcaagcagccaatgagatacccagcctggaggagccagaacgggaaggggccactgctaacgtcagtgagggtgaaaaaaaaacagaggaaagtagtcaagaaccccagtcaacctgtacccctgaggaacgacggcataaccaacgggaacgactcaaccagatcttgctcaatctccttgaaaaaatccctggaaaaaatgccattgatgtgacctacttgctggaggaaggatcaggcaggaaactgcgaaggcgtactttgtttatcccagaaaacagctttcgaaagtgaccctcaaagaatgagaacctcaagcatctgggatccagtggagctaatcagtcctgcctcctgctctctgggtatagacaggggtgggaagggtccatctgggcaaggggaatggggccatgttgttgacattaggtacttaataagccttggagctagtggagagggagaggaaagggttctgtccaagacagttcaggttaattaattttcttctccattgcttcaccttaagggttaataatgtagagaggagggaggaccacattgatgaccagaacctactggtactttatagcatttgccccaccccacagcttaggtttttctgtcatcctcagatcccacaggcattgcgaagaagctgcttcctatacccaggtataactcaaaatccaaagggatagggccaggatccctattcctaccccatctattctctgttggctccaagagctaccccagagaccttaaacagaaacagtagctgaggcttcttcctagatacctgactagggaagtttgtctctcctttcttgcccaaccaggtcaaagtaaaatgtgagttgacagctcaaagcacttgtaactgctgccccctccctacctctactccccaaaatggaatcatgggatagggaaggcccccatggggtcagaagggcacggtagttcttgcaattatttttgttttacccttcataacc

SEQ ID NO: 877 - DNA, 2161 bp, Homo sapiens
actttcccctctccgtctcctgcgggcgcaatggaggaggaggatgaggaagcgcgggcgctcctggcaggcggccctgacgaggccgacagaggtgccccggccgcccctggagccctgccggccctctgcgaccccagtcgcctggcgcaccggcttttggtgctgttactgatgtgcttccttggctttggcagctatttttgctatgataatcctgctgcccttcagactcaagttaaacgagatatgcaagtgaataccacgaaattcatgctgctgtatgcctggtattcttggcccaatgtagttttgtgtttctttggtggctttttgatagaccgagtatttggaatacgatggggcacaatcatttttagctgctttgtttgcattggacaggttgtttttgccctgggtggaatatttaatgctttttggctgatggaatttggaagatttgtatttgggattggtggcgagtccttagcagttgcccagaatacatatgctgtgagctggtttaaaggcaaagaattaaacctggtgtttggacttcaacttagcatggctagaattggaagtacagtaaacatgaacctcatgggatggctgtattctaagattgaagctttgttaggttctgctggtcacacaaccctcgggatcacacttatgattgggggtgtaacgtgtattctttcactaatctgtgccttggctcttgcctacttggatcagagagcagagagaatccttcataaagaacaaggaaaaacaggtgaagttattaaattaactgatgtaaaggacttctccttacccctgtggcttatatttatcatctgtgtctgctattatgttgctgtgttcccttttattggacttgggaaagttttctttacagagaaatttggattttcttcccaggcagcaagtgcaattaacagtgttgtatatgtcatatcagctcccatgtccccggtgtttgggctcctggtggataaaacagggaagaacatcatctgggttctttgcgcagtagcagccactcttgtgtcccacatgatgctggcctttacgatgtggaacccttggattgctatgtgtcttctgggactctcctactcattgcttgcctgtgcattgtggccaatggtggcatttgtagttcctgaacatcagctgggaactgcatatggcttcatgcagtccattcagaatcttgggttggccatcatttccatcattgctggtatgatactggattctcgggggtatttgtttttggaagtgttcttcattgcctgtgtttctttgtcacttttatctgtggtcttactctatttggtgaatcgtgcccagggtgggaacctaaattattctgcaagacaaagggaagaaataaaattttcccatactgaatgagaagttaaaatgaatgtgtcatgagaatgggcttaacacatcgttggtttgaaaacttccatttttaaaaatttagagtttagtcattagaaaaaataatggactggaaagttatatttatatccaaatatacctatttcaaagtgtatttgtgaggcctgttttagcctgtgtcttttgtattgtgtgttgctaaagaattctacttttagtaggctaatcaacaatgaaagggttagaaaattgctgtggaacatccaggtgaacttcaggaaagacagtgaaaaatggaaaacgttggagcttctgttgagataatcttcattaggtatatatcttagggatacagccttttctttatcttatagcaggaaaaaaaaacttttgagggaaatagaagggctgcgttacacaaaataaacaatggcattgtcataggccttccttttactagtagggcataatgctagggaatatgtgaagatgtttttatgaagtctctttctgatcacgaacaatagcttgcgctctactctgtagttatgtggattgccgagcaatgacccttttcaatttcttatttctgtgttactgaggaccctaatcacttagggatgtaattttatagtataaactttctgtacagtttttcttatagtctaataagtaaaaagtgtccttcaaattatgataattgcctatgtacatggataaattaaaacactgcacacgg

SEQ ID NO: 878 - DNA, 7620 bp, Homo sapiens
gtcattgagctgatgtgcttttgcaaggggtctctttagaagtggtaggggcagggtcgagagaagaaggggatgcagaatctgtacatgaggaaggagccagagtcactcaggaaactcctcattcttcctgcgctggctgtggcacacccaccggtggcacacccctccctcgggtccagttcagcccacagactcctgggaggagagccagggccccagcctctcctttgaggagtgttgcagcctttctgtgtgccagatgcctagtgaagaaaagctgaaaccctggagctttgtgcatgttaatgaccttggaaatgactgagctcacggaccctcatcacaccatgggagactacaaagtggcccaccctcaggaccctcaccacccatcagagaagcctgtcattcactgccataaatgtggggagccttgcaagggtgaagtgcttcgggtccagaccaaacatttccacatcaagtgtttcacctgcaaagtgtgtggctgtgacctggcacaagggggcttcttcataaagaacggagagtatctctgcaccctggactaccagcggatgtacgggacacgctgccatggctgtggggagttcgtggagggcgaagtggtgactgctctgggcaagacctaccatcccaattgctttgcttgtactatctgcaagcgcccgtttccacccggagaccgagtcacattcaatgggagagactgcctttgtcaactctgtgcacagccgatgtcgtccagtccgaaagaaaccaccttctccagcaattgtgccggctgcggaagagatatcaagaatgggcaggcgctgctggcgctggataagcagtggcacttggggtgctttaaatgcaagtcctgcgggaaggtcctcaccggggagtacatcagcaaggatggtgctccgtactgtgaaaaggactaccagggactctttggggtgaaatgtgaggcgtgtcaccagtttatcacagggaaagtcctggaggcaggtgacaaacattaccaccccagctgtgcacgatgcagcagatgcaaccagatgttcacagaaggagaggaaatgtatcttcaaggctccaccgtttggcatcccgactgtaagcaatctacgaagaccgaggaaaagctgcggcctaccaggacatcctcggaaagtatttattctaggccaggctccagtattcctggctcaccaggtcatactatctatgcaaaagtagacaatgagatcctggattacaaggatttagcagccattccgaaggtcaaggcaatttatgacattgaacgtccagatcttattacctatgagcctttctacacttcgggctatgatgacaaacaggagagacagagccttggagagtctccgaggactttgtctcctactccatcagcagaagggtaccaggatgttcgggatcggatgatccatcggtccacgagccagggctccatcaactcccctgtgtacagccgccacagctacactccaaccacgtcccgctctccccagcatttccacagacctggcaatgagccgtccagcggccggaactcccctctcccttaccggccagacagccgccctctaactccaacttacgctcaggcccctaaacatttccatgttccagatcaaggaatcaacatttaccgaaagccacccatctacaaacagcatgctgccttggcagcccagagcaagtcctcagaagatatcatcaagttttccaagttcccagcagcccaggcaccagaccccagcgagacaccaaagattgagacggaccactggcctggtcccccctcatttgctgtcgtaggacctgacatgaaacgcagatctagtggcagagaggaagatgatgaggaacttctgagacgtcggcagcttcaagaagagcaattaatgaagcttaactcaggcctgggacagttgatcttgaaagaagagatggagaaagagagccgggaaaggtcatctctgttagccagtcgctacgattctcccatcaactcagcttcacatattccatcatctaaaactgcatctctccctggctatggaagaaatgggcttcaccggcctgtttctaccgacttcgctcagtataacagctatggggatgtcagcgggggagtgcgagattaccagacactcccagatggccacatgcctgcaatgagaatggaccgaggagtgtctatgcccaacatgttggaaccaaagatatttccatatgaaatgctcatggtgaccaacagagggcgaaacaaaatcctcagagaggtggacagaaccaggctggagcgccacttagcccctgaagtgtttcgggaaatctttggaatgtccatacaggagtttgacaggttacctctttggagacgcaacgacatgaagaaaaaagcaaaactcttctaagtcccactcgtgaatggcaattagagaaaggactgacagtggcggtgccccataggatgtcatattgaggcccaaacttgattggagaatttgcaaactaccgtcgctcagcaacaccaaaaagagaaagtctggttaaaacaccatgagtcaaatgtcgggccagccaacagtaacacttgccaagaagcatggcgtagaaatttctatgttccgaaacacagagtagtgtccacatgtgagcttttcacattaccttatgtatacaacaggagctgcgttgttttcttctttttcttttcctttatctgttgtccaacaacagtgctgactgtccggataagagctggcaagtgcccttaggatgccgcatgggaaaaatcggttatcataatttcaaagtataaatatatttattaagtagcgctgcggctaagaaggaagagtgaggggtctgtccatggggtggcagtgatttcacacccgcctttcttgaatggcttcgtgttactcagccgtgccctggcaggaatggaactccatcagggaacagggcagctctgtttgaatggggtgaaaaacagcaaaattaattcttagcaagctccttgttctctactgttcaccgggacctggctggcaaatgacttagctattagtatatttaaaaactgttcaaaagcaaaagagaaggaacaggaatgaaaggaaaccttcccttaactctttctgcttcccatagcaggtctggttcctgctccccgcctaggacaggagctgtctggagctccacctttgcaaagaaaggaaaaacacaaattgcccccagattggcccagtggcatgccattaggtgattttgcataggggccatatcattcatggccaaaaaaaaccaaaaagcaaaaaacaaaaacaagtcccatgtcctactgactctagttcttccagtcgttatcctctgctgtctctctggcatcctatgaatcagatcaagcccatgctgttgttggtttttaaggtttctttcaataataggctaaggaaagacatgtttttctcttttaaatctctgcaactccaaagtagactccttcgaacgtatttaatttggccttttcagctttcttcttgcccagctctgtcgaattcatgggtgtgtgtgcacatgttggtttcactcacccagagtaattttgtgagcatgcatgtgctttttaatttctgcttgaatgtttgtcctgctgtgttgcagcttctaaagacattgtcaccgagtgtgtgtgactcaaagatcaagagtgaggctaaactgcgaccccaacatcacttccttcatggaaaggtgttggcgctgatgtagctcatggaaggatcagactgggaaccacagaggaaggatgaggtgggatgtggaggtcagagcatctcacgagagtccctcaggctctgcaacactagattcgaatatgagcctagggtttccccaacacgtgcgtgcatatgaaaccacatcatgattcccgacgtgagttagatgagggagagtttgtgtaactccacacccaggagggtaagccactttattatcatgctttggggctgtgcttaagaatttaagctctgttttaaagccgaagaagaaaacatttgaatttaccttcatatgccactaagaacaaaagctctgaagttcttcctgctggcaccaaatattaggattacaagctgtctctctgacaccagtggtaaaaaagcaagtagaatagtttctgagtctgtgttgcagcctctgacacgtggctcaccgctgtcatttgggggatggaatgaacagtcactgttctatagcatcctcctgtgctcttacctaaggaatctaaattgtcctagccttccattgctatgcactgaatgaggactactctcgtgtgtgtgtgtgtgtgtgtgtgtgtgtgtgtgtgtgtgtgtgtgtgtgttggatctactaacatgtttagcaaatggctctgacagggtggccatgagcagatgagaccagctcttgcttggttggaagccacactgcagtttgcagtttagcctttggtgtctcagtggcttcttgcttattccatgctttttctatcccatcctctctctgtgccctcctgcaatggcagccttggcacaatgcctgggtgtcctcatccttgctttactctggaaagtgtggggatggagaggatggtgcatttccagtgcttccttacctgtcaataacaatggtggccacctgggtcccagcacttggctggtggagagatttttttcattatggagctaataaagggtccctacgttttacattgattaatgaattatcacccagacatgtgcagatgaaatgtcaatataagaaaaatcaaggtatttgggaaacatgggcataatcaggtagttttgctaaaattcctcttccttggtctacataaagaagacatgggtctgtcatagaatggggacattagactgaaaactgggacaacccccttccttattttatagagactaggagttaaggggcctgcctaagattgcagtgataaagaactgaaccctaaatcagctcccactaatgaaaccctgctttccttgtatcttttaaactcagttctgcatccaacttgagaagaaaaaaagcttctttccatatcaagtaccatatgagttcatttaaactgcaccttgcagaaatgcattgccagaaagcaccagtagcctcctatctgcaagcagagtagtgctctgctctggggaggggtcattggaaaccataatgcagagtgggccccctactccatttcccagcaaaaggctccagctggagggatgggttgtggggcaacctggttcctgctaactgccagattgaatgtgtgggctagaatgcctgcacatttagttaaactgggctcagcatgcttgtcctcaaaatgtccatcctggtcacagcacacaagatggctattggtctgcttttaccctaccctgtactatacatgaaaattccagttattaacacactcaaactggtggagcttgttcaccctaggaaggggattgtatatatggcaggcttccctggtgccgatgtaaagggctacatttgggaacatttgacttccttgggactcttaagtgcataatgatggcatgaagtaaaaggggcctcaatgatgataggaaaatcagttcttttaaaatttcttcaagaaaatccaggctatcacatagtctttctgtgtgacttattaggagataggaagagcattgggaaacttgcacagctagctatgcatctacattttggtttggggttagttatgaaatgttcttaatatgacgtgttcaataacttcacataaacttcctgttctccaaaacctcaaagagatagagttaatgagttgttgtttttttttaaatgggggtagttttctatctgtcatgggctctagcatctactccgctacccaattctgtcatctccaagctgagtttcctcttctgaggcagaggctggagcagttctttttcagttctcatcctctccatcccaatccagtatatcaatcaactctaactcggagacgtctagctggcaatgtttctaaaactttcactggatttctttagacattgaagcaaacatttttttctaagaattgcttctcagatgatgatatcaaatgtatatgcttttgcaagtttgaaaagttcaaattaaccacttttgactaggtaagtctttctaaaaaccatttaaagctaactgggtcttagcatcctcctgtgtatggaagagacaggtgaccgctccaggttgggtgctcacagaacccttttcctgactctcatggaagatggtggaaggaaaatagactgtctcatcaaccctcctgtgtcctctgaagcaatctcagtttttattaaccacctcttctgtgtttctggtagctatttaacctgtatttaatctgtacttcctatgccagcctcaattttatttgatttttacaattattctcttctaaccaatgaagtgtttgtcagtatgccccaaagcttgctcttttgtgctcccttttgaataactttctatccagaaaaagagattatttgggacttgagatttgcagtgataccaacttatagcaatgatgtactttaagggaactacccaactatgttgtgatagaagaaagagaaaccttcactttggcatttttttttaatcactgtttatttttctgtttgcggcccaggaagcagtgggaggtggtggcagatatgctttgcatatggattgttatgtttttatttgggcaagtttaatcatggaaaactcaaaaagaaggggggaaatggtcagtttaagccaaaagaaactttctaaacaatgtataggtacacagcaaaattaaacaaatccaacaatttctgaagcttagtgtaattgagtggtggttgttattcaataaaattattcccaaaagtgtttctcctaagagtgcagttcccatgagtcacttcctgaacccattgaccaaaggtggacagagacaatcctgtagaccttgacattcagaaagatgtgagctgcttactgatcatatatgcatacgtttctttacagcagaggaaaccattgtccacaaaactgatgttcttttggggttttatgtacagacttgtccaatcatgtgtgtggttcctgcgagttgctgatgactccgcattgaagctctctgagttctttgattttaagttgggtttatggaattttttcaaatgttggaaggtgtgtggttcttcctgccctccctccccttttggaaatatgaaagcaaatgtttagaagaattccttttgaaaagctgtgtcgtgttccctgtgaaactgagcaggtgtgtgttggcgcgctaagtgccacatgcttgtgtgtagaggaggaggtggccctgccggctccgcgctgctgtgcctgtgatccctacctgctccccgctcctgttgccagcagcactcactgcactcctttgtcatatactctgcatcactgtcatactcacaacttcgtgaataaagttgtgtgctttattcgtagaaaaaaaaaaaa

SEQ ID NO: 879 - DNA, 7704 bp, Homo sapiens
gtcattgagctgatgtgcttttgcaaggggtctctttagaagtggtaggggcagggtcgagagaagaaggggatgcagaatctgtacatgaggaaggagccagagtcactcaggaaactcctcattcttcctgcgctggctgtggcacacccaccggtggcacacccctccctcgggtccagttcagcccacagactcctgggaggagagccagggccccagcctctcctttgaggagtgttgcagcctttctgtgtgccagatgcctagtgaagaaaagctgaaaccctggagctttgtgcatgttaatgaccttggaaatgactgagctcacggaccctcatcacaccatgggagactacaaagtggcccaccctcaggaccctcaccacccatcagagaagcctgtcattcactgccataaatgtggggagccttgcaagggtgaagtgcttcgggtccagaccaaacatttccacatcaagtgtttcacctgcaaagtgtgtggctgtgacctggcacaagggggcttcttcataaagaacggagagtatctctgcaccctggactaccagcggatgtacgggacacgctgccatggctgtggggagttcgtggagggcgaagtggtgactgctctgggcaagacctaccatcccaattgctttgcttgtactatctgcaagcgcccgtttccacccggagaccgagtcacattcaatgggagagactgcctttgtcaactctgtgcacagccgatgtcgtccagtccgaaagaaaccaccttctccagcaattgtgccggctgcggaagagatatcaagaatgggcaggcgctgctggcgctggataagcagtggcacttggggtgctttaaatgcaagtcctgcgggaaggtcctcaccggggagtacatcagcaaggatggtgctccgtactgtgaaaaggactaccagggactctttggggtgaaatgtgaggcgtgtcaccagtttatcacagggaaagtcctggaggcaggtgacaaacattaccaccccagctgtgcacgatgcagcagatgcaaccagatgttcacagaaggagaggaaatgtatcttcaaggctccaccgtttggcatcccgactgtaagcaatctacgaagaccgaggaaaagctgcggctgccaaacattcggcgttcttcatccgatttcttttattccaaaagtctgattcgacgcacaggacggtctccgtctctgcagcctaccaggacatcctcggaaagtatttattctaggccaggctccagtattcctggctcaccaggtcatactatctatgcaaaagtagacaatgagatcctggattacaaggatttagcagccattccgaaggtcaaggcaatttatgacattgaacgtccagatcttattacctatgagcctttctacacttcgggctatgatgacaaacaggagagacagagccttggagagtctccgaggactttgtctcctactccatcagcagaagggtaccaggatgttcgggatcggatgatccatcggtccacgagccagggctccatcaactcccctgtgtacagccgccacagctacactccaaccacgtcccgctctccccagcatttccacagacctggcaatgagccgtccagcggccggaactcccctctcccttaccggccagacagccgccctctaactccaacttacgctcaggcccctaaacatttccatgttccagatcaaggaatcaacatttaccgaaagccacccatctacaaacagcatgctgccttggcagcccagagcaagtcctcagaagatatcatcaagttttccaagttcccagcagcccaggcaccagaccccagcgagacaccaaagattgagacggaccactggcctggtcccccctcatttgctgtcgtaggacctgacatgaaacgcagatctagtggcagagaggaagatgatgaggaacttctgagacgtcggcagcttcaagaagagcaattaatgaagcttaactcaggcctgggacagttgatcttgaaagaagagatggagaaagagagccgggaaaggtcatctctgttagccagtcgctacgattctcccatcaactcagcttcacatattccatcatctaaaactgcatctctccctggctatggaagaaatgggcttcaccggcctgtttctaccgacttcgctcagtataacagctatggggatgtcagcgggggagtgcgagattaccagacactcccagatggccacatgcctgcaatgagaatggaccgaggagtgtctatgcccaacatgttggaaccaaagatatttccatatgaaatgctcatggtgaccaacagagggcgaaacaaaatcctcagagaggtggacagaaccaggctggagcgccacttagcccctgaagtgtttcgggaaatctttggaatgtccatacaggagtttgacaggttacctctttggagacgcaacgacatgaagaaaaaagcaaaactcttctaagtcccactcgtgaatggcaattagagaaaggactgacagtggcggtgccccataggatgtcatattgaggcccaaacttgattggagaatttgcaaactaccgtcgctcagcaacaccaaaaagagaaagtctggttaaaacaccatgagtcaaatgtcgggccagccaacagtaacacttgccaagaagcatggcgtagaaatttctatgttccgaaacacagagtagtgtccacatgtgagcttttcacattaccttatgtatacaacaggagctgcgttgttttcttctttttcttttcctttatctgttgtccaacaacagtgctgactgtccggataagagctggcaagtgcccttaggatgccgcatgggaaaaatcggttatcataatttcaaagtataaatatatttattaagtagcgctgcggctaagaaggaagagtgaggggtctgtccatggggtggcagtgatttcacacccgcctttcttgaatggcttcgtgttactcagccgtgccctggcaggaatggaactccatcagggaacagggcagctctgtttgaatggggtgaaaaacagcaaaattaattcttagcaagctccttgttctctactgttcaccgggacctggctggcaaatgacttagctattagtatatttaaaaactgttcaaaagcaaaagagaaggaacaggaatgaaaggaaaccttcccttaactctttctgcttcccatagcaggtctggttcctgctccccgcctaggacaggagctgtctggagctccacctttgcaaagaaaggaaaaacacaaattgcccccagattggcccagtggcatgccattaggtgattttgcataggggccatatcattcatggccaaaaaaaaccaaaaagcaaaaaacaaaaacaagtcccatgtcctactgactctagttcttccagtcgttatcctctgctgtctctctggcatcctatgaatcagatcaagcccatgctgttgttggtttttaaggtttctttcaataataggctaaggaaagacatgtttttctcttttaaatctctgcaactccaaagtagactccttcgaacgtatttaatttggccttttcagctttcttcttgcccagctctgtcgaattcatgggtgtgtgtgcacatgttggtttcactcacccagagtaattttgtgagcatgcatgtgctttttaatttctgcttgaatgtttgtcctgctgtgttgcagcttctaaagacattgtcaccgagtgtgtgtgactcaaagatcaagagtgaggctaaactgcgaccccaacatcacttccttcatggaaaggtgttggcgctgatgtagctcatggaaggatcagactgggaaccacagaggaaggatgaggtgggatgtggaggtcagagcatctcacgagagtccctcaggctctgcaacactagattcgaatatgagcctagggtttccccaacacgtgcgtgcatatgaaaccacatcatgattcccgacgtgagttagatgagggagagtttgtgtaactccacacccaggagggtaagccactttattatcatgctttggggctgtgcttaagaatttaagctctgttttaaagccgaagaagaaaacatttgaatttaccttcatatgccactaagaacaaaagctctgaagttcttcctgctggcaccaaatattaggattacaagctgtctctctgacaccagtggtaaaaaagcaagtagaatagtttctgagtctgtgttgcagcctctgacacgtggctcaccgctgtcatttgggggatggaatgaacagtcactgttctatagcatcctcctgtgctcttacctaaggaatctaaattgtcctagccttccattgctatgcactgaatgaggactactctcgtgtgtgtgtgtgtgtgtgtgtgtgtgtgtgtgtgtgtgtgtgtgtgtgttggatctactaacatgtttagcaaatggctctgacagggtggccatgagcagatgagaccagctcttgcttggttggaagccacactgcagtttgcagtttagcctttggtgtctcagtggcttcttgcttattccatgctttttctatcccatcctctctctgtgccctcctgcaatggcagccttggcacaatgcctgggtgtcctcatccttgctttactctggaaagtgtggggatggagaggatggtgcatttccagtgcttccttacctgtcaataacaatggtggccacctgggtcccagcacttggctggtggagagatttttttcattatggagctaataaagggtccctacgttttacattgattaatgaattatcacccagacatgtgcagatgaaatgtcaatataagaaaaatcaaggtatttgggaaacatgggcataatcaggtagttttgctaaaattcctcttccttggtctacataaagaagacatgggtctgtcatagaatggggacattagactgaaaactgggacaacccccttccttattttatagagactaggagttaaggggcctgcctaagattgcagtgataaagaactgaaccctaaatcagctcccactaatgaaaccctgctttccttgtatcttttaaactcagttctgcatccaacttgagaagaaaaaaagcttctttccatatcaagtaccatatgagttcatttaaactgcaccttgcagaaatgcattgccagaaagcaccagtagcctcctatctgcaagcagagtagtgctctgctctggggaggggtcattggaaaccataatgcagagtgggccccctactccatttcccagcaaaaggctccagctggagggatgggttgtggggcaacctggttcctgctaactgccagattgaatgtgtgggctagaatgcctgcacatttagttaaactgggctcagcatgcttgtcctcaaaatgtccatcctggtcacagcacacaagatggctattggtctgcttttaccctaccctgtactatacatgaaaattccagttattaacacactcaaactggtggagcttgttcaccctaggaaggggattgtatatatggcaggcttccctggtgccgatgtaaagggctacatttgggaacatttgacttccttgggactcttaagtgcataatgatggcatgaagtaaaaggggcctcaatgatgataggaaaatcagttcttttaaaatttcttcaagaaaatccaggctatcacatagtctttctgtgtgacttattaggagataggaagagcattgggaaacttgcacagctagctatgcatctacattttggtttggggttagttatgaaatgttcttaatatgacgtgttcaataacttcacataaacttcctgttctccaaaacctcaaagagatagagttaatgagttgttgtttttttttaaatgggggtagttttctatctgtcatgggctctagcatctactccgctacccaattctgtcatctccaagctgagtttcctcttctgaggcagaggctggagcagttctttttcagttctcatcctctccatcccaatccagtatatcaatcaactctaactcggagacgtctagctggcaatgtttctaaaactttcactggatttctttagacattgaagcaaacatttttttctaagaattgcttctcagatgatgatatcaaatgtatatgcttttgcaagtttgaaaagttcaaattaaccacttttgactaggtaagtctttctaaaaaccatttaaagctaactgggtcttagcatcctcctgtgtatggaagagacaggtgaccgctccaggttgggtgctcacagaacccttttcctgactctcatggaagatggtggaaggaaaatagactgtctcatcaaccctcctgtgtcctctgaagcaatctcagtttttattaaccacctcttctgtgtttctggtagctatttaacctgtatttaatctgtacttcctatgccagcctcaattttatttgatttttacaattattctcttctaaccaatgaagtgtttgtcagtatgccccaaagcttgctcttttgtgctcccttttgaataactttctatccagaaaaagagattatttgggacttgagatttgcagtgataccaacttatagcaatgatgtactttaagggaactacccaactatgttgtgatagaagaaagagaaaccttcactttggcatttttttttaatcactgtttatttttctgtttgcggcccaggaagcagtgggaggtggtggcagatatgctttgcatatggattgttatgtttttatttgggcaagtttaatcatggaaaactcaaaaagaaggggggaaatggtcagtttaagccaaaagaaactttctaaacaatgtataggtacacagcaaaattaaacaaatccaacaatttctgaagcttagtgtaattgagtggtggttgttattcaataaaattattcccaaaagtgtttctcctaagagtgcagttcccatgagtcacttcctgaacccattgaccaaaggtggacagagacaatcctgtagaccttgacattcagaaagatgtgagctgcttactgatcatatatgcatacgtttctttacagcagaggaaaccattgtccacaaaactgatgttcttttggggttttatgtacagacttgtccaatcatgtgtgtggttcctgcgagttgctgatgactccgcattgaagctctctgagttctttgattttaagttgggtttatggaattttttcaaatgttggaaggtgtgtggttcttcctgccctccctccccttttggaaatatgaaagcaaatgtttagaagaattccttttgaaaagctgtgtcgtgttccctgtgaaactgagcaggtgtgtgttggcgcgctaagtgccacatgcttgtgtgtagaggaggaggtggccctgccggctccgcgctgctgtgcctgtgatccctacctgctccccgctcctgttgccagcagcactcactgcactcctttgtcatatactctgcatcactgtcatactcacaacttcgtgaataaagttgtgtgctttattcgtagaaaaaaaaaaaa

SEQ ID NO: 880 - DNA, 7597 bp, Homo sapiens
gagacagtaaggagccaggggaacagagagaattgtggggcagcaccgctccttgggtccccactccccatttctcattgcttggaaatccatgccaagatgcctgccttccttggtctaaagtgtctggggaaattgtgcagctctgagaaaagcaaagtcacctcatctgagagaaccagtgccaggggctcgaacagaaagagactgattgttgaggaccggagggtctctgggacctccttcaccgctcataggcgtgccactatcactcatttgctgtatctctgtcccaaggactactgcccacgtgggcgtgtatgtaacagcgttgatccttttgtggcccaccctcaggaccctcaccacccatcagagaagcctgtcattcactgccataaatgtggggagccttgcaagggtgaagtgcttcgggtccagaccaaacatttccacatcaagtgtttcacctgcaaagtgtgtggctgtgacctggcacaagggggcttcttcataaagaacggagagtatctctgcaccctggactaccagcggatgtacgggacacgctgccatggctgtggggagttcgtggagggcgaagtggtgactgctctgggcaagacctaccatcccaattgctttgcttgtactatctgcaagcgcccgtttccacccggagaccgagtcacattcaatgggagagactgcctttgtcaactctgtgcacagccgatgtcgtccagtccgaaagaaaccaccttctccagcaattgtgccggctgcggaagagatatcaagaatgggcaggcgctgctggcgctggataagcagtggcacttggggtgctttaaatgcaagtcctgcgggaaggtcctcaccggggagtacatcagcaaggatggtgctccgtactgtgaaaaggactaccagggactctttggggtgaaatgtgaggcgtgtcaccagtttatcacagggaaagtcctggaggcaggtgacaaacattaccaccccagctgtgcacgatgcagcagatgcaaccagatgttcacagaaggagaggaaatgtatcttcaaggctccaccgtttggcatcccgactgtaagcaatctacgaagaccgaggaaaagctgcggcctaccaggacatcctcggaaagtatttattctaggccaggctccagtattcctggctcaccaggtcatactatctatgcaaaagtagacaatgagatcctggattacaaggatttagcagccattccgaaggtcaaggcaatttatgacattgaacgtccagatcttattacctatgagcctttctacacttcgggctatgatgacaaacaggagagacagagccttggagagtctccgaggactttgtctcctactccatcagcagaagggtaccaggatgttcgggatcggatgatccatcggtccacgagccagggctccatcaactcccctgtgtacagccgccacagctacactccaaccacgtcccgctctccccagcatttccacagacctggcaatgagccgtccagcggccggaactcccctctcccttaccggccagacagccgccctctaactccaacttacgctcaggcccctaaacatttccatgttccagatcaaggaatcaacatttaccgaaagccacccatctacaaacagcatgctgccttggcagcccagagcaagtcctcagaagatatcatcaagttttccaagttcccagcagcccaggcaccagaccccagcgagacaccaaagattgagacggaccactggcctggtcccccctcatttgctgtcgtaggacctgacatgaaacgcagatctagtggcagagaggaagatgatgaggaacttctgagacgtcggcagcttcaagaagagcaattaatgaagcttaactcaggcctgggacagttgatcttgaaagaagagatggagaaagagagccgggaaaggtcatctctgttagccagtcgctacgattctcccatcaactcagcttcacatattccatcatctaaaactgcatctctccctggctatggaagaaatgggcttcaccggcctgtttctaccgacttcgctcagtataacagctatggggatgtcagcgggggagtgcgagattaccagacactcccagatggccacatgcctgcaatgagaatggaccgaggagtgtctatgcccaacatgttggaaccaaagatatttccatatgaaatgctcatggtgaccaacagagggcgaaacaaaatcctcagagaggtggacagaaccaggctggagcgccacttagcccctgaagtgtttcgggaaatctttggaatgtccatacaggagtttgacaggttacctctttggagacgcaacgacatgaagaaaaaagcaaaactcttctaagtcccactcgtgaatggcaattagagaaaggactgacagtggcggtgccccataggatgtcatattgaggcccaaacttgattggagaatttgcaaactaccgtcgctcagcaacaccaaaaagagaaagtctggttaaaacaccatgagtcaaatgtcgggccagccaacagtaacacttgccaagaagcatggcgtagaaatttctatgttccgaaacacagagtagtgtccacatgtgagcttttcacattaccttatgtatacaacaggagctgcgttgttttcttctttttcttttcctttatctgttgtccaacaacagtgctgactgtccggataagagctggcaagtgcccttaggatgccgcatgggaaaaatcggttatcataatttcaaagtataaatatatttattaagtagcgctgcggctaagaaggaagagtgaggggtctgtccatggggtggcagtgatttcacacccgcctttcttgaatggcttcgtgttactcagccgtgccctggcaggaatggaactccatcagggaacagggcagctctgtttgaatggggtgaaaaacagcaaaattaattcttagcaagctccttgttctctactgttcaccgggacctggctggcaaatgacttagctattagtatatttaaaaactgttcaaaagcaaaagagaaggaacaggaatgaaaggaaaccttcccttaactctttctgcttcccatagcaggtctggttcctgctccccgcctaggacaggagctgtctggagctccacctttgcaaagaaaggaaaaacacaaattgcccccagattggcccagtggcatgccattaggtgattttgcataggggccatatcattcatggccaaaaaaaaccaaaaagcaaaaaacaaaaacaagtcccatgtcctactgactctagttcttccagtcgttatcctctgctgtctctctggcatcctatgaatcagatcaagcccatgctgttgttggtttttaaggtttctttcaataataggctaaggaaagacatgtttttctcttttaaatctctgcaactccaaagtagactccttcgaacgtatttaatttggccttttcagctttcttcttgcccagctctgtcgaattcatgggtgtgtgtgcacatgttggtttcactcacccagagtaattttgtgagcatgcatgtgctttttaatttctgcttgaatgtttgtcctgctgtgttgcagcttctaaagacattgtcaccgagtgtgtgtgactcaaagatcaagagtgaggctaaactgcgaccccaacatcacttccttcatggaaaggtgttggcgctgatgtagctcatggaaggatcagactgggaaccacagaggaaggatgaggtgggatgtggaggtcagagcatctcacgagagtccctcaggctctgcaacactagattcgaatatgagcctagggtttccccaacacgtgcgtgcatatgaaaccacatcatgattcccgacgtgagttagatgagggagagtttgtgtaactccacacccaggagggtaagccactttattatcatgctttggggctgtgcttaagaatttaagctctgttttaaagccgaagaagaaaacatttgaatttaccttcatatgccactaagaacaaaagctctgaagttcttcctgctggcaccaaatattaggattacaagctgtctctctgacaccagtggtaaaaaagcaagtagaatagtttctgagtctgtgttgcagcctctgacacgtggctcaccgctgtcatttgggggatggaatgaacagtcactgttctatagcatcctcctgtgctcttacctaaggaatctaaattgtcctagccttccattgctatgcactgaatgaggactactctcgtgtgtgtgtgtgtgtgtgtgtgtgtgtgtgtgtgtgtgtgtgtgtgtgttggatctactaacatgtttagcaaatggctctgacagggtggccatgagcagatgagaccagctcttgcttggttggaagccacactgcagtttgcagtttagcctttggtgtctcagtggcttcttgcttattccatgctttttctatcccatcctctctctgtgccctcctgcaatggcagccttggcacaatgcctgggtgtcctcatccttgctttactctggaaagtgtggggatggagaggatggtgcatttccagtgcttccttacctgtcaataacaatggtggccacctgggtcccagcacttggctggtggagagatttttttcattatggagctaataaagggtccctacgttttacattgattaatgaattatcacccagacatgtgcagatgaaatgtcaatataagaaaaatcaaggtatttgggaaacatgggcataatcaggtagttttgctaaaattcctcttccttggtctacataaagaagacatgggtctgtcatagaatggggacattagactgaaaactgggacaacccccttccttattttatagagactaggagttaaggggcctgcctaagattgcagtgataaagaactgaaccctaaatcagctcccactaatgaaaccctgctttccttgtatcttttaaactcagttctgcatccaacttgagaagaaaaaaagcttctttccatatcaagtaccatatgagttcatttaaactgcaccttgcagaaatgcattgccagaaagcaccagtagcctcctatctgcaagcagagtagtgctctgctctggggaggggtcattggaaaccataatgcagagtgggccccctactccatttcccagcaaaaggctccagctggagggatgggttgtggggcaacctggttcctgctaactgccagattgaatgtgtgggctagaatgcctgcacatttagttaaactgggctcagcatgcttgtcctcaaaatgtccatcctggtcacagcacacaagatggctattggtctgcttttaccctaccctgtactatacatgaaaattccagttattaacacactcaaactggtggagcttgttcaccctaggaaggggattgtatatatggcaggcttccctggtgccgatgtaaagggctacatttgggaacatttgacttccttgggactcttaagtgcataatgatggcatgaagtaaaaggggcctcaatgatgataggaaaatcagttcttttaaaatttcttcaagaaaatccaggctatcacatagtctttctgtgtgacttattaggagataggaagagcattgggaaacttgcacagctagctatgcatctacattttggtttggggttagttatgaaatgttcttaatatgacgtgttcaataacttcacataaacttcctgttctccaaaacctcaaagagatagagttaatgagttgttgtttttttttaaatgggggtagttttctatctgtcatgggctctagcatctactccgctacccaattctgtcatctccaagctgagtttcctcttctgaggcagaggctggagcagttctttttcagttctcatcctctccatcccaatccagtatatcaatcaactctaactcggagacgtctagctggcaatgtttctaaaactttcactggatttctttagacattgaagcaaacatttttttctaagaattgcttctcagatgatgatatcaaatgtatatgcttttgcaagtttgaaaagttcaaattaaccacttttgactaggtaagtctttctaaaaaccatttaaagctaactgggtcttagcatcctcctgtgtatggaagagacaggtgaccgctccaggttgggtgctcacagaacccttttcctgactctcatggaagatggtggaaggaaaatagactgtctcatcaaccctcctgtgtcctctgaagcaatctcagtttttattaaccacctcttctgtgtttctggtagctatttaacctgtatttaatctgtacttcctatgccagcctcaattttatttgatttttacaattattctcttctaaccaatgaagtgtttgtcagtatgccccaaagcttgctcttttgtgctcccttttgaataactttctatccagaaaaagagattatttgggacttgagatttgcagtgataccaacttatagcaatgatgtactttaagggaactacccaactatgttgtgatagaagaaagagaaaccttcactttggcatttttttttaatcactgtttatttttctgtttgcggcccaggaagcagtgggaggtggtggcagatatgctttgcatatggattgttatgtttttatttgggcaagtttaatcatggaaaactcaaaaagaaggggggaaatggtcagtttaagccaaaagaaactttctaaacaatgtataggtacacagcaaaattaaacaaatccaacaatttctgaagcttagtgtaattgagtggtggttgttattcaataaaattattcccaaaagtgtttctcctaagagtgcagttcccatgagtcacttcctgaacccattgaccaaaggtggacagagacaatcctgtagaccttgacattcagaaagatgtgagctgcttactgatcatatatgcatacgtttctttacagcagaggaaaccattgtccacaaaactgatgttcttttggggttttatgtacagacttgtccaatcatgtgtgtggttcctgcgagttgctgatgactccgcattgaagctctctgagttctttgattttaagttgggtttatggaattttttcaaatgttggaaggtgtgtggttcttcctgccctccctccccttttggaaatatgaaagcaaatgtttagaagaattccttttgaaaagctgtgtcgtgttccctgtgaaactgagcaggtgtgtgttggcgcgctaagtgccacatgcttgtgtgtagaggaggaggtggccctgccggctccgcgctgctgtgcctgtgatccctacctgctccccgctcctgttgccagcagcactcactgcactcctttgtcatatactctgcatcactgtcatactcacaacttcgtgaataaagttgtgtgctttattcgtagaaaaaaaaaaaa

SEQ ID NO: 881 - DNA, 6850 bp, Homo sapiens
gaggagaggaggcgtgagagagcgtgcctgcccgccgcacacggggctggtttccggagtgcgtctctagagggatgcacgttgccttagccgagcttcggagagaagcctgatatgtaacccaggcaggtgggagcctcagtctgtcgggctgaggtctggcatctacaaagcctcttggccgtgttctgaacttgaagcctggaggagttctctgctcagcacagccaaggaacagaattagaagaaaaggaaccctggcctgaggcaggtgacaaacattaccaccccagctgtgcacgatgcagcagatgcaaccagatgttcacagaaggagaggaaatgtatcttcaaggctccaccgtttggcatcccgactgtaagcaatctacgaagaccgaggaaaagctgcggctgccaaacattcggcgttcttcatccgatttcttttattccaaaagtctgattcgacgcacaggacggtctccgtctctgcagcctaccaggacatcctcggaaagtatttattctaggccaggctccagtattcctggctcaccaggtcatactatctatgcaaaagtagacaatgagatcctggattacaaggatttagcagccattccgaaggtcaaggcaatttatgacattgaacgtccagatcttattacctatgagcctttctacacttcgggctatgatgacaaacaggagagacagagccttggagagtctccgaggactttgtctcctactccatcagcagaagggtaccaggatgttcgggatcggatgatccatcggtccacgagccagggctccatcaactcccctgtgtacagccgccacagctacactccaaccacgtcccgctctccccagcatttccacagacctgatcaaggaatcaacatttaccgaaagccacccatctacaaacagcatgctgccttggcagcccagagcaagtcctcagaagatatcatcaagttttccaagttcccagcagcccaggcaccagaccccagcgagacaccaaagattgagacggaccactggcctggtcccccctcatttgctgtcgtaggacctgacatgaaacgcagatctagtggcagagaggaagatgatgaggaacttctgagacgtcggcagcttcaagaagagcaattaatgaagcttaactcaggcctgggacagttgatcttgaaagaagagatggagaaagagagccgggaaaggtcatctctgttagccagtcgctacgattctcccatcaactcagcttcacatattccatcatctaaaactgcatctctccctggctatggaagaaatgggcttcaccggcctgtttctaccgacttcgctcagtataacagctatggggatgtcagcgggggagtgcgagattaccagacactcccagatggccacatgcctgcaatgagaatggaccgaggagtgtctatgcccaacatgttggaaccaaagatatttccatatgaaatgctcatggtgaccaacagagggcgaaacaaaatcctcagagaggtggacagaaccaggctggagcgccacttagcccctgaagtgtttcgggaaatctttggaatgtccatacaggagtttgacaggttacctctttggagacgcaacgacatgaagaaaaaagcaaaactcttctaagtcccactcgtgaatggcaattagagaaaggactgacagtggcggtgccccataggatgtcatattgaggcccaaacttgattggagaatttgcaaactaccgtcgctcagcaacaccaaaaagagaaagtctggttaaaacaccatgagtcaaatgtcgggccagccaacagtaacacttgccaagaagcatggcgtagaaatttctatgttccgaaacacagagtagtgtccacatgtgagcttttcacattaccttatgtatacaacaggagctgcgttgttttcttctttttcttttcctttatctgttgtccaacaacagtgctgactgtccggataagagctggcaagtgcccttaggatgccgcatgggaaaaatcggttatcataatttcaaagtataaatatatttattaagtagcgctgcggctaagaaggaagagtgaggggtctgtccatggggtggcagtgatttcacacccgcctttcttgaatggcttcgtgttactcagccgtgccctggcaggaatggaactccatcagggaacagggcagctctgtttgaatggggtgaaaaacagcaaaattaattcttagcaagctccttgttctctactgttcaccgggacctggctggcaaatgacttagctattagtatatttaaaaactgttcaaaagcaaaagagaaggaacaggaatgaaaggaaaccttcccttaactctttctgcttcccatagcaggtctggttcctgctccccgcctaggacaggagctgtctggagctccacctttgcaaagaaaggaaaaacacaaattgcccccagattggcccagtggcatgccattaggtgattttgcataggggccatatcattcatggccaaaaaaaaccaaaaagcaaaaaacaaaaacaagtcccatgtcctactgactctagttcttccagtcgttatcctctgctgtctctctggcatcctatgaatcagatcaagcccatgctgttgttggtttttaaggtttctttcaataataggctaaggaaagacatgtttttctcttttaaatctctgcaactccaaagtagactccttcgaacgtatttaatttggccttttcagctttcttcttgcccagctctgtcgaattcatgggtgtgtgtgcacatgttggtttcactcacccagagtaattttgtgagcatgcatgtgctttttaatttctgcttgaatgtttgtcctgctgtgttgcagcttctaaagacattgtcaccgagtgtgtgtgactcaaagatcaagagtgaggctaaactgcgaccccaacatcacttccttcatggaaaggtgttggcgctgatgtagctcatggaaggatcagactgggaaccacagaggaaggatgaggtgggatgtggaggtcagagcatctcacgagagtccctcaggctctgcaacactagattcgaatatgagcctagggtttccccaacacgtgcgtgcatatgaaaccacatcatgattcccgacgtgagttagatgagggagagtttgtgtaactccacacccaggagggtaagccactttattatcatgctttggggctgtgcttaagaatttaagctctgttttaaagccgaagaagaaaacatttgaatttaccttcatatgccactaagaacaaaagctctgaagttcttcctgctggcaccaaatattaggattacaagctgtctctctgacaccagtggtaaaaaagcaagtagaatagtttctgagtctgtgttgcagcctctgacacgtggctcaccgctgtcatttgggggatggaatgaacagtcactgttctatagcatcctcctgtgctcttacctaaggaatctaaattgtcctagccttccattgctatgcactgaatgaggactactctcgtgtgtgtgtgtgtgtgtgtgtgtgtgtgtgtgtgtgtgtgtgtgtgtgttggatctactaacatgtttagcaaatggctctgacagggtggccatgagcagatgagaccagctcttgcttggttggaagccacactgcagtttgcagtttagcctttggtgtctcagtggcttcttgcttattccatgctttttctatcccatcctctctctgtgccctcctgcaatggcagccttggcacaatgcctgggtgtcctcatccttgctttactctggaaagtgtggggatggagaggatggtgcatttccagtgcttccttacctgtcaataacaatggtggccacctgggtcccagcacttggctggtggagagatttttttcattatggagctaataaagggtccctacgttttacattgattaatgaattatcacccagacatgtgcagatgaaatgtcaatataagaaaaatcaaggtatttgggaaacatgggcataatcaggtagttttgctaaaattcctcttccttggtctacataaagaagacatgggtctgtcatagaatggggacattagactgaaaactgggacaacccccttccttattttatagagactaggagttaaggggcctgcctaagattgcagtgataaagaactgaaccctaaatcagctcccactaatgaaaccctgctttccttgtatcttttaaactcagttctgcatccaacttgagaagaaaaaaagcttctttccatatcaagtaccatatgagttcatttaaactgcaccttgcagaaatgcattgccagaaagcaccagtagcctcctatctgcaagcagagtagtgctctgctctggggaggggtcattggaaaccataatgcagagtgggccccctactccatttcccagcaaaaggctccagctggagggatgggttgtggggcaacctggttcctgctaactgccagattgaatgtgtgggctagaatgcctgcacatttagttaaactgggctcagcatgcttgtcctcaaaatgtccatcctggtcacagcacacaagatggctattggtctgcttttaccctaccctgtactatacatgaaaattccagttattaacacactcaaactggtggagcttgttcaccctaggaaggggattgtatatatggcaggcttccctggtgccgatgtaaagggctacatttgggaacatttgacttccttgggactcttaagtgcataatgatggcatgaagtaaaaggggcctcaatgatgataggaaaatcagttcttttaaaatttcttcaagaaaatccaggctatcacatagtctttctgtgtgacttattaggagataggaagagcattgggaaacttgcacagctagctatgcatctacattttggtttggggttagttatgaaatgttcttaatatgacgtgttcaataacttcacataaacttcctgttctccaaaacctcaaagagatagagttaatgagttgttgtttttttttaaatgggggtagttttctatctgtcatgggctctagcatctactccgctacccaattctgtcatctccaagctgagtttcctcttctgaggcagaggctggagcagttctttttcagttctcatcctctccatcccaatccagtatatcaatcaactctaactcggagacgtctagctggcaatgtttctaaaactttcactggatttctttagacattgaagcaaacatttttttctaagaattgcttctcagatgatgatatcaaatgtatatgcttttgcaagtttgaaaagttcaaattaaccacttttgactaggtaagtctttctaaaaaccatttaaagctaactgggtcttagcatcctcctgtgtatggaagagacaggtgaccgctccaggttgggtgctcacagaacccttttcctgactctcatggaagatggtggaaggaaaatagactgtctcatcaaccctcctgtgtcctctgaagcaatctcagtttttattaaccacctcttctgtgtttctggtagctatttaacctgtatttaatctgtacttcctatgccagcctcaattttatttgatttttacaattattctcttctaaccaatgaagtgtttgtcagtatgccccaaagcttgctcttttgtgctcccttttgaataactttctatccagaaaaagagattatttgggacttgagatttgcagtgataccaacttatagcaatgatgtactttaagggaactacccaactatgttgtgatagaagaaagagaaaccttcactttggcatttttttttaatcactgtttatttttctgtttgcggcccaggaagcagtgggaggtggtggcagatatgctttgcatatggattgttatgtttttatttgggcaagtttaatcatggaaaactcaaaaagaaggggggaaatggtcagtttaagccaaaagaaactttctaaacaatgtataggtacacagcaaaattaaacaaatccaacaatttctgaagcttagtgtaattgagtggtggttgttattcaataaaattattcccaaaagtgtttctcctaagagtgcagttcccatgagtcacttcctgaacccattgaccaaaggtggacagagacaatcctgtagaccttgacattcagaaagatgtgagctgcttactgatcatatatgcatacgtttctttacagcagaggaaaccattgtccacaaaactgatgttcttttggggttttatgtacagacttgtccaatcatgtgtgtggttcctgcgagttgctgatgactccgcattgaagctctctgagttctttgattttaagttgggtttatggaattttttcaaatgttggaaggtgtgtggttcttcctgccctccctccccttttggaaatatgaaagcaaatgtttagaagaattccttttgaaaagctgtgtcgtgttccctgtgaaactgagcaggtgtgtgttggcgcgctaagtgccacatgcttgtgtgtagaggaggaggtggccctgccggctccgcgctgctgtgcctgtgatccctacctgctccccgctcctgttgccagcagcactcactgcactcctttgtcatatactctgcatcactgtcatactcacaacttcgtgaataaagttgtgtgctttattcgtagaaaaaaaaaaaa

SEQ ID NO: 882 - DNA, 5173 bp, Homo sapiens
tgcggctccaggaaacggcgcgctcccagctccgcgctcgccacccgacgcgccccaggcgaccccgcagactcagccagaccaccctgcgggccccagcggcggcagcggagagcgcggtcccgggtcggagcctgggacacctccgcacggacggggcgggcggcgcggacaggccatggggacccgggccgggccagcggtggcgggccagcgggagccccgggcctgagaagtgggcggcggggtggcgggggccatgacctcggtgtggaagcgcctgcagcgcgtgggcaagcgggcggccaagttccagttcgtggcctgttaccacgagctagtgttggagtgcaccaagaaatggcagccagataagctggtggtggtatggacccgtcggaaccgacgcatctgctccaaggcccacagctggcagccgggcatccagaacccataccggggcaccgtggtgtggatggtacctgagaatgtggacatctctgtgaccctctacagggacccccacgtggaccagtatgaggccaaagagtggacatttattattgaaaatgagtctaaggggcagcggaaggtgctggccacggccgaggtggacctggcccgccatgcagggcccgtgcctgtccaagtcccagtgaggctgcggctgaagccaaagtcagtgaaggtggtgcaggctgagctgagcctcactctttccggggtgctgctgcgggagggccgtgccacggacgatgacatgcagagtctcgcaagcctcatgagtgtgaagcctagtgatgtgggcaacttggatgactttgctgagagtgatgaagatgaggctcatggcccaggagccccggaggcccgggctcgagtcccccagccagatccctctcgagagctgaagacgctttgtgaggaggaggaggaaggccaaggacgaccccagcaggcagttgccagcccttctaatgctgaggataccagcccagcccctgtgagtgctcctgcacccccagccagaacctcccgaggccaggggtcagaacgagctaatgaagcggggggccaggtaggccctgaggccccaaggcccccggaaacctcaccagagatgaggtcttcaaggcagccagcccaggacacggcccccaccccagcccctcggctccggaaaggctctgatgccctccggcccccagtcccccagggggaagatgaggtccccaaagcctcaggggctcctccagcaggattgggctctgctagggagacccaggcccaggcatgccctcaggaagggacagaagcccatggagctaggctgggcccgagcattgaggataaaggttctggagacccttttggaaggcagagactcaaggctgaagagatggacactgaggacaggccagaggccagtggggtggacactgagccaaggtcaggaggcagagaggcaaacactaagaggtcaggagtcagagctggggaggctgaagagagttcagcagtttgtcaagtggatgctgagcagaggtcaaaggtgagacatgtggacactaagggaccagaggcgacaggggtgatgcctgaggcaagatgcagggggacccctgaggctcctccaaggggctctcaggggaggctgggagtcaggaccagggatgaggctccctcaggcctgagcctgcccccagcggagcctgcagggcactctgggcaacttggtgacctcgagggggccagggctgctgcaggccaggagagagagggtgcagaagtgaggggtggagcacctggtattgaggggacaggcctggagcagggcccttctgttggagcaataagcaccaggccccaggtgagcagctggcagggggccctgttatcaactgcccagggggcaatatccaggggtctgggaggctgggaggcagaagctgggggttcaggggacctggaaacagagactgaggtggtagggttggaggtgctgggaacccaggagaaagaagttgaggggtcagggttcccagagactaggacactagaaattgagatattgggggccttggagaaagaagcagcaagatcaagggtcctggagtcagaggttgctgggacagcacagtgtgagggactggagacccaggaaacagaggtgggggtcatagagaccccagggacagagactgaggtattggggacccagaaaacagaagctgggggttcaggagttttgcagacaagaactacgatagcagagactgaggtactggtgacccaggagatatctggggatttagggccactgaagatagaagatacaatacagtctgagatgctggggacccaggagacagaggtggaagcttctagggtaccagagtcagaggctgaggggacagaagctaaaatattagggacccaggagataacagctagggattcaggggtcagagagatagaagcagagatagcagagtctgacatattggtagcccaggagatagaggtgggacttttgggggttctgggaatagagactggggcagcagaaggtgcgatattggggacccaagagatagcatctagggattcaggggtcccagggttagaagctgatacaacagggatccaggtgaaagaggttgggggttcagaggttccagagatagcgactgggacagcagaaactgagatattggggacccaagagatagcatctaggagttcaggggtcccagggctagaatctgaggtagctggggcccaggagacagaggtcgggggttcagggatctcagggcccgaggctggaatggcagaggcccgagtactgatgacccgtaagacagaaattatagttccagaggctgagaaggaagaggctcagacttcgggggtccaggaagcagagactagagttgggagtgctctcaaatatgaggctttaagggccccagtcactcagccaagagttttaggatcccaggaagcaaaagcagagatttcaggagtacaagggtcagagactcaagttctgagagtccaggaggcagaggctggggtttgggggatgtcagagggcaaatctggggcttggggggcccaggaagcagagatgaaggttttagagtctccagagaacaaatctggtacttttaaggcccaggaagcggaggctggggtcttgggaaatgagaaggggaaagaagctgagggaagcctcacagaggccagcctgcctgaagcacaggtggccagtggggcaggggctggggcgcccagggcctcttccccagagaaggctgaagaggacaggaggctgccgggcagccaggcaccacctgccctggtcagctccagccagtccctgctggagtggtgccaggaagtcaccactggctaccgtggcgtccgcatcaccaacttcaccacatcctggcgcaacggcttggccttctgtgccatcctgcaccgattctacccagacaagattgactatgcctcgctagacccactcaacatcaagcagaacaacaagcaggccttcgatggcttcgcggctctgggcgtgtcgcggctgctggagcccgcggacatggtgctactgtcggtgcccgacaagctcatcgtcatgacgtacctgtgccagatccgcgccttctgcaccgggcaggagctgcagctggtacaactggagggcggcggcggcgccggcacgtaccgcgtgggcagcgcccagcccagcccgcccgacgacctggacgccggaggcctggcgcagcggctgcgcggtcacggggccgaggggccccaggagcccaaggaggccgcagaccgcgcagacggggcggccccgggggtggcctccaggaacgcggtcgcgggccgcgcctccaaggacggcggggccgaggccccccgagagtcgcgacccgcggaggtcccggccgaggggctggtgaacggggcgggggcaccgggcggcggcggcgtgaggctgcgacggccctcggtcaacggggagcccgggtcggtgcccccgccccgcgcgcacggctccttctcccacgtgcgcgacgcggacctgctcaagaagaggcgctcgcggctgcggaacagcagctcgttctcgatggacgatccggacgcgggagccatgggagctgcggctgcagaaggccaggcccctgaccccagccctgccccaggcccacccacagctgcagactctcaacagccccctggtgggagttccccctcggaggaaccacccccaagcccaggggaggaggctgggctgcaacggttccaggacacaagtcagtacgtgtgtgcagagctgcaggccctggaacaggagcagaggcagatagatgggcgggcggctgaggtggagatgcagctgaggagcctcatggagtcaggtgccaacaagctgcaggaggaggtgctgatccaggagtggttcaccctggtcaacaagaagaacgctctcatccggaggcaggaccagctgcagctgctcatggaggagcaggacttggagcgaaggttcgagctgctgagccgcgagctgcgggccatgctggccatcgaagactggcagaaaacgtccgctcagcagcaccgagagcagctcctactggaggagctggtgtcgctggtgaaccagcgcgatgagctagtccgggacctggaccacaaggagcggatcgccctggaggaggacgagcgcctggagcgcggcctggaacagcggcgccgcaagctgagccggcagttgagccggcgggagcgctgcgtgctgagctgaggccgccggcccgggtggcccataacttctcgcgtccccggcgtccgccgccgccccgggcctgcgctgcggacgacccggccgtcccggaggccgcgcgcgtgtccgctaggggccgccggcgcccttccccgtacagggcagggcggatccccgaccccacgggcggggcggccgccgtatttatttgtcaccgagggtgtgtgcgcgctcgcggcgggtgcggggtcctccccgacggcacggccgggccggcggcctcggggagagggatgcctgggcactaccgccccgcgctggcttgccctcctgttctccagagcaataaagttggacgagact

SEQ ID NO: 883 - DNA, 614 bp, Homo sapiens
aggaaacggcgcgctcccagctccgcgctcgccacccgacgcgccccaggcgaccccgcagactcagccagaccaccctgcgggccccagcggcggcagcggagagcgcggtcccgggtcggagcctgggacacctccgcacggacggggcgggcggcgcggacaggccatggggacccgggccgggccagcggtggcgggccagcgggagccccgggcctgagaagtgggcggcggggtggcgggggccatgacctcggtgtggaagcgcctgcagcgcgtgggcaagcgggcggccaagttccagttcgtggcctgttaccacgagctagtgttggagtgcaccaagaaatggcagccagataagctggtggtggtatggacccgtcggaaccgacgcatctgctccaaggcccacagctggcagccgggcatccagaacccataccggggcaccgtggtgtggatggtacctgagaatgtggacatctctgtgaccctctacagggtgagtctctagccctccagcatggatggcaattgcaacacaggcagttgcaacaattgcaacacaggtctcctggtaggttgttcatccagatagaagaggatgc

SEQ ID NO: 884 - DNA, 1986 bp, Homo sapiens
acaggtgggagtggacacgggcaggtcaaccactgtccctgccccatgaccccgacacaggtcagatgacccagatgtggggggccagggcaggagcagttgaggggccaggctatcagctgagtcgaaagttggggacccccagggctgacagtcccaacaagtcactaggggcgggcaggtacatggggtcagccctgcccttccaagctaaaattcaaagatccagccagcctggcttgtcctgtgtgtgtgagcatgcagcagccgctcctgggtgtgggaactgaaaaggcagcagggcacccccttttggccaggaggtggaggtgctggctcaggagggtccaggtctggggagccctgaggacagaaggggagggagcctggtggggcctctgcaggaggcagggctgggctgggtcacacggatggggccatgtggggcagtgcaatggtcactgcatggggccctggccatgacggagaagccagcactaggtgacagaagtcagaggtggcctgagggaattccatggaagaggagtcgaggccgggcgtggtggctcacacctgtaatcccagcactttgggaggccaaagtgagcagatcacctgaggtcaggagttcgagaccagcctggccaacatggtgaaaccccgtctctactaaaaatacaaaaattagctgggcgtgatggcgggtggctacttgggaggctgaggcaggagaatcacctgaaccaggaggtggaggttgcagtgagccatgatcctgccactgcactccagccagggcgacagagcgaatctccatctcaaaaaaagagagtagggaggaaaggcctgggctgggcccttcacaggctctcatcctgtgaggccggagctcagcccagccccaggaggggaattgggaggctcggagcctgggtgtggatgggcccagggccacagggccaggaaggatgaaggctgtggcctttgcttgaggaggcatttctcttggaaggaggtgggcccgggggttctgtgcatgcaggactagaggaggggcaggggcgggcaggagctggggtcaaggacccctcctcccctctgtatgagtggctctggctggccccaggcccaggctggtgggaaacccctcccagccctcactggccccttcttccacaggaaggccaggcccctgaccccagccctgccccaggcccacccacagctgcagactctcaacagccccctggtgggagttccccctcggaggaaccacccccaagcccaggggaggaggctgggctgcaacggttccaggacacaagtcagtacgtgtgtgcagagctgcaggccctggaacaggagcagaggcagatagatgggcgggcggctgaggtggagatgcagctgaggagcctcatggagtcaggtgccaacaagctgcaggaggaggtgctgatccaggagtggttcaccctggtcaacaagaagaacgctctcatccggaggcaggaccagctgcagctgctgtgagtgctggccccgggccaggagagcagagggactcttagctactttggttagagttcttcactactttcttattcctacagagatctttttgacaaacgattcctcttccatcttactgtttttgtcctaaacaaattgctgtttaaagtgtaaaactggccaggcacggtgtctcatgcctgtaatcccagcacctggggaggccgaggcaggcggatcatctgaggtcaggagttcaagaccagccaacatggtgaaaccccatctctactaaaaatacaaaaattagccaagtatggtggcacgcgcctgtaatcccagcaacttggaaggctgaggcaggagaatcgcttgaacctgggaggcagaggttgcagtgagccaagatcagaccactaccgccccgcgctggcttgccctcctgttctccagagcaataaagttggacgagac

SEQ ID NO: 885 - DNA, 586 bp, Homo sapiens
gctgaggtggagatgcagctgaggagcctcatggagtcaggtgccaacaagctgcaggaggaggtgctgatccaggagtggttcaccctggtcaacaagaagaacgctctcatccggaggcaggaccagctgcagctgctgtgagtgctggccccgggccaggagagcagagggactcttagctactttggttagagttcttcactactttcttattcctacagagatctttttgacaaacgattcctcttccatcttactgtttttgtcctaaacaaattgctgtttaaagtgtaaaactggccaggcacggtgtctcatgcctgtaatcccagcacctggggaggccgaggcaggcggatcatctgaggtcaggagttcaagaccagccaacatggtgaaaccccatctctactaaaaatacaaaaattagccaagtatggtggcacgcgcctgtaatcccagcaacttggaaggctgaggcaggagaatcgcttgaacctgggaggcagaggttgcagtgagccaagatcagaccattacactctagtctgggcaaaagagtgagactctgtctcaaaaaata

SEQ ID NO: 886 - DNA, 1237 bp, Homo sapiens
ctaacacagtgaaaccccgtctctactaaaaatacaaaacattagccaggcctggtggcgggcgcctgtagttccagcttctgggaaggctgaggcaggagaatcgcttgaaccctcctggggttgagagattgcagtgagccgagatcgtgccactgcactccagcctttacagtaaggaaaacagaagcccagagagatctgatctggttcccatgtggggtccgaagccactctgcggccattgcctttgtcatcctgcagggtggagacagctttgcctcccttttgcgtttgggatttttcagaataactgtagccagtgcttcctgtttatgagtactgttcatccaaataatccttcgggggtccttctggggggtgtgtgggaggagcaacacaaacacccagcaattggagaaaacagaagaaaagcgataatgtggtctggagactagaggatagctctgcggtcagccctgccctcgggaactgctggggaggtgggatggggtcagggagtggccagagccctgggcactctctccctacgccccttttcctgaactgccacccccccgccacccaccccccgccaccttccagcatggaggagcaggacttggagcgaaggttcgagctgctgagccgcgagctgcgggccatgctggccatcgaagactggcagaaaacgtccgctcagcagcaccgagagcagctcctactggaggagctggtgtcgctggtgaaccagcgcgatgagctagtccgggacctggaccacaaggagcggatcgccctggaggaggacgagcgcctggagcgcggcctggaacagcggcgccgcaagctgagccggcagttgagccggcgggagcgctgcgtgctgagctgaggccgccggcccgggtggcccataacttctcgcgtccccggcgtccgccgccgccccgggcctgcgctgcggacgacccggccgtcccggaggccgcgcgcgtgtccgctaggggccgccggcgcccttccccgtacagggcagggcggatccccgaccccacgggcggggcggccgccgtatttatttgtcaccgagggtgtgtgcgcgctcgcggcgggtgcggggtcctccccgacggcacggccgggccggcggcctcggggagagggatgcctgggcactaccgccccgcgctggcttgccctcctgttctccagagcaataaagttggacgagact

SEQ ID NO: 887 - DNA, 2011 bp, Homo sapiens
ggggggccaggtaggccctgaggccccaaggcccccggaaacctcaccagagatgaggtcttcaaggcagccagcccaggacacggcccccaccccagcccctcggctccggaaaggctctgatgccctccggcccccagtcccccagggggaagatgaggtccccaaagcctcaggggctcctccagcaggattgggctctgctagggagacccaggcccaggcatgccctcaggaagggacagaagcccatggagctaggctgggcccgagcattgaggataaaggttctggagacccttttggaaggcagagactcaaggctgaagagatggacactgaggacaggccagaggccagtggggtggacactgagccaaggtcaggaggcagagaggcaaacactaagaggtcaggagtcagagctggggaggctgaagagagttcagcagtttgtcaagtggatgctgagcagaggtcaaaggcaccacctgccctggtcagctccagccagtccctgctggagtggtgccaggaagtcaccactggctaccgtggcgtccgcatcaccaacttcaccacatcctggcgcaacggcttggccttctgtgccatcctgcaccgattctacccagacaagattgactatgcctcgctagacccactcaacatcaagcagaacaacaagcaggccttcgatggcttcgcggctctgggcgtgtcgcggctgctggagcccgcggacatggtgctactgtcggtgcccgacaagctcatcgtcatgacgtacctgtgccagatccgcgccttctgcaccgggcaggagctgcagctggtacaactggagggcggcggcggcgccggcacgtaccgcgtgggcagcgcccagcccagcccgccccgcgcgcacggctccttctcccacgtgcgcgacgcggacctgctcaagaagaggcgctcgcggctgcggaacagcagctcgttctcgatggacgatccggacgcgggagccatgggagctgcggctgcagaaggccaggcccctgaccccagccctgccccaggcccacccacagctgcagactctcaacagccccctggtgggagttccccctcggaggaaccacccccaagcccaggggaggaggctgggctgcaacggttccaggacacaagtcagtacgtgtgtgcagagctgcaggccctggaacaggagcagaggcagatagatgggcgggcggctgaggtggagatgcagctgaggagcctcatggagtcaggtgccaacaagctgcaggaggaggtgctgatccaggagtggttcaccctggtcaacaagaagaacgctctcatccggaggcaggaccagctgcagctgctcatggaggagcaggacttggagcgaaggttcgagctgctgagccgcgagctgcgggccatgctggccatcgaagactggcagaaaacgtccgctcagcagcaccgagagcagctcctactggaggagctggtgtcgctggtgaaccagcgcgatgagctagtccgggacctggaccacaaggagcggatcgccctggaggaggacgagcgcctggagcgcggcctggaacagcggcgccgcaagctgagccggcagttgagccggcgggagcgctgcgtgctgagctgaggccgccggcccgggtggcccataacttctcgcgtccccggcgtccgccgccgccccgggcctgcgctgcggacgacccggccgtcccggaggccgcgcgcgtgtccgctaggggccgccggcgcccttccccgtacagggcagggcggatccccgaccccacgggcggggcggccgccgtatttatttgtcaccgagggtgtgtgcgcgctcgcggcgggtgcggggtcctccccgacggcacggccgggccggcggcctcggggagagggatgcctgggcactaccgccccgcgctggcttgccctcctgttctccagagcaataaagttggacgagact

SEQ ID NO: 888 - DNA, 2305 bp, Homo sapiens
ggggggccaggtaggccctgaggccccaaggcccccggaaacctcaccagagatgaggtcttcaaggcagccagcccaggacacggcccccaccccagcccctcggctccggaaaggctctgatgccctccggcccccagtcccccagggggaagatgaggtccccaaagcctcaggggctcctccagcaggattgggctctgctagggagacccaggcccaggcatgccctcaggaagggacagaagcccatggagctaggctgggcccgagcattgaggataaaggttctggagacccttttggaaggcagagactcaaggctgaagagatggacactgaggacaggccagaggccagtggggtggacactgagccaaggtcaggaggcagagaggcaaacactaagaggtcaggagtcagagctggggaggctgaagagagttcagcagtttgtcaagtggatgctgagcagaggtcaaaggcaccacctgccctggtcagctccagccagtccctgctggagtggtgccaggaagtcaccactggctaccgtggcgtccgcatcaccaacttcaccacatcctggcgcaacggcttggccttctgtgccatcctgcaccgattctacccagacaagattgactatgcctcgctagacccactcaacatcaagcagaacaacaagcaggccttcgatggcttcgcggctctgggcgtgtcgcggctgctggagcccgcggacatggtgctactgtcggtgcccgacaagctcatcgtcatgacgtacctgtgccagatccgcgccttctgcaccgggcaggagctgcagctggtacaactggagggcggcggcggcgccggcacgtaccgcgtgggcagcgcccagcccagcccgcccgacgacctggacgccggaggcctggcgcagcggctgcgcggtcacggggccgaggggccccaggagcccaaggaggccgcagaccgcgcagacggggcggccccgggggtggcctccaggaacgcggtcgcgggccgcgcctccaaggacggcggggccgaggccccccgagagtcgcgacccgcggaggtcccggccgaggggctggtgaacggggcgggggcaccgggcggcggcggcgtgaggctgcgacggccctcggtcaacggggagcccgggtcggtgcccccgccccgcgcgcacggctccttctcccacgtgcgcgacgcggacctgctcaagaagaggcgctcgcggctgcggaacagcagctcgttctcgatggacgatccggacgcgggagccatgggagctgcggctgcagaaggccaggcccctgaccccagccctgccccaggcccacccacagctgcagactctcaacagccccctggtgggagttccccctcggaggaaccacccccaagcccaggggaggaggctgggctgcaacggttccaggacacaagtcagtacgtgtgtgcagagctgcaggccctggaacaggagcagaggcagatagatgggcgggcggctgaggtggagatgcagctgaggagcctcatggagtcaggtgccaacaagctgcaggaggaggtgctgatccaggagtggttcaccctggtcaacaagaagaacgctctcatccggaggcaggaccagctgcagctgctcatggaggagcaggacttggagcgaaggttcgagctgctgagccgcgagctgcgggccatgctggccatcgaagactggcagaaaacgtccgctcagcagcaccgagagcagctcctactggaggagctggtgtcgctggtgaaccagcgcgatgagctagtccgggacctggaccacaaggagcggatcgccctggaggaggacgagcgcctggagcgcggcctggaacagcggcgccgcaagctgagccggcagttgagccggcgggagcgctgcgtgctgagctgaggccgccggcccgggtggcccataacttctcgcgtccccggcgtccgccgccgccccgggcctgcgctgcggacgacccggccgtcccggaggccgcgcgcgtgtccgctaggggccgccggcgcccttccccgtacagggcagggcggatccccgaccccacgggcggggcggccgccgtatttatttgtcaccgagggtgtgtgcgcgctcgcggcgggtgcggggtcctccccgacggcacggccgggccggcggcctcggggagagggatgcctgggcactaccgccccgcgctggcttgccctcctgttctccagagcaataaagttggacgagact

SEQ ID NO: 889 - DNA, 2903 bp, Homo sapiens
ccacggccgaggtactggtgacccaggagatatctggggatttagggccactgaagatagaagatacaatacagtctgagatgctggggacccaggagacagaggtggaagcttctagggtaccagagtcagaggctgaggggacagaagctaaaatattagggacccaggagataacagctagggattcaggggtcagagagatagaagcagagatagcagagtctgacatattggtagcccaggagatagaggtgggacttttgggggttctgggaatagagactggggcagcagaaggtgcgatattggggacccaagagatagcatctagggattcaggggtcccagggttagaagctgatacaacagggatccaggtgaaagaggttgggggttcagaggttccagagatagcgactgggacagcagaaactgagatattggggacccaagagatagcatctaggagttcaggggtcccagggctagaatctgaggtagctggggcccaggagacagaggtcgggggttcagggatctcagggcccgaggctggaatggcagaggcccgagtactgatgacccgtaagacagaaattatagttccagaggctgagaaggaagaggctcagacttcgggggtccaggaagcagagactagagttgggagtgctctcaaatatgaggctttaagggccccagtcactcagccaagagttttaggatcccaggaagcaaaagcagagatttcaggagtacaagggtcagagactcaagttctgagagtccaggaggcagaggctggggtttgggggatgtcagagggcaaatctggggcttggggggcccaggaagcagagatgaaggttttagagtctccagagaacaaatctggtacttttaaggcccaggaagcggaggctggggtcttgggaaatgagaaggggaaagaagctgagggaagcctcacagaggccagcctgcctgaagcacaggtggccagtggggcaggggctggggcgcccagggcctcttccccagagaaggctgaagaggacaggaggctgccgggcagccaggcaccacctgccctggtcagctccagccagtccctgctggagtggtgccaggaagtcaccactggctaccgtggcgtccgcatcaccaacttcaccacatcctggcgcaacggcttggccttctgtgccatcctgcaccgattctacccagacaagattgactatgcctcgctagacccactcaacatcaagcagaacaacaagcaggccttcgatggcttcgcggctctgggcgtgtcgcggctgctggagcccgcggacatggtgctactgtcggtgcccgacaagctcatcgtcatgacgtacctgtgccagatccgcgccttctgcaccgggcaggagctgcagctggtacaactggagggcggcggcggcgccggcacgtaccgcgtgggcagcgcccagcccagcccgcccgacgacctggacgccggaggcctggcgcagcggctgcgcggtcacggggccgaggggccccaggagcccaaggaggccgcagaccgcgcagacggggcggccccgggggtggcctccaggaacgcggtcgcgggccgcgcctccaaggacggcggggccgaggccccccgagagtcgcgacccgcggaggtcccggccgaggggctggtgaacggggcgggggcaccgggcggcggcggcgtgaggctgcgacggccctcggtcaacggggagcccgggtcggtgcccccgccccgcgcgcacggctccttctcccacgtgcgcgacgcggacctgctcaagaagaggcgctcgcggctgcggaacagcagctcgttctcgatggacgatccggacgcgggagccatgggagctgcggctgcagaaggccaggcccctgaccccagccctgccccaggcccacccacagctgcagactctcaacagccccctggtgggagttccccctcggaggaaccacccccaagcccaggggaggaggctgggctgcaacggttccaggacacaagtcagtacgtgtgtgcagagctgcaggccctggaacaggagcagaggcagatagatgggcgggcggctgaggtggagatgcagctgaggagcctcatggagtcaggtgccaacaagctgcaggaggaggtgctgatccaggagtggttcaccctggtcaacaagaagaacgctctcatccggaggcaggaccagctgcagctgctcatggaggagcaggacttggagcgaaggttcgagctgctgagccgcgagctgcgggccatgctggccatcgaagactggcagaaaacgtccgctcagcagcaccgagagcagctcctactggaggagctggtgtcgctggtgaaccagcgcgatgagctagtccgggacctggaccacaaggagcggatcgccctggaggaggacgagcgcctggagcgcggcctggaacagcggcgccgcaagctgagccggcagttgagccggcgggagcgctgcgtgctgagctgaggccgccggcccgggtggcccataacttctcgcgtccccggcgtccgccgccgccccgggcctgcgctgcggacgacccggccgtcccggaggccgcgcgcgtgtccgctaggggccgccggcgcccttccccgtacagggcagggcggatccccgaccccacgggcggggcggccgccgtatttatttgtcaccgagggtgtgtgcgcgctcgcggcgggtgcggggtcctccccgacggcacggccgggccggcggcctcggggagagggatgcctgggcactaccgccccgcgctggcttgccctcctgttctccagagcaataaagttggacgagact

SEQ ID NO: 890 - DNA, 5173 bp, Homo sapiens
  misc_feature 3974, 3975, 3976, 3977, 3978, 3979, 3980, 3981, 3982, 3983,3984, 3985, 3986, 3987, 3988, 3989, 3990, 3991, 3992, 3993,3994, 3995, 3996, 3997, 3998, 3999, 4000, 4001, 4002, 4003,4004, 4005, 4006, 4007, 4008, 4009, 4010, 4011, 4012: n = A,T,C or G
  misc_feature 4013, 4014, 4015, 4016, 4017, 4018: n = A,T,C or G
tgcggctccaggaaacggcgcgctcccagctccgcgctcgccacccgacgcgccccaggcgaccccgcagactcagccagaccaccctgcgggccccagcggcggcagcggagagcgcggtcccgggtcggagcctgggacacctccgcacggacggggcgggcggcgcggacaggccatggggacccgggccgggccagcggtggcgggccagcgggagccccgggcctgagaagtgggcggcggggtggcgggggccatgacctcggtgtggaagcgcctgcagcgcgtgggcaagcgggcggccaagttccagttcgtggcctgttaccacgagctagtgttggagtgcaccaagaaatggcagccagataagctggtggtggtatggacccgtcggaaccgacgcatctgctccaaggcccacagctggcagccgggcatccagaacccataccggggcaccgtggtgtggatggtacctgagaatgtggacatctctgtgaccctctacagggacccccacgtggaccagtatgaggccaaagagtggacatttattattgaaaatgagtctaaggggcagcggaaggtgctggccacggccgaggtggacctggcccgccatgcagggcccgtgcctgtccaagtcccactgaggctgcggctgaagccaaagtcagtgaaggtggtgcaggctgagctgagcctcactctttccggggtgctgctgcgggagggccgtgccacggacgatgacatgcagagtctcgcaagcctcatgagtgtgaagcctagtgatgtgggcaacttggatgactttgctgagagtgatgaagatgaggctcatggcccaggagccccggaggcccgggctcgagtcccccagccagatccctctcgagagctgaagacgctttgtgaggaggaggaggaaggccaaggacgaccccagcaggcagttgccagcccttctaatgctgaggataccagcccagcccctgtgagtgctcctgcacccccagccagaacctcccgaggccaggggtcagaacgagctaatgaagcggggggccaggtaggccctgaggccccaaggcccccggaaacctcaccagagatgaggtcttcaaggcagccagcccaggacacggcccccaccccagcccctcggctccggaaaggctctgatgccctccggcccccagtcccccagggggaagatgaggtccccaaagcctcaggggctcctccagcaggattgggctctgctagggagacccaggcccaggcatgccctcaggaagggacagaagcccatggagctaggctgggcccgagcattgaggataaaggttctggagacccttttggaaggcagagactcaaggctgaagagatggacactgaggacaggccagaggccagtggggtggacactgagccaaggtcaggaggcagagaggcaaacactaagaggtcaggagtcagagctggggaggctgaagagagttcagcagtttgtcaagtggatgctgagcagaggtcaaaggtgagacatgtggacactaagggaccagaggcgacaggggtgatgcctgaggcaagatgcagggggacccctgaggctcctccaaggggctctcaggggaggctgggagtcaggaccagggatgaggctccctcaggcctgagcctgcccccagcggagcctgcagggcactctgggcaacttggtgacctcgagggggccagggctgctgcaggccaggagagagagggtgcagaagtgaggggtggagcacctggtattgaggggacaggcctggagcagggcccttctgttggagcaataagcaccaggccccaggtgagcagctggcagggggccctgttatcaactgcccagggggcaatatccaggggtctgggaggctgggaggcagaagctgggggttcaggggtcctggaaacagagactgaggtggtagggttggaggtgctgggaacccaggagaaagaagttgaggggtcagggttcccagagactaggacactagaaattgagatattgggggccttggagaaagaagcagcaagatcaagggtcctggagtcagaggttgctgggacagcacagtgtgagggactggagacccaggaaacagaggtgggggtcatagagaccccagggacagagactgaggtattggggacccagaaaacagaagctgggggttcaggagttttgcagacaagaactacgatagcagagactgaggtactggtgacccaggagatatctggggatttagggccactgaagatagaagatacaatacagtctgagatgctggggacccaggagacagaggtggaagcttctagggtaccagagtcagaggctgaggggacagaagctaaaatattagggacccaggagataacagctagggattcaggggtcagagagatagaagcagagatagcagagtctgacatattggtagcccaggagatagaggtgggacttttgggggttctgggaatagagactggggcagcagaaggtgcgatattggggacccaagagatagcatctagggattcaggggtcccagggttagaagctgatacaacagggatccaggtgaaagaggttgggggttcagaggttccagagatagcgactgggacagcagaaactgagatattggggacccaagagatagcatctaggagttcaggggtcccagggctagaatctgaggtagctggggcccaggagacagaggtcgggggttcagggatctcagggcccgaggctggaatggcagaggcccgagtactgatgacccgtaagacagaaattatagttccagaggctgagaaggaagaggctcagacttcgggggtccaggaagcagagactagagttgggagtgctctcaaatatgaggctttaagggccccagtcactcagccaagagttttaggatcccaggaagcaaaagcagagatttcaggagtacaagggtcagagactcaagttctgagagtccaggaggcagaggctggggtttgggggatgtcagagggcaaatctggggcttggggggcccaggaagcagagatgaaggttttagagtctccagagaacaaatctggtacttttaaggcccaggaagcggaggctggggtcttgggaaatgagaaggggaaagaagctgagggaagcctcacagaggccagcctgcctgaagcacaggtggccagtggggcaggggctggggcgcccagggcctcttccccagagaaggctgaagaggacaggaggctgccgggcagccaggcaccacctgccctggtcagctccagccagtccctgctggagtggtgccaggaagtcaccactggctaccgtggcgtccgcatcaccaacttcaccacatcctggcgcaacggcttggccttctgtgccatcctgcaccgattctacccagacaagattgactatgcctcgctagacccactcaacatcaagcagaacaacaagcaggccttcgatggcttcgcggctctgggcgtgtcgcggctgctggagcccgcggacatggtgctactgtcggtgcccgacaagctcatcgtcatgacgtacctgtgccagatccgcgccttctgcaccgggcaggagctgcagctggtacaactggagggcggcggcggcgccggcacgtaccgcgtgggcagcgcccagcccagcccgcccgacgacctggacgccggaggcctggcgcagcggctgcgcggtcacggggccgaggggccccaggagcccaaggaggccgcagaccgcgcagacggggcggccccgggggtggcctccaggaactcggtcgcgggccgcgcctccaaggacggcggggccgaggccccccgagagtcgcgacccgcggaggtcccggccgaggggnnnnnnnnnnnnnnnnnnnnnnnnnnnnnnnnnnnnnnnnnnnnncgacggccctcggtcaacggggagcccgggtcggtgcccccgccccgcgcgcacggctccttctcccacgtgcgcgacgcggacctgctcaagaagaggcgctcgcggctgcggaacagcagctcgttctcgatggacgatccggacgcgggagccatgggagctgcggctgcagaaggccaggcccctgaccccagccctgccccaggcccacccacagctgcagactctcaacagccccctggtgggagttccccctcggaggaaccacccccaagcccaggggaggaggctgggctgcaacggttccaggacacaagtcagtacgtgtgtgcagagctgcaggccctggaacaggagcagaggcagatagatgggcgggcggctgaggtggagatgcagctgaggagcctcatggagtcaggtgccaacaagctgcaggaggaggtgctgatccaggagtggttcaccctggtcaacaagaagaacgctctcatccggaggcaggaccagctgcagctgctcatggaggagcaggacttggagcgaaggttcgagctgctgagccgcgagctgcgggccatgctggccatcgaagactggcagaaaacgtccgctcagcagcaccgagagcagctcctactggaggagctggtgtcgctggtgaaccagcgcgatgagctagtccgggacctggaccacaaggagcggatcgccctggaggaggacgagcgcctggagcgcggcctggaacagcggcgccgcaagctgagccggcagttgagccggcgggagcgctgcgtgctgagctgaggccgccggcccgggtggcccataacttctcgcgtccccggcgtccgccgccgccccgggcctgcgctgcggacgacccggccgtcccggaggccgcgcgcgtgtccgctaggggccgccggcgcccttccccgtacagggcagggcggatccccgaccccacgggcggggcggccgccgtatttatttgtcaccgagggtgtgtgcgcgctcgcggcgggtgcggggtcctccccgacggcacggccgggccggcggcctcggggagagggatgcctgggcactaccgccccgcgctggcttgccctcctgttctccagagcaataaagttggacgagact

SEQ ID NO: 891 - DNA, 614 bp, Homo sapiens; identical to SEQ ID NO: 883

SEQ ID NO: 892 - DNA, 1986 bp, Homo sapiens; identical to SEQ ID NO: 884

SEQ ID NO: 893 - DNA, 586 bp, Homo sapiens; identical to SEQ ID NO: 885

SEQ ID NO: 894 - DNA, 1237 bp, Homo sapiens; identical to SEQ ID NO: 886

SEQ ID NO: 895 - DNA, 2011 bp, Homo sapiens; identical to SEQ ID NO: 887

SEQ ID NO: 896 - DNA, 2255 bp, Homo sapiens
ggcactgcagcaccagccgtctgcagctccggccgccacttgcgcctctccagcctccgcaggcccaaccgccgccagcaccatggccagcaccatttccgcctacaaggagaagatgaaggagctgtcggtgctgtcgctcatctgctcctgcttctacacacagccgcaccccaataccgtctaccagtacggggacatggaggtgaagcagctggacaagcgggcctcaggccagagcttcgaggtcatcctcaagtccccttctgacctgtccccagagagccctatgctctcctccccacccaagaagaaggacacctccctggaggagctgcaaaagcggctggaggcagccgaggagcggaggaagacgcaggaggcgcaggtgctgaagcagctggcggagcggcgcgagcacgagcgcgaggtgctgcacaaggcgctggaggagaataacaacttcagccgccaggcggaggagaagctcaactacaagatggagctcagcaaggagatccgcgaggcacacctggccgcactgcgcgagcggctgcgcgagaaggagctgcacgcggccgaggtgcgcaggaacaaggagcagcgagaagagatgtcgggctaagggcccgggacgggcggcgcccatcctgcgacagaacacgttcgggttttggttttgtttcgttcacctctgtctagatgcaacttttgttcctcctcccccacccccgcccccagcttcatgcttctcttccgcactcagccgccctgccctgtcctcgtggtgagtcgctgaccacggcttcccctgcaggagccgccgggcgtgagacgcggtccctcggtgcagacaccaggccgggcgcggctgggtcccccgggggccctgtgagagaggtggcggtgaccgtggtaaacccagggcggtggcgtgggatcacgggtccttacgctgggctgtctggtcagcacgtgcaggtcagggcaggtcctctgagccggcgcccctggccagcaggcgaggctacagtacctgctgtctttccagggggaaggggctccccatgagggaggggcgacgggggaggggggtgatggtgcctgggagcctgcgtgtgcagccggtgcttgttgaactggcaggcgggtgggtgggggctgcagctttccttaatgtggttgcacaggggtcctctgagaccacctggcgtgaggtggacaccctgggccttcctggaagcctgcagttgggggcctgccctgagtctgctggggagtgggcattctctgccagggacccatgagcaggctgcatggtctagaggttgtgggcagcatggacagtcccccactcagaagtgcaagagttccaaagagcctctggcccaggcccctccccaccagggctttgcagatgtccttgaaagacccaccctagagccctttggagtgctggcccctcctgtgccctctgccctggtggaagcggcagccacaagtcctcctcagggagccccaagggggattttgtgggaccgctgcccacagatccaggtgttggaagggcagcgggtaaggttcccaagccagccccaacacccttcccacttggcacccagagggggctgtgggtggaggcctgactccaggcctctcctgcccacaccctctgggctgagttccttctttcccttggacgcccagtgctggccttggaggacggtcagctggaggatggcggtgggggaggctgtctttgtaccactgcagcatcccccacttctccacggaagccccatcccaaagctgctgcctggccccttgctgtaaagtgtgaagggggcggctgagttctcttaggacccagagccagggccctcaacttccatcctgcgggaggccttggccgggcactgccagtgtcttccagagtcacacccagggaccacgggaggatcctgacccctgcagggctcaggggtcagcagggacccactgccccatctccctctccccaccaagacagccccagaaggagcagccagctgggatgggaacccaaggctgtccacatctggcttttgtgggactcagaaagggaagcagaactgagggctgggatattcctcatggtggcagcgctcatagcgaaagcctactgtaatatgcacccatctcatccacgtagtaaagtgaacttaaaaattcaatcaaatgaacaattaaataaacacctgtgtgtttaagacatg

SEQ ID NO: 897 - DNA, 1473 bp, Homo sapiens
ggaggtcacaatcacattgagccaaaacgcatccagtgttttctccagttacaaataaaacgaatatgcccatgctgctaccacatcctcaccagcatttcctaaaaggccttttaagagcacctttccgatgttaccacttcatctttcactcaagtactcatctcggatcaggaatcccatgtgctcagccgtttaattctcttggactccattgtacaaagtggatgctgctgtcagatggcttaaagagaaaattatgtgtacaaacaaccttaaaggaccacacagaaggactttctgataaagagcaaagatttgtggataaactttatactggtttaatccaagggcaaagggcctgtttagcagaggccataactcttgtagaatcaactcacagcaggaaaaaggagttagcccaggtgcttcttcagaaagtattactttaccacagagaacaagaacaatcaaataaaggaaaaccactagcatttcgagtaggattgtctgggccccctggtgctggaaaatcaacatttatagaatattttggaaaaatgcttactgagagagggcacaaattatctgtgctagctgtggacccttcttcttgtactagtggtggatcactcttaggtgataaaacccgaatgactgagttatcaagagatatgaatgcatacatcaggccatctcctactagaggaactttaggaggcgtgacaaggaccacaaatgaagctattctgttgtgtgaaggagcgggatatgacataattcttattgaaaccgttggtgtgggtcagtcggagtttgctgttgctgacatggttgacatgtttgttttactactgccaccagcaggaggagatgagctgcagggtatcaaaaggggtataatcgagatggcagatctggtagctgtaactaaatctgatggagacttgattgtgccagctcgaaggatacaagcggaatatgtgagtgcactgaaattactccgcaaacgttcacaagtctggaaaccaaaggtaattcgtatttctgcccgaagtggagaggggatctctgaaatgtgggataaaatgaaagatttccaggacctaatgcttgccagtggggagctgactgccaaacgacggaagcaacagaaagtttggatgtggaatctcattcaggaaagtgtgttagagcatttcaggacccaccccacagtccgggaacagattccacttctggaacaaaaggttctcattggggccctgtccccaggactagcagcagacttcttgttaaaagcttttaaaagcagagactaataaaattcatcctgtataataattttacatatcatttcataaagtattttaatagaaaaatcacttgtatgcttatattttcagtaattattgtatggtgctcttgtcttctttgtttgtgacccatgcttgaaaacttgaaggaagttag

SEQ ID NO: 898 - DNA, 1845 bp, Homo sapiens
gaagttggctggttgcaccgatctgggggcttcccgggctcgggtaaccggagtgctggtatctaatcgtcgctcaaaagctcctaggtgcgcgggtggatataattcccggcttctcgagaagacactacagcctcaaggaggtatatcccgtgccttacctgactgggggctctgagtccagttgtgttgtcttcaacttagacaccatggaggcacctccagtcaccatgatgcctgtcactgggggcaccattaacatgatggagtacctgttgcagggaagtgttttagatcacagtttggaaagcctcatccaccgccttcgtggtttgtgtgacaacatggaacctgagactttccttgaccatgagatggtattcctccttaagggccagcaagccagcccatttgttctcagggcccgacgctctatggacagggcaggggcaccctggcatctgcgctacctgggacagccagaaatgggagacaagaaccgccatgccctggtgcgaaactgcgtggacattgccacatctgagaacctcaccgacttcttgatggaaatgggcttccgcatggaccatgagtttgttgctaagggacatttgttccgtaagggcatcatgaagattatggtgtacaagactttccgcatcctggtgccagggaacacagacagcactgaggccttgtcactctcctatctcgtggaattaagtgtggtagcacccgctgggcaggacatggtctctgatgacatgaagaacttcgcagaacagctaaaacctctggttcacctagagaaaatagaccccaagaggctcatgtgactaagaggatctgtccacatttggggcctatccttacttgtttgaaaaaatatgtttgctttttttggtttttgttttgttttgtttttgagacggagtctcgctttgtttcccaggctggagtgcagtggcacgatctcggctcactgcaacctctgcctcctgggttcaggcaattctcccacctcagcctcctgagtagctgggattacaggcacatgccaccatgctcagctaatttttgtatttttagtagaaatggggattcaccatgttggtcaggctattctcgaactcctgacctcgtgatccacccaccttggcctcccaaagtgctgggattacaggcatgagccaccacgcctggccaaaaaaatatgttttaaatgtcccatttcaccattgccaggcaggcattcttccttcagggagaggatggtgagaattaattggttctttgcactgttctcctcatgtggcgatttcactttcatgacagcctttctttaaaggctcaggatgtcacggagaatctatctaatcccactgtattaagaggggaaaccgggccaagcgcagtggctcacacctctaatcccagcactttgggaggctgaggtaggtggatcacccaaggtcaggagtttgagaccagcctggccaaatggtgaaaccccatctctacgaaaaatacaaaatttagccgggcatggtagcaggcgcttgtaatcccagctacttgggaggctgaggctggagaatcgcttgaacccaggaggtgaaggttgcagtgaccggagatgacgccattgcactccagcctgggtgagaagagcgaaactccgtctcaaaaaaaaaataaaaatgaagaggggaaaccagaataaattatcttttggaaaggacaatttcttgtttggccatttgtgtacaaggttggtaacattagaggctgtgagcttgtgttacatggtaataaagccaatgaagagaaaaaaaaaaaaaaaaa

SEQ ID NO: 899 - DNA, 827 bp, Homo sapiens
ggaacagtgtggcccgccatgttcttctccgcggcgctccgggcccgggcggctggcctcaccgcccactggggaagacatgtaaggaatttgcataagacagctatgcaaaatggagctggaggagctttatttgtgcacagagatactcctgagaataaccctgatactccatttgatttcacaccagaaaactataagaggatagaggcaattgtaaaaaactatccagaaggccataaagcagcagctgttcttccagtcctggatttagcccaaaggcagaatgggtggttgcccatctctgctatgaacaaggttgcagaagttttacaagtacctccaatgagagtatatgaagtagcaactttttatacaatgtataatcgaaagccagttggaaagtatcacattcaggtctgcactactacaccctgcatgcttcgaaactctgacagcatactggaggccattcagaaaaagcttggaataaaggttggggagactacacctgacaaacttttcactcttatagaagtggaatgtttaggggcctgtgtgaacgcaccaatggttcaaataaatgacaattactatgaggatttgacagctaaggatattgaagaaattattgatgagctcaaggctggcaaaatcccaaaaccagggccaaggagtggacgcttctcttgtgagccagctggaggtcttacctctttgactgaaccacccaagggacctggatttggtgtacaagcaggcctttaatttatattgaactgtaaatatgtcactagagaaataaaatatggacttccaatctacgt

SEQ ID NO: 900 - DNA, 5362 bp, Homo sapiens
ttttatgcaaaacatcccttttccttcaccacaaagaccgagaatccttgtccagctgtcagtccatgatgcattaatattatcacagccagtttctacacctttaccactaagtggagccaactttagcaccttgctaatgaatctgggtcctgagaattgtgcaacactgctgctctttgttttacttgagagtaaaattctgctgcattctcttaggccagctgtcttgactggggtagctgaagctgttgtagctatgatctttccatttcagtggcaatgcccatatattcccctttgtcctctttcactggctgcagtgcttagtgcacctttaccatttatagttggagttgactcaaggtattttgatcttcatgacccaccacaagatgttgtttgcattgacttggatacgaacatgttatatgtatcagatgaaaagaagaacatgaactggaagcaacttcccaaaaagccgtgcaaaaatctacttagcaccttaaagaaattgtatccccagctgtcttcagttcaccaaaaaactcaagaaggctcagcgattgacatgactccaattgaagcagatttctcctggcaaaagaagatgacacagcttgagatggaaattcaagaggcatttttgcgctttatggcgtctattttaaaaggatatagaacatatctcagaccaatcacagaggctccttcaaataaagccacagctgctgattcattgtttgaccgacagggatttttaaaaagtcgagatcgtgcctatgcaaaattctatacccttttatccaaaacacagatttttattcgtttcattgaagaatgcagttttgtaagtgataaagatactggattagcattttttgatgactgcatagaaaagttgtttcctgataaaggcacagagaaaacagataaggttgattttgattcagcagaagataccagattgatagaactagatgattcacagaaaggtgagcatactgtatttataatgccgccagagccacctcctgatgatggaaaggacctgtcaccaaagtacagttacaaatactttccaagactggaccttaagctttttgacagaccgcaggagttgaaactttgttttagtagacaccctactgggaatagcattacaaagagtccacctctcatggctaagagaactaaacaggaaataaaaacagctcataaattggcgaagagatgttatacaaatccaccacagtgggccaagtgtctgtttagtcattgttacagtttatggtttatttgtcttccggcctatgttagagtttctcatcctaaagtcagagcacttcagcaggcatatgatgtacttattaagatgaggaaaacagatgtggatcccttagatgaggtgtgctatcgagtagtgatgcagctttgtggactttggggtcatcctgttttagcagtgagagtcttatttgaaatgaaaactgctaggataaagcctaatgctattacttatggttattataataaggtagtcttggagagcccgtggcctagcagtacccgcagtggtattttcttatggacgaaggtacggaatgtggtacgtggcttggcacagtttaggcagccgcttaaaaagactgtgcaaaggtcacaggtctcctcaatatcaggtggtcagtctgaccaaggatacgggtctaaggatgaacttataaaggatgatgcagaaattcatgtgcctgaagaacaggcagcaagagaattgataactaaaacaaaaatgcaaacagaagaggtgtgtgatgcctctgctattgtggcaaaacattcacaacctagtccagagcctcacagtcctactgaacctcctgcatggggcagcagtattgtgaaagttccgtctggtatatttgatgtcaacagcaggaaaagtagcactggtagtatatcaaatgtgctgttttctactcaagatccagttgaagatgcagtctttggcgaagctactaatctcaagaagaatggtgatagaggagaaaaaagacaaaagcattttcctgagaggagttgtagttttagttctgaaagtcgagcaggaatgttgcttaagaagagtagtttggattcgaattcaagtgaaatggctatcatgatgggagcagatgccaagattctcacagcagcattgacatgtcctaagacttctctacttcatattgcaagaacccatagctttgagaatgttagctgtcacctacctgatagtaggacttgtatgtctgaaagcacttggaatcctgagcacagatcatctccggtgccagagatgcttgaggaaagccaagaactccttgagcctgtggttgatgacgtacctaaaactactgcaacagtagatacatatgagagtctactaagtgatagtaacagtaatcagtccagagacttgaaaacagtatccaaagatctgaggaataagagaagtagtttatatggtattgctaaggtggttcagagggaagatgttgaaactggactagatcctttgtctcttttagccactgaatgtacaggaggaaaaactcctgattctgaagataagttgttttctccagttattgcacgtaatctggctgatgaaatagaaagctatatgaacctaaaaagtcccctaggtagtaaatcttctagtatggaattacacagagaggaaaacagagagtctggcatgactactgcatttattcatgctctagagaggagatcaagcctacctttagatcatggttcaccagcacaggaaaatcctgaaagtgaaaagagctcacctgcagtgtccaggtctaaaacttttactgggcgtttcaagcagcaaaccccctctcgaactcataaagaacgttcaacttctttgtcagcactggtgcgttcttcgccacatggctcgttgggttctgtagtaaattctttgtcagggctaaagctggataatatactctcagggcccaagatagatgtcctgaaatctggtatgaaacaagcagcgacagtagccagtaagatgtgggtagctgttgcgtctgcctacagctactcagatgatgaggaagaaactaatagagactacagcttcccagctggcctagaagaccatattttgggggagaatatatcgcctaacacaagtatctcagggttggtccccagtgaacttacccagagcaacacaagtcttggcagtagcagcagtagtggagatgtaggaaaactgcattatccaacaggtgaagttccatttccaagaggcatgaaagggcaagactttgaaaaatcagatcatggttcttctcaaaataccagcatgtctagcatctatcagaattgtgcaatggaggttttgatgtccagttgttcacagtgtagagcttgtggagctttagtttatgatgaagaaattatggctggatggacagcagatgactcaaatttgaatacagcttgtccattctgtaaaagcaacttcttgcctcttctcaatatagaattcaaagatttgagaggttctgcaagctttttcctgaaaccaagtacctctggtgacagtttacaaagtggaagcattccattggcaaatgaatccttggagcacaaacctgtatccagtttagcagaacctgacttgatcaactttatggacttcccaaaacataaccagatcataactgaagaaacaggctctgcagttgaaccaagtgatgaaataaagagagccagtggagatgtccaaactatgaaaatttcatctgtgcctaatagtttatcaaagcgaaatgtgtctttgactcgaagtcacagtgttggaggcccattgcagaatattgactttacccagcgaccgtttcatggcatctcaacagttagtcttccaaatagtctgcaggaagttgtggatcctttaggaaaaagacccaatcctccccctgtttctgtgccctacttgagtcctctagtactccgtaaagaacttgaatctttgctagaaaatgaaggtgatcaggtgattcatacatcttctttcatcaatcaacatccaatcattttctggaacctcgtttggtatttcagacgtttggaccttcctagtaacttgccaggacttatcctcacatctgaacattgtaatgaaggtgtacagcttcctctgtcatctctgtcccaggatagcaaacttgtgtatattcagctgttatgggataatatcaaccttcatcaggaaccaagagaacctctgtatgtctcatggaggaattttaattctgaaaagaaatcatctctcctgtcagaggaacaacaagaaacaagcactttagtagaaaccatcaggcagagtattcagcacaataatgttcttaaacccatcaacctactttcacagcaaatgaagccaggcatgaaaagacaaaggagtttatacagagaaatcctcttcttatcattagtgtctctaggaagagagaatattgatattgaggcatttgacaatgaatatggaattgcatacaatagtctgtcttcagagattcttgaaaggttgcagaaaattgatgctccaccaagtgccagtgtcgagtggtgcaggaagtgttttggagcgcctctcatttaaatagagattcactagaatgttgacacacaaggcttggggattagatttcatctggaaacattcaagttttttttccaaatcgtaagaactggtgaatacggaattgaagtaactcttggggacaatatataatgaattatgattcatattgcattaccttgaaatatgaagtgccatttgaatgtcccagggcttattaatattgaagattttcaacccctgaactgcttttctgcctctgtggaaaactactttgggattcttcagtatttgtagtagtttgatagaaataatgaggaaccatattcattctaggcattgtttatatttgaagttactgagtttgaggaatggcaaattaaatttgcctaacccccaaaacaaatgaaatatctcaattataaaagcaacatggccgggcacggtggctcaggcctgtaatcccagcactttgggaggctgagcaaggtgggtggatcacttgaggccaggagttcgagaccagcctggccaacacggtgagaccctgtctttactaaaaatacaaaaattagccaggcgcaccactgtagtcccagctactcaggctgaggcaggagaatcgcttgaactgaggcagaggctacagtgagtggagatcacgccactgcaactccagcttgggtgacagagtgagaccgtctc

SEQ ID NO: 901 - DNA, 2803 bp, Homo sapiens
tgggaaggagagaaaatggcggcggagccgaacaagaccgaaatccagactctttttaagaggcttcgcgcagttccaaccaacaaggcctgtttcgactgcggcgccaagaatccgagttgggccagcatcacgtacggtgttttcttgtgcattgactgttccggggtgcaccgctccctgggcgtccatctgagcttcatcaggtccacagagttggattccaactggaactggttccagctgaggtgtatgcaggtcggcgggaatgccaatgcgacggctttttttcgccaacatggatgcacagccaatgatgccaacaccaaatataatagccgagctgcccagatgtaccgggagaagatccggcagctggggagtgcggccctggctaggcatggcactgatctttggatagacaacatgagtagtgccgttcctaatcactccccagagaagaaggactctgatttcttcacagaacacactcaaccccctgcctgggatgcgccagccactgagccttcagggacccagcagccagccccgtctacagagagcagtggcctggcacagccggagcatggccccaacacagacctgcttggcacctcacccaaagcctcactggaactgaaaagctccatcattggcaagaagaagccagcagcagctaagaaagggctgggtgccaagaaaggcctaggggcccagaaggtgagcagccagagcttcagtgagattgagcggcaggctcaggtggcagagaagctccgtgagcagcaggcagccgatgccaagaagcaggcggaggagtccatggtcgcctccatgcgtctggcctaccaggagctccagattgatcgtaagaaagaggaaaagaagctacagaatctggaagggaagaagcgagagcaggcagaaaggttgggcatgggcttggtatcccgaagctctgtctcccactccgtgctgtctgagatgcaggtgattgagcaggaaaccccagtgagtgcaaaatcctctcgctcgcagctggacttgtttgacgatgttggtactttcgcctctggacccccaaagtacaaggacaatcccttttccttaggggaaagctttggctcccgctgggatacagatgctgcctggggtatggacagggtagaggagaaggagccagaagtgaccatctcaagcatccggcctatttcagaaagagccacaaaccggagggaagtggagagccggagctcaggcctcgagtctagtgaggcgcgtcagaaattcgcaggagccaaagccatctcatctgacatgttctttgggcgggaggtggatgcggagtatgaggccaggtctcggctgcagcagctctcaggcagcagtgccatcagctcttcagacctctttggggacatggatggagctcacggagcaggaagtgtatctctggggaacgtgctgcctacagcggacattgcccagtttaagcagggtgtcaagtctgtggctgggaaaatggctgtgctggccaatggtgtgatgaattccttgcaggatcgctacggttcctactgatccgagctctgtgactcaggcttacgatggtgacggcaacaagaactccacagttcccaggctggggatgctttgccttgtggaagctggggaggatttgttacttcgtatgtgtggtgtgtgtgtggggtggcctttgaggcgctcactcctgtgaggggaatggtcagtaccagcccttgtcctctgcctgtggactgagccctttattccctctcacaccaccctccgtgtgttagactcttgtccttctgtcctgcccccacagctgctgctcacttatcctgccatactgggaaagggggttcccccacgatggcttattctgggtccagactttccccaggtagggaaagcggaaggtagaaggctttttttgctggctctagggttcttctagttcgaggccttgggtccccatcctctggaaccagggggaggcctggaaggagttcactgtagacccgtcccatggggaaagaggctgcggacttgctgctgctgctgctgccagtggcctcttctgggtgccaggagaggggaaggacctttgtctgggcgttaccaagggctggaaactttacctggtacctaaaggtttcatttgggatcagaccggagacccttgggttctcccgtctcaccacccctttctacagtaagcacttggaagattgtttcagggtgtctcagggtccctctgtaccatctgctgtggaatgcaggaccctctgtgacattctttatcccttcttccccgggttggtggccatggagggtcttgtctgctgtgattcgactctggatgctgtgagcttgatgctggccagggaagcagaggatgtgagaggcagaggcaggctcctggggctgagctccttcctctgcatcattctgggcttggcctggacagcacccgccagtgagagctgtgggcctcaccctctggcagctgagccaagcactgtcattcttggtgccatcttcccctgccgcaccggcagtctcagcccagcccccacctttgggttgtaggttgggctcccaagcaacacagaccactcttccccttgcccctcccccagagggacttgactttctttctggactgtttgtattgaaacaaagtggtgtcaaaataaagcccctgcagggcctggctccctgttggtctgagtgaaaaaaaaaaaaaaaaaaaaaaaaaaaaaaaaaaaaaaaaaaa

SEQ ID NO: 902 - DNA, 773 bp, Homo sapiens
cccaggtaatttgagcaaaggccacagtgaactccggcgtggctgaggaaggaggaggcacccacaggctgctgggaggagagcataaggctcaaaatggaaaatcataaatccaataataaggaaaacataacaattgttgatatatccagaaaaattaaccagcttccagaagcagaaaggaatctacttgaaaatggatcggtttatgttggattaaatgctgctctttgtggcctcatagcaaacagtctttttcgacgcatcttgaatgtgacaaaggctcgcatagctgctggcttaccaatggcagggataccttttcttacaacagacttaacttacagatgttttgtaagttttcctttgaatacaggtgatttggattgtgaaacctgtaccataacacggagtggactgactggtcttgttattggtggtctataccctgttttcttggctatacctgtaaatggtggtctagcagccaggtatcaatcagctctgttaccacacaaagggaacatcttaagttactggattagaacttctaagcctgtctttagaaagatgttatttcctattttgctccagactatgttttcagcataccttgggtctgaacaatataaactacttataaaggcccttcagttatctgaacctggcaaagaaattcactgattttaaacaaatatgtaaacaaaaataaaatggtaaaaacagaaaaaaaaaaaaaaaaaaaaaaaaaaaaaaaaaaaaaaaaaaaaaaa

SEQ ID NO: 903 - DNA, 3843 bp, Homo sapiens
atttccggggacgccgcgccggactgaggctgtgcgcccgagactccgggtccccaggggctgcgccgggccggcctggcaagggggacgagtcagtggacactccaggaagagcggccccgcggggggcgatgaccgtgcgctgaccctgactcactccaggtccggaggcgggggcccccggggcgactcgggggcggaccgcggggcggagctgccgcccgtgagtccggccgagccacctgagcccgagccgcgggacaccgtcgctcctgctctccgaatgctgcgcaccgcgatgggcctgaggagctggctcgccgccccatggggcgcgctgccgcctcggccaccgctgctgctgctcctgctgctgctgctcctgctgcagccgccgcctccgacctgggcgctcagcccccggatcagcctgcctctgggctctgaagagcggccattcctcagattcgaagctgaacacatctccaactacacagcccttctgctgagcagggatggcaggaccctgtacgtgggtgctcgagaggccctctttgcactcagtagcaacctcagcttcctgccaggcggggagtaccaggagctgctttggggtgcagacgcagagaagaaacagcagtgcagcttcaagggcaaggacccacagcgcgactgtcaaaactacatcaagatcctcctgccgctcagcggcagtcacctgttcacctgtggcacagcagccttcagccccatgtgtacctacatcaacatggagaacttcaccctggcaagggacgagaaggggaatgtcctcctggaagatggcaagggccgttgtcccttcgacccgaatttcaagtccactgccctggtggttgatggcgagctctacactggaacagtcagcagcttccaagggaatgacccggccatctcgcggagccaaagccttcgccccaccaagaccgagagctccctcaactggctgcaagacccagcttttgtggcctcagcctacattcctgagagcctgggcagcttgcaaggcgatgatgacaagatctactttttcttcagcgagactggccaggaatttgagttctttgagaacaccattgtgtcccgcattgcccgcatctgcaagggcgatgagggtggagagcgggtgctacagcagcgctggacctccttcctcaaggcccagctgctgtgctcacggcccgacgatggcttccccttcaacgtgctgcaggatgtcttcacgctgagccccagcccccaggactggcgtgacacccttttctatggggtcttcacttcccagtggcacaggggaactacagaaggctctgccgtctgtgtcttcacaatgaaggatgtgcagagagtcttcagcggcctctacaaggaggtgaaccgtgagacacagcagtggtacaccgtgacccacccggtgcccacaccccggcctggagcgtgcatcaccaacagtgcccgggaaaggaagatcaactcatccctgcagctcccagaccgcgtgctgaacttcctcaaggaccacttcctgatggacgggcaggtccgaagccgcatgctgctgctgcagccccaggctcgctaccagcgcgtggctgtacaccgcgtccctggcctgcaccacacctacgatgtcctcttcctgggcactggtgacggccggctccacaaggcagtgagcgtgggcccccgggtgcacatcattgaggagctgcagatcttctcatcgggacagcccgtgcagaatctgctcctggacacccacagggggctgctgtatgcggcctcacactcgggcgtagtccaggtgcccatggccaactgcagcctgtacaggagctgtggggactgcctcctcgcccgggacccctactgtgcttggagcggctccagctgcaagcacgtcagcctctaccagcctcagctggccaccaggccgtggatccaggacatcgagggagccagcgccaaggacctttgcagcgcgtcttcggttgtgtccccgtcttttgtaccaacaggggagaagccatgtgagcaagtccagttccagcccaacacagtgaacactttggcctgcccgctcctctccaacctggcgacccgactctggctacgcaacggggcccccgtcaatgcctcggcctcctgccacgtgctacccactggggacctgctgctggtgggcacccaacagctgggggagttccagtgctggtcactagaggagggcttccagcagctggtagccagctactgcccagaggtggtggaggacggggtggcagaccaaacagatgagggtggcagtgtacccgtcattatcagcacatcgcgtgtgagtgcaccagctggtggcaaggccagctggggtgcagacaggtcctactggaaggagttcctggtgatgtgcacgctctttgtgctggccgtgctgctcccagttttattcttgctctaccggcaccggaacagcatgaaagtcttcctgaagcagggggaatgtgccagcgtgcaccccaagacctgccctgtggtgctgccccctgagacccgcccactcaacggcctagggccccctagcaccccgctcgatcaccgagggtaccagtccctgtcagacagccccccggggtcccgagtcttcactgagtcagagaagaggccactcagcatccaagacagcttcgtggaggtatccccagtgtgcccccggccccgggtccgccttggctcggagatccgtgactctgtggtgtgagagctgacttccagaggacgctgccctggcttcaggggctgtgaatgctcggagagggtcaactggacctcccctccgctctgctcttcgtggaacacgaccgtggtgcccggcccttgggagccttggggccagctggcctgctgctctccagtcaagtagcgaagctcctaccacccagacacccaaacagccgtggccccagaggtcctggccaaatatgggggcctgcctaggttggtggaacagtgctccttatgtaaactgagccctttgtttaaaaaacaattccaaatgtgaaactagaatgagagggaagagatagcatggcatgcagcacacacggctgctccagttcatggcctcccaggggtgctggggatgcatccaaagtggttgtctgagacagagttggaaaccctcaccaactggcctcttcaccttccacattatcccgctgccaccggctgccctgtctcactgcagattcaggaccagcttgggctgcgtgcgttctgccttgccagtcagccgaggatgtagttgttgctgccgtcgtcccaccacctcagggaccagagggctaggttggcactgcggccctcaccaggtcctgggctcggacccaactcctggacctttccagcctgtatcaggctgtggccacacgagaggacagcgcgagctcaggagagatttcgtgacaatgtacgcctttccctcagaattcagggaagagactgtcgcctgccttcctccgttgttgcgtgagaacccgtgtgccccttcccaccatatccaccctcgctccatctttgaactcaaacacgaggaactaactgcaccctggtcctctccccagtccccagttcaccctccatccctcaccttcctccactctaagggatatcaacactgcccagcacaggggccctgaatttatgtggtttttatacattttttaataagatgcactttatgtcattttttaataaagtctgaagaattactgtttaaaaaaaaaaaaaaaaaaaaaaaaaaaaaaa

SEQ ID NO: 904 - DNA, 3809 bp, Homo sapiens
gcttgcgggtgagctctgcccaagccgaggctgcggggccggcgccggcgggaggactgcggtgccccgcggaggggctgagtttgccagggcccacttgaccctgtttcccacctcccgccccccaggtccggaggcgggggcccccggggcgactcgggggcggaccgcggggcggagctgccgcccgtgagtccggccgagccacctgagcccgagccgcgggacaccgtcgctcctgctctccgaatgctgcgcaccgcgatgggcctgaggagctggctcgccgccccatggggcgcgctgccgcctcggccaccgctgctgctgctcctgctgctgctgctcctgctgcagccgccgcctccgacctgggcgctcagcccccggatcagcctgcctctgggctctgaagagcggccattcctcagattcgaagctgaacacatctccaactacacagcccttctgctgagcagggatggcaggaccctgtacgtgggtgctcgagaggccctctttgcactcagtagcaacctcagcttcctgccaggcggggagtaccaggagctgctttggggtgcagacgcagagaagaaacagcagtgcagcttcaagggcaaggacccacagcgcgactgtcaaaactacatcaagatcctcctgccgctcagcggcagtcacctgttcacctgtggcacagcagccttcagccccatgtgtacctacatcaacatggagaacttcaccctggcaagggacgagaaggggaatgtcctcctggaagatggcaagggccgttgtcccttcgacccgaatttcaagtccactgccctggtggttgatggcgagctctacactggaacagtcagcagcttccaagggaatgacccggccatctcgcggagccaaagccttcgccccaccaagaccgagagctccctcaactggctgcaagacccagcttttgtggcctcagcctacattcctgagagcctgggcagcttgcaaggcgatgatgacaagatctactttttcttcagcgagactggccaggaatttgagttctttgagaacaccattgtgtcccgcattgcccgcatctgcaagggcgatgagggtggagagcgggtgctacagcagcgctggacctccttcctcaaggcccagctgctgtgctcacggcccgacgatggcttccccttcaacgtgctgcaggatgtcttcacgctgagccccagcccccaggactggcgtgacacccttttctatggggtcttcacttcccagtggcacaggggaactacagaaggctctgccgtctgtgtcttcacaatgaaggatgtgcagagagtcttcagcggcctctacaaggaggtgaaccgtgagacacagcagtggtacaccgtgacccacccggtgcccacaccccggcctggagcgtgcatcaccaacagtgcccgggaaaggaagatcaactcatccctgcagctcccagaccgcgtgctgaacttcctcaaggaccacttcctgatggacgggcaggtccgaagccgcatgctgctgctgcagccccaggctcgctaccagcgcgtggctgtacaccgcgtccctggcctgcaccacacctacgatgtcctcttcctgggcactggtgacggccggctccacaaggcagtgagcgtgggcccccgggtgcacatcattgaggagctgcagatcttctcatcgggacagcccgtgcagaatctgctcctggacacccacagggggctgctgtatgcggcctcacactcgggcgtagtccaggtgcccatggccaactgcagcctgtacaggagctgtggggactgcctcctcgcccgggacccctactgtgcttggagcggctccagctgcaagcacgtcagcctctaccagcctcagctggccaccaggccgtggatccaggacatcgagggagccagcgccaaggacctttgcagcgcgtcttcggttgtgtccccgtcttttgtaccaacaggggagaagccatgtgagcaagtccagttccagcccaacacagtgaacactttggcctgcccgctcctctccaacctggcgacccgactctggctacgcaacggggcccccgtcaatgcctcggcctcctgccacgtgctacccactggggacctgctgctggtgggcacccaacagctgggggagttccagtgctggtcactagaggagggcttccagcagctggtagccagctactgcccagaggtggtggaggacggggtggcagaccaaacagatgagggtggcagtgtacccgtcattatcagcacatcgcgtgtgagtgcaccagctggtggcaaggccagctggggtgcagacaggtcctactggaaggagttcctggtgatgtgcacgctctttgtgctggccgtgctgctcccagttttattcttgctctaccggcaccggaacagcatgaaagtcttcctgaagcagggggaatgtgccagcgtgcaccccaagacctgccctgtggtgctgccccctgagacccgcccactcaacggcctagggccccctagcaccccgctcgatcaccgagggtaccagtccctgtcagacagccccccggggtcccgagtcttcactgagtcagagaagaggccactcagcatccaagacagcttcgtggaggtatccccagtgtgcccccggccccgggtccgccttggctcggagatccgtgactctgtggtgtgagagctgacttccagaggacgctgccctggcttcaggggctgtgaatgctcggagagggtcaactggacctcccctccgctctgctcttcgtggaacacgaccgtggtgcccggcccttgggagccttggggccagctggcctgctgctctccagtcaagtagcgaagctcctaccacccagacacccaaacagccgtggccccagaggtcctggccaaatatgggggcctgcctaggttggtggaacagtgctccttatgtaaactgagccctttgtttaaaaaacaattccaaatgtgaaactagaatgagagggaagagatagcatggcatgcagcacacacggctgctccagttcatggcctcccaggggtgctggggatgcatccaaagtggttgtctgagacagagttggaaaccctcaccaactggcctcttcaccttccacattatcccgctgccaccggctgccctgtctcactgcagattcaggaccagcttgggctgcgtgcgttctgccttgccagtcagccgaggatgtagttgttgctgccgtcgtcccaccacctcagggaccagagggctaggttggcactgcggccctcaccaggtcctgggctcggacccaactcctggacctttccagcctgtatcaggctgtggccacacgagaggacagcgcgagctcaggagagatttcgtgacaatgtacgcctttccctcagaattcagggaagagactgtcgcctgccttcctccgttgttgcgtgagaacccgtgtgccccttcccaccatatccaccctcgctccatctttgaactcaaacacgaggaactaactgcaccctggtcctctccccagtccccagttcaccctccatccctcaccttcctccactctaagggatatcaacactgcccagcacaggggccctgaatttatgtggtttttatacattttttaataagatgcactttatgtcattttttaataaagtctgaagaattactgtttaaaaaaaaaaaaaaaaaaaaaaaaaaaaaaa

SEQ ID NO: 905 - DNA, 1304 bp, Homo sapiens
cttcgccacattcgcttcctgctttcggtgtgtctgttgtgtcttgttgcgggcaccgcagtcgccgtgaagatggcgtctaccagccgtttggatgctcttccaagagtcacatgtccaaaccatccagatgcgattttagtggaggactacagagccggtgatatgatctgtcctgaatgtggcttggttgtaggtgaccgggttattgatgtgggatctgaatggcgaactttcagcaatgacaaagcaacaaaagatccatctcgagttggagattctcagaatcctcttctgagtgatggagatttgtctaccatgattggcaagggcacaggagctgcaagttttgacgaatttggcaattctaagtaccagaatcggagaacaatgagcagttctgatcgggcaatgatgaatgcattcaaagaaatcactaccatggcagacagaatcaatctacctcgaaatatagttgatcgaacaaataatttattcaagcaagtatatgaacagaagagcctgaagggaagagctaatgatgctatagcttctgcttgtctctatattgcctgtagacaagaaggggttcctaggacatttaaagaaatatgtgccgtatcacgaatttctaagaaagaaattggtcggtgttttaaacttattttgaaagcgctagaaaccagtgtggatttgattacaactggggacttcatgtccaggttctgttccaacctttgtcttcctaaacaagtacagatggcagctacacatatagcccgtaaagctgtggaactggacttggttcctgggaggagccccatctctgtggcagcggcagctatttacatggcctcacaggcatcagctgaaaagaggacccaaaaagaaattggagatattgctggtgttgctgatgttacaatcagacagtcctatagactgatctatcctcgagccccagatctgtttcctacagacttcaaatttgacaccccagtggacaaactaccacagctataaattgaggcagctaacgtcaaattcttgaatacaaaactttgcctgttgtacatagcctatacaaaatgctgggttgagcctttcatgaggaaaaacaaaagacatggtacgcattccagggctgaatactattgcttggcattctgtatgtatatactagtgaaacatatttaatgatttaaatttcttatcaaatttcttttgtagcaatctaggaaactgtattttggaagatatttgaaattatgtaattcttgaataaaacatttttcaaaactcaa

SEQ ID NO: 906 - DNA, 5205 bp, Homo sapiens
gagccgccgccgggtcccgctcgtctgccgcctcagcctcagccccaacctcagccgccgccgttgcgcttgctcccgggcggtcctggcctgtgccgccgccgcccccagcgtcggagccatggcgggcgccgcgtccccttgcgccaacggctgcgggcccggcgcgccctcggacgccgaggtgctgcacctctgccgcagcctcgaggtgggcaccgtcatgactttgttctactccaagaagtcgcagcgacccgagcggaagaccttccaggtcaagctggagacgcgccagatcacgtggagccggggcgccgacaagatcgagggggccattgacattcgtgaaattaaggagatccgcccagggaagacctcacgggactttgatcgctatcaagaggacccagctttccggccggaccagtcacattgctttgtcattctctatggaatggaatttcgcctgaaaacgctgagcctgcaagccacatctgaggatgaagtgaacatgtggatcaagggcttaacttggctgatggaggatacattgcaggcacccacacccctgcagattgagaggtggctccggaagcagttttactcagtggatcggaatcgtgaggatcgtatatcagccaaggacctgaagaacatgctgtcccaggtcaactaccgggtccccaacatgcgcttcctccgagagcggctgacggacctggagcagcgcagcggggacatcacctacgggcagtttgctcagctgtaccgcagcctcatgtacagcgcccagaagacgatggacctccccttcttggaagccagtactctgagggctggggagcggccggagctttgccgagtgtcccttcctgagttccagcagttccttcttgactaccagggggagctgtgggctgttgatcgcctccaggtgcaggagttcatgctcagcttcctccgagaccccttacgagagatcgaggagccatacttcttcctggatgagtttgtcaccttcctgttctccaaagagaacagtgtgtggaactcgcagctggatgcagtatgcccggacaccatgaacaaccctctttcccactactggatctcctcctcgcacaacacgtacctgaccggggaccagttctccagtgagtcctccttggaagcctatgctcgctgcctgcggatgggctgtcgctgcattgagttggactgctgggacggcccggatgggatgccagttatttaccatgggcacacccttaccaccaagatcaagttctcagatgtcctgcacaccatcaaggagcatgcctttgtggcctcagagtacccagtcatcctgtccattgaggaccactgcagcattgcccagcagagaaacatggcccaatacttcaagaaggtgctgggggacacactcctcaccaagcccgtggagatctctgccgacgggctcccctcacccaaccagcttaagaggaagatcctcatcaagcacaagaagctggctgagggcagtgcctacgaggaggtgcctacatccatgatgtactctgagaacgacatcagcaactctatcaagaatggcatcctctacctggaggaccctgtgaaccacgaatggtatccccactactttgttctgaccagcagcaagatctactactctgaggagaccagcagtgaccagggcaacgaggatgaggaggagcccaaggaggtcagcagcagcacagagctgcactccaatgagaagtggttccatgggaagctaggggcagggcgtgacgggcgtcacatcgctgagcgcctgcttactgagtactgcatcgagaccggagcccctgacggctccttcctcgtgcgagagagtgagaccttcgtgggcgactacacgctctctttctggcggaacgggaaagtccagcactgccgtatccactcccggcaagatgctgggacccccaagttcttcttgacagacaacctcgtctttgactccctctatgacctcatcacgcactaccagcaggtgcccctgcgctgtaatgagtttgagatgcgactttcagagcctgtcccacagaccaacgcccacgagagcaaagagtggtaccacgcgagcctgaccagagcacaggctgagcacatgctaatgcgcgtccctcgtgatggggccttcctggtgcggaagcggaatgaacccaactcatatgccatctctttccgggctgagggcaagatcaagcattgccgtgtccagcaagagggccagacagtgatgctagggaactcggagttcgacagccttgttgacctcatcagctactatgagaaacacccgctataccgcaagatgaagctgcgctatcccatcaacgaggaggcactggagaagattggcacagctgagcctgactacggggccctgtatgagggacgcaaccctggcttctatgtagaggcaaaccctatgccaactttcaagtgtgcagtcaaagccctctttgactacaaggcccagagggaggacgagctgaccttcatcaagagcgccatcatccagaatgtggagaagcaagagggaggctggtggcgaggggactacggagggaagaagcagctgtggttcccatcaaactacgtggaagagatggtcaaccccgtggccctggagccggagagggagcacttggacgagaacagccccctaggggacttgctgcggggggtcttggatgtgccggcttgtcagattgccatccgtcctgagggcaagaacaaccggctcttcgtcttctccatcagcatggcgtcggtggcccactggtccctggatgttgctgccgactcacaggaggagctgcaggactgggtgaaaaagatccgtgaagtggcccagacagcagacgccaggctcactgaagggaagataatggaacggaggaagaagattgccctggagctctctgaacttgtcgtctactgccggcctgttccctttgatgaagagaagattggcacagaacgtgcttgctaccgggacatgtcatccttcccggaaaccaaggctgagaaatacgtgaacaaggccaaaggcaagaagttccttcagtacaatcgactgcagctctcccgcatctaccccaagggccagcgactggattcctccaactacgatcctttgcccatgtggatctgtggcagtcagcttgtggccctcaacttccagacccctgacaagcctatgcagatgaaccaggccctcttcatgacgggcaggcactgtggctacgtgctgcagccaagcaccatgcgggatgaggccttcgacccctttgacaagagcagcctccgcgggctggagccatgtgccatctctattgaggtgctgggggcccgacatctgccaaagaatggccgaggcattgtgtgtccttttgtggagattgaggtggctggagctgagtatgacagcaccaagcagaagacagagtttgtggtggacaatggactcaaccctgtatggccagccaagcccttccacttccagatcagtaaccctgaatttgcctttctgcgcttcgtggtgtatgaggaagacatgtttagtgaccagaatttcctggctcaggctactttcccagtaaaaggcctgaagacaggatacagagcagtgcctttgaagaacaactacagtgaggacctggagttggcctccctgctgatcaagattgacattttccctgccaagcaggagaatggtgacctcagtcccttcagtggtacgtccctgcgggagcggggctcagatgcctcaggccagctgtttcatggccgagcccgggaaggctcctttgaatcccgctaccagcagccgtttgaggacttccgcatctcccaggagcatctcgcagaccattttgacagtcgagaacgaagggccccaagaaggactcgggtcaatggagacaaccgcctctagttgtaccccagcctcgttggagagcagcaggtgctgtgcgccttgtagaatgccgcgaactgggttctttggaagcagccccctgtggcggccttccgggtctcgcagcctgaagcctggattccagcagtgaatgctagacagaaaccaagccattaatgagatgttattactgttttgggcctccatgccccagctctggatgaaggcaaaaactgtactgtgtttcgcattaagcacacacatctggccctgacttctggagatggatccttccatcttgtggggccaggaccatggccgaagccccttggagagagaggctgcctcagccagtggcacaggagactccaaggagctactgacattcctaagagtggaggaggaggaggagccttgctgggccagggaaacaaagtttacattgtcctgtagctttaaaaccacagctgggcagggtgagaagctagatgcccctgcagtttggccctggagccagggcagaggaatgtagggcctgcatggagaagggttctgccctgcctgaggaggaggacacagcacaagggcacattgcccatggctgggaacatgacccagcctgaaagatacaggggatcatgttaaaaatagcagtattatttttcgtctcaatggtattgtaactaagttatttactcctcctgctcctcacccctgtagggaaaccttggagaggagagtggcaggtgggctgcctgctgtgttaagaggacttagtttgtgatgtaaggcactgtcaggaatggggggcgggccagggtgggaagagaagaaatagcagagcctattttggtgaggttttttgtttttaagtcaaagaagactcagtatgctttccctgaggaatgaaaaagggattgaggagttgcctgactcctgggtgggtggggtacaggcagttaggtgctgaatgaagctgccatccttgctgcagcttctaactggtaaaaagatccagggatggagatgggaaggttagaaaggcagccctcacctctgaggacagaggccggggtccaggcccgtgggcgcaaaggtgcctcatagcatagccagcattcagcacacacaaacctactgcccacatttgggctcagggttggccatttgctagttctgctgccctcttaagatctgactgccaaataaatcatcctcatgtcctt

SEQ ID NO: 907 - DNA, 5202 bp, Homo sapiens
gagccgccgccgggtcccgctcgtctgccgcctcagcctcagccccaacctcagccgccgccgttgcgcttgctcccgggcggtcctggcctgtgccgccgccgcccccagcgtcggagccatggcgggcgccgcgtccccttgcgccaacggctgcgggcccggcgcgccctcggacgccgaggtgctgcacctctgccgcagcctcgaggtgggcaccgtcatgactttgttctactccaagaagtcgcagcgacccgagcggaagaccttccaggtcaagctggagacgcgccagatcacgtggagccggggcgccgacaagatcgagggggccattgacattcgtgaaattaaggagatccgcccagggaagacctcacgggactttgatcgctatcaagaggacccagctttccggccggaccagtcacattgctttgtcattctctatggaatggaatttcgcctgaaaacgctgagcctgcaagccacatctgaggatgaagtgaacatgtggatcaagggcttaacttggctgatggaggatacattgcaggcacccacacccctgcagattgagaggtggctccggaagcagttttactcagtggatcggaatcgtgaggatcgtatatcagccaaggacctgaagaacatgctgtcccaggtcaactaccgggtccccaacatgcgcttcctccgagagcggctgacggacctggagcagcgcagcggggacatcacctacgggcagtttgctcagctgtaccgcagcctcatgtacagcgcccagaagacgatggacctccccttcttggaagccagtactctgagggctggggagcggccggagctttgccgagtgtcccttcctgagttccagcagttccttcttgactaccagggggagctgtgggctgttgatcgcctccaggtgcaggagttcatgctcagcttcctccgagaccccttacgagagatcgaggagccatacttcttcctggatgagtttgtcaccttcctgttctccaaagagaacagtgtgtggaactcgcagctggatgcagtatgcccggacaccatgaacaaccctctttcccactactggatctcctcctcgcacaacacgtacctgaccggggaccagttctccagtgagtcctccttggaagcctatgctcgctgcctgcggatgggctgtcgctgcattgagttggactgctgggacggcccggatgggatgccagttatttaccatgggcacacccttaccaccaagatcaagttctcagatgtcctgcacaccatcaaggagcatgcctttgtggcctcagagtacccagtcatcctgtccattgaggaccactgcagcattgcccagcagagaaacatggcccaatacttcaagaaggtgctgggggacacactcctcaccaagcccgtggagatctctgccgacgggctcccctcacccaaccagcttaagaggaagatcctcatcaagcacaagaagctggctgagggcagtgcctacgaggaggtgcctacatccatgatgtactctgagaacgacatcagcaactctatcaagaatggcatcctctacctggaggaccctgtgaaccacgaatggtatccccactactttgttctgaccagcagcaagatctactactctgaggagaccagcagtgaccagggcaacgaggatgaggaggagcccaaggaggtcagcagcagcacagagctgcactccaatgagaagtggttccatgggaagctaggggcagggcgtgacgggcgtcacatcgctgagcgcctgcttactgagtactgcatcgagaccggagcccctgacggctccttcctcgtgcgagagagtgagaccttcgtgggcgactacacgctctctttctggcggaacgggaaagtccagcactgccgtatccactcccggcaagatgctgggacccccaagttcttcttgacagacaacctcgtctttgactccctctatgacctcatcacgcactaccagcaggtgcccctgcgctgtaatgagtttgagatgcgactttcagagcctgtcccacagaccaacgcccacgagagcaaagagtggtaccacgcgagcctgaccagagcacaggctgagcacatgctaatgcgcgtccctcgtgatggggccttcctggtgcggaagcggaatgaacccaactcatatgccatctctttccgggctgagggcaagatcaagcattgccgtgtccagcaagagggccagacagtgatgctagggaactcggagttcgacagccttgttgacctcatcagctactatgagaaacacccgctataccgcaagatgaagctgcgctatcccatcaacgaggaggcactggagaagattggcacagctgagcctgactacggggccctgtatgagggacgcaaccctggcttctatgtagaggcaaaccctatgccaactttcaagtgtgcagtcaaagccctctttgactacaaggcccagagggaggacgagctgaccttcatcaagagcgccatcatccagaatgtggagaagcaagagggaggctggtggcgaggggactacggagggaagaagcagctgtggttcccatcaaactacgtggaagagatggtcaaccccgtggccctggagccggagagggagcacttggacgagaacagccccctaggggacttgctgcggggggtcttggatgtgccggcttgtcagattgccatccgtcctgagggcaagaacaaccggctcttcgtcttctccatcagcatggcgtcggtggcccactggtccctggatgttgctgccgactcacaggaggagctgcaggactgggtgaaaaagatccgtgaagtggcccagacagcagacgccaggctcactgaagggaagataatggaacggaggaagaagattgccctggagctctctgaacttgtcgtctactgccggcctgttccctttgatgaagagaagattggcacagaacgtgcttgctaccgggacatgtcatccttcccggaaaccaaggctgagaaatacgtgaacaaggccaaaggcaagaagttccttcagtacaatcgactgcagctctcccgcatctaccccaagggccagcgactggattcctccaactacgatcctttgcccatgtggatctgtggcagtcagcttgtggccctcaacttccagacccctgacaagcctatgcagatgaaccaggccctcttcatgacgggcaggcactgtggctacgtgctgcagccaagcaccatgcgggatgaggccttcgacccctttgacaagagcagcctccgcgggctggagccatgtgccatctctattgaggtgctgggggcccgacatctgccaaagaatggccgaggcattgtgtgtccttttgtggagattgaggtggctggagctgagtatgacagcaccaagcagaagacagagtttgtggtggacaatggactcaaccctgtatggccagccaagcccttccacttccagatcagtaaccctgaatttgcctttctgcgcttcgtggtgtatgaggaagacatgtttagtgaccagaatttcctggctcaggctactttcccagtaaaaggcctgaagacaggatacagagcagtgcctttgaagaacaactacagtgaggacctggagttggcctccctgctgatcaagattgacattttccctgccaaggagaatggtgacctcagtcccttcagtggtacgtccctgcgggagcggggctcagatgcctcaggccagctgtttcatggccgagcccgggaaggctcctttgaatcccgctaccagcagccgtttgaggacttccgcatctcccaggagcatctcgcagaccattttgacagtcgagaacgaagggccccaagaaggactcgggtcaatggagacaaccgcctctagttgtaccccagcctcgttggagagcagcaggtgctgtgcgccttgtagaatgccgcgaactgggttctttggaagcagccccctgtggcggccttccgggtctcgcagcctgaagcctggattccagcagtgaatgctagacagaaaccaagccattaatgagatgttattactgttttgggcctccatgccccagctctggatgaaggcaaaaactgtactgtgtttcgcattaagcacacacatctggccctgacttctggagatggatccttccatcttgtggggccaggaccatggccgaagccccttggagagagaggctgcctcagccagtggcacaggagactccaaggagctactgacattcctaagagtggaggaggaggaggagccttgctgggccagggaaacaaagtttacattgtcctgtagctttaaaaccacagctgggcagggtgagaagctagatgcccctgcagtttggccctggagccagggcagaggaatgtagggcctgcatggagaagggttctgccctgcctgaggaggaggacacagcacaagggcacattgcccatggctgggaacatgacccagcctgaaagatacaggggatcatgttaaaaatagcagtattatttttcgtctcaatggtattgtaactaagttatttactcctcctgctcctcacccctgtagggaaaccttggagaggagagtggcaggtgggctgcctgctgtgttaagaggacttagtttgtgatgtaaggcactgtcaggaatggggggcgggccagggtgggaagagaagaaatagcagagcctattttggtgaggttttttgtttttaagtcaaagaagactcagtatgctttccctgaggaatgaaaaagggattgaggagttgcctgactcctgggtgggtggggtacaggcagttaggtgctgaatgaagctgccatccttgctgcagcttctaactggtaaaaagatccagggatggagatgggaaggttagaaaggcagccctcacctctgaggacagaggccggggtccaggcccgtgggcgcaaaggtgcctcatagcatagccagcattcagcacacacaaacctactgcccacatttgggctcagggttggccatttgctagttctgctgccctcttaagatctgactgccaaataaatcatcctcatgtcctt

SEQ ID NO: 908 - DNA, 8702 bp, Homo sapiens
aggtgacgcggccggcgtcccaagatggcggcggcggcggctcccggaaggccgcggcggcgtcccggctgctaaggcgggccccacgcggctggcagcggacaggccggacctacggccggaggacgggcggcagccgcctctgcgcggaccggggctgggccgtgcggcggcagcggcgccaggggatgctcttgctgggcctggcctctcccttctcaacttagggcggcggcgggcccgcgcccctggctcccgggccatggcgctgagggagctcaaagtgtgtctgctcggggatacaggtgtaggtaaatcgagtattgtgtggcggtttgtggaagacagttttgatccaaacatcaacccaacaataggggcatcttttatgaccaagactgtccagtaccaaaatgagctacataaattcctaatctgggatacagctggacaagaacgatttcgtgccttagcaccaatgtactatcgagggtcggctgcagctataatcgtttatgatatcacaaaagaagagacattttcaacattaaagaattgggtgaaagagcttcgacagcatggcccacctaatattgtagttgccattgcaggaaataaatgtgatcttatcgatgtaagagaagtcatggagagagatgcaaaggactacgccgactctattcatgcaatttttgtagagaccagcgcaaaaaacgcgataaacataaatgaactctttatagaaattagtcgaagaattccatccactgacgccaacctgccatctggcggtaagggcttcaaactccgaagacagccttcagagccaaagcggagctgctgctgaccgaacctcagcctctcagacttgatgatgaagtaggtggtcctgaaagttaacaggagggctggggtccctgccaccagttttcacctagccagtcttgagtcttctccgtgcaaaaaggattcacagaaatggaccagttctgttctccaaagactgcagcaatgatatttcagtctgtgaacttctattatgtaaagaatctctagtgtacaaagggactacatcgttggcttttgaccttgctgaaaaggaacatataattgtatggatggtaggattaagttgttgagtagttttgtaatcaagattttatgtaacatttgtaaagggaaaattagcacttttgtggttcttaagggaaaagaaacagaccttgtggagattataatttccttggtttctgttaccactgttagagggagttgtatcatttaacatatagtaggatagtttaagtgtagggaggacaattattgtctgaagctaaaatgggttatttataggactgatggaaatgatttcatctctgccatctctaaagcacttttcattgaacatgttagcctaggatacgtacagtaaattaacaatgatagcagcagatgcctagctcatcctgggtttgcttctgaccttgtcatgtgtgtgccaccaaacacgttattggcacctttttaaataagctctcatgatcaagatggtgatggtagagaagctgcccggaataaactgaatttcatatgttctaaaatgactagcaatggtttaaaaaggaagaagagtggaagtgaagaaggtggtataaatgctgtcaatttttttttaacccaagtattttggtggggaaaagcaagtatctattgcttagcatatgtaaagttgtagtctatatttatggggccattgcttaaagattataaattatgtaaatacattaataaattctaagtttcatttgacattccattgaatctcgcacccagtcttgcgtatgcctgcccagttttcagcctcttaacgggagactcaagcacattggtattgtataaaggtatagagcacttagcttacaatctttaaaggtttctctgccttcccttctacccacccgcctcccaccagatcccatctggaaatcataataaagacatatgccactttgacaaacctgactagtccttactagcctgagggtaaaagattaagctccaacctcaagtcatttacctggtcttggtaataagtttcttttagcttgtacagcatcctcagaccaactgaggagctttccttgttaacaatttagcttatctttctgtttcctttatttttcccctgcctctgttagtggttaacactcttttccctcagggagcctaatgaggtttttaatatcatctaaaaataaagcattgaagtgaagttggtgaaaatttgttcctggtctaatttggcacccttccaacctgagtattgtaggggaaggaaatttacaagatttaataggaaatgaaacagcttgaatttcaaactaaattgtattttcagagctatcctgaaactgaacagctgaaactttaaaaaataattggtattattttgtgccccccacttaatatggatagattttaatgggaaaattataattcagattaaataaaaaacaattcccttttccctgttgtatatcttaagcatttggaattttttttatcttctgaaatcatataaaaagaatgtcattagtaaaaattctaacttcgttttgtttaaaagacatgtggatgctccatgcccctaggattttgcttcctccccggtgctaaattagcaagctcctagagaagccatgtgattcccagagccaggcgctttacacctaaagtagtttgactttcttctgtatacatccagatggatcccaggcatccgggcaccaccctggtgtgtccctagaattcccactgctgggcctctatctccatgacaacaaaataaaaacagaggttgcttgactcattaccaaagaggcaaagcatgtgcgaccctttctgtcttattttaccaaaagatggtgcaaatctatgaccttcacattttttccaccacacccaccagtagctgttggtgattgcatggtgtctcggtgcatggggaaaggcaaggtcttctgagctcatcttaactggtgaggcatctggatgtgtctgatcttactgtgatgttttactgtaccgagcccaatgtgggtccatctcatcagccctttgctgatttcatgatttctcaccctccctcccatatgtagggtgtgattctgttttattatagccacatgttttattaacagaatgagtgatatgaagcttgtacttatgcatttctcgggcctcttccctcattttcatcagtctgtctaagaacttgactcggcactgtttctcgtgtaatatccttctaatgcttagcaacaacaacaaaaaattgctctctcagatccataatccatactcagtgaaagcagggaaaaaatattttcacttattttatttgcttctaaaatgcaaagatgaatactaaagtcagaagcagtgtttcattttgaacacattttggattattaagctgactaagcaatgatctaatacacatttcatattttctttataataatttcttatggagaagaggctatatttcaaaggaattgagacatactcccatctataaacatgtttggttttcttacgatacagggccatttttttaaaactctcaggactgaacagaagagaaaaattattaattagctgctactgtatgttgattcttttcggagaaattgaaataagctctttgcaggcgtccaatcctagaaaccaatggtctccagaactctcacacaagtgtttttctgattctatgataactaattaaccatcatctggtgattaaaagaacataaagtaagattatgattaagtgtccatcacctgcctgtcagccgtggtcagaataagttttacacgaagcaggtgaaagatttagttcttttcaaagtaacttattttcttgtgacccgtttatgatgttgtttgaagtccctgtttcccattgtgtacgcactttctggatgtctggaaggatcgggacttttgtgtgagaggcttgagcgcctcctctatgtgggctggtgtccttcttgaagttgtcaattcctcttattcttaaatatctaaagggaaaggaaaccaactttaatttcagaacttctctttacgtcttgtatgtatttcttttctgttctcaaggaggaaaattggtctaggaagccttctaaattaaactctgggaaatatagtaatgaaaatatcctttagctaactttcctgtaactgtcaaaccaaaatgtcagtatttttagggcattgtgttaaaataagcagtttagattccgacgacactgcactaattggcatgtcagcctccagctcagaaaggcatttgctcatggttacaggcatcttttagattctaagagtgagttacagaattctttttggtactttcacttattctttcagaatacatcaaggatgtgatttatgggcccttaagagtataagatataggtgcacagtatgttacttaagtaacggatgagcccccctaaacatccacgtgtctctgcaggaacctgtgtaagtattgtgaaaacccttttcttccagggaaaaattattggaaattccttaactgagctatacttggtacttgctctagaacatttgggaaatgacaaactcaggctggctctcctctctaacctcactgggctataaatgttccttctaactctgtaatgaaagttcagtgacaaactagatagtgaacctgtgaaagtcattatttacatttgctttaaagggacagttttaccgttcaacttcaagagtttttctacctctttaacagttaatattttttaaaggaagaaatggaatgtaccttcaggggtcaagctgttaactgtatacctgcctctagttagcttggtttatcaaaaggatttttaaatgattcaaggtaatgtttaggatatttgttttaactcctgctgtgctgtgatttaaaaaaaaatagtctaagaaacaaatttatccatgagataaacatcatattttatagttttagaaaaaagggttgggggtggaatttagcctagaacttaaagaaacaacctctgcgaatttctcttgacagcggagttgcttgtcttgacttctaataatataaatccaggcagtttgattatccgatttgcaagaaactttaatggaattctggggcatttgtcctgttttatgtgcaaatgaaagtctaaaaaatatgaggaagatattacatttttcaggagcctccattttttcagtctaagagaatgataagtgagaggcctattgtgatgaagttgcattggacataatgtgggaagtgaataaatagaaccaagaatcttcatctatctctgttggtctttcaggattctcttagcatataggaaaatgatttaccttccagatctcgaaggacttccaatagcatagatcaggtttaatttgatggtctataccatcagaaataactaatatctgttttctttccttttagagtataatcaattatggataggccagaatatttttggcttcaaaacaaaaggattcataagcttaaaaaaacaaaaatcccaaaccttccatctatcccttttattacgttgaacattttagatagtaagattaagatgtatcattagtatatggtgaaattaaaaccgtggtgtctaacagatttaacaaaaagtgtttaatttactgcaagttcatttttagatctgtatggtgcccagtactccacaaaatgcatcataattgaaacaacaaaattattttcatgagcaagaattcaagtatcaaggcctatcagccaattaaaagccgtaagatagtaatgattttttttctttttttttttttttctttttttagatggagtctcactctgtcgcccaggctggtatgcagtggcgcgatctcagctcactgcaacctgtctcctgggttcaagcagttctcctgcctcagcctcctgagtagctgggatgacaggcgtgcaccaccatacccagctaatttttgtatttttagtagagatggggtttcaccatgtttgccaggctggtctcgaactcctgacctcaggtgatctgcttgcctcggcttcgcaacattctgggattacagacgtgagccaccgcgcccaaccagtaacgatttttttaaagggcctttcttaattgacagttttaagctgtagacattaatattataacaaacaaaacatgccagttttactgattccgctttttgcttgattcaggaacttttcattgtttggggaagcttttgaatgcagtactgtggaggaaatcatccttaaaatagcatttcacacatagggccaaaattgaaattgtcaaggaaacccctcagcatctaacgtcatcttgtagaagagctgggcatacctcttcctctaggccaattcagaggccactggccacccaagtagagtggggcccactggcatgagtagtccctgtgcccatgcccatggtggtgcttgactttgctttggggcttaatcctagtatcatttggccattaatttttaattaagtttatacttgaataatcagttttactcctgaaaaattttgaagccagcactgactttgtttatattcacttaccttgtatatgaacttatgacattagagtttgtgaaactgtcttaacgtggctcatacacgtgatgtcagagggactggtcagttctttacagggtgaattaatcggcagctggctagtcagagcaactgatgggtggcttttttttctttttttttttgagacggagtctcgctctgtcacccaggctggagtgtaagggcgcgatctcggctcactgcaacctccgcctcccaggttcaagcaattctcctgcctcagccacctgaatagctaggattacaggcgcccgcccccacacccggctaatattttttgtatttttagtagagacagggtttcaccgtgttgatcaggctggtctcgaactcctgacctcacgatccgcccgcctcggcctcccaaagtgctgggattacaggcgtgagtggtggccctatttttaaaccattcgttacgctgtgtagacagagctttattgccctggaaaagattttttttttaactctcatgcagttcagtctttccatcatttcactttgtgagtcactcacataattgtcaatcattcctctgaccttcttaagaatttacaccttaccgtctctgtgattgaagcagacttctcgctttatttcccttaggctcatttttctgtgggctctcccttaaagacacatggccacagacacctccttcgcatatgtaatctgccttcccctgcggccttccgtggtcacagcaacagggactgctcaccccctccagctggggcttttctaacaagcacagtcagaaatgcgcaggcctggggttggggatgaacagaagttgattagtgggcacagaaatacagttagatagaaggaatagttccagcattcgatattacagtagggagactgcatttaacaataattgattgtatatttgaaaacagctagaagaataagaatattcccaacacaaagaaaagataagcgaggtgaaggaaatcccagttaccctcattcagtccattacacattcgatacaggtatcaaaatatcataggcacctcaaagacatgtacaactcttaatttaacatttttgaaagaaaaaaaaaccggccagagcattaaaacaaataaaataagaaacacagaggccagtgttaggtgaagaactccgctgcttcagaaagagaatagcagcgctcgcttaccgtgggaacacggccagttaacaaaatgggttttggttttttgttttgttttgttttaccattggtaataagatagttaacataagtggtcagaacttcgctgaatttgtaataaagcatttgttaagcgtgtaaaagtccaaattaaaagtcttgaagaaaaacagctatggcaatgagcctagacatttttcaaaaaaaaaagctaagccgtcctaccagcaatctctctttctcctaagaatgtcatgccttctcaagacctgatgaaaggaataagatatttgtgcctttttataaaagcatctattacgaaagtaaaattcagttgcttacagttttggccgctttgtagcactattataaacagcccaaatttatggccttggacttactgcatgacacatggcctggttacctgtcatggaatgctgcagtggtggtttgccaagcttctgtggatgtttgaagactttatttttgcagtcttaaccttgggctggacctaagtgtatgtaaaccatatgatgcctgtattgtttatagatgctgacaaaagaaaactagaccttttgttttttgttgtaagatttttgttttcatgcctatgctcatagtagatagtttgcaaatgaaagttgatttgccatacttttaaataatattgttttagcttgaatattctataatacacttttatagagtataacatgctaaatcactgttttgttgtaagaagggtgtaaacattttgttaataaaatgctatgtttacaaatataaaaaaaaaaaaaaaaaaaaaaaaaaaaaaaaaaaaaaaaaaaaaaaaaaaa

SEQ ID NO: 909 - DNA, 4600 bp, Homo sapiens
ggatttttcctagcgagctggaggaaaggcaggtacccggagtggagttatattacctgtttctttgttctgatgggaccccagagaggacatcacgctttgtaactggttcttcaaggggagaagcaaatgtgtccctgaaaacttcagctgccgcgtttggcaccagtgatttgccttcaaggaaactggggagtcagaaaattgggaactcatatcaacatggcaaacctattgaaaacagtggtgactggctgctcgtgtcctctacttagcaatttggggtcctgtaagggtctacgtgtgaagaaggattttttacgaacattttatactcaccaagaactgtggtgtaaagcgcctgtaaaaccaggaattccatataagcaactgactgttggagtccccaaagagatattccaaaatgagaagcgagtggcattgtctcctgctggtgttcagaacttggtcaagcagggttttaatgttgtcgtggaatcgggtgcgggcgaagcttccaagttctcagatgatcactatagagtggcaggtgcccaaatccaaggggcaaaggaagtgctggcttctgatttggtggtcaaagtgcgagcccctatggttaatccaacattaggtgttcatgaagctgaccttttaaagacatcaggaacgctgattagttttatttacccagcccaaaatccagagttgctaaataaactttcccaaagaaaaactacagttctggcaatggaccaggttccaagagtcacaattgctcagggatatgatgcgctaagctccatggccaacattgcgggttataaggctgttgtcctagcagcaaatcattttgaacgtttttttactggtcagatcacagctgctggaaaagttcctccagctaagattctgatagttggtggtggtgttgctgggcttgcttctgcaggcgcagcaaagtcgatgggtgcaattgttcgaggatttgacacaagagctgcagctttggaacagttcaagtctcttggtgctgagcccttggaggtggacttgaaggaatctggtgagggacaaggaggatatgcaaaagagatgtccaaagagttcattgaagctgaaatgaaactctttgctcaacaatgcaaggaggtagacatccttatcagcacagcacttattccaggtaaaaaagctccagttttatttaataaagaaatgattgagtcaatgaaggaaggttcagttgttgtggatttagctgctgaggctggtggaaactttgaaaccactaagccaggagaactctacattcataagggaattactcacataggctacacagacctgcccagccgaatggccactcaggccagcaccctatattccaacaacatcaccaaactcctgaaggccatcagcccggacaaagataatttttattttgatgtgaaagatgactttgactttggtacgatgggtcatgtcattagaggaactgtagtgatgaaagatggtaaagtgattttcccagctcccacaccgaaaaatattcctcaaggtgccccagtaaaacagaagacagtggctgagctggaagctgaaaaagcagctaccattacacccttcaggaagacaatgtcaacggcttctgcatatacagcaggtctcacagggatactgggtttgggcattgcggctcccaatctagccttttctcagatggtgaccacttttggcttggctggcattgtggggtatcataccgtctggggagtgacccctgctctccactcaccactgatgtctgtgacaaatgcaatctcagggctgactgcagttggtgggttggcactgatgggaggacatttgtatccttccacaacttctcagggccttgctgctcttgctgcattcatatcctctgtcaacattgcaggtggctttctggtgactcagagaatgctggacatgttcaagcgtcccactgaccccccagaatacaactacctgtacctgctccctgccggcacctttgttggtggatatttagctgccctctacagtggttataacattgaacagatcatgtacctaggctcgggtttgtgctgtgtcggtgccttggctggcctctccacccagggaacagcacgtcttggcaatgcactgggcatgattggggttgctggaggactggcagccaccctcggagtcctaaaaccgggcccagaattactagctcagatgtctggagcgatggctttgggtggtaccattggattgacaattgccaaacgcatccagatttctgatttacctcaattagttgctgcttttcacagtttagtgggtttggcagctgtacttacttgcatagctgagtacattatagaatatccacattttgctacggacgcagcagcaaatctcaccaagattgtggcctacctcggcacttacattggtggcgtcacctttagtgggtctctcattgcctatggaaaattgcagggtctcctgaaatctgcccctctcctactgcctggaaggcacttactcaatgcaggcttactggctgctagtgtgggcgggataatcccattcatggtggacccaagctttactactggcatcacctgtctgggttcagtgtctgctctctctgctgtcatgggtgtgactttgacagctgctattgggggtgctgacatgcccgtcgttatcactgtgctgaacagctactcaggctgggccctgtgtgcagagggcttcctgctcaacaacaatctgctgaccatcgtgggtgcactcataggctcgtctggtgctatcctgtcatacatcatgtgtgtggcaatgaatcgctccctggctaatgtgattcttggaggctatggcaccacttcaacagctggtggaaaacccatggaaatttctggcacacatacggaaatcaaccttgacaatgcaattgacatgattcgagaagctaatagcattattattacaccaggctatggtctctgtgcagccaaagctcaataccccattgctgatttggtaaagatgctcactgagcaaggcaaaaaagtcaggtttggaattcacccagttgcaggccgaatgcctggtcagcttaatgtgctgctggctgaggctggtgtgccatatgacattgtgttggaaatggatgagatcaaccatgattttccagatactgatttggtccttgtaattggagctaatgacactgttaattcagcagctcaagaagatcccaactctattattgcaggcatgccagtccttgaggtctggaaatcaaagcaggtgattgttatgaagaggtctttgggtgttggctatgctgcagtggacaatccaatcttctacagacctaacacggccatgcttctaggtgatgccaagaaaacatgtgacgcgctccaggcgaaagttagagaatcctatcagaagtaaatattaaggatcaagctgttagctaataatgccacctctgcagttttgggaacaggcaaataaagtatcagtatacatggtgatgtacatctgtagcaaagctcttggagaaaatgaagactgaagaaagcaaagcaaaaactgtatagagagatttttcaaaagcagtaatccctcaattttaaaaaaggattgaaaattctaaatgtctttctgtgcatattttttgtgttaggaatcaaaagtattttataaaaggagaaagaacagcctcattttagatgtagtcctgttggattttttatgcctcctcagtaaccagaaatgttttaaaaaactaagtgtttaggatttcaagacaacattatacatggctctgaaatatctgacacaatgtaaacattgcaggcacctgcattttatgtttttttttttcaacaaatgtgactaatttgaaacttttatgaacttctgagctgtccccttgcaattcaaccgcagtttgaattaatcatatcaaatcagttttaattttttaaattgtacttcagagtctatatttcaagggcacattttctcactactattttaatacattaaaggactaaataatctttcagagatgctggaaacaaatcatttgctttatatgtttcattagaataccaatgaaacatacaacttgaaaattagtaatagtatttttgaagatcccatttctaattggagatctctttaatttcgatcaacttataatgtgtagtactatattaagtgcacttgagtggaattcaacatttgactaataaaatgagttcatcatgttggcaagtgatgtggcaattatctctggtgacaaaagagtaaaatcaaatatttctgcccgttacaaatatcaaggaagacctgctactatgaaatagatgacattaatctgtcttcactgtttataatacggatggattttttttcaaatcagtgtgtgttttgaggtcttatgtaattgatgacatttgagagaaatggtggctttttttagctacctctttgttcatttaagcaccagtaaagatcatgtctttttaaaaaaaaaaaaaaaaaaaaaaaaaaaaaaaaa

SEQ ID NO: 910 - DNA, 4232 bp, Homo sapiens
gcgccgcggggcccaagcccgggtctgccagcgcgagctcctctcgcggccctcagggcacagcccaaggctgtcagcctcccggcccagtgatttgccttcaaggaaactggggagtcagaaaattgggaactcatatcaacatggcaaacctattgaaaacagtggtgactggctgctcgtgtcctctacttagcaatttggggtcctgtaagggtctacgtgtgaagaaggattttttacgaacattttatactcaccaagaactgtggtgtaaagcgcctgtaaaaccaggaattccatataagcaactgactgttggagtccccaaagagatattccaaaatgagaagcgagtggcattgtctcctgctggtgttcagaacttggtcaagcagggttttaatgttgtcgtggaatcgggtgcgggcgaagcttccaagttctcagatgatcactatagagtggcaggtgcccaaatccaaggggcaaaggaagtgctggcttctgatttggtggtcaaagtgcgagcccctatggttaatccaacattaggtgttcatgaagctgaccttttaaagacatcaggaacgctgattagttttatttacccagcccaaaatccagagttgctaaataaactttcccaaagaaaaactacagttctggcaatggaccaggttccaagagtcacaattgctcagggatatgatgcgctaagctccatggccaacattgcgggttataaggctgttgtcctagcagcaaatcattttggacgtttttttactggtcagatcacagctgctggaaaagttcctccagctaagattctgatagttggtggtggtgttgctgggcttgcttctgcaggcgccgaaaagtcgatgggtgcaattgttcgaggatttgacacaagagctgccagtttggaacagttcaagtctcttggtgctgagcccttggaggtggacttgaaggaatctggtgagggacaaggaggatatgcaaaagagatgtccaaagagttcattgaagctgaaatgaaactctttgctcaacaatgcaaggaggtagacatccttatcagcacagcacttattccaggtaaaaaagctccagttttatttaataaagaaatgattgagtcaatgaaggaaggttcagttgttgtggatttagctgctgaggctggtggaaactttgaaaccactaagccaggagaactctacattcataagggaattactcacataggctacacagacctgcccagccgaatggccactcaggccagcaccctatattccaacaacatcaccaaactcctgaaggccatcagcccggacaaagataatttttattttgatgtgaaagatgactttgactttggtacgatgggtcatgtcattagaggaactgtagtgatgaaagatggtaaagtgattttcccagctcccacaccgaaaaatattcctcaaggtgccccagtaaaacagaagacagtggctgagctggaagctgaaaaagcagctaccattacacccttcaggaagacaatgtcaacggcttctgcatatacagcaggtctcacagggatactgggtttgggcattgcggctcccaatctagccttttctcagatggtgaccacttttggcttggctggcattgtggggtatcataccgtctggggagtgacccctgctctccactcaccactgatgtctgtgacaaatgcaatctcagggctgactgcagttggtgggttggcactgatgggaggacatttgtatccttccacaacttctcagggccttgctgctcttgctgcattcatatcctctgtcaacattgcaggtggctttctggtgactcagagaatgctggacatgttcaagcgtcccactgaccccccagaatacaactacctgtacctgctccctgccggcacctttgttggtggatatttagctgccctctacagtggttataacattgaacagatcatgtacctaggctcgggtttgtgctgtgtcggtgccttggctggcctctccacccagggaacagcacgtcttggcaatgcactgggcatgattggggttgctggaggactggcagccaccctcggagtcctaaaaccgggcccagaattactagctcagatgtctggagcgatggctttgggtggtaccattggattgacaattgccaaacgcatccagatttctgatttacctcaattagttgctgcttcacacagtttagtgggtttggcagctgtacttacttgcatagctgagtacattatagaatatccacattttgctccggatgcagcagcaaatctcaccaagattgtggcctacctcggcacttacattggtggcgtcacctttagtgggtctctcattgcctatggaaaattgcagggtctcctgaaatctgcccctctcctactgcctggaaggcacttactcaatgcaggcttactggctgctagtgtgggcgggataatcccattcatggtggacccaagctttactactggcatcacctgtctgggttcagtgtctgctctctctgctgtcatgggtgtgactttgacagctgctattgggggtgctgacatgcccgtcgttatcactgtgctgaacagctactcaggctgggccctgtgtgcagagggcttcctgctcaacaacaatctgctgaccatcgtgggtgcactcataggctcgtctggtgctcccctgtcatacatcatgtgtgtggcaatgaatcgctccctggctaatgtgattcttggaggctatggcaccacttcaacagctggtggaaaacccatggaaatttctggcacacatacggaaatcaaccttgacaatgcaattgacatgattcgagaagctaatagcattatttttacaccaggctatggtctctgtgcagccaaagctcaataccccattgctgatttggtaaagatgctcactgagcaaggcaaaaaagtcaggtttggaattcacccagttgcaggccgaatgcctggtcagcttaatgtgctgctggctgaggctggtgtgccatatgacattgtgttggaaatggatgagatcaaccatgattttccagatactgatttggtccttgtaattggagctaatgacactgttaattcagcagctcaagaagatcccaactctattattgcaggcatgccagtccttgaggtctggaaatcaaagcaggtgattgttatgaagaggtctttgggtgttggctatgctgcagtggacaatccaatcttctacaaacctaacacggccatgcttctaggtgatgccaagaaaacatgtgacgcgctccaggcgaaagttagagaatcctatcagaagtaaatattaaggatcaagctgttagctaatatgccacctctgcagttttgggaacaggcaaataaagtatcagtatacatggtgatgtacatctgtagcaaagctcttggagcaaaatgaagactgaagaaagcaaagcaaaaactgtatagagagatttttcaaaagcagtaatccctcaattttaaaaaaggattgaaaattctaaatgtctttctgtgcatattttttgtgttaggaatcaaaagtattttataaaaggagaaagaacagcctcattttagatgtagtcctgttggattttttatgcctcctcagtaaccagaaatgttttaaaaaactaagtgtttaggatttcaagacaacattatacatggctctgaaatatctgacacaatgtaaacattgcaggcacctgcattttatgttttttttttcaacaaatgtgactaatttgaaacttttatgaacttctgagctgtccccttgcaattcaaccgcagtttgaattaatcatatcaaatcagttttaattttttaaattgtacttcagagtctatatttcaagggcacattttctcactactattttaatacattaaaggactaaataatctttcagagatgctggaaacaaatcacttgctttatatgtttcattagaataccaatgaaacatacaacttgaaaattagtaatagtattttggaagatcccatttctaattggagatctctttaatttcgatcaacttataatgtgtagtactatattaagtgcacttgagtgggattcaacatttgactaataaaatgagttcatcatgttggc

SEQ ID NO: 911 - DNA, 1197 bp, Homo sapiens
cgaggaatcgccgtggcgtcttggtgttctccacgctggttcgcaggtgaagagatggcgtttgtgaagagtggctggttgctgcgacagagtactattttgaagcgctggaagaagaactggtttgatctgtggtcggatggtcacctgatctattatgatgaccagactcggcagaatatcgaggataaggtccacatgccaatggactgcatcaacatccgcacggggcaggaatgtcgggatactcagcccccggatggaaagtcaaaagactgcatgctccagattgtttgtcgagatgggaaaacaattagtctttgtgcagaaagcacagatgattgcttggcctggaaatttacactccaagattctaggacaaacacagcgtatgtgggctctgcagtcatgaccgatgagacatccgtggtttcctcacctccaccatacacggcctatgctgcaccggcccctgaggagctgcacagtaaaggtcccaaaatacacaccaccacgagtgcaaaaacccaggcggttctcccaacgcgatgtttttttcccagcgaatctccgataagaaggtctgtgcagatttctgtgctcctacctgcagtaaatattcgtagacgtataaagctaacttttccccagcctgcccgtccgagggcaccaaggagcctttgcctttggcaaacatggtttgcagggaagagggcgcccagcctccccacagccgccaccgctccggctctcccgagctgcccctcgcccccggccccctccaaggcgctccctccctctctcgctggctggcgctctcctagcagcgctcccctccctcccgagcaggcgctggctccgcgctctttccagctgtcaaagcatcaggcccggccgcggccccatcgccctggaactcctcccgtgccggcttggcctggggtgccgccgccgcctcccgcaaggccgcccgctctccggtagctcgcgtgctcgcccggttccgcttgcgcggccctctgcgcccccagcaccgctgccgccgccgccggcgctggcctcatgtgtcacattttcttaatccagtctatggctgatggatatttgggttggttccaactttttgctattgtgaatagtgccgcaataaacatacgtgtgcatgtgaaaaaaaaaaaaaaaaaaaaaaaaaaaaaa

SEQ ID NO: 912 - DNA, 1778 bp, Homo sapiens
agttgcaggcgagcaggcgaggaatcgccgtggcgtcttggtgttctccacgctggttcgcaggtgaagagatggcgtttgtgaagagtggctggttgctgcgacagagtactattttgaagcgctggaagaagaactggtttgatctgtggtcggatggtcacctgatctattatgatgaccagactcggcagaatatcgaggataaggtccacatgccaatggactgcatcaacatccgcacggggcaggaatgtcgggatactcagcccccggatggaaagtcaaaagactgcatgctccagattgtttgtcgagatgggaaaacaattagtctttgtgcagaaagcacagatgattgcttggcctggaaatttacactccaagattctaggacaaacacagcgtatgtgggctctgcagtcatgaccgatgagacatccgtggtttcctcacctccaccatacacggcctatgctgcaccggcccctgaggcttatggctatgggccatacggtggtgcgtacccgccaggaactcaagttgtctacgctgcgaatgggcaggcgtatgccgtgccccaccagtacccatatgcaggactttatggacagcagcctgctaaccaagtcatcattcgagagcgctatcgagacaacgacagcgacctggcactgggcatgctggcaggagcagccacgggcatggccttagggtctctattttgggtcttctaggggcctcaaggtcttgatgtgcatagcttctgataaccctgtgtgcaataatatgatttgcagggcatttctgtttgtgacaaaagtttttaataatagttttaatcattcctttgaaagtagtgatgtcataattgtactaatccacataagtaccacagagaagggtttgaactgtgctattttgttcaaatgttgactctccgggggcactggctcattccaagactgttcttgtgcaactctcagaataccttatttgagcatacctgttttgaaaggcattttctttttagagttaggtgtagtgcttaagggttaatttattttcatgttatgccagtaatatagtgttgtatgcctattgagtgattgtggcaagaaaagctacagcttctttgcgtttaactttttcaaaccacagaccagaactggttgcatgttactttaggagttgtgggttggtaagctcccaggtacttcccgaggctatggtgtgagagcccccgtcctgccctctggggctccacaggcccctggcaaggccgatggctcaggatgatggggcacagcccgcctttgaacaatcatgcttcagaaatctgcctgaccctagctgctgctgctgctcactttattcttgtatggctttggtaggcatacttggagaacatatcccacattaggaattgatttaagcctgagagtttgagggctttaatcctttaaaacttggagaagctggctgggcgcggtggctcacgcctgtaatcccagcactttgagagaccgaggcgggcggatcacgaggtcaggagatcgagaccatcctggctaacacggtgaaaccccatctctactaaaaatacaaaaaattagctgggcgtggtggcaggcgcctgtggtcccagctactcgggaggctgaggcaggagaatagtgtgaacccaggaggcggagcttgcagtgagccaagatagtgccactgcacttcagcctgggtgacagagtgagactctgtctcaaaaaaaaaaaaaaaaa

SEQ ID NO: 913 - DNA, 2080 bp, Homo sapiens
gtacagggctggatgattgaagcaccagcgggaactagtcggacctccgagctctttaaactgtcctcagctcggctggttctccacgagctccgggcagacggcggggggtgggtcggcgtttaagtcaaaggccttggggctccgagtcccttcctctccccgtcctgtgaaggcacgacccagttcagctgtctgtaaagtggagccattagtccctgcctcgtagtgggaaaactgggaggcggaacgaggaggccgccggtcccaacccggcccaggagcatctttctccgcagaccgtttcctggcgagatcctgcgcagccgaggctgtgttagcgccaaggacttccagcagctgttagcagaggctgctgccagggctgctgccccgctccctcctcctccttcccctggagtcagtggtgggaagcttcccaggagagtcctcagcaacctctggaacacaggacttggccatgactgtctcctgtccctgtgtgggcccagatggttgagcttgagcaggaggtggagcggcggcagcggctggggcaggagtcagcagctaggaaagccctcatcgcgagttcctaccacccggcacggcctgaggtctacgactcactgcaggatgcagctctggcccccgagttcctggccgtgactgagtacagcgtgtccccagacgcagacctcaagggccttctccagcggctggagacagtatcggaggagaagcgcatctaccgggtgcctgttttcacagcgcccttctgccaggccctgctggaagagctggagcacttcgagcaatcggacatgcctaaggggaggcccaacaccatgaacaactacggggtgctgctgcacgagctcgggctggacgagccgctgatgacaccactgcgggagcgcttcctgcagccgctgatggccctgctgtaccctgactgtggcgggggccggctcgacagccaccgggcctttgtggtcaaatacgcaccgggccaggacctggagctgggctgccactatgataatgccgagctcaccctcaatgtggccttgggcaaggtcttcacagggggcgccctgtattttgggggcctcttccaggcacccacagccctgacggagcccctggaggtggagcacgtggtgggccagggtgtcctccaccgtggcggccagctgcatggagcccggcccttgggcactggtgagcgttggaaccttgtcgtctggctccgagcctctgctgtgcgcaacagcctctgtcccatgtgctgccgtgagcccgacctggtggacgatgagggcttcggtgatggcttcacccgagaggagcccgccacggtggatgtatgtgcgctcacctgagcttgcttgggcccagtgtgggggtggcaggcaggtgagggctccgttgccttggtctgggggcagaaataaaatccccgcagcctactgcacttcttggctcaacggtgtgccagcttctgggtcattctatgggcaaagatgctgccttagttcaggtttgtcagaagcagggtctggaatggggcttcagcgagggagtcagggaagcaggggaggggagggagcagctgggcaaggaagtggcttcagaggacgtccagcctcagctggccccacggagagctccaggcagagcccacagtaccacagtgtgcccacaccaccggttactggctcctggatgagggggccagagaggagtgaataacttcccagacacttacctccagggcagggtgccttccagtagccaagggaagcctccagagagcacagatgtgaaccctcagcagcaggcatcaccccccagtggactcgggtgggccaccagtagcatcttctagatggcaggggggtgaatggcagggccaggaaccaggctgcccgggttcccattctgcttctgccacttccagctgtgtggctttaggtgagccttcaccttttggtgccttcgtttcctcatttagcacctacctcctagagctgttttgggagtcaaatgcgctgacgtatataaagtgctttgcaag

SEQ ID NO: 914 - DNA, 6237 bp, Homo sapiens
gagagagcgcgatgggccgcggcggtgggcgcacgttccgcggggactcatgccacgcgcgtcccggcccgacgcgcaattagcagccacctccgcagcccgccgccaccgcctccctgccctcccgggctgccgcagctaggagctccagccgtcgcctcgcgcaggctgcgggcattgtcctctcggttcgccgcccgggctgctgctgccgccgcggactgctgcggggcccggacccgcaccccagggatacgctgccgccgccgccggccggcccggcgcccggcctccgttcggtggtttccgccctgcgttctctgggttgctctctcctgggtttttcctgcgtagctgaggaaggggaagagaagtccagccgccaagcccagccttccccggcgcgcagccccgacggggccgcggcaggcgcggcgagagcgctgacggagccatgagagagtacaaagtggtggtgctgggctcgggcggcgtgggcaagtccgcgctcaccgtgcagttcgtgacgggctccttcatcgagaagtacgacccgaccatcgaagacttttaccgcaaggagattgaggtggactcgtcgccgtcggtgctggagatcctggatacggcgggcaccgagcagttcgcgtccatgcgggacctgtacatcaagaacggccagggcttcatcctggtctacagcctcgtcaaccagcagagcttccaggacatcaagcccatgcgggaccagatcatccgcgtgaagcggtacgagcgcgtgcccatgatcctggtgggcaacaaggtggacctggagggtgagcgcgaggtctcgtacggggagggcaaggccctggctgaggagtggagctgccccttcatggagacgtcggccaaaaacaaagcctcggtagacgagctatttgccgagatcgtgcggcagatgaactacgcggcgcagcccaacggcgatgagggctgctgctcggcctgcgtgatcctctgaggcggccaccgcgcgccggccgcgctctgcgcacaaaagccaaacgcatccgactctctaaatgtgatttatttcttgctttgagattggagaccactttgcattggccagggtgtcttgggagcccggctggcctccgcggccggcgtcccctgcctccaccctgtgcccgagggggtgtccggtcctgcccatccgatactctggtggaaatgtggctctttgcagcatgtacgtttctccctgattttggttgatgcatatttccccgtttaagtagccgttagggcgcagtatcggcagcttgacacccaccaagcaaaagtttcagcctggaaaaaaaatgggggggaagggtggatgaaaaggagggagagaaggtggaaatggtttttttttttttttttctattttctttctttttttttttttttttttttggtcaacagccgtttttctagttccaagttttaaatacatggaaggaagtccgggagaaccatatgaaggagcaggaggagaggaagaaactttttttccttcttttccaggagtagctggaaattaagatcgggttccttttctgccagcttggaagggcaaccccatgactgattgcgattctgaggatgtctatgcaaagttggattcttgttacagtgtatccaatctgaagtattgcacatctgaactgggactgttaacactgatgccaatacagtgtggggtgccagaaagtgtctgctgatatttgtggaaaaaaaatctattttgtttacctactgtatcaaaggggagtctgggggagaatggtagtattttttttttttatcagctgtgaaaaaaatgttacagatctgcacattttcgtgtgtactatggtgtgtgtgtgtatgtgtgtggtgtgtgtgtgttttaagtttagccttttgtttttgttttttggttggcagtaaccgattttaatgactagcttttaaaaatacagtacaaagactttgtaaatgtgattcagggcccccagcacccctgtgtctgcagagtgccttcaaaactcagctgttccagccggtgccaacctgtgaacttcccaccatatcccagaatctgctattccccaaaccacttcccagtttcctttcagtaatctttctgaaggagccaggacaatagggcctgttgtttagtgaatttctttattattttcagcctttaaaatgtaatttccatctcttgcaatgaatttgtttcccttttttttgcttcattttgtttaaattttcaggtatttagctcccctttcatattatttttaaattttttaattacctgttgtagggtgttcctccagaagcaaagagcaaaattttactgttgtgatgtaccaattctaactaattgtaatttttaatttcatgcgtttaatcattgtctcttcattttaagacttttaatacaaatgtcatttttaaagaaacaaacccaaaactattgtttgtgtttctgtgtttcatattcagtgatttaatacagtatcatggctgaggtggatggggcaggtgcatgatactcttcagagctatttgtgaaattttaaagacagaagtgtctcagtgacaagttggatgacactactcccaactttttaaatttggagaaaaccatcaaggtcgaggaagccctgggtatggccattaccatctgattagaagatgaacaggtattttgaatctgatctgacatggaacagtttacctcattgtaggtagggaacaagagaacccatctattaaaattgccttagatctgggaaagtaaccatccttctggcaaagtaggatggcacttttaagtttttcttccttttttccctctgtttatattgcacatcaagtcaaaaacatgtttgggaaagatggttttcaattctgaagttatacctagtgatgttttttgcagtacatttgaatggattgtagacactgcctcaacccttttgaggttttgatttggaaatagatttaaaagaaaacaggctaagataatatccttgttctcatttacaccctgcagtttggaccacatttgacctcataagtttttccttttaacagtaggaggcagtgtgagctttttattttttatttttcttaaggtggtcttagtaatataacatgttcatacatatcaagagagtacttggtataccttaggtctatgaagtgtagctgaaatctgaagagtcttgacaaagggatttacacccttgacaaaaccaaaagaaattaacaggccacaggtttctttaaagctgtgttaacatatcttgccttaaaatgtgtgtgtgtgtttttgctttgcttttttttttttgcccaagaggcatctcagtactccagcaatggaggaagaatagagaattttgcctggcaatggtcctactgccattttttttttcccactctgatctcacttaagtttgatatcaaacacaattgggaggcaatagtatcaatatcctaaatgtagaaattaaaagatactgtataattttatgcctttgcaaagattcgttcttgtatttgaataaattcagttgctaaagtagatccaaagtgttaaaaatgctgaagtcatgtcaagtactgtctggagggtttttttaagaaaaggcatttggcatttaactgtctcttgttttatttttaagtttttggaaaccttttgacataaaatgctgccaagtatctaagaaatgtatatactgacagaagatatttgaaagtggaaaattggaaatgaaatatgttgctgggtgcgttaatcacctccgcccaggatttagtcacttgcaggacctctttatagtctaggatggcagagcagaagattttaatatgcttttattaagtgatgtaaaataaatgctttttggattatcaatgaaagcaattttatgtgtgcctgaagcaagaaaatagcgtttttggttttatctcatattttcttggcaaaattgagagaaattaggaacactgctatttttttcttaaaaatgtttttaagaatatgttcgtttctttgactattaagaaccccttgtggtattagtgtgtgaagagataagggcatttgtttcaatgaaaaagttagtgttaaaggaagtgagtcagggagggcggagtttgttgtaaggcaatcacctgtcaaaacagaaattgggtgggaaaggagtctttatcttggggagcaaaagctgacttttaaacttgacccctgctgtttttaaacagcttttccttttggtctctgacagtcaatccaggttttatgttatttcaaaagggttatttttgtcctccttttttaatagcttcaggaaagttaaaggtatcatcttaggtctaacactctagtctttgagagttacggttctttcgtagaacaatttccatgttgttaactgttgtagacttaattgaatcacattttgggaccagatgtatttggggatagaattctttaaatgtatgggacttcatgcttcctgattatgtaatatttcctgtggttgggaatcctagaatgcctgatctattttatctgttcaggtagttttgttattgtaccctcttttgggtcatattctagtatttctcacagggggtatgagaaacagaaagctatatgtagcagctggtcttgagaagtagaagcatcttaactgtcataagagcatagattttttgtttttcacaacagctggaataagttcctgcattataagtataaagggaaccgagatttaatttggagatcatcactgttaaaacgataccagacatttgtcacagtgtcttatttggggaaagtttgctaatatacattttgtctgtgaaaatatagtaaattttaaaatactaatataatgtggtattcttgattacagtattttatgcagactattaggaatgattcagtgcatttaactgaacacagagctagttctaggtgagtgagatctttatctattaactggattttgaaggtttgagaaggctatggggatcatctggttgaaaggttctcaaacttgaccatatatcaaaatcacctggagcttaaaacatgtactgctgggaccctcctccagtttcttacccagtgggtctcgggtagggtctcaattttcatttctaacaagtttccaagtgattgtgttattgctgttccagggaccacactttgaaaaccagtgatctagactgaactccaaatgagtactatactgacagccacctagatattgagagacacagacttcagactcatgtcacacattttggagtgctgtctactacagttagagaataatctctattgaaatctaagctaaagaggacatataccatttatactaagactaactgttgtgtgtgaaatagaataaacattgcaggtagtttttgatcattttcacattattacaggaacattttgactatggttttcaatgttaattcagaagttgactttaaatgaaaatgtggttagaatagaggcaaagcctaagtgatcagaatcaacattccccttctccccaacctaggggaaaaaaaatttgaaaagtatgtcttcaataaaaggggacactttatttgtcttctcttcaacattaaaaaacaaagattttaagttttcatggcaagggttctaaaaatcattgtgccagagaatttaaatcttcatatcatggtaagcacatgcgtatgtctgtgactcagtttcttagccagacttccaggtgttagttaattccttctcatttagttctactgtaatccattctgggaaaatgcataccacaaaactgtgtatcttgcagcttctttcgttatgcatcttaattccctcagaaggtcccagaactttatgttaaagatctgggtttttaaagacaatttgggggccttctaaagaaacaatagtagatctaattacaagtagtggattgcttacttcaaatttctcttttacaatttagaaagtttagtaccagtttatagactgagggagtagtagctactatttagatgctgagaataatattatcatgcttgggtggggaagaaaggcccttactcaaatctccattttcatttttaatgcttcctggacttcagttattttcttgcttttgcctcaagaataataaatatttttggttaaaa

SEQ ID NO: 915 - DNA, 2678 bp, Homo sapiens
ggcctcgagcgccccggcgggaggtttttctatatgagtggagaagacagctgttaccagggaggtcatacaacatttttttaggatgtctgaagatgaagaaaaagtgaaattacgccgtcttgaaccagctatccagaaattcattaagatagtaatcccaacaaacctggaaaggttaagaaagcaccagataaatattgagaagtatcaaaggtgcagaatctgggacaagttgcatgaagagcatatcaatgcaggacgtacagttcagcaactccgatccaatatccgagaaattgagaaactttgtttgaaagtccgaaaggatgacctagtacttctgaagagaatgatagatcctgttaaagaagaagcatcagcagcaacagcagaatttctccaactccatttggaatctgtagaagaacttaagaagcaatttaatgatgaagaaactttgctacagcctcctttgaccagatccatgactgttggtggagcatttcatactactgaagctgaagctagttctcagagtttgactcagatatatgccttacctgaaattcctcaagatcaaaatgctgcagaatcgcgggaaaccttagaagcggacttaattgaacttagccaactggtcactgacttctctctcctagtgaactctcagcaggagaagattgacagcattgcagaccatgtcaacagtgctgctgtgaatgttgaagagggaaccaaaaacttagggaaggctgcaaaatacaagctggcagctctgcctgtggcaggtgcactcatcgggggaatggtagggggtcctattggcctccttgcatgcttcaaagtggcaggaattgcagctgcacttggtggtggggtgttgggcttcacaggtggaaaattgatacaaagaaagaaacagaaaatgatggagaagctcacttccagctgtccagatcttcccagccaaactgacaagaaatgcagttaaaaaccaaatttcagtattattggtgccaacatgtctatcctgaggacctttgctgctgttggacactccgtcaccttttggaacacaagtatatcaagatagtggctactgatgttcaagtgggattgaagtgtgataaatggatatattttgttgtttgctggggtgttcatggagatgttaagagattgaggccctgggctgagggtatataatgtatgtcaggtaaagtttgaagactgccaaggagcagattttctccctggaaatgtgaaaactgaacctataactctgataaggacttgagatgtgtagaaacgttgggttatggaagactagtttcttccataaccctgaattggagaccttaatgctaagtgtagattattgaggtttgttagtgaggaaaagaataagagttcagaagcctttgttatcagatagcgaaatcagggcctagtgaggagcacaggtcgactacataatggagtccattggcgaaccctattgcaatttggtccaactatatcttctggtgaaggaaattaatgatgtaagaaaatgcaagaggctcaacttctcttccaaaaatcttctggcttctgaactcttcctctgcctctctttaaataaataacacagaatttcaagtggtaggagacttattaagccagtcaccaagcttggtctgtcagcctgtcttctaacacctcaaagatcttgtgccctgtgctgtccctcccttgtaattatgaaaagttctttggtttctggggtgaactctacccatgtataatgaggaattctctcataaccttttttgtcttgtctgtcatctctgttcatcccctcctataacctctaggtaaaaagaaaagaaaaaaagaaatttcgagatattttcaacattgttagagtttgggctaaaatgagcaaggagaaaaaaaccaccaagaacatttcctggggcatgttccagttttgaggggtgatatatctgccagatagggggtatctgacccagtcttcttttcagctggtctctggggggagctgagaactcgcttgctacctcacatccttttccccagactttttatctcctatgcatccctttgctttctatagctggtgtttcttccccaaaatggcgttcccatgcttacctttctcacattctagacaatgatggacaaagacgcatgcaagactcagacccggggaatggtgtggtgctaatctcaacacctgacattcacagcaagcatggcccagcccaaccgcatgtctatctcaaaccgcagaaaggctttaatactggaaaaaaagaattcaagactacaggcagctcccctctgtaccccaactcatttaaaataggaggaatcactttttgccttacttaacgcttttttctgagcacagggatgggcacctgcaccccagaaggtgtgagctgtctctctgccaggagctaaggttcattaggggattggatggtttatcacttctttctttctgagtttacttttagtaacttttattgatggctacctttcatgtccctgtctaaagagactttctctttcatacgtcttaaatctcatcaatgaaatccagtgaaacagcaccatttcttagtatcattaaataactagaaagtatcaaaaaaaaaaaaaaaaaa

SEQ ID NO: 916 - DNA, 4739 bp, Homo sapiens
tggcggggctcagcgacgctgcgcgggtggcggtttgcgaactgcgggtggactgtgtagtgaccggcgtcccgctgtctcgccccgtggcgggtgagcgagggtgcgtggtgcgcggcggcggcggaacgaacgcggtgcgggcggggcgcccgccgcagggcccatggcctcctgcgcgagcatcgacatcgaggacgccacgcagcacctgcgggacatcctcaagctggaccggcccgcgggcggccccagtgcagagagcccacggccatccagtgcctacaatggggacctcaatggacttctggtcccagacccgctctgctcaggtgatagtacctcagcaaacaagactggtcttcggaccatgccacccattaacctgcaagagaagcaggtcatctgtctctcaggagatgatagctccacctgcattgggattttggccaaggaggtggagattgtggctagcagtgactctagcatttcaagcaaggcccggggaagcaacaaggtgaaaattcagcctgtcgccaagtatgactgggaacagaagtactactatggcaacctgattgctgtgtctaactccttcttggcctatgccattcgggctgccaacaatggctctgccatggtgcgggtgatcagcgtcagcacttcggagcggaccttgctcaagggcttcacaggcagtgtggctgatctggctttcgcgcacctcaactctccacagctggcctgcctggatgaggcaggcaacctgttcgtgtggcgcttggctctggttaatggcaaaattcaagaagagatcttggtccatattcggcagccagagggcacgccactgaaccactttcgcaggatcatctggtgccccttcatccctgaggagagcgaagactgctgtgaggagagcagcccaacagtggccctgctgcatgaagaccgggctgaggtgtgggacctggacatgctccgctccagccacagtacctggcctgtggatgttagccagatcaagcagggcttcattgtggtaaaaggtcatagcacgtgcctcagtgaaggagccctctctcctgatgggactgtgctggctactgcgagccacgatggctatgtcaagttctggcagatctacattgaggggcaagatgagccaaggtgtctgcacgagtggaaacctcatgatgggcggcccctctcctgcctcctgttctgtgacaaccataagaaacaagaccctgatgtccctttctggaggttccttattactggtgctgaccagaaccgagagttaaagatgtggtgtacagtatcctggacctgcctgcagactattcgcttctccccagatatcttcagctcagtgagtgtgccccctagcctcaaggtttgcttggacctctcagcagaatacctgattctcagcgatgtgcaacggaaggtcctctatgtgatggagctgctgcaaaaccaggaggagggccacgcctgcttcagctccatctcggagttcctgctcacccaccctgtgctgagctttggtatccaggttgtgagtcgctgccggctacggcacactgaggtgctgcctgccgaagaggaaaatgacagcctgggtgctgatggtacccatggagccggtgccatggagtctgcggccggtgtgctcatcaagctcttttgtgtgcatactaaggcactgcaagatgtgcagatccgcttccagccacagctgaaccctgatgtggtggccccactgcccacccacactgcccacgaggacttcacatttggagagtctcggcccgaactgggctctgagggcctggggtcagccgctcacggctcccagcctgacctccgacgaatcgtggagctgcctgcacctgccgacttcctcagtctgagcagtgagaccaagcccaagttgatgacacctgacgccttcatgacacctagcgcctccttgcagcagatcactgcctctcccagcagcagcagcagcggtagcagcagcagcagcagcagtagcagcagctcccttacagctgtgtctgccatgagcagcacctcagctgtggacccctccttgaccaggccacctgaggagctgaccttgagccccaagctgcagctggatggcagcctgacaatgagcagcagtggcagccttcaggcaagcccgcgtggcctcctgcctggcctgctcccagccccagctgacaaactgactcccaaggggccgggccaggtgcctactgccacctctgcactgtccctggagctgcaggaagtggagcccctggggctaccccaagcctcccctagccgcactcgttcccctgatgtcatctcctcagcttccactgccctgtcccaggacatccctgagattgcatctgaggccctgtcccgtggttttggctcctctgcaccagagggccttgagccagacagtatggcttcagccgcctcggcactgcacctgctgtccccacggccccggccagggcccgagctcggcccccagctcgggcttgatggaggccctggggatggagatcggcataataccccctccctcctggaggcagccttgacccaggaggcctcgactcctgacagtcaggtttggcccacagcacctgacattactcgtgagacctgcagcaccctggcagaaagccccaggaatggccttcaggaaaagcacaagagcctggccttccaccgaccaccatatcacctgctgcagcaacgtgacagccaggatgccagtgctgagcaaagtgaccatgatgatgaggtggccagccttgcctctgcttcaggaggctttggcaccaaagttcctgctccacggctgcctgccaaggactggaagaccaagggatcccctcgaacctcacccaagctcaagaggaaaagcaagaaggatgatggggatgcagccatgggatcccggctcacagagcaccaggtggcagagccccctgaggactggccagcactaatttggcaacagcagagagagctggcagagctgcggcacagccaggaagagctgctgcagcgtctgtgtacccaactcgaaggcctgcagagcacagtcacaggccacgtagaacgtgcccttgagactcggcacgagcaggaacagcggcggctggagcgagcactggctgaggggcagcagcggggagggcagctgcaggagcagctgacacaacagttgtcccaagcactgtcgtcagctgtagctgggcggctagagcgcagcatacgggatgagatcaagaagacagtccctccatgtgtctcaaggagtctggagcctatggcaggccaactgagcaactcagtggctaccaagctcacagctgtggagggcagcatgaaagagaacatctccaagctgctcaagtccaagaacttgactgatgccatcgcccgagcagctgcagacacattacaagggccgatgcaggctgcctaccgggaagccttccagagtgtggtgctgccggcctttgagaagagctgccaggccatgttccagcaaatcaatgatagcttccggctggggacacaggaatacttgcagcagctagaaagccacatgaagagccggaaggcacgggaacaggaggccagggagcctgtgctagcccagctgcggggcctggtcagcacactgcagagtgccactgagcagatggcagccaccgtggccggcagtgttcgtgctgaggtgcagcaccagctgcatgtggctgtgggcagcctgcaggagtccattttagcacaggtacagcgcatcgttaagggtgaggtgagtgtggcgctcaaggagcagcaggccgccgtcacctccagcatcatgcaggccatgcgctcagctgctggcacacctgtcccctctgcccaccttgactgccaggcccagcaagcccatatcctgcagctgctgcagcagggccacctcaatcaggccttccagcaggcgctgacagctgctgacctgaacctggtgctgtatgtgtgtgaaactgtggacccagcccaggtttttgggcagccaccctgcccgctctcccagcctgtgctcctttccctcatccagcagctggcatctgaccttggcactcgaactgacctcaagctcagctacctggaagaggccgtgatgcacctggaccacagtgaccccatcactcgggaccacatgggctccgttatggcccaggtgcgccaaaagctttttcagttcctgcaggctgagccacacaactcacttggcaaagcagctcggcgtctcagcctcatgctgcatggcctcgtgacccccagcctcccttagctgctaagcctgccttgcccaggggtgggatggcactgaaggccagcagacaggcctaggctggggcagggtcacggctggcctttacctgctcaggcccccatctctggggtgtttgggggtcagggagcagggagcactggccgtggtctacagcgtgtggtagtcagaaggtttagctgggcccagggcaggtattgcgcctgcttgggttctgccatgcctggagcatgaccctgagatcgtgacaccacttgagtggaattttccatgttcctttttacctctaatttggatctttttgtttttgaaaaacattgagaaattcaattaaatgcttttggaataaaatggaaaaaaaaaaaaa

SEQ ID NO: 917 - DNA, 3435 bp, Homo sapiens
gttggtccgcggacgccggaagtagttcgtcgctccctagcggccgaaggggcgggctcgcggggtctcgactgctttcggcttgctcggcggagcaagatggcggacatctccctggacgaactcatcaggaagcgcggggcggcggcgaaaggacggcttaatgccagaccgggagttggaggtgtccgatctcgagttgggatccagcaaggccttctcagccagtcaacacgcacagccaccttccagcagagatttgatgcccggcagaagattggcctctcagatgcccggctcaaactgggagtcaaggatgcccgggagaagcttttgcagaaagatgcccgatttcgaatcaaagggaaagtgcaggatgccagagagatgttgaactctcgcaagcagcagaccacggtgccccagaagccccgccaggttgctgatgcccgggagaagatcagcttgaagaggagttcccctgctgccttcataaacccacccattgggacagtgacccctgctctgaagctcaccaaaaccatccaggttccacagcagaaagccatggcaccacttcatccccatcctgccggaatgagaatcaatgttgtcaataaccaccaggccaaacagaatttatatgacctggatgaagatgatgatggtatagcttccgttcctactaaacagatgaagtttgcagcctcaggcggctttctccaccacatggctgggctaagcagttccaagctttccatgtccaaggccctccctctcaccaaagtggttcagaatgatgcatacacagctcctgctctcccttcctctattcgaacaaaagccttgaccaacatgtcccggacactggtgaacaaggaagaaccccccaaagagctgccagctgctgagcctgttctcagcccattggaaggcaccaagatgactgtgaataatctgcaccctcgagtcactgaggaggacattgttgagcttttctgtgtgtgtggggccctcaagcgagctcgactggtccatcctggggtagcggaggtggtgtttgtgaaaaaggacgatgccatcaccgcatataagaagtacaacaaccggtgtctggacgggcagccgatgaagtgcaaccttcacatgaatgggaatgttatcacctcagaccagcccatcctgctgcggctgagtgacagcccatcaatgaaaaaggagagcgagctgcctcgcagggtgaactctgcctcctcctccaacccccctgccgaagtggaccctgacaccatcctgaaggcactcttcaagtcctcaggggcctctgtgaccacgcagcccacagaattcaaaatcaagctttgagcaggggagtgaggcagccagaagtgggggcagaggagggtggctctgtttccccaaggcaaagcttatgaccaatgggccatcggactggagacccctgattgtgggaagggttgccagggataaagagcttcctcactggatgggacccgcctttctgtgttgtgttctgccctgtgctcttctctctacgttaacgtttcctgtagtatgtttcttcatctcatcgccaaggtaggcttgtgtttttcagtgtgtgcctccccgagcctcagccccaagctgatttcttatctggaaatggtacactgaattctctgggtggctttcttgtggccccatgggatgcagcgtgggggctgtctgaaggaccctgctttttccaggggccgaggggctgcctttcctttgtgtgtattaagcttttcaaacaatggaggggatggagagccctggtgtcctgacgggagccaggtcggcctgagagctgtgccgctcctctgtcttgtcagtggaggtgcctgggtggggagcaggtctcaggcctcttgtcctctccccagtggctccaggcctcactagtggcaagggcaggatgaggctgcaccgctgggaagagtctatctaagctcttggcttggagtcccgtgtcgtctccacccagaggaagttctccagagttcacctttcccttttccttgagttgtgctgaatgccccaccccagctctctttcccttctgggtgtctttgctgggagggggctgtgttgtgagccctcccggttctcacctcgcctggcacttaaccacaccctggttttgtgtagccgccagctctcttctggttgggcctttgaaaggctcagcctcccattgtgcagtgcttgggtttggagcttatttgaatggaagaggtcagtttgttcctggctctccatttctggcctcagttgtctacaggacagtggtcagggatgcctggaggcatatatccagctgccaccaaggggcactgtttgttcccacttatgtgagtgaccccatccatccatgaccagaggattattttcctgccttggcagaggaggaggagtcaagggagcagggcagctctaccaggcaaggtgtttccccagcataggcgcagacagttgggacgaaacttcagagcccaggcagtccctgaatgaccaggccagtgttgtcactgagtggtcccctgctggttgggagtgaagagaatccaggctggcagagctggagccagttggggagcacggttctgggagctctgcaaaatcagtagcaagtgctggaaaaggcacatgccgaagatactcaagagctcccaagatttgcttgaggctagcccagtgaaaaaaaccagagactcatgtttccaggggtcagtctgtcaggcaggaaggacccaggatttgaacccagcttcagtgtgcaggctctgaggctgcccaggacgggaaagtccaaggaaggggcctggtggtgctccacttgcagttctttaaagaatgctgctttttattctcctaaccctttcaagtgggtgcagacttctcgttagcagctggaagacattcctcccacacttttcccttcctggcccaagagagcatccagaaggcagtaggacctggtttttcaggtactgggagccgggggctcactgcttgcactgtgcttagggtagggatggtaaatatcctccctgcatggctttatcctccctctcatcccaaagcaggtatcttctggttgtcacagagtttcattgagtccagctgcagccacgtggccatctggagctggtgctataggtgaccatctggtacattgaggggacctgtttgcctcctccactctataagcagtcatcttgggagaccgggaggagaaggtggtgggctagtcctgtgtcctcctccacttcccatgcctctatgttacccatctgtgtctcctgtgcagaaggagaggaaggggcattaagagatgaagggtgattatgtattacttatccatttctgaataaacatttgttattccta

SEQ ID NO: 918 - DNA, 3348 bp, Homo sapiens
gttggtccgcggacgccggaagtagttcgtcgctccctagcggccgaaggggcgggctcgcggggtctcgactgctttcggcttgctcggcggagcaagatggcggacatctccctggacgaactcatcaggaagcgcggggcggcggcgaaaggacggcttaatgccagaccgggagttggaggtgtccgatctcgagttgggatccagcaaggccttctcagccagtcaacacgcacagccaccttccagcagagatttgatgcccggcagaagattggcctctcagatgcccggctcaaactgggagtcaaggatgcccgggagaagcttttgcagaaagatgcccgatttcgaatcaaagggaaagtgcaggatgccagagagatgttgaactctcgcaagcagcagaccacggtgccccagaagccccgccaggttgctgatgcccgggagaagatcagcttgaagaggagttcccctgctgccttcataaacccacccattgggacagtgacccctgctctgaagctcaccaaaaccatccagaatttatatgacctggatgaagatgatgatggtatagcttccgttcctactaaacagatgaagtttgcagcctcaggcggctttctccaccacatggctgggctaagcagttccaagctttccatgtccaaggccctccctctcaccaaagtggttcagaatgatgcatacacagctcctgctctcccttcctctattcgaacaaaagccttgaccaacatgtcccggacactggtgaacaaggaagaaccccccaaagagctgccagctgctgagcctgttctcagcccattggaaggcaccaagatgactgtgaataatctgcaccctcgagtcactgaggaggacattgttgagcttttctgtgtgtgtggggccctcaagcgagctcgactggtccatcctggggtagcggaggtggtgtttgtgaaaaaggacgatgccatcaccgcatataagaagtacaacaaccggtgtctggacgggcagccgatgaagtgcaaccttcacatgaatgggaatgttatcacctcagaccagcccatcctgctgcggctgagtgacagcccatcaatgaaaaaggagagcgagctgcctcgcagggtgaactctgcctcctcctccaacccccctgccgaagtggaccctgacaccatcctgaaggcactcttcaagtcctcaggggcctctgtgaccacgcagcccacagaattcaaaatcaagctttgagcaggggagtgaggcagccagaagtgggggcagaggagggtggctctgtttccccaaggcaaagcttatgaccaatgggccatcggactggagacccctgattgtgggaagggttgccagggataaagagcttcctcactggatgggacccgcctttctgtgttgtgttctgccctgtgctcttctctctacgttaacgtttcctgtagtatgtttcttcatctcatcgccaaggtaggcttgtgtttttcagtgtgtgcctccccgagcctcagccccaagctgatttcttatctggaaatggtacactgaattctctgggtggctttcttgtggccccatgggatgcagcgtgggggctgtctgaaggaccctgctttttccaggggccgaggggctgcctttcctttgtgtgtattaagcttttcaaacaatggaggggatggagagccctggtgtcctgacgggagccaggtcggcctgagagctgtgccgctcctctgtcttgtcagtggaggtgcctgggtggggagcaggtctcaggcctcttgtcctctccccagtggctccaggcctcactagtggcaagggcaggatgaggctgcaccgctgggaagagtctatctaagctcttggcttggagtcccgtgtcgtctccacccagaggaagttctccagagttcacctttcccttttccttgagttgtgctgaatgccccaccccagctctctttcccttctgggtgtctttgctgggagggggctgtgttgtgagccctcccggttctcacctcgcctggcacttaaccacaccctggttttgtgtagccgccagctctcttctggttgggcctttgaaaggctcagcctcccattgtgcagtgcttgggtttggagcttatttgaatggaagaggtcagtttgttcctggctctccatttctggcctcagttgtctacaggacagtggtcagggatgcctggaggcatatatccagctgccaccaaggggcactgtttgttcccacttatgtgagtgaccccatccatccatgaccagaggattattttcctgccttggcagaggaggaggagtcaagggagcagggcagctctaccaggcaaggtgtttccccagcataggcgcagacagttgggacgaaacttcagagcccaggcagtccctgaatgaccaggccagtgttgtcactgagtggtcccctgctggttgggagtgaagagaatccaggctggcagagctggagccagttggggagcacggttctgggagctctgcaaaatcagtagcaagtgctggaaaaggcacatgccgaagatactcaagagctcccaagatttgcttgaggctagcccagtgaaaaaaaccagagactcatgtttccaggggtcagtctgtcaggcaggaaggacccaggatttgaacccagcttcagtgtgcaggctctgaggctgcccaggacgggaaagtccaaggaaggggcctggtggtgctccacttgcagttctttaaagaatgctgctttttattctcctaaccctttcaagtgggtgcagacttctcgttagcagctggaagacattcctcccacacttttcccttcctggcccaagagagcatccagaaggcagtaggacctggtttttcaggtactgggagccgggggctcactgcttgcactgtgcttagggtagggatggtaaatatcctccctgcatggctttatcctccctctcatcccaaagcaggtatcttctggttgtcacagagtttcattgagtccagctgcagccacgtggccatctggagctggtgctataggtgaccatctggtacattgaggggacctgtttgcctcctccactctataagcagtcatcttgggagaccgggaggagaaggtggtgggctagtcctgtgtcctcctccacttcccatgcctctatgttacccatctgtgtctcctgtgcagaaggagaggaaggggcattaagagatgaagggtgattatgtattacttatccatttctgaataaacatttgttattccta

SEQ ID NO: 919 - DNA, 616 bp, Homo sapiens
ggcttccgtagcgggagggcgaaagatggcggcggcagtactgggacagttgggtgcgttatggatacataacctgaggagccgggggaagctggccttggggaaatctaccactgtcgaagacaaataaaatatagcaaagacaagatgtggtatttggcaaaattgatacgaggaatgtctattgaccaggctttggctcagttggaattcaatgacaaaaaaggggccaaaataattaaagaggttctcttagaagcacaagatatggcagtgagagaccataacgtggaattcaggtccaatttatatatagctgagtccacctcaggacgaggccagtgcctgaaacgcatccgctaccatggcagaggtcgctttgggatcatggagaaggtttattgccattattttgtgaagttggtggaagggcccccacctccacctgagccaccaaagacggcagttgcccatgccaaagagtatattcagcagcttcgcagccggaccatcgttcacactctatgatgaggagattcagactccacagtgtatatattttgccatttattttctaaaaataaacaaaaattgaaggcaaaaaaaaaaaaaaaaa

SEQ ID NO: 920 - DNA, 735 bp, Homo sapiens
ggcttccgtagcgggagggcgaaagatggcggcggcagtactgggacagttgggtgcgttatggatacataacctgaggagccgggggaagctggccttgggtgttttacctcaatcatatatccacacaagtgcttctcttgacatttctcgaaaatgggagaagaagaataaaattgtttatcctccacaactgcctggagaacctcggagaccagcagaaatctaccactgtcgaagacaaataaaatatagcaaagacaagatgtggtatttggcaaaattgatacgaggaatgtctattgaccaggctttggctcagttggaattcaatgacaaaaaaggggccaaaataattaaagaggttctcttagaagcacaagatatggcagtgagagaccataacgtggaattcaggtccaatttatatatagctgagtccacctcaggacgaggccagtgcctgaaacgcatccgctaccatggcagaggtcgctttgggatcatggagaaggtttattgccattattttgtgaagttggtggaagggcccccacctccacctgagccaccaaagacggcagttgcccatgccaaagagtatattcagcagcttcgcagccggaccatcgttcacactctatgatgaggagattcagactccacagtgtatatattttgccatttattttctaaaaataaacaaaaattgaaggcaaaaaaaaaaaaaaaaaa

SEQ ID NO: 921 - DNA, 15976 bp, Homo sapiens
ttgtttattttgtttttagtttttggggtccccgtgctgctgcaaggcgaaacgggagggagtgacccctgcgcccctcagtcccccctacgacgtcgcctccatagtctgcggagaagcggagactgcgcgcctcgcctcacagcgaaacgccgcgcactcggagccggcacggctcggcgggttgtggttttttgcactgaatgtaacctagactcatcttcacgggcttgtgttgccccaggtactgtcaaaggcagtatttttgtgtttctgcagagttttgcacaaaatctgttcccatgcaaaccaatgagggagaagtatcggaagaaagcagttccaaggtggaacaggaggattttgtaatggaagggcatggcaagactccacctcctggtgaagaaagcaaacaagagaaggagcaagaaagggaagaacagttaatggaagacaagaaaaggaagaaagaggataaaaagaaaaaagaagccactcagaaggtcacggaacaaaaaaccaaagtgcccgaagtgacgaaaccaagtttaagccaaccaacggccgccagcccaattggcagctctccatcgccaccagtcaatggtggcaacaatgccaaaagggtggcagtgccgaacggacaaccgccaagcgccgcccgctacatgcctcgggaggtgccgccgcgattccgttgccagcaggaccacaaagtgttactaaaacgtgggcagccccctccaccgtcctgcatgctccttgggggtggggcagggcctcctccctgcacagcacctggagcaaacccaaacaacgcacaagtgacaggagcgctgctgcagagtgagagtgggactgcgccagtctggagcaaaagcacaccacctgctccagataatggtacttccgcttggggtgagccaaatgaaagcagtcctgggtggggcgagatggatgatacaggagcatcgaccacaggctgggggaacacgcccgccaacgctcccaatgccatgaagcctaattccaaatctatgcaagacggctggggggagagtgacgggccagtcacaggagctcgccatcccagctgggaagaggaggaggatggaggagtctggaacaccactggctctcagggcagtgcttcctcccacaactcagcaagctggggacaaggaggaaagaaacaaatgaagtgctcactcaaaggaggaaacaatgattcatggatgaatcctcttgccaaacagttttcaaatatgggattgctgagtcagactgaagataatccaagcagcaaaatggatttgtctgtaggaagcctttcagataaaaaatttgatgtggacaagcgagcgatgaatctcggggattttaatgatatcatgaggaaggatcgatctgggttccgtccacctaattccaaagacatgggaaccacagatagtgggccttattttgagaagggcggtagtcatggtttgtttggaaacagcacagcacaatcgagaggtctgcacacacccgtgcagccactaaattcttctcccagtctccgggcgcaagtgcctccccagtttatttccccccaggtttctgcctcaatgctcaagcagtttcccaacagtggcctgagtccaggtcttttcaatgtggggccccagttatctcctcaacaaattgccatgctgagccagcttccacaaattccccagtttcagttggcatgtcagcttctcttgcagcagcagcaacagcagcagttgttacagaaccagagaaagatttctcaagctgtacgccaacagcaagagcagcagctggctcgaatggtgagtgcactgcagcagcagcagcagcagcagcagaggcagccaggcatgaagcactcgccctctcatcctgttgggcccaagccgcatctggacaacatggtacccaacgcattgaatgtggggctcccagaccttcaaaccaaagggccaatacctggatatggttctggcttcagctctggcggcatggactatggcatggttggtgggaaggaggctggaaccgagtctcgctttaaacagtggacctccatgatggaggggctgccctctgtagccacacaggaagccaatatgcacaaaaatggcgctatagtggcccctggtaaaacccggggagggtcaccgtacaaccagtttgatatcatccctggtgacacactgggtggccatacgggtcctgctggtgatagctggttacctgccaaatctccaccaacaaataaaatcggaagtaaatccagcaatgccagttggcctccagaattccaaccaggagtgccatggaaaggtatccaaaacattgaccctgaatctgacccctatgtcaccccaggaagtgtgctggggggtacagccacatctcccattgtagatactgaccaccaactgctgcgggataacaccacagggtctaattcttccctcaacacctcgctgccttcacctggtgcctggccctacagtgcctctgacaactcctttaccaacgttcatagcacttcagcaaagttccctgattacaaatcaacatggtccccagatcccataggacacaaccccactcatctctccaacaagatgtggaaaaaccatatttcctccaggaacactacaccgctgccccgcccacctcctggtctgaccaaccccaaaccatcatctccctggagcagcacagcaccccgatcagtcagggggtgggggacacaggactcacggctcgcctcggcctctacctggagtgatggtggctcagttcgtcctagttactggctggttcttcacaatctcaccccacagattgatgggtcaaccttgagaacgatctgcatgcagcatggcccactgctgacattccatctgaatctaacccagggcactgccctgatccgatacagcaccaaacaggaggcggccaaggcccaaactgcactgcacatgtgtgtgttgggaaacactaccatccttgctgagtttgccactgatgatgaagtcagccgctttctggcacaagctcagccccctacacctgcagcaaccccaagtgcgccagctgcggggtggcagtcgctggagaccggccagaaccagtcagatcccgtgggacctgctctgaatctttttggtgggtccactgggctcgggcagtggagcagcagcgctggtggcagcagcggggccgatcttgctggcgcttcattgtgggggcccccaaactattcttctagcttatggggagtcccaacggtggaagatccccataggatgggcagccctgctcctttactacctggtgaccttctgggaggagggtcggattcaatctgaacttagaactttcaactctgacctcgtgaccttttttggaacagcagcagcactaacttgaccttttcgttttttttttcaacttgcaataaatacatttttaaaaggaaaaaagaaaacggagagaaaaaaaggtgggtcattgacagactgtctgagcacatagttgcctcccttataacttcagttttttcgtttggaatatgaatccaaaaagagaacatatcactcttgaaatacttgaatcatgaacgccaacctagaaagacaatgtgaagcaagtacacataccatttaaatttaaacacaaaaaaattaaaaaaattagtttctagtttttcacttttttcatgttatatggaagttgttgctaagaaacatatatactgaaaaaaaatagctttttaactttgtttgcactgggtgtgtttccgtccttaggtctaccatgtttgggagggagggaaattcaaaagaattgttgggggaggggggagggaagacttgacggagcctcactttaaaaacaaaaacacaaaaaacctaaaaaaaaaaaaaaggaaaaaatttgtgattggctggttgataaataccagtgtgttctggcacatgtaactgcccaggcatgctcgttctggtgtgtgtgtgcacgtgtgttcatgtgcattcgcgtgcatccttctctgtctctgtgtgtgtgcctgtgttcttcccttctcccctgccccaccctgacttctcagaaagctgcatcgctgacagtctgcaggctggctggccggcccatctgctttttattttatttttttaactatgagaacacacaggcccggagagccactgctactaaagcaactccattgggctgcattaagatgaacagagtgctttttaatgatgaaagcagggagctcctttccatttgcaacttagcctgaatgtggggtttctctggctgttcttttgacctagcagtagagtggagcactgccaagtccaaaaaactagagcaggaggtacctcttggagcaacggtgtgtttatttctgtttttttttttttttaagtgaatggccaccaggcacatctgagtatctgttaagtttcatgcaggccttttcgttagtttgaaatgggaacggaagataacttttgatgatgcgatgtctcaaaaacagagaaactttgttccctctttccttatgatcaggtttgagaaattcttcaaaaaattaggtgaagttgagttacatatttctgttggttggttctctttttcattttatgaaaacagaaaagaataagtggtgagcagcctcctgaaagcatctgcagctactccctctgctcctttctcgccgagcgttacctgtgccaggccgtggcgcgttacagcaccaggccatcactgacagaaacgtttacttaacgaatgttcttaaaccagtgtgtacttcaagcgtttccttttgtttctctgtgttgtgtatttcctgtgtatgtggttttgcttaggcaggtataacttagcgaagacttttaagtattgcacctttttttgatttttgacctcttccccccaccttgtaattttgcttttttaatttcggtatttaaatacttttttttttttttaagcatcaatgtagtagtactctgggccgaacaggggtcaacgtttaatctacagttatcaccaacatgtatgtacttatgtcggaatcaaaatgtatcaaactgcttattgtgaagagaattatagcagacctgaagggggcgaaaaaccagatagggtggggggatggatgccggtgacgtgctagcacttgtgtggacatcccagtctgcattatgctgtttaacataaagtgccgacattttgtaccagcaaatacctgcccattccaacccttggtgggagcagacctctactgtcctctgtaacttgctgctattgaggacaagggagtttttctttctttagcgtcttcagtgaaggatacaatacaacaatgcctaatgtatttgactttttagcttgtgtctgtgtgtaggtgggtgggtgggtgtgtataggaaaagcctaaaacaagttatttgcatttcagtggttttgtgagacaaagaatgggaaattctgtagcccttctggcttaccctgttgattataaacctagcctcaaaagagattgacaggcatgactcaagtgagtgttcacatatacaagcctgcatgagccctctgtgggtaggtggtcacacttggcatctgcagcattgacgtggccccgctgggtgccttgagcatgccctcttcctgctctgcaatttgaatcaccaccgtgccccttccaccactgttccccatgcaaaagctctgcttccagcagcccccactgaccgctctctgtgtggagcaaagtgctgtcgtgcggtgaccaccaggtgaagagcagcttgtattcagacatctagagaaggttaaatcttagtgtccctgggccaggagcatatcccaaggctcctgcgagccagtggcgaccctgtccactgccgctcttggttcactgctgtgtcctgccccaccctcctctcctcctgcctgttggttccttgacctgcactatgggttagttgagttccttacgatactacggtgaaagccgggtgctagagcccctcttgtttacaagacataatgagggatttgaaatatgtaaaaataaacatgagaagctaaaatgttcttccatcataagcttaaagggaaaaaaactaaaaactttaaaaaaaaaagaccaaaaagtgcgtatatatatacatataaatatatattttagatgaagactaactctgggagcatttaacagtgttttttgtttctgtttttaacatttgttttcctgctttaaaatttgcaagcattctcaggaattctagggtaggaagccagttttttgaagatggtttatttaaccatatcttatcctagagagatggctgtttctttcctgttaataaacttttacaagttcctgaaacttcagaaagtttaaacaatttttacttaaaaaaatgtaaaaagaaaagtctccaaacattattgtcatactggggatcacacattttaaaacacatagaaatattttttaaaaattatcaatttagcagcaacaggtaaattcattatcttaaaaatatgggagaaggattaagctttgtaagagctcgatcatggattcttttgaaattgtgtgtagtttaatgggagagtgtttggtgtatatagatgagaatgccatcactttgttcctttccatttgagactgaactgaaatctcccctagtaatttttatttttttaaaggaacccttctccttgtccccacaaccccagcaacaaaagaaaggaaggaaggaagaaacaacagcttaaaaaaaaaagtaatctgtaaaatagtacagttggattgctgagaatctatgtaaagagttaggaaatataggttaataatttttggaacaaattttaaatataggcattactagaggaaaattatctatggactgtcctattaatgaagaatgtctgtcttacctccgtttgttttgggaggaggagaaaatatagaagaatctaataaggaacaagtgattttacttttttagctcccagctactgttgtgctcgttttaattgctgttttgaagatctgctgcttaattatccccatcccttagccggagatgtggagtgtttcctttcagtttttggtgatgttgaattcttttgtattccctcctggggccaggggtcagaattcccaagcatgaccacagcttcttttaaacattaagcttcccagtgggaaggaaactccagctcgacaggtaaagggagtgggtggggttgctgcctgcaatttctctaaaaccgctttagtgccttcgtacatacacccagacatcctgagcaagggggacgcacatgtgtgtgtgtgtggtccagtcactccacagatgtaagatactcacccataaaggaaattggagtggttctggacaggccccaaaggcagtgggctgaatttaaaataaataaacaaacgtcaagcaagttaatatgcttatgtctcagtaatgtagaatgccaagttccttcctgtgtcgtgtgccctccattactgtgcattgattcctccaggtgtgtaattgtgacaactgcagtgatttggaaagtctctttgtcttgggcaaatagaaggggttcctgttgttctgctcttgtccttcgtctcctccccttttcccccagacctcccccttctttttgtcaacttgctgggagctttgctttattggttggcagtgacctaagaacaggatatggtgaggatgtcatggaagagaagagctctttccgtggtattctttggcaagagccatgtctactaagaggttagatgacttcagtatacttataaaattcagtgagagtgccttcttctcttctaccacactctggcatagatacaggcttgctggtcacctctcattacatagatttattttaaaaacattttgattatgttaatttgagctttcccttttttttttttaactactttttaaaacacttgattactagtggcttagaggtgtgtacatctcctgaacatcacaaacttggtttctacctaccacacgagtagccaaaagaaaagaagcactaatagagaaaggggtgtctcacaccagacagaggacctctgctgtcaattagatccagtatcatgacctaactttaagtgtggaaaagagttcagatctctgagacactgtgaagaaatggatggctcatgtaacatctctgatccctcagtccccaaccctggacgtgtttcatttacaacattcataggagttaacttagcagtgttgcaagttaaggttccaaaccaaattatttaatcagtgtccccccaataaatcacttatccatttattgctagttagttttatttatagcaacttgatttcctatgagtatggctcctgttgtaagaattttcccacctcttctgacatgaatgtagcataagttagcaatcggttcttccaaactcctgtgggttgaatatggtatagaaggtatgcaagaggaaaaagaaaggaaaagataaaactcctgcctgagaatttggaagcacctttattaacacatatatctcgcagaaactagaagctcataggctgttaactttttgcaactattcactcatttttaccacttttttttttgggtgagggggtgatttttgtaaggttaacagccagattccattttgacctcagatgctgtgtactttttaatttcattttttatattctgccatcttgactcttctctaaaacagaatgaaaatgtctgcatgctgagcaaaatgcttacgccaagcctgtttttctctgcagagtaaacaggatgttttcagcagacttggctctaatagccatctctaagattagggaacaattgagtctttatgtagaaaagatccattttttccccatcctcagagttaaaattcaacatttaaagctttatcggttattgttttagatttgagatttttgtttttaagtatctataagatctttagaagtgagataaatttttcgctggttaaaaaaaatcaaactttcctctgcagtgtttttgccaagttttgtcacacttcatgtgtatgcattaactatacttcttagtgttactgcaaaaaaaaaaaacaaaaacaaaacaaaaaaaagccttgttctttaattgtgtttttcctcctgtgagtggacaactaaagccgcgtgatgatgcggatgaaaatattctggtctgtgtgtatacaatgaattgtcagtcttcagacctcatggtcgttaagaaaatagggaactcacaaaccctgctgcgcactacatttacttctttatctgcaagtacagggagtccatacagtcaagaaacacacagatacacataatgctattgaggacattgtcattctgtaagaaaacagaatattatctagatttccagagttagtgcagaccctgtgataacagtctgtgggtttgtggccagcgccaaaggtgtgtgtattttcagaaatggtccctatttgtcagtgatagtgttttttttttcttaagtttgacaaagggggtggtaatatcacattctttagatttgaaataattatcagctccaagaatctgtgaacatagtaataacaataaaaattcaacatcgaccctccctaacctgctcaccatacctccccaccccatgcctctgaagaaagaggccatgaacctacgaggtggtaaagggggacacaggtcagggagtggagagctactcctccagcagctcagcacccacactgcccgcatgcgtgtggccaccgggaccagatcccgagtgattgtggcatacccctaatatttgagtagtttttaagctgtcagtctcttgtcataacctcctaccgccacccaaaaaagtaacgaaagttgcagtaactgccagtgtttgcctcaccaaatttaaatcgttcccttttcagttagctatatacctgaatttgtttttaacaagaaactgtacatggccaggaaaaatggtactaccttggccaaagggtctttgcaaaaagctcagtcttcagttcttcactgtgacaaatgcttatcttgttcatgggaggggaaagatcagataaataggcaagaagtactctgttttaaataaagaataaatagtgtccgtttaaagcactttgtgcctcaacttcatttttaaactgtaaatcattgctttggaaataaattcccaattataattgacccatatctagccaatatcaacaagttgggatggtttttgtttttttcttttttttcaaaaagggaaattcctctttactgctcacagtaagctgcaaaagaaagttgtcaaggtggcttatgatgctgttgtagcagagctgtgaaaggaagtgctttgctttctctcccgccttccggaatctggcgttccttccccttcggctactgaaaggtgtgtacaactcccagaggggtggctgtaaaagttgactggaggcaaagtggagtggccttattgccaggactagccctacagaagagctttacagagaggaggacagtacatcctatgtgtgttcgccaaaaatgggaaaggtgggtatttaggcaaaacaaaataaaaacctttggaaccctttaagaagttacataccttttaaaggtagtatagtttctcaccaagtgatgcattttagcatgacacttcttgccagaaattttgggataagttggaataaatgtgtttaaaacatcatccaccgccctttttaaattttgtctaaggaattacttaagtatagtatttctgaatgtgcctttgtgagtacagagaccgtccgttctaggaagaagctatccgttggatacaaacaaacagacggtcagctttagtcattagggaagtcaaagttcctcctggaagtcccaggagcagctgttgagatttcattagcatcaatattgcacagtgtagagttgagtggaagagattctgggacttgggagaggagacaggggaaggtacccaggcgacgcagacccacgttagtccaagagcgcaggtttacacatctgcattccctagttttctccgtctgtatgtttgtgctcatgtggctttggctgttttgttttttgtttttctgtaagcactggagaattggaatatggtgatacttgtgacacattcatgcatgtaaacaaggcattttccagcttctgccgtgtgcagagcgggcagcacgcttttaccctttgagtctgtgtcctgaggcggccattacattcccacatgggcgtcacatcacgttgctgttgatgcaaacagggtattacacacaaggaaaaggggttttgaagagttaagattgaagtgtttgagaaagaaaagagaaaaatctgaaatcatattttatttcttcagagctattatagttgaacacagaaatctgcagtgtctttatttgtttttatgttttaaacaatttcacctcttctccccactcctatcttctaaagaaatatcaagcaaatgctaagggccatttccatgattcctcagagctcccccaaagaggagaacagtccctcccactcgattccttcagcttcattcaggaagacacagggaggagagatgctgcttctgcgctttgctctcattcctctctcatggccttgaaatgtattattatgcaaatgtgaattttgatactgaatttaagaagaggttgttggatttttttttttttttttttttttttcaaaaaaaaaagtcccacatgtggtcatcgtcgcttctttatgttgtaaggtgaattgtaactatgcattctgcaaagggggtggggaggagagggcagaaaggggaagggagtagcgttgcatccttgttcttcagtttctgtgtccatggtgtccccgtgtcctggaggggaaggggagtgagagacgaatgtggtaaggtcagcacagtgagatagagacctctgagtcctcttgccactgttgctggcaggtctgatggccaggtaaattccagggggcctgcagttcctgtcaaccaatgtggttcaggattcttgatcctagccgtgcagtgttaatccagtgcagcaatggaactccacaggctccagtgttctctggaaaaagtactcatcctttcctgaattcagagcccttcaagctcaggaaaccacgcttcactcgtgctgacctgaaagttaatctttaggtcgattttgaaaaactccgcctcctctctcctttttaatatttctttcttcctttttaatcatgtttaagtgaacttactcttagttataaggaactgtcctgctttgtggggaagagggctgttgcttgtcaggcaaaaaagttttctcttcctacccaccatccctctctctgcttcccttgcatttggcaggctgtatgaagccaatgagctgcgaggtgttttgacaggggaggtctgcatgcagcctcttctttgtcctaacaattcctttgttgatcttgcctgtgatgaatcatagcgcctgcattgctctggtctaggcattatttgcaacacacagtatcgtaagcgagagattgttctgcctatattcagtgttttccatgcagcaattcttcttgttgacgttcacagtactgtaacgagtaacagacttgatcacagtctcctcgtgcctgtgcagggctgcacaggcatgatcttatcagggttccaatctgttagattgcctttaaacaaaaaaaacaacaaaaaaataaaatcctgacgtttcaactgtctcacacaaaataatacctcgaggtacatttccccctgcaatgtaaacccttaactcctctctcctttctgacatcagtggattatcctttttaaaatatgaacatgtaaatagcaggataactttaaaaaacattttctttgctgtgaaagtaaccctaaaatatgttttcttcttttgtatttttttggtttttgtttttaagccatcagaagtttcagatctttactctttcatgtttaagaagaaagagcagaggaggtcgggggagccggtttgcatttgtgttggaggggtgttatctccattgcctcccacacagtgacagcagaccagtatgtaaaccctgtcttggctgggcgcggtggctcacaccagtaatcccagcactttgggaggctgaggcaggcagatcatctgaggtcaggagtttaagaccagcctggccaacatggtgaaaccccgtctctactaaaaaattagccggacgcagtggcgcgcgcctgtggtcccagctgctcgggaggctaaggcaggagaattgcttgaacccgggagacggaggttgcggtgagccgagattgcaccactgcactccagtgtgggcaacagagcaagacttcgactcaaaaacataaaataaacaaaagacacacacacacacaaaaaccctgtcttaaatagctgccatctcttccagcaatctagtgccagggtaagaagtgtctgaatttctctcttccagcagatccatcccctgcagggactccagaatgttctccacacaatacctggagctctcaacctttcttggttcagacacacacatacacaccccttgagtaactcagtatcattttgtagttcacagaaggatgtagtccctggcattttggtttgcactgtagaatccatagccttgtcactttgttatgctctggaaatgtactgatttcttacttgggaggaaacttgtgtaaggagatgtgcaaaccaccctgaaagccatgtgcatcctcacctcttccattaccccctccatgagctcgaagcgacattaagtagagggaaatgcttttaacaaatgctgctcatgtggatctgtcagctattgcttgcctagatttgggcacccatgaagcagggttggaatggatcattttgaattgcttctttgcagacacccccttcgcccccatctttaagataaaccctttactagtcaagaagcccttttcagttggatctcactgatcttgtatagtgacgacttcctttgaaggaagaagcttgattataagtgcatgcatattatccacccaccttctgatttgggcactgttcaccttggaattttatttattttgtttatctggaggccctttttctatcagtctctgatccctcatgggttctgcctgcccttgtatctcttgtacaatgctcccaaagggctttgctgatctctgcacttctttcctgggacactccccccaccaccaccctttgcacacaccagtgaccaaagtgtatgcagtgatctcacagaagacatcaaaaatggtgcatgcaccgtgaatgtgctcacagagacacgtgcacaagattctgcacccttggccttaatctcagtatgacttaaggtgcaggaacatttttaacaggttttaaaaaaacaaaaaacccttctgggaggaaaaaaataaaaagcagatacaacagctcaactgttcccactcctaactctccactatgtgcttataacttcacattctatgccctccccgccacccacctcatccctgttctgcgtaaccaaaaaacagacaacaaaagcaacctgaggagaggtttctggactattttatctgtctccatttagatggagatataaatgctgctttgggttccataatcctagggggctatgtttacatagtaaaatacatcctaccaaatcaggaaacagtgaataatgggagtcacttcacagagacgcaggaggacctggggggcgtagcagaggaggataggtagagaagtaccattttaattatttgtgacttgtggcttccttcctcctctcctcctccctccacgtctctctttgccccctttagacagaaggtgcagaaaagggcatcaaaaagaggctggattttttaaaaggcagctttccaactttgcacacaaacaggtaacaggaaggtacagcaaaaatcctctcatctgaaacactgtcagcagaaacaaaacctgtaaaaatgactaatcagctgcacatattgatgctctctgcaagttacctttaagtgttttttttttcttatacttgaagttgcttttacgatattattttggtggctttcttttctctctttgatgggcaatagaggaagtagataatgggatttaaggacgcctgggggagaaaagggaggatgtggcattgtctttttttttttttttttttttttttttagcatagaggtttaatcaaactcccatatgttgaaattgctcctcatattactggttttacatggacacagaaactaggcactttagaggtgcacttgcatggcaggctgggcccccttttctatattttattttcctttttagtatagtggtacttaaaatcactggttcacttaaaaaaacaaacaataaaatgttaaactctactaatgtacaaataagctgaaaagttgcattttatgtgtattttttgccatagcaggtactgtatttctcatgctggatttcaaaaaaaaaaaaaaaagtatcaaaaacaaaaaaaactaaagggtggtgttttattggattgtgacaggttgagtaataaggaattaagtcgtcgtcatttcattaaaactgagagatgatgtaatgcatatataagagttttctgaagggttttttttgggcttttaaacagcttatttttgtttttgtttagtttttttattttattttattttggaaagatatgattgtattatgtgcaactcagttgcttacattataactacaaaatatttttgggttcctggaaaaaaaagaaaaaagactaataaatgtgtttggctgctaagcaaaaaaaaaaaaaaaaaa

SEQ ID NO: 922 - DNA, 17947 bp, Homo sapiens
gagagagcaagagggagagtgtgtgagagagagttagttcaagccaaaatggccgacagagtctctgctggtttctgaatatttaaaatacaaaaaaacagatagacaaaaagaattcattttttggaccttttttcatttccatttctaccttgtatgcctcaatttgctggatttaagcactgctgcactttatgagagagaaggagcaagaaagggaagaacagttaatggaagacaagaaaaggaagaaagaggataaaaagaaaaaagaagccactcagaaggtcacggaacaaaaaaccaaagtgcccgaagtgacgaaaccaagtttaagccaaccaacggccgccagcccaattggcagctctccatcgccaccagtcaatggtggcaacaatgccaaaagggtggcagtgccgaacggacaaccgccaagcgccgcccgctacatgcctcgggaggtgccgccgcgattccgttgccagcaggaccacaaagtgttactaaaacgtgggcagccccctccaccgtcctgcatgctccttgggggtggggcagggcctcctccctgcacagcacctggagcaaacccaaacaacgcacaagtgacaggagcgctgctgcagagtgagagtgggactgcgccagactcaacccttggaggtgctgctgcttcaaattatgcaaattccacttggggctcgggagcctcctccaacaacggcacctcccccaacccaattcacatctgggacaaggtgattgtagacgggtctgacatggaagagtggccttgtattgccagcaaagacactgaatcttcttccgaaaacaccaccgataacaacagtgcctcgaaccctggctctgagaagagcactctgccaggaagcaccactagtaacaaaggaaaagggagccagtgccagtctgcaagttctgggaacgaatgtaatcttggggtctggaaatctgaccctaaggctaaatctgttcaatcttccaactctactacagagaacaacaatggactaggaaattggaggaatgtgagtggtcaggatagaattggacctggctctggcttcagcaactttaacccaaatagcaacccatctgcctggccagcactggtccaagaaggaacttctaggaaaggggcattggaaacagataatagtaattccagtgcacaggttagcacagtaggtcagacatccagggaacagcagtcaaagatggaaaatgcgggtgttaattttgttgtctctggcagagaacaggctcaaattcataacactgatggaccaaaaaatggaaacactaactccttgaacttaagttcaccaaaccccatggagaataagggaatgccctttggaatgggcttggggaacacctccaggagcactgatgccccttcacaaagcactggagatcgaaagactgggagtgttggatcttggggtgcagctagggggccttctggaactgacacagtctctggacaaagcaattctggaaacaatgggaacaatggaaaagagagagaggactcctggaaaggagcttctgttcagaaatcaactgggtcaaaaaatgactcttgggacaacaataacaggtctacgggtgggtcctggaactttggcccccaggactctaatgacaacaaatggggtgaagggaacaaaatgacatctggggtctctcagggagaatggaaacagccgactgggtctgatgagttgaaaattggagaatggagtggtccaaaccaaccaaattctagcactggagcatgggacaatcaaaagggccaccccctccctgaaaaccaaggcaatgcccaggctccctgttggggaagatcttccagctccacaggaagtgaagttggaggtcaaagcactggaagcaaccacaaagcaggaagtagtgacagtcataactctggccgtcggtcgtacaggcccacacatcctgattgtcaggctgtcttgcagactcttttgagccgaactgatttggaccccagggtgctctcaaacactggctggggccaaactcaaattaagcaggacacagtgtgggacattgaagaggtgccaaggcctgaggggaaatctgacaaaggaactgaggggtgggagagcgctgccacacagaccaagaactcagggggctggggagatgcacccagccaaagcaatcaaatgaagtctggatggggggagctctcagcctctacagagtggaaagaccccaagaacacaggaggctggaatgactacaagaacaacaactcttccaactggggaggaggacgacctgatgaaaagacaccttcctcttggaatgagaatcccagcaaggatcaggggtggggaggtggacgccagcccaatcaaggatggtcttctggaaagaatggttggggggaggaagtcgatcagacaaaaaacagcaattgggaaagttctgcaagtaaacctgtgtctgggtggggtgaaggagggcagaatgaaatcgggacttggggtaatggtggcaatgcaagcctagcttcaaaaggtgggtgggaggattgcaaaagatccccagcatggaatgagacgggccgacagcccaattcctggaataaacaacaccaacagcagcagcccccacagcagccgccgccaccacaaccagaggcttctggttcgtggggaggcccacccccaccacctccaggcaacgttcgaccttccaattccagctggagcagcgggccacagcctgcaacacctaaggatgaggaacccagtggttgggaagagccatccccacagtcaattagtcggaaaatggacattgatgatggcacttcagcatggggagaccctaacagttataactacaagaatgtgaatctgtgggataagaattcccaagggggcccagcacctcgagaaccaaacctgcccaccccaatgaccagtaaatcggcatcagattccaaatctatgcaagacggctggggggagagtgacgggccagtcacaggagctcgccatcccagctgggaagaggaggaggatggaggagtctggaacaccactggctctcagggcagtgcttcctcccacaactcagcaagctggggacaaggaggaaagaaacaaatgaagtgctcactcaaaggaggaaacaatgattcatggatgaatcctcttgccaaacagttttcaaatatgggattgctgagtcagactgaagataatccaagcagcaaaatggatttgtctgtaggaagcctttcagataaaaaatttgatgtggacaagcgagcgatgaatctcggggattttaatgatatcatgaggaaggatcgatctgggttccgtccacctaattccaaagacatgggaaccacagatagtgggccttattttgagaagggcggtagtcatggtttgtttggaaacagcacagcacaatcgagaggtctgcacacacccgtgcagccactaaattcttctcccagtctccgggcgcaagtgcctccccagtttatttccccccaggtttctgcctcaatgctcaagcagtttcccaacagtggcctgagtccaggtcttttcaatgtggggccccagttatctcctcaacaaattgccatgctgagccagcttccacaaattccccagtttcagttggcatgtcagcttctcttgcagcagcagcaacagcagcagttgttacagaaccagagaaagatttctcaagctgtacgccaacagcaagagcagcagctggctcgaatggtgagtgcactgcagcagcagcagcagcagcagaggcagccaggcatgaagcactcgccctctcatcctgttgggcccaagccgcatctggacaacatggtacccaacgcattgaatgtggggctcccagaccttcaaaccaaagggccaatacctggatatggttctggcttcagctctggcggcatggactatggcatggttggtgggaaggaggctggaaccgagtctcgctttaaacagtggacctccatgatggaggggctgccctctgtagccacacaggaagccaatatgcacaaaaatggcgctatagtggcccctggtaaaacccggggagggtcaccgtacaaccagtttgatatcatccctggtgacacactgggtggccatacgggtcctgctggtgatagctggttacctgccaaatctccaccaacaaataaaatcggaagtaaatccagcaatgccagttggcctccagaattccaaccaggagtgccatggaaaggtatccaaaacattgaccctgaatctgacccctatgtcaccccaggaagtgtgctggggggtacagccacatctcccattgtagatactgaccaccaactgctgcgggataacaccacagggtctaattcttccctcaacacctcgctgccttcacctggtgcctggccctacagtgcctctgacaactcctttaccaacgttcatagcacttcagcaaagttccctgattacaaatcaacatggtccccagatcccataggacacaaccccactcatctctccaacaagatgtggaaaaaccatatttcctccaggaacactacaccgctgccccgcccacctcctggtctgaccaaccccaaaccatcatctccctggagcagcacagcaccccgatcagtcagggggtgggggacacaggactcacggctcgcctcggcctctacctggagtgatggtggctcagttcgtcctagttactggctggttcttcacaatctcaccccacagattgatgggtcaaccttgagaacgatctgcatgcagcatggcccactgctgacattccatctgaatctaacccagggcactgccctgatccgatacagcaccaaacaggaggcggccaaggcccaaactgcactgcacatgtgtgtgttgggaaacactaccatccttgctgagtttgccactgatgatgaagtcagccgctttctggcacaagctcagccccctacacctgcagcaaccccaagtgcgccagctgcggggtggcagtcgctggagaccggccagaaccagtcagatcccgtgggacctgctctgaatctttttggtgggtccactgggctcgggcagtggagcagcagcgctggtggcagcagcggggccgatcttgctggcgcttcattgtgggggcccccaaactattcttctagcttatggggagtcccaacggtggaagatccccataggatgggcagccctgctcctttactacctggtgaccttctgggaggagggtcggattcaatctgaacttagaactttcaactctgacctcgtgaccttttttggaacagcagcagcactaacttgaccttttcgttttttttttcaacttgcaataaatacatttttaaaaggaaaaaagaaaacggagagaaaaaaaggtgggtcattgacagactgtctgagcacatagttgcctcccttataacttcagttttttcgtttggaatatgaatccaaaaagagaacatatcactcttgaaatacttgaatcatgaacgccaacctagaaagacaatgtgaagcaagtacacataccatttaaatttaaacacaaaaaaattaaaaaaattagtttctagtttttcacttttttcatgttatatggaagttgttgctaagaaacatatatactgaaaaaaaatagctttttaactttgtttgcactgggtgtgtttccgtccttaggtctaccatgtttgggagggagggaaattcaaaagaattgttgggggaggggggagggaagacttgacggagcctcactttaaaaacaaaaacacaaaaaacctaaaaaaaaaaaaaaggaaaaaatttgtgattggctggttgataaataccagtgtgttctggcacatgtaactgcccaggcatgctcgttctggtgtgtgtgtgcacgtgtgttcatgtgcattcgcgtgcatccttctctgtctctgtgtgtgtgcctgtgttcttcccttctcccctgccccaccctgacttctcagaaagctgcatcgctgacagtctgcaggctggctggccggcccatctgctttttattttatttttttaactatgagaacacacaggcccggagagccactgctactaaagcaactccattgggctgcattaagatgaacagagtgctttttaatgatgaaagcagggagctcctttccatttgcaacttagcctgaatgtggggtttctctggctgttcttttgacctagcagtagagtggagcactgccaagtccaaaaaactagagcaggaggtacctcttggagcaacggtgtgtttatttctgtttttttttttttttaagtgaatggccaccaggcacatctgagtatctgttaagtttcatgcaggccttttcgttagtttgaaatgggaacggaagataacttttgatgatgcgatgtctcaaaaacagagaaactttgttccctctttccttatgatcaggtttgagaaattcttcaaaaaattaggtgaagttgagttacatatttctgttggttggttctctttttcattttatgaaaacagaaaagaataagtggtgagcagcctcctgaaagcatctgcagctactccctctgctcctttctcgccgagcgttacctgtgccaggccgtggcgcgttacagcaccaggccatcactgacagaaacgtttacttaacgaatgttcttaaaccagtgtgtacttcaagcgtttccttttgtttctctgtgttgtgtatttcctgtgtatgtggttttgcttaggcaggtataacttagcgaagacttttaagtattgcacctttttttgatttttgacctcttccccccaccttgtaattttgcttttttaatttcggtatttaaatacttttttttttttttaagcatcaatgtagtagtactctgggccgaacaggggtcaacgtttaatctacagttatcaccaacatgtatgtacttatgtcggaatcaaaatgtatcaaactgcttattgtgaagagaattatagcagacctgaagggggcgaaaaaccagatagggtggggggatggatgccggtgacgtgctagcacttgtgtggacatcccagtctgcattatgctgtttaacataaagtgccgacattttgtaccagcaaatacctgcccattccaacccttggtgggagcagacctctactgtcctctgtaacttgctgctattgaggacaagggagtttttctttctttagcgtcttcagtgaaggatacaatacaacaatgcctaatgtatttgactttttagcttgtgtctgtgtgtaggtgggtgggtgggtgtgtataggaaaagcctaaaacaagttatttgcatttcagtggttttgtgagacaaagaatgggaaattctgtagcccttctggcttaccctgttgattataaacctagcctcaaaagagattgacaggcatgactcaagtgagtgttcacatatacaagcctgcatgagccctctgtgggtaggtggtcacacttggcatctgcagcattgacgtggccccgctgggtgccttgagcatgccctcttcctgctctgcaatttgaatcaccaccgtgccccttccaccactgttccccatgcaaaagctctgcttccagcagcccccactgaccgctctctgtgtggagcaaagtgctgtcgtgcggtgaccaccaggtgaagagcagcttgtattcagacatctagagaaggttaaatcttagtgtccctgggccaggagcatatcccaaggctcctgcgagccagtggcgaccctgtccactgccgctcttggttcactgctgtgtcctgccccaccctcctctcctcctgcctgttggttccttgacctgcactatgggttagttgagttccttacgatactacggtgaaagccgggtgctagagcccctcttgtttacaagacataatgagggatttgaaatatgtaaaaataaacatgagaagctaaaatgttcttccatcataagcttaaagggaaaaaaactaaaaactttaaaaaaaaaagaccaaaaagtgcgtatatatatacatataaatatatattttagatgaagactaactctgggagcatttaacagtgttttttgtttctgtttttaacatttgttttcctgctttaaaatttgcaagcattctcaggaattctagggtaggaagccagttttttgaagatggtttatttaaccatatcttatcctagagagatggctgtttctttcctgttaataaacttttacaagttcctgaaacttcagaaagtttaaacaatttttacttaaaaaaatgtaaaaagaaaagtctccaaacattattgtcatactggggatcacacattttaaaacacatagaaatattttttaaaaattatcaatttagcagcaacaggtaaattcattatcttaaaaatatgggagaaggattaagctttgtaagagctcgatcatggattcttttgaaattgtgtgtagtttaatgggagagtgtttggtgtatatagatgagaatgccatcactttgttcctttccatttgagactgaactgaaatctcccctagtaatttttatttttttaaaggaacccttctccttgtccccacaaccccagcaacaaaagaaaggaaggaaggaagaaacaacagcttaaaaaaaaaagtaatctgtaaaatagtacagttggattgctgagaatctatgtaaagagttaggaaatataggttaataatttttggaacaaattttaaatataggcattactagaggaaaattatctatggactgtcctattaatgaagaatgtctgtcttacctccgtttgttttgggaggaggagaaaatatagaagaatctaataaggaacaagtgattttacttttttagctcccagctactgttgtgctcgttttaattgctgttttgaagatctgctgcttaattatccccatcccttagccggagatgtggagtgtttcctttcagtttttggtgatgttgaattcttttgtattccctcctggggccaggggtcagaattcccaagcatgaccacagcttcttttaaacattaagcttcccagtgggaaggaaactccagctcgacaggtaaagggagtgggtggggttgctgcctgcaatttctctaaaaccgctttagtgccttcgtacatacacccagacatcctgagcaagggggacgcacatgtgtgtgtgtgtggtccagtcactccacagatgtaagatactcacccataaaggaaattggagtggttctggacaggccccaaaggcagtgggctgaatttaaaataaataaacaaacgtcaagcaagttaatatgcttatgtctcagtaatgtagaatgccaagttccttcctgtgtcgtgtgccctccattactgtgcattgattcctccaggtgtgtaattgtgacaactgcagtgatttggaaagtctctttgtcttgggcaaatagaaggggttcctgttgttctgctcttgtccttcgtctcctccccttttcccccagacctcccccttctttttgtcaacttgctgggagctttgctttattggttggcagtgacctaagaacaggatatggtgaggatgtcatggaagagaagagctctttccgtggtattctttggcaagagccatgtctactaagaggttagatgacttcagtatacttataaaattcagtgagagtgccttcttctcttctaccacactctggcatagatacaggcttgctggtcacctctcattacatagatttattttaaaaacattttgattatgttaatttgagctttcccttttttttttttaactactttttaaaacacttgattactagtggcttagaggtgtgtacatctcctgaacatcacaaacttggtttctacctaccacacgagtagccaaaagaaaagaagcactaatagagaaaggggtgtctcacaccagacagaggacctctgctgtcaattagatccagtatcatgacctaactttaagtgtggaaaagagttcagatctctgagacactgtgaagaaatggatggctcatgtaacatctctgatccctcagtccccaaccctggacgtgtttcatttacaacattcataggagttaacttagcagtgttgcaagttaaggttccaaaccaaattatttaatcagtgtccccccaataaatcacttatccatttattgctagttagttttatttatagcaacttgatttcctatgagtatggctcctgttgtaagaattttcccacctcttctgacatgaatgtagcataagttagcaatcggttcttccaaactcctgtgggttgaatatggtatagaaggtatgcaagaggaaaaagaaaggaaaagataaaactcctgcctgagaatttggaagcacctttattaacacatatatctcgcagaaactagaagctcataggctgttaactttttgcaactattcactcatttttaccacttttttttttgggtgagggggtgatttttgtaaggttaacagccagattccattttgacctcagatgctgtgtactttttaatttcattttttatattctgccatcttgactcttctctaaaacagaatgaaaatgtctgcatgctgagcaaaatgcttacgccaagcctgtttttctctgcagagtaaacaggatgttttcagcagacttggctctaatagccatctctaagattagggaacaattgagtctttatgtagaaaagatccattttttccccatcctcagagttaaaattcaacatttaaagctttatcggttattgttttagatttgagatttttgtttttaagtatctataagatctttagaagtgagataaatttttcgctggttaaaaaaaatcaaactttcctctgcagtgtttttgccaagttttgtcacacttcatgtgtatgcattaactatacttcttagtgttactgcaaaaaaaaaaaacaaaaacaaaacaaaaaaaagccttgttctttaattgtgtttttcctcctgtgagtggacaactaaagccgcgtgatgatgcggatgaaaatattctggtctgtgtgtatacaatgaattgtcagtcttcagacctcatggtcgttaagaaaatagggaactcacaaaccctgctgcgcactacatttacttctttatctgcaagtacagggagtccatacagtcaagaaacacacagatacacataatgctattgaggacattgtcattctgtaagaaaacagaatattatctagatttccagagttagtgcagaccctgtgataacagtctgtgggtttgtggccagcgccaaaggtgtgtgtattttcagaaatggtccctatttgtcagtgatagtgttttttttttcttaagtttgacaaagggggtggtaatatcacattctttagatttgaaataattatcagctccaagaatctgtgaacatagtaataacaataaaaattcaacatcgaccctccctaacctgctcaccatacctccccaccccatgcctctgaagaaagaggccatgaacctacgaggtggtaaagggggacacaggtcagggagtggagagctactcctccagcagctcagcacccacactgcccgcatgcgtgtggccaccgggaccagatcccgagtgattgtggcatacccctaatatttgagtagtttttaagctgtcagtctcttgtcataacctcctaccgccacccaaaaaagtaacgaaagttgcagtaactgccagtgtttgcctcaccaaatttaaatcgttcccttttcagttagctatatacctgaatttgtttttaacaagaaactgtacatggccaggaaaaatggtactaccttggccaaagggtctttgcaaaaagctcagtcttcagttcttcactgtgacaaatgcttatcttgttcatgggaggggaaagatcagataaataggcaagaagtactctgttttaaataaagaataaatagtgtccgtttaaagcactttgtgcctcaacttcatttttaaactgtaaatcattgctttggaaataaattcccaattataattgacccatatctagccaatatcaacaagttgggatggtttttgtttttttcttttttttcaaaaagggaaattcctctttactgctcacagtaagctgcaaaagaaagttgtcaaggtggcttatgatgctgttgtagcagagctgtgaaaggaagtgctttgctttctctcccgccttccggaatctggcgttccttccccttcggctactgaaaggtgtgtacaactcccagaggggtggctgtaaaagttgactggaggcaaagtggagtggccttattgccaggactagccctacagaagagctttacagagaggaggacagtacatcctatgtgtgttcgccaaaaatgggaaaggtgggtatttaggcaaaacaaaataaaaacctttggaaccctttaagaagttacataccttttaaaggtagtatagtttctcaccaagtgatgcattttagcatgacacttcttgccagaaattttgggataagttggaataaatgtgtttaaaacatcatccaccgccctttttaaattttgtctaaggaattacttaagtatagtatttctgaatgtgcctttgtgagtacagagaccgtccgttctaggaagaagctatccgttggatacaaacaaacagacggtcagctttagtcattagggaagtcaaagttcctcctggaagtcccaggagcagctgttgagatttcattagcatcaatattgcacagtgtagagttgagtggaagagattctgggacttgggagaggagacaggggaaggtacccaggcgacgcagacccacgttagtccaagagcgcaggtttacacatctgcattccctagttttctccgtctgtatgtttgtgctcatgtggctttggctgttttgttttttgtttttctgtaagcactggagaattggaatatggtgatacttgtgacacattcatgcatgtaaacaaggcattttccagcttctgccgtgtgcagagcgggcagcacgcttttaccctttgagtctgtgtcctgaggcggccattacattcccacatgggcgtcacatcacgttgctgttgatgcaaacagggtattacacacaaggaaaaggggttttgaagagttaagattgaagtgtttgagaaagaaaagagaaaaatctgaaatcatattttatttcttcagagctattatagttgaacacagaaatctgcagtgtctttatttgtttttatgttttaaacaatttcacctcttctccccactcctatcttctaaagaaatatcaagcaaatgctaagggccatttccatgattcctcagagctcccccaaagaggagaacagtccctcccactcgattccttcagcttcattcaggaagacacagggaggagagatgctgcttctgcgctttgctctcattcctctctcatggccttgaaatgtattattatgcaaatgtgaattttgatactgaatttaagaagaggttgttggatttttttttttttttttttttttttcaaaaaaaaaagtcccacatgtggtcatcgtcgcttctttatgttgtaaggtgaattgtaactatgcattctgcaaagggggtggggaggagagggcagaaaggggaagggagtagcgttgcatccttgttcttcagtttctgtgtccatggtgtccccgtgtcctggaggggaaggggagtgagagacgaatgtggtaaggtcagcacagtgagatagagacctctgagtcctcttgccactgttgctggcaggtctgatggccaggtaaattccagggggcctgcagttcctgtcaaccaatgtggttcaggattcttgatcctagccgtgcagtgttaatccagtgcagcaatggaactccacaggctccagtgttctctggaaaaagtactcatcctttcctgaattcagagcccttcaagctcaggaaaccacgcttcactcgtgctgacctgaaagttaatctttaggtcgattttgaaaaactccgcctcctctctcctttttaatatttctttcttcctttttaatcatgtttaagtgaacttactcttagttataaggaactgtcctgctttgtggggaagagggctgttgcttgtcaggcaaaaaagttttctcttcctacccaccatccctctctctgcttcccttgcatttggcaggctgtatgaagccaatgagctgcgaggtgttttgacaggggaggtctgcatgcagcctcttctttgtcctaacaattcctttgttgatcttgcctgtgatgaatcatagcgcctgcattgctctggtctaggcattatttgcaacacacagtatcgtaagcgagagattgttctgcctatattcagtgttttccatgcagcaattcttcttgttgacgttcacagtactgtaacgagtaacagacttgatcacagtctcctcgtgcctgtgcagggctgcacaggcatgatcttatcagggttccaatctgttagattgcctttaaacaaaaaaaacaacaaaaaaataaaatcctgacgtttcaactgtctcacacaaaataatacctcgaggtacatttccccctgcaatgtaaacccttaactcctctctcctttctgacatcagtggattatcctttttaaaatatgaacatgtaaatagcaggataactttaaaaaacattttctttgctgtgaaagtaaccctaaaatatgttttcttcttttgtatttttttggtttttgtttttaagccatcagaagtttcagatctttactctttcatgtttaagaagaaagagcagaggaggtcgggggagccggtttgcatttgtgttggaggggtgttatctccattgcctcccacacagtgacagcagaccagtatgtaaaccctgtcttggctgggcgcggtggctcacaccagtaatcccagcactttgggaggctgaggcaggcagatcatctgaggtcaggagtttaagaccagcctggccaacatggtgaaaccccgtctctactaaaaaattagccggacgcagtggcgcgcgcctgtggtcccagctgctcgggaggctaaggcaggagaattgcttgaacccgggagacggaggttgcggtgagccgagattgcaccactgcactccagtgtgggcaacagagcaagacttcgactcaaaaacataaaataaacaaaagacacacacacacacaaaaaccctgtcttaaatagctgccatctcttccagcaatctagtgccagggtaagaagtgtctgaatttctctcttccagcagatccatcccctgcagggactccagaatgttctccacacaatacctggagctctcaacctttcttggttcagacacacacatacacaccccttgagtaactcagtatcattttgtagttcacagaaggatgtagtccctggcattttggtttgcactgtagaatccatagccttgtcactttgttatgctctggaaatgtactgatttcttacttgggaggaaacttgtgtaaggagatgtgcaaaccaccctgaaagccatgtgcatcctcacctcttccattaccccctccatgagctcgaagcgacattaagtagagggaaatgcttttaacaaatgctgctcatgtggatctgtcagctattgcttgcctagatttgggcacccatgaagcagggttggaatggatcattttgaattgcttctttgcagacacccccttcgcccccatctttaagataaaccctttactagtcaagaagcccttttcagttggatctcactgatcttgtatagtgacgacttcctttgaaggaagaagcttgattataagtgcatgcatattatccacccaccttctgatttgggcactgttcaccttggaattttatttattttgtttatctggaggccctttttctatcagtctctgatccctcatgggttctgcctgcccttgtatctcttgtacaatgctcccaaagggctttgctgatctctgcacttctttcctgggacactccccccaccaccaccctttgcacacaccagtgaccaaagtgtatgcagtgatctcacagaagacatcaaaaatggtgcatgcaccgtgaatgtgctcacagagacacgtgcacaagattctgcacccttggccttaatctcagtatgacttaaggtgcaggaacatttttaacaggttttaaaaaaacaaaaaacccttctgggaggaaaaaaataaaaagcagatacaacagctcaactgttcccactcctaactctccactatgtgcttataacttcacattctatgccctccccgccacccacctcatccctgttctgcgtaaccaaaaaacagacaacaaaagcaacctgaggagaggtttctggactattttatctgtctccatttagatggagatataaatgctgctttgggttccataatcctagggggctatgtttacatagtaaaatacatcctaccaaatcaggaaacagtgaataatgggagtcacttcacagagacgcaggaggacctggggggcgtagcagaggaggataggtagagaagtaccattttaattatttgtgacttgtggcttccttcctcctctcctcctccctccacgtctctctttgccccctttagacagaaggtgcagaaaagggcatcaaaaagaggctggattttttaaaaggcagctttccaactttgcacacaaacaggtaacaggaaggtacagcaaaaatcctctcatctgaaacactgtcagcagaaacaaaacctgtaaaaatgactaatcagctgcacatattgatgctctctgcaagttacctttaagtgttttttttttcttatacttgaagttgcttttacgatattattttggtggctttcttttctctctttgatgggcaatagaggaagtagataatgggatttaaggacgcctgggggagaaaagggaggatgtggcattgtctttttttttttttttttttttttttttagcatagaggtttaatcaaactcccatatgttgaaattgctcctcatattactggttttacatggacacagaaactaggcactttagaggtgcacttgcatggcaggctgggcccccttttctatattttattttcctttttagtatagtggtacttaaaatcactggttcacttaaaaaaacaaacaataaaatgttaaactctactaatgtacaaataagctgaaaagttgcattttatgtgtattttttgccatagcaggtactgtatttctcatgctggatttcaaaaaaaaaaaaaaaagtatcaaaaacaaaaaaaactaaagggtggtgttttattggattgtgacaggttgagtaataaggaattaagtcgtcgtcatttcattaaaactgagagatgatgtaatgcatatataagagttttctgaagggttttttttgggcttttaaacagcttatttttgtttttgtttagtttttttattttattttattttggaaagatatgattgtattatgtgcaactcagttgcttacattataactacaaaatatttttgggttcctggaaaaaaaagaaaaaagactaataaatgtgtttggctgctaagcaaaaaaaaaaaaaaaaaa

SEQ ID NO: 923 - DNA, 6629 bp, Homo sapiens
gactagtggtggatacatgaattcacacaggtggtagaattatacagacattaatacacacacagtgaaagtaaaactaggaaaatctgcctaaggtaagtagatggagttactgtcaatgtccttgttttgcaaaacatcaccattgtgagatcctactgagaatctgaaacacagccttggttatatgcttttttctttttttaccctgtaaaaatgttccttttaccctgtaaagtgttcctttttatactggtaagtataaaaggaacaaattatactggtaagtaaaaattactgataaagtaactttaaactgaatatgggaaataactgctgtgctgtatggtataaataaataatatatttatctataacaatactactttatataatggaactagatgtcacaaatggctctagtactagtaatgcaattaatcaatataatgttttgtagggttttgttttttatactctttgttaagcctccaaactagcaagtacccattacagtaaatgtacaatggattatttctgtttccgcgtttcagtcattaactcattagttgcataatcttaaggtcaaattaccttgttgaaggggacagtctggatccattccgtggagctcacatcaaaaacgtctgctgcattttcactgtgcactgagaggcacggggcattgtaacctgggaggagcaaagacggtaacagcaaacatgggctccgtgatacctttttcagtgaatttttgatgagataattatagattcacatgtagttgtaaaaataatacagagagatcccttgtacactctgcccagattcaattcacaacaaaataaaacttcagtgtctggattacaaataatttaaaacatagctaaaaatgtaaaagtaaaaacctgccgttttgctaagaccagaccatcaaatatttaagagcatttaacttccaggacttgtggagtatgcatgacatgagccaccaagaagaagtttttaaaggaagagttaaaataagtgaaatttttttctaccttcatcagtataagcagtggaaaacacttttgaaagggctgtcccaccacataaaacgttacatttgtgcttttccagcattcttttttttgtttggttgtatgtttttattttttattatactttaagttttagggtacatgtgcacaacgtgcaggtttgttacatgtgtatacatgtgccatgttggtgtgctccacccattaactcatcatttaacattaggcatatctcctaatgctatccctcccccctccccccaccccacaacaggccccagtgtgtgatgttccccttcctgtgtccatgtgttctcattgttcagttcccacctatgagtgagaacatgcggtgtttggttttttgtcctttcgatagtttgctgagaatgatggtttccagcttcatccatgtccctgcaagggacatgaactcatcattttctatggctgcatagtattccatggtgtatatgtgccacattttcttaatccagtttatcattgttggacatttgggttagttccaagtctttgctactgtgaatagtgccgcaataaacatacgtgtgcatgtgtctttatagcagcatgatttataatcctttgggtacatacccagcaatgggatggctgagtcaaatggtatttctagttctagatccctgaggaatcgccacactgacttccacaatggttgaactagtttacagtcccaccaacagtgtaaaagtgttcctatttctccacatcctctctagcacttgttgtttcctgactttttaatgatcaccattctaactggtgtgagatggtatctcattgcggttttgatttgcatttctctgatggccagtgatgatgagcattttttcatgtgtcttttggctgcataaatgtcttcttttgagaagtgtctgttcatgtccttcacccactttttgatggggttgtttttttcttgtaaatttgtttgagttcattatagattctgggtattagccctttgtcagatgagtagattgcaaaaatttttctcattctgtatgttgcctgttcactctgatggtagtttcttttgctgtgcagaagctctttagtttaattagatcccatttgtcaattttggcttttgttgccattgcttttggtgttttagacatgcagcccttgcccatgcctatgtcctgaatggtattgcctaggttttcttctagggtttttatggttttaggtctaacatgtaagtctttaatccatcttgaattaatttttgtataaggtgtaaggaaggggtccagtttcagctttctacatatggctagccagttttcccagcaccatttattaaatcgggaatcctttcctcatttcttgtttttgtcaggtttgtcaaagatcagatggttatagatgtgtggtattatttctgagggctctgttctgttccattggtctatatctctgttttggtaccaggcgcctccgcaacctcccaggagctctgaccaaggtgcctcactggggtggggaacttgcctcacctggggccatttcatatttctgaatcatgtgtgataacagagaactggaagacaagcctccagcacctcccgtgcgaatgagcaggaccatctttagcactgggggcaaagaccctttgtcagccaatcacagtttgaaacctttgccttctgttccagaggagaaaaagcccaggcataaaatcatctccatattctcaggcacagagaaaggaagtaaaaagaaagaaaaggaacggccagaaatttctcctccatctgattttgaacacaccatccatgttggctttgatgctgttactggagaattcactggcatgccagaacactgggctcgattactacagacctcaaatatcaccaaactagagcaaaagaagaatcctcaggctgtgctggatgtctacgactccaacacagtgaagcagaagtatctgagttttactcctcctgagaaagatggcttcccttctggaacaccagcactgaatgccgagggaacagaagcacctgcagtagtgacagaggaggaggacgatgatgaagagactgcccctcccattattgccccaccaccggatcatatgaaatcaatttacacacggtctgtaattgaccctgttcctgcaccagttggtgattcaaatgttgatggtggtgccaagtctttagacaaacagaaaaagaagactaagatgacagatgaagagattatggagaaactaagaactattgtgagcataggtgaccctaagaaaaaaatatacaagatatgaaaaaattggacaaggggcttctggtacagttttcactgctactgacgttgcactgggacagaaggttgctatcaaacaaattaatttacagaaacagccaaagaaggaattgatcattaatgagattctggtaatgaaagaattaaaaaatcccaacatagttaacttcttggacagttacctggtaggagatgaattgtttgtggtcgtggaataccttgctagggggtcactcactgatgtggtaacagaaacctgcatggatgaagcacagattgccgctgtatgcagagagagtttacaggcattggagtttttacatgctaatcaagtgatccacagagacatcaaaagtgacagtgtacttttgggaatggaaggatcggttaagctcactgactttggtttctgtgcccagatcacccctgagcagagcaaacgcagtaccgtggtcagaacgccatactggatggcaccagaagtggttacacggaaggcttatggccctaaagtcaatgtatggtctctgggtatcatggctactgagatggtagaaggagagcctccatacctcaatgaaaatcccttgagggccttgtgcctaatagcaactaatggaatcccagaacttcagaatccagagacactttccccaatatttcgggatttcttaaatcgatgtttggaaacagatgtggaaaaaaggggttcagccaaagaattattacagcatcttttcctgaaactagccaaactgttatctagcttgacaccactgatcatggcagctaaagaagcaatgaagagtaaccgttaacatcactgctgtggcctcatattcttttttccattttctacaagaagccttttagtatatgaaaattattactcttttgggggtttaaagaaatggtctgcataacctgaatgaaagaagcaaatgactattctctgaagacaaccaagagaaaattgcaaaaagaaaagtatgacttttatatgaaccccttctttagggtccaaaaggaattgtggactgaatcactagccttaggtctttcagcaaaccgcctatcagggccatttatcatatgtgagatttgcattttactttgctgactttgttgtaatagatcccattcattgtcccctttggggtatttccaatacttgaatggcagattggagtttttcagagtatttgtttcatctgctagtctttctctccttcatagctttccttttcctggacttgctccttttgagttgcttttgagtttctcatgcctaggtaagtgtaatagaaattatgtagctccttatgttggcaaaggagctctatatagtttcactttttataaaagttaggaccagctgttgttacatgtaatattttagttcagaacttgacctgaaggaagggaagaaaagtatttgatttttaccttttttaacaaatgtgaaaaagtcagttttagaaattttgtggtagtaagtttggcatttgttacatgtatagagagaagactaataatctctatttataactaaatcattgagatagaaaaagattcccattgaccgtgtatttcttcccatttcgtcttcccttctgcctgtttccccttcaggcttggctctaggaaccaaagtgatttgttcttgttccaacctgggctttgtgactttggttagtgccactaccttcttccctcctttcccccttcaatttggaaataaatttctgtatatgttgcaattttaggtttatttttgttctttttgtttttcattaatcctctctcacctcacagatacccccctcccatggcaaataatataataaccagtgaattttcgggaatttaaaattagcttttttccacttaaaggagaacaatatttgggactagcaggcgcagagtgagagacgtgaaccttggtgatctctgatatagtgagaagagattatactcatgaaagagaatgttagtgttacagagaagcagccgataggaaatcaactgtagagacttggaggcggcggcattgctccaggtcatcatcagtgtggtattatctatgagaacttgagcgacagagtatttcttgatgaatttatagatcatttgagatgttgagttacttttgttttgttttcaaataggtagagactattaatgtaaaaaaacaagaaaggaaaatgaaatgtgcgtgttgagagcaataatttgtttcttttaaagattctgaaagatctgagacctgtagcattaattatttgagtgccctcccttctcccctcccctccctttctcttctcttctttcatctcctctccttctcctttattcattgttttgctttggaataggttgttcaagtatttggtttggttctggcattttgttcccaccatccccttcccccattaacttcccccctgcttgccatcctgcagtagtataaatcatgaataaaaaataattttgctgttgtagtatacattggggaaactagcagggttttatttccattattttattcccactatatctatgataagatacaattataaggagagaagtgactgttttttattgataaggcaagattttcagaaaaatgagtaaaataattaatgaaacatatttagagcacttagtggtctctgttttcaatataattcttgatttcatttttctctggaatatattggccttctacagctattactgaattacagaaactggtttatttctgtcagaaagctgcagtgccacctgagttccaaattttaacattctttgtaaacggatggattatgataaagaagatgctaccaatgaaatagaaaaccaacgagatgagaagactgtgatcctcatgcactcagaggcacttcccttctaagtcaaagaccattctcactgactatgtgccaaggcctcacttcaggcttgtgactcaacaaagggcttttccattgatagaagcagtttgggatttgtagctacaacttcttcgatagttacctgcatgtccattgctggcagctgacttcagtcattaaaacctggctctttggttaagggagctacactgtggtttattcttaagttacatggataaactaacctctagcagaaatatagtttggttaattttgagatgtgtcatttttaaacaaaatcttaaaagcaatacagaattgtgatttattaattttaaattaaaacattgagaacttgttgaaagaaaaatta

SEQ ID NO: 924 - DNA, 2656 bp, Homo sapiens
atggcggcgggtgggagcggcgggcgtgcgtcgtgcccgccgggggtcggggtcggcccgggcacggggggcagtcccgggcccagcgccaacgccgccgccaccccggcccccggcaacgcggccgccgccgccgccgccgccgccgccgccgccgccgcccctgggccgacgccgcccgccccgccgggccccgggacagacgcgcaggccgcgggcgcggagcgggcggaggaggcggcgggcccgggggcggcggcgctgcagcgcgaggccgcgtacaactggcaggccagcaagcccaccgtgcaggagcgcttcgccttcctcttcaacaacgaggtgctgtgcgacgtgcacttcctggtgggcaaggggctcagctcgcagcgcatccccgcgcacaggttcgtgctggccgtgggcagcgccgtctttgatgccatgttcaacgggggaatggccacaacatccacggagattgagctgcccgacgtggaacccgctgccttcctcgcactgctcaagtttctctactcggacgaggtgcagattggcccggagacggtgatgaccacgctatacaccgccaagaagtacgcggtgccagcgctcgaggcccattgcgtggagttcctgaagaagaacctgcgagccgacaacgccttcatgctgctcacgcaggcgcgactcttcgatgaaccgcagctggccagcctgtgcctggagaacatcgacaaaaacactgcagacgccatcaccgcggagggcttcaccgacattgacctggacacgctggtggctgtcctggagcgcgacacactgggcatccgtgaggtgcggctgttcaatgccgttgtccgctggtccgaggccgagtgtcagcggcagcagctgcaggtgacgccagagaacaggcggaaggttctgggcaaggccctgggcctcattcgcttcccgctcatgaccatcgaggagttcgctgcaggtcccgcacagtcgggcatcctggtggaccgcgaggtggtcagcctcttcctgcacttcaccgtcaaccccaagccacgagtggagttcattgaccggccccgctgctgcctgcgtgggaaggagtgcagcatcaaccgcttccagcaggtggagagtcgctggggctacagcgggaccagtgaccgcatcaggttctcagtcaacaagcgcatcttcgtggtgggatttgggctgtatggatccatccacgggcccaccgactaccaagtgaacatccagattattcacaccgatagcaacaccgtcttgggccagaacgacacgggcttcagctgcgacggctcagccagcaccttccgcgtcatgttcaaggagccggtggaggtgctgcccaacgtcaactacacggcctgtgccacgctcaagggcccagactcccactacggcaccaaaggcctgcgcaaggtgacacacgagtcgcccaccacgggcgccaagacctgcttcaccttttgctacgcggccgggaacaacaatggcacatccgtggaggacggccagatccccgaggtcatcttctacacctaggctgcccgacaccgacaccgccctccctccgtggggatagccgcagccccaggccatcatctgctgctggggcccccccaccacgcggtgccaggcccagtgtcccccaggccgtctgtccactccatgccacctttctcagcatcaggacggggttgccctgtgttcaccacgagtgtggctgctggatcagggcagccggggaggtggccaggccagtggccaggccctgtggagacaatccctcaggactagggacagggctgtgccggcctgggccagggcccacggacccgcagctcagggcgcctgcccacgtcgtctgccggcggtgcgccgcgggcgtccctcgcgtctcttcactgcacattgcaatgcatttgcgattcccatttctctgctaggagccagcctgggtggcgctgctcccagagccgtgggtcccagaccttgcgttccttttgttcctgtccgtttatcaggacacgggccccacctgtcacgtgcccgaggccacccaagcccagcctgcggggcgttcccactgcctggatgccggcttgagttctgcgcacgcaggattcagtgtggggacggcccctgccggataggcctagccctggcccaggtggtgagcggtttgcagtgtccgttctcatccacctgatgggcccagataaaggcccccgctgtccagcctccctggacggccctcgcggtccctgcagcccaagatgggactcagaccctgtgccccagagctcccctgccgcagaatggggccccagccggccccgaccgggtccaggagcactgctcgcctgtacatactgttgccctagcccacctggtgccgtgggagccacccccaggtgctgggggcacagcccctccccactccggccacgcccccacccaccccgcgtgtttctgccctgtgactcctggaacctgcgtcctccccaaagccatgggaggggtgtcctcctcagaccatgcccccagatgatttttttaaataaagaaacaaatgcacctgcaaaaaaaaaaaaaaaaaaaaaaaaaaaaaaaaaaaaaa

SEQ ID NO: 925 - DNA, 1591 bp, Homo sapiens
ccctcgcctacagaggcggcgctgtccctgatcgagcggcgggagcgagggttcagagatgggcagtgagaaggagcagagtccagaaccacacctgcctgaggaaggggaagggggtaagccttggagagtggatgactcagagggttcttggatcccacctggggagaaggagcatgggcaagagagcctgtcggatgaactgcaagaaactcatccaaaaaagccatggcagaaagtcactgtccgggctcgagagctaggggaccccattgctcatccaaggcatgaggcagatgagaagccctttatatgtgcccagtgtggcaaaaccttcaataatacctccaacctgagaacacaccagcggatccacactggtgagaagccttacaagtgttctgaatgtggcaagagcttctcgagaagctccaaccgcatccggcacgagcggatccacctggaagagaaacactacaaatgccccaagtgccaggagagctttcggcggcgctcagacctcaccacgcaccagcaagatcacctaggcaagcggccataccgctgtgacatctgtggcaagagcttcagccagagtgccacgctagctgtgcatcaccggacccacctggagccagcaccctacatctgctgtgagtgtgggaagagcttcagcaacagctccagctttggcgtgcatcaccgcacccacacaggtgagagaccttatgagtgcactgagtgtgggcggaccttcagcgatatctccaactttggagcacaccagcggacccacagaggggagaagccctaccggtgcactgtgtgtgggaaacacttctcccggagctcgaatctcatccgccaccagaaaactcacttgggcgaacaggctgggaaagattccagctgaaggagagccccatttagagtgagggagagagagtgagagaccctaacctattggaggaagatcttcagcatcttttgctgctaccttgacctcaagcccttcatcccactttggagaatggttttgtatagcctctgaagtcaggatctcaggaagtcctgaggagggactctggaataaaaacccttgcctctttccaggccaatttctcgtgttggaaagtcagaagacccagtcttggctttactttcttggggtgaaagagaaatagggtaggctcagaacatgctcatgttattaaggcagcagtccccctggcctttgaggaagtacttatgagatgggtgtcactgtctgaaggttctccaaattgtctgtgaactgcttaggtaggagtgcactgcagtttcctgctagttcccacctgttgtgccccaactttgcttctagatctctggggtgggaggagtgaccttctcaatggaaggggcctccttggtctggagaagagatctgaggtcccaccttagaaatgaaagggaaaccctcagggagccatgacccagggaccttcacactcccccatgtttgttacttgttatccctcccccaacctgcctctgttttccccagagtgattagcagtaaaacccttcaatgaaaaaaaaaaaaaaaaaa

SEQ ID NO: 926 - DNA, 3993 bp, Homo sapiens
ccggaaacagcgggctggggcagccactgcttacactgaagagggaggacgggagaggagtgtgtgtgtgtgtgtgtgtgtgtgtgtgtatgtatgtgtgtgctttatcttatttttctttttggtggtggtggtggaaggggggaggtgctagcagggccagccttgaactcgctggacagagctacagacctatggggcctggaagtgcccgctgagaaagggagaagacagcagaggggttgccgaggcaacctccaagtcccagatcatgtctctgtggggtctggtctccaagatgcccccagaaaaagtgcagcggctctatgtcgactttccccaacacctgcggcatcttctgggtgactggctggagagccagccctgggagttcctggtcggctccgacgccttctgctgcaacttggctagtgccctactttcagacactgtccagcaccttcaggcctcggtgggagagcagggggaggggagcaccatcttgcaacacatcagcacccttgagagcatatatcagagggaccccctgaagctggtggccactttcagacaaatacttcaaggagagaaaaaagctgttatggaacagttccgccacttgccaatgcctttccactggaagcaggaagaactcaagtttaagacaggcttgcggaggctgcagcaccgagtaggggagatccaccttctccgagaagccctgcagaagggggctgaggctggccaagtgtctctgcacagcttgatagaaactcctgctaatgggactgggccaagtgaggccctggccatgctactgcaggagaccactggagagctagaggcagccaaagccctagtgctgaagaggatccagatttggaaacggcagcagcagctggcagggaatggcgcaccgtttgaggagagcctggccccactccaggagaggtgtgaaagcctggtggacatttattcccagctacagcaggaggtaggggcggctggtggggagcttgagcccaagacccgggcatcgctgactggccggctggatgaagtcctgagaaccctcgtcaccagttgcttcctggtggagaagcagcccccccaggtactgaagactcagaccaagttccaggctggagttcgattcctgttgggcttgaggttcctgggggccccagccaagcctccgctggtcagggccgacatggtgacagagaagcaggcgcgggagctgagtgtgcctcagggtcctggggctggagcagaaagcactggagaaatcatcaacaacactgtgcccttggagaacagcattcctgggaactgctgctctgccctgttcaagaacctgcttctcaagaagatcaagcggtgtgagcggaagggcactgagtctgtcacagaggagaagtgcgctgtgctcttctctgccagcttcacacttggccccggcaaactccccatccagctccaggccctgtctctgcccctggtggtcatcgtccatggcaaccaagacaacaatgccaaagccactatcctgtgggacaatgccttctctgagatggaccgcgtgccctttgtggtggctgagcgggtgccctgggagaagatgtgtgaaactctgaacctgaagttcatggctgaggtggggaccaaccgggggctgctcccagagcacttcctcttcctggcccagaagatcttcaatgacaacagcctcagtatggaggccttccagcaccgttctgtgtcctggtcgcagttcaacaaggagatcctgctgggccgtggcttcaccttttggcagtggtttgatggtgtcctggacctcaccaaacgctgtctccggagctactggtctgaccggctgatcattggcttcatcagcaaacagtacgttactagccttcttctcaatgagcccgacggaacctttctcctccgcttcagcgactcagagattgggggcatcaccattgcccatgtcatccggggccaggatggctctccacagatagagaacatccagccattctctgccaaagacctgtccattcgctcactgggggaccgaatccgggatcttgctcagctcaaaaatctctatcccaagaagcccaaggatgaggctttccggagccactacaagcctgaacagatgggtaaggatggcaggggttatgtcccagctaccatcaagatgaccgtggaaagggaccaaccacttcctaccccagagctccagatgcctaccatggtgccttcttatgaccttggaatggcccctgattcctccatgagcatgcagcttggcccagatatggtgccccaggtgtacccaccacactctcactccatccccccgtatcaaggcctctccccagaagaatcagtcaacgtgttgtcagccttccaggagcctcacctgcagatgccccccagcctgggccagatgagcctgccctttgaccagcctcacccccagggcctgctgccgtgccagcctcaggagcatgctgtgtccagccctgaccccctgctctgctcagatgtgaccatggtggaagacagctgcctgagccagccagtgacagcgtttcctcagggcacttggattggtgaagacatattccctcctctgctgcctcccactgaacaggacctcactaagcttctcctggaggggcaaggggagtcggggggagggtccttgggggcacagcccctcctgcagccctcccactatgggcaatctgggatctcaatgtcccacatggacctaagggccaaccccagttggtgatcccagctggagggagaacccaaagagacagctcttctactacccccacagacctgctctggacacttgctcatgccctgccaagcagcagatggggagggtgccctcctatccccacctactcctgggtcaggaggaaaagactaacaggagaatgcacagtgggtggagccaatccactccttcctttctatcattcccctgcccacctccttccagcactgactggaagggaagttcaggctctgagacacgccccaacatgcctgcacctgcagcgcgcacacgcacgcacacacacatacagagctctctgagggtgatggggctgagcaggaggggggctgggtaagagcacaggttagggcatggaaggcttctccgcccattctgacccagggcctaggacggataggcaggaacatacagacacatttacactagaggccagggatagaggatattgggtctcagccctaggggaatgggaagcagctcaagggaccctgggtgggagcataggaggggtctggacatgtggttactagtacaggttttgccctgattaaaaaatctcccaaagccccaaattcctgttagccaggtggaggcttctgatacgtgtatgagactatgcaaaagtacaagggctgagattcttcgtgtatagctgtgtgaacgtgtatgtacctaggatatgttaaatgtatagctggcaccttagttgcatgaccacatagaacatgtgtctatctgcttttgcctacgtgacaacacaaatttgggagggtgagacactgcacagaagacagcagcaagtgtgctggcctctctgacatatgctaacccccaaatactctgaatttggagtctgactgtgcccaagtgggtccaagtggctgtgacatctacgtatggctccacacctccaatgctgcctgggagccagggtgagagtctgggtccaggcctggccatgtggccctccagtgtatgagagggccctgcctgctgcatcttttctgttgccccatccaccgccagcttcccttcactcccctatcccattctccctctcaaggcaggggtcatagatcctaagccataaaataaattttattccaaaataacaaaataaataatctactgtacacaatctgaaaaaaaaaaaaaaaaaa

SEQ ID NO: 927 - DNA, 1983 bp, Homo sapiens
gaggactgcagtgtaggactttcctgcagaataccatttgatcctattaagaattgtccaaatgttggagcatttgattgaaaaatccttcttagccattttaaagatagctttccaatgattagacgaattgattctttctgtgactcatcagttcatttcctgtaaaattcatgtcttgctgttgatttgtgaataagaaccagagcttgtagaaaccactttaatcatatccaggagtttgcaagaaacaggtgcttaacactaattcacctcctgaacaagaaaaatgggctgtgaccggaactgtgggctcatcgctggggctgtcattggtgctgtcctggctgtgtttggaggtattctaatgccagttggagacctgcttatccagaagacaattaaaaagcaagttgtcctcgaagaaggtacaattgcttttaaaaattgggttaaaacaggcacagaagtttacagacagttttggatctttgatgtgcaaaatccacaggaagtgatgatgaacagcagcaacattcaagttaagcaaagaggtccttatacgtacagagttcgttttctagccaaggaaaatgtaacccaggacgctgaggacaacacagtctctttcctgcagcccaatggtgccatcttcgaaccttcactatcagttggaacagaggctgacaacttcacagttctcaatctggctgtggcagctgcatcccatatctatcaaaatcaatttgttcaaatgatcctcaattcacttattaacaagtcaaaatcttctatgttccaagtcagaactttgagagaactgttatggggctatagggatccatttttgagtttggttccgtaccctgttactaccacagttggtctgttttatccttacaacaatactgcagatggagtttataaagttttcaatggaaaagataacataagtaaagttgccataatcgacacatataaaggtaaaaggaatctgtcctattgggaaagtcactgcgacatgattaatggtacagatgcagcctcatttccaccttttgttgagaaaagccaggtattgcagttcttttcttctgatatttgcaggtcaatctatgctgtatttgaatccgacgttaatctgaaaggaatccctgtgtatagatttgttcttccatccaaggcctttgcctctccagttgaaaacccagacaactattgtttctgcacagaaaaaattatctcaaaaaattgtacatcatatggtgtgctagacatcagcaaatgcaaagaagggagacctgtgtacatttcacttcctcattttctgtatgcaagtcctgatgtttcagaacctattgatggattaaacccaaatgaagaagaacataggacatacttggatattgaacctataactggattcactttacaatttgcaaaacggctgcaggtcaacctattggtcaagccatcagaaaaaattcaagtattaaagaatctgaagaggaactatattgtgcctattctttggcttaatgagactgggaccattggtgatgagaaggcaaacatgttcagaagtcaagtaactggaaaaataaacctccttggcctgatagaaatgatcttactcagtgttggtgtggtgatgtttgttgcttttatgatttcatattgtgcatgcagatcgaaaacaataaaataagtaagtatgtaccaaaaaatattgcttcaataatattagcttatatattacttgttttcactttatcaaagagaagttacatattaggccatatatatttctagacatgtctagccactgatcatttttaaatataggtaaataaacctataaatattatcacgcagatcactaaagtatatctttaattctgggagaaatgagataaaagatgtacttgtgaccattgtaacaatagcacaaataaagcacttgtgccaaagttgtccaaaaaa

SEQ ID NO: 928 - DNA, 2050 bp, Homo sapiens
agatgtcaggataaccttaaggatagatgaagggttgagagcctgtgcctcatttctgagttctcagctgctatgccgtggaaatcctgtttactttctgcatctgctcctgcaagactctggagccagtcttgaggtcctacatctccgaaagcaagctcttctagaagttgatagctttccaatgattagacgaattgattctttctgtgactcatcagttcatttcctgtaaaattcatgtcttgctgttgatttgtgaataagaaccagagcttgtagaaaccactttaatcatatccaggagtttgcaagaaacaggtgcttaacactaattcacctcctgaacaagaaaaatgggctgtgaccggaactgtgggctcatcgctggggctgtcattggtgctgtcctggctgtgtttggaggtattctaatgccagttggagacctgcttatccagaagacaattaaaaagcaagttgtcctcgaagaaggtacaattgcttttaaaaattgggttaaaacaggcacagaagtttacagacagttttggatctttgatgtgcaaaatccacaggaagtgatgatgaacagcagcaacattcaagttaagcaaagaggtccttatacgtacagagttcgttttctagccaaggaaaatgtaacccaggacgctgaggacaacacagtctctttcctgcagcccaatggtgccatcttcgaaccttcactatcagttggaacagaggctgacaacttcacagttctcaatctggctgtggcagctgcatcccatatctatcaaaatcaatttgttcaaatgatcctcaattcacttattaacaagtcaaaatcttctatgttccaagtcagaactttgagagaactgttatggggctatagggatccatttttgagtttggttccgtaccctgttactaccacagttggtctgttttatccttacaacaatactgcagatggagtttataaagttttcaatggaaaagataacataagtaaagttgccataatcgacacatataaaggtaaaaggaatctgtcctattgggaaagtcactgcgacatgattaatggtacagatgcagcctcatttccaccttttgttgagaaaagccaggtattgcagttcttttcttctgatatttgcaggtcaatctatgctgtatttgaatccgacgttaatctgaaaggaatccctgtgtatagatttgttcttccatccaaggcctttgcctctccagttgaaaacccagacaactattgtttctgcacagaaaaaattatctcaaaaaattgtacatcatatggtgtgctagacatcagcaaatgcaaagaagggagacctgtgtacatttcacttcctcattttctgtatgcaagtcctgatgtttcagaacctattgatggattaaacccaaatgaagaagaacataggacatacttggatattgaacctataactggattcactttacaatttgcaaaacggctgcaggtcaacctattggtcaagccatcagaaaaaattcaagtattaaagaatctgaagaggaactatattgtgcctattctttggcttaatgagactgggaccattggtgatgagaaggcaaacatgttcagaagtcaagtaactggaaaaataaacctccttggcctgatagaaatgatcttactcagtgttggtgtggtgatgtttgttgcttttatgatttcatattgtgcatgcagatcgaaaacaataaaataagtaagtatgtaccaaaaaatattgcttcaataatattagcttatatattacttgttttcactttatcaaagagaagttacatattaggccatatatatttctagacatgtctagccactgatcatttttaaatataggtaaataaacctataaatattatcacgcagatcactaaagtatatctttaattctgggagaaatgagataaaagatgtacttgtgaccattgtaacaatagcacaaataaagcacttgtgccaaagttgtccaaaaaa

SEQ ID NO: 929 - DNA, 2338 bp, Homo sapiens
gaggactgcagtgtaggactttcctgcagaataccatttgatcctattaagaattgtccaaatgttggagcatttgattgaaaaatccttcttagccattttaaagatagctttccaatgattagacgaattgattctttctgtgactcatcagttcatttcctgtaaaattcatgtcttgctgttgatttgtgaataagaaccagagcttgtagaaaccactttaatcatatccaggagtttgcaagaaacaggtgcttaacactaattcacctcctgaacaagaaaaatgggctgtgaccggaactgtgggctcatcgctggggctgtcattggtgctgtcctggctgtgtttggaggtattctaatgccagttggagacctgcttatccagaagacaattaaaaagcaagttgtcctcgaagaaggtacaattgcttttaaaaattgggttaaaacaggcacagaagtttacagacagttttggatctttgatgtgcaaaatccacaggaagtgatgatgaacagcagcaacattcaagttaagcaaagaggtccttatacgtacagagttcgttttctagccaaggaaaatgtaacccaggacgctgaggacaacacagtctctttcctgcagcccaatggtgccatcttcgaaccttcactatcagttggaacagaggctgacaacttcacagttctcaatctggctgtggcagctgcatcccatatctatcaaaatcaatttgttcaaatgatcctcaattcacttattaacaagtcaaaatcttctatgttccaagtcagaactttgagagaactgttatggggctatagggatccatttttgagtttggttccgtaccctgttactaccacagttggtctgttttatccttacaacaatactgcagatggagtttataaagttttcaatggaaaagataacataagtaaagttgccataatcgacacatataaaggtaaaaggaatctgtcctattgggaaagtcactgcgacatgattaatggtacagatgcagcctcatttccaccttttgttgagaaaagccaggtattgcagttcttttcttctgatatttgcaggtcaatctatgctgtatttgaatccgacgttaatctgaaaggaatccctgtgtatagatttgttcttccatccaaggcctttgcctctccagttgaaaacccagacaactattgtttctgcacagaaaaaattatctcaaaaaattgtacatcatatggtgtgctagacatcagcaaatgcaaagaagggagacctgtgtacatttcacttcctcattttctgtatgcaagtcctgatgtttcagaacctattgatggattaaacccaaatgaagaagaacataggacatacttggatattgaacctataactggattcactttacaatttgcaaaacggctgcaggtcaacctattggtcaagccatcagaaaaaattcaagtattaaagaatctgaagaggaactatattgtgcctattctttggcttaatgagactgggaccattggtgatgagaaggcaaacatgttcagaagtcaagtaactggaaaaataaacctccttggcctgatagaaatgatcttactcagtgttggtgtggtgatgtttgttgcttttatgatttcatattgtgcatgcagatcgaaaacaataaaataaacctggctcaagcacaaaccaatttgtgttgttctgattcaataattggtttctgggtggccaattcagaagaagagtgtacatgctcaacaaatcctaggccctgcattcctgtcatcctcatccgggggaaacaccatcatcccagtagctgccctattcaactgcaacagtctccaggaccatcagtatactgcatttcatgtgcaccaaatattttgaaagacatttataaataattggcttatgactcatatttctctatgaataccttcatacagcaggtataactcttttctttatgggcttaaatattttgtcactgatcctgcaaatggacatcattttagcacactagcggtttatattttaaggaccttcattctctgttctgcacctcttctggaaattgagtaaattttgcttttttttttttactcagttgcaacttacgcttggcatcttcagaatgcttttctagcattaagagatgtaaatgataaaggaattattgtatgaaatattacaaagcgtagactatgcattgttattcattataatattttttgctgtcataatcgcctcataaagacaggtttcaaccattaaaatatgttcttccttaaaaaa

SEQ ID NO: 930 - DNA, 1679 bp, Homo sapiens
ggatcttcaaaccgtgggagtggtgcggcggctagagtccctggactcctcaacctagggagctactcgcgagatgcctacgacttgtaacgggctgcctggtaaaatgagtctatggaaacggttgccagggccggctaacagcggctcccggaagtcctttgatgctttgttaacagtgaagctactggaccaatgaggtgcttcttccggttttgtccgcgctcgcctaattcttctttatcaaggttgcctttgaccccggaaaagagatcttccgggttcctctctccccaagatggctgctgaggacgagttacagctgccgcggctccccgagctgttcgaaactggtagacagttactggacgaagtagaagtggcgactgaacccgccggttcccggatagtccaggagaaggtgttcaagggcttggacctccttgagaaggctgccgaaatgttatcgcagctcgacttgttcagccgaaatgaagatttggaagagattgcttccaccgacctgaagtaccttttggtgccagcgtttcaaggagccctcaccatgaaacaagtcaaccccagcaagcgtctagatcatttgcagcgggctcgagaacactttataaactacttaactcagtgccattgctatcatgtggcagagtttgagctgcccaaaaccatgaacaactctgctgaaaatcacactgccaattcctccatggcttatcctagtctcgttgctatggcatctcaaagacaggctaaaatacagagatacaagcagaagaaggagttggagcataggttgtctgcaatgaaatctgctgtggaaagtggtcaagcagatgatgagcgtgttcgtgaatattatcttcttcaccttcagaggtggattgatatcagcttagaagagattgagagcattgaccaggaaataaagatcctgagagaaagagactcttcaagagaggcatcaacttctaactcatctcgccaggagaggcctccagtgaaacccttcattctcactcggaacatggctcaagccaaagtatttggagctggttatccaagtctgccaactatgacggtgagtgactggtatgagcaacatcggaaatatggagcattaccggatcagggaatagccaaggcagcaccagaggaattcagaaaagcagctcagcaacaggaagaacaagaagaaaaggaggaagaggatgatgaacaaacactccacagagcccgggagtgggatgactggaaggacacccatcctaggggctatgggaaccgacagaacatgggctgatcttcccacaacaccacaggactgcagggtgcacaactcccctgccaaggaaaaccatgcagtcctcccctccctggtctcctgcttcagctctgtacaacgagggcaaagatgctaaatcttgctttgcattcagtaaagtgtcaagtgattaagtgtgtatttgtaccctagatgatatgaaccagcagtcttgttttggcatcatcctcatcatgttgtattccagcttcttaagtggaaggaaaagagtgctgagaaatggctctgtataatctatggctatccgaattctctgaaaaaataataaaagtcccctctattatatgagcctgtacagaaaaaaaaaaaaaaaaaaaaa

SEQ ID NO: 931 - DNA, 5927 bp, Homo sapiens
ccaggcggcgttgcggccccggccccggctccctgcgccgccgccgccgccgccgccgccgccgccgccgccgccgccagcgctagcgccagcagccgggcccgatcacccgccgcccggtgcccgccgccgcccgcgccagcaaccgggcccgatcacccgccgcccggtgcccgccgccgcccgcgccaccggcatggcgctccggggcttctgcagcgccgatggctccgacccgctctgggactggaatgtcacgtggaataccagcaaccccgacttcaccaagtgctttcagaacacggtcctcgtgtgggtgccttgtttttacctctgggcctgtttccccttctacttcctctatctctcccgacatgaccgaggctacattcagatgacacctctcaacaaaaccaaaactgccttgggatttttgctgtggatcgtctgctgggcagacctcttctactctttctgggaaagaagtcggggcatattcctggccccagtgtttctggtcagcccaactctcttgggcatcaccacgctgcttgctacctttttaattcagctggagaggaggaagggagttcagtcttcagggatcatgctcactttctggctggtagccctagtgtgtgccctagccatcctgagatccaaaattatgacagccttaaaagaggatgcccaggtggacctgtttcgtgacatcactttctacgtctacttttccctcttactcattcagctcgtcttgtcctgtttctcagatcgctcacccctgttctcggaaaccatccacgaccctaatccctgcccagagtccagcgcttccttcctgtcgaggatcaccttctggtggatcacagggttgattgtccggggctaccgccagcccctggagggcagtgacctctggtccttaaacaaggaggacacgtcggaacaagtcgtgcctgttttggtaaagaactggaagaaggaatgcgccaagactaggaagcagccggtgaaggttgtgtactcctccaaggatcctgcccagccgaaagagagttccaaggtggatgcgaatgaggaggtggaggctttgatcgtcaagtccccacagaaggagtggaacccctctctgtttaaggtgttatacaagacctttgggccctacttcctcatgagcttcttcttcaaggccatccacgacctgatgatgttttccgggccgcagatcttaaagttgctcatcaagttcgtgaatgacacgaaggccccagactggcagggctacttctacaccgtgctgctgtttgtcactgcctgcctgcagaccctcgtgctgcaccagtacttccacatctgcttcgtcagtggcatgaggatcaagaccgctgtcattggggctgtctatcggaaggccctggtgatcaccaattcagccagaaaatcctccacggtcggggagattgtcaacctcatgtctgtggacgctcagaggttcatggacttggccacgtacattaacatgatctggtcagcccccctgcaagtcatccttgctctctacctcctgtggctgaatctgggcccttccgtcctggctggagtggcggtgatggtcctcatggtgcccgtcaatgctgtgatggcgatgaagaccaagacgtatcaggtggcccacatgaagagcaaagacaatcggatcaagctgatgaacgaaattctcaatgggatcaaagtgctaaagctttatgcctgggagctggcattcaaggacaaggtgctggccatcaggcaggaggagctgaaggtgctgaagaagtctgcctacctgtcagccgtgggcaccttcacctgggtctgcacgccctttctggtggccttgtgcacatttgccgtctacgtgaccattgacgagaacaacatcctggatgcccagacagccttcgtgtctttggccttgttcaacatcctccggtttcccctgaacattctccccatggtcatcagcagcatcgtgcaggcgagtgtctccctcaaacgcctgaggatctttctctcccatgaggagctggaacctgacagcatcgagcgacggcctgtcaaagacggcgggggcacgaacagcatcaccgtgaggaatgccacattcacctgggccaggagcgaccctcccacactgaatggcatcaccttctccatccccgaaggtgctttggtggccgtggtgggccaggtgggctgcggaaagtcgtccctgctctcagccctcttggctgagatggacaaagtggaggggcacgtggctatcaagggctccgtggcctatgtgccacagcaggcctggattcagaatgattctctccgagaaaacatcctttttggatgtcagctggaggaaccatattacaggtccgtgatacaggcctgtgccctcctcccagacctggaaatcctgcccagtggggatcggacagagattggcgagaagggcgtgaacctgtctgggggccagaagcagcgcgtgagcctggcccgggccgtgtactccaacgctgacatttacctcttcgatgatcccctctcagcagtggatgcccatgtgggaaaacacatctttgaaaatgtgattggccccaaggggatgctgaagaacaagacgcggatcttggtcacgcacagcatgagctacttgccgcaggtggacgtcatcatcgtcatgagtggcggcaagatctctgagatgggctcctaccaggagctgctggctcgagacggcgccttcgctgagttcctgcgtacctatgccagcacagagcaggagcaggatgcagaggagaacggggtcacgggcgtcagcggtccagggaaggaagcaaagcaaatggagaatggcatgctggtgacggacagtgcagggaagcaactgcagagacagctcagcagctcctcctcctatagtggggacatcagcaggcaccacaacagcaccgcagaactgcagaaagctgaggccaagaaggaggagacctggaagctgatggaggctgacaaggcgcagacagggcaggtcaagctttccgtgtactgggactacatgaaggccatcggactcttcatctccttcctcagcatcttccttttcatgtgtaaccatgtgtccgcgctggcttccaactattggctcagcctctggactgatgaccccatcgtcaacgggactcaggagcacacgaaagtccggctgagcgtctatggagccctgggcatttcacaagggatcgccgtgtttggctactccatggccgtgtccatcggggggatcttggcttcccgctgtctgcacgtggacctgctgcacagcatcctgcggtcacccatgagcttctttgagcggacccccagtgggaacctggtgaaccgcttctccaaggagctggacacagtggactccatgatcccggaggtcatcaagatgttcatgggctccctgttcaacgtcattggtgcctgcatcgttatcctgctggccacgcccatcgccgccatcatcatcccgccccttggcctcatctacttcttcgtccagaggttctacgtggcttcctcccggcagctgaagcgcctcgagtcggtcagccgctccccggtctattcccatttcaacgagaccttgctgggggtcagcgtcattcgagccttcgaggagcaggagcgcttcatccaccagagtgacctgaaggtggacgagaaccagaaggcctattaccccagcatcgtggccaacaggtggctggccgtgcggctggagtgtgtgggcaactgcatcgttctgtttgctgccctgtttgcggtgatctccaggcacagcctcagtgctggcttggtgggcctctcagtgtcttactcattgcaggtcaccacgtacttgaactggctggttcggatgtcatctgaaatggaaaccaacatcgtggccgtggagaggctcaaggagtattcagagactgagaaggaggcgccctggcaaatccaggagacagctccgcccagcagctggccccaggtgggccgagtggaattccggaactactgcctgcgctaccgagaggacctggacttcgttctcaggcacatcaatgtcacgatcaatgggggagaaaaggtcggcatcgtggggcggacgggagctgggaagtcgtccctgaccctgggcttatttcggatcaacgagtctgccgaaggagagatcatcatcgatggcatcaacatcgccaagatcggcctgcacgacctccgcttcaagatcaccatcatcccccaggaccctgttttgttttcgggttccctccgaatgaacctggacccattcagccagtactcggatgaagaagtctggacgtccctggagctggcccacctgaaggacttcgtgtcagcccttcctgacaagctagaccatgaatgtgcagaaggcggggagaacctcagtgtcgggcagcgccagcttgtgtgcctagcccgggccctgctgaggaagacgaagatccttgtgttggatgaggccacggcagccgtggacctggaaacggacgacctcatccagtccaccatccggacacagttcgaggactgcaccgtcctcaccatcgcccaccggctcaacaccatcatggactacacaagggtgatcgtcttggacaaaggagaaatccaggagtacggcgccccatcggacctcctgcagcagagaggtcttttctacagcatggccaaagacgccggcttggtgtgagccccagagctggcatatctggtcagaactgcagggcctatatgccagcgcccagggaggagtcagtacccctggtaaaccaagcctcccacactgaaaccaaaacataaaaaccaaacccagacaaccaaaacatattcaaagcagcagccaccgccatccggtcccctgcctggaactggctgtgaagacccaggagagacagagatgcgaaccacccaaaacacgcacaccctgcccctggtgccctgagacagacacacagcctcacgcccccaggaatgcaagtggtttcctggtgcttcccacggaggagttttggcagccagacttctggaggaattggttgtatagaagatcctagtgaccaaattcagcctactgcctcggatctctccagccgaagtctgtggactgcaagtctttgagatgcttctggctcccatcacctctaacatccttgtctgggtctaccaggaacgcttcatttccttggggctgcagttttgtggttgaggggcctggagaaaatcattttctccccttggcagtgtcccagggccctggatggtcctcttaccaacatctggtcttccaggcactcaaaagctgggaaccagcatctcagcgccagctctaccagttctcgttttgggccagaggcagcctctgcactcccacgcctgtcctcctggaagggacctggttggactaacggctaacctggacctggaactgtagggccaggggattgtctcagggccgacgttccacctggggcttccctccccacccaccccgactccaggctttcccttttttcttttgttcaacattgtaagaacaatcaatgctgttattactgatcccaccatgattgatgtggggtaaatattaaggagatggcctcatgggaatttgaccttgactagaaatagagactgagagtgagcaaccagctggaaggtactatgccagtcctagcagaaaaatgtgttaggggcctggcccaaagcagtgttggttgcttacagtgttgattgattttgttcttttttcttaccacctcttttctttccctctcatggtacctgctcatggttatgaagctttcaaagtaaagaacacgaaatac

SEQ ID NO: 932 - DNA, 5749 bp, Homo sapiens
ccaggcggcgttgcggccccggccccggctccctgcgccgccgccgccgccgccgccgccgccgccgccgccgccgccagcgctagcgccagcagccgggcccgatcacccgccgcccggtgcccgccgccgcccgcgccagcaaccgggcccgatcacccgccgcccggtgcccgccgccgcccgcgccaccggcatggcgctccggggcttctgcagcgccgatggctccgacccgctctgggactggaatgtcacgtggaataccagcaaccccgacttcaccaagtgctttcagaacacggtcctcgtgtgggtgccttgtttttacctctgggcctgtttccccttctacttcctctatctctcccgacatgaccgaggctacattcagatgacacctctcaacaaaaccaaaactgccttgggatttttgctgtggatcgtctgctgggcagacctcttctactctttctgggaaagaagtcggggcatattcctggccccagtgtttctggtcagcccaactctcttgggcatcaccacgctgcttgctacctttttaattcagctggagaggaggaagggagttcagtcttcagggatcatgctcactttctggctggtagccctagtgtgtgccctagccatcctgagatccaaaattatgacagccttaaaagaggatgcccaggtggacctgtttcgtgacatcactttctacgtctacttttccctcttactcattcagctcgtcttgtcctgtttctcagatcgctcacccctgttctcggaaaccatccacgaccctaatccctgcccagagtccagcgcttccttcctgtcgaggatcaccttctggtggatcacagggttgattgtccggggctaccgccagcccctggagggcagtgacctctggtccttaaacaaggaggacacgtcggaacaagtcgtgcctgttttggtaaagaactggaagaaggaatgcgccaagactaggaagcagccggtgaaggttgtgtactcctccaaggatcctgcccagccgaaagagagttccaaggtggatgcgaatgaggaggtggaggctttgatcgtcaagtccccacagaaggagtggaacccctctctgtttaaggtgttatacaagacctttgggccctacttcctcatgagcttcttcttcaaggccatccacgacctgatgatgttttccgggccgcagatcttaaagttgctcatcaagttcgtgaatgacacgaaggccccagactggcagggctacttctacaccgtgctgctgtttgtcactgcctgcctgcagaccctcgtgctgcaccagtacttccacatctgcttcgtcagtggcatgaggatcaagaccgctgtcattggggctgtctatcggaaggccctggtgatcaccaattcagccagaaaatcctccacggtcggggagattgtcaacctcatgtctgtggacgctcagaggttcatggacttggccacgtacattaacatgatctggtcagcccccctgcaagtcatccttgctctctacctcctgtggctgaatctgggcccttccgtcctggctggagtggcggtgatggtcctcatggtgcccgtcaatgctgtgatggcgatgaagaccaagacgtatcaggtggcccacatgaagagcaaagacaatcggatcaagctgatgaacgaaattctcaatgggatcaaagtgctaaagctttatgcctgggagctggcattcaaggacaaggtgctggccatcaggcaggaggagctgaaggtgctgaagaagtctgcctacctgtcagccgtgggcaccttcacctgggtctgcacgccctttctggtggccttgtgcacatttgccgtctacgtgaccattgacgagaacaacatcctggatgcccagacagccttcgtgtctttggccttgttcaacatcctccggtttcccctgaacattctccccatggtcatcagcagcatcgtgcaggcgagtgtctccctcaaacgcctgaggatctttctctcccatgaggagctggaacctgacagcatcgagcgacggcctgtcaaagacggcgggggcacgaacagcatcaccgtgaggaatgccacattcacctgggccaggagcgaccctcccacactgaatggcatcaccttctccatccccgaaggtgctttggtggccgtggtgggccaggtgggctgcggaaagtcgtccctgctctcagccctcttggctgagatggacaaagtggaggggcacgtggctatcaagggcgtgaacctgtctgggggccagaagcagcgcgtgagcctggcccgggccgtgtactccaacgctgacatttacctcttcgatgatcccctctcagcagtggatgcccatgtgggaaaacacatctttgaaaatgtgattggccccaaggggatgctgaagaacaagacgcggatcttggtcacgcacagcatgagctacttgccgcaggtggacgtcatcatcgtcatgagtggcggcaagatctctgagatgggctcctaccaggagctgctggctcgagacggcgccttcgctgagttcctgcgtacctatgccagcacagagcaggagcaggatgcagaggagaacggggtcacgggcgtcagcggtccagggaaggaagcaaagcaaatggagaatggcatgctggtgacggacagtgcagggaagcaactgcagagacagctcagcagctcctcctcctatagtggggacatcagcaggcaccacaacagcaccgcagaactgcagaaagctgaggccaagaaggaggagacctggaagctgatggaggctgacaaggcgcagacagggcaggtcaagctttccgtgtactgggactacatgaaggccatcggactcttcatctccttcctcagcatcttccttttcatgtgtaaccatgtgtccgcgctggcttccaactattggctcagcctctggactgatgaccccatcgtcaacgggactcaggagcacacgaaagtccggctgagcgtctatggagccctgggcatttcacaagggatcgccgtgtttggctactccatggccgtgtccatcggggggatcttggcttcccgctgtctgcacgtggacctgctgcacagcatcctgcggtcacccatgagcttctttgagcggacccccagtgggaacctggtgaaccgcttctccaaggagctggacacagtggactccatgatcccggaggtcatcaagatgttcatgggctccctgttcaacgtcattggtgcctgcatcgttatcctgctggccacgcccatcgccgccatcatcatcccgccccttggcctcatctacttcttcgtccagaggttctacgtggcttcctcccggcagctgaagcgcctcgagtcggtcagccgctccccggtctattcccatttcaacgagaccttgctgggggtcagcgtcattcgagccttcgaggagcaggagcgcttcatccaccagagtgacctgaaggtggacgagaaccagaaggcctattaccccagcatcgtggccaacaggtggctggccgtgcggctggagtgtgtgggcaactgcatcgttctgtttgctgccctgtttgcggtgatctccaggcacagcctcagtgctggcttggtgggcctctcagtgtcttactcattgcaggtcaccacgtacttgaactggctggttcggatgtcatctgaaatggaaaccaacatcgtggccgtggagaggctcaaggagtattcagagactgagaaggaggcgccctggcaaatccaggagacagctccgcccagcagctggccccaggtgggccgagtggaattccggaactactgcctgcgctaccgagaggacctggacttcgttctcaggcacatcaatgtcacgatcaatgggggagaaaaggtcggcatcgtggggcggacgggagctgggaagtcgtccctgaccctgggcttatttcggatcaacgagtctgccgaaggagagatcatcatcgatggcatcaacatcgccaagatcggcctgcacgacctccgcttcaagatcaccatcatcccccaggaccctgttttgttttcgggttccctccgaatgaacctggacccattcagccagtactcggatgaagaagtctggacgtccctggagctggcccacctgaaggacttcgtgtcagcccttcctgacaagctagaccatgaatgtgcagaaggcggggagaacctcagtgtcgggcagcgccagcttgtgtgcctagcccgggccctgctgaggaagacgaagatccttgtgttggatgaggccacggcagccgtggacctggaaacggacgacctcatccagtccaccatccggacacagttcgaggactgcaccgtcctcaccatcgcccaccggctcaacaccatcatggactacacaagggtgatcgtcttggacaaaggagaaatccaggagtacggcgccccatcggacctcctgcagcagagaggtcttttctacagcatggccaaagacgccggcttggtgtgagccccagagctggcatatctggtcagaactgcagggcctatatgccagcgcccagggaggagtcagtacccctggtaaaccaagcctcccacactgaaaccaaaacataaaaaccaaacccagacaaccaaaacatattcaaagcagcagccaccgccatccggtcccctgcctggaactggctgtgaagacccaggagagacagagatgcgaaccacccaaaacacgcacaccctgcccctggtgccctgagacagacacacagcctcacgcccccaggaatgcaagtggtttcctggtgcttcccacggaggagttttggcagccagacttctggaggaattggttgtatagaagatcctagtgaccaaattcagcctactgcctcggatctctccagccgaagtctgtggactgcaagtctttgagatgcttctggctcccatcacctctaacatccttgtctgggtctaccaggaacgcttcatttccttggggctgcagttttgtggttgaggggcctggagaaaatcattttctccccttggcagtgtcccagggccctggatggtcctcttaccaacatctggtcttccaggcactcaaaagctgggaaccagcatctcagcgccagctctaccagttctcgttttgggccagaggcagcctctgcactcccacgcctgtcctcctggaagggacctggttggactaacggctaacctggacctggaactgtagggccaggggattgtctcagggccgacgttccacctggggcttccctccccacccaccccgactccaggctttcccttttttcttttgttcaacattgtaagaacaatcaatgctgttattactgatcccaccatgattgatgtggggtaaatattaaggagatggcctcatgggaatttgaccttgactagaaatagagactgagagtgagcaaccagctggaaggtactatgccagtcctagcagaaaaatgtgttaggggcctggcccaaagcagtgttggttgcttacagtgttgattgattttgttcttttttcttaccacctcttttctttccctctcatggtacctgctcatggttatgaagctttcaaagtaaagaacacgaaata

SEQ ID NO: 933 - DNA, 5759 bp, Homo sapiens
ccaggcggcgttgcggccccggccccggctccctgcgccgccgccgccgccgccgccgccgccgccgccgccgccgccagcgctagcgccagcagccgggcccgatcacccgccgcccggtgcccgccgccgcccgcgccagcaaccgggcccgatcacccgccgcccggtgcccgccgccgcccgcgccaccggcatggcgctccggggcttctgcagcgccgatggctccgacccgctctgggactggaatgtcacgtggaataccagcaaccccgacttcaccaagtgctttcagaacacggtcctcgtgtgggtgccttgtttttacctctgggcctgtttccccttctacttcctctatctctcccgacatgaccgaggctacattcagatgacacctctcaacaaaaccaaaactgccttgggatttttgctgtggatcgtctgctgggcagacctcttctactctttctgggaaagaagtcggggcatattcctggccccagtgtttctggtcagcccaactctcttgggcatcaccacgctgcttgctacctttttaattcagctggagaggaggaagggagttcagtcttcagggatcatgctcactttctggctggtagccctagtgtgtgccctagccatcctgagatccaaaattatgacagccttaaaagaggatgcccaggtggacctgtttcgtgacatcactttctacgtctacttttccctcttactcattcagctcgtcttgtcctgtttctcagatcgctcacccctgttctcggaaaccatccacgaccctaatccctgcccagagtccagcgcttccttcctgtcgaggatcaccttctggtggatcacagggttgattgtccggggctaccgccagcccctggagggcagtgacctctggtccttaaacaaggaggacacgtcggaacaagtcgtgcctgttttggtaaagaactggaagaaggaatgcgccaagactaggaagcagccggtgaaggttgtgtactcctccaaggatcctgcccagccgaaagagagttccaaggtggatgcgaatgaggaggtggaggctttgatcgtcaagtccccacagaaggagtggaacccctctctgtttaaggtgttatacaagacctttgggccctacttcctcatgagcttcttcttcaaggccatccacgacctgatgatgttttccgggccgcagatcttaaagttgctcatcaagttcgtgaatgacacgaaggccccagactggcagggctacttctacaccgtgctgctgtttgtcactgcctgcctgcagaccctcgtgctgcaccagtacttccacatctgcttcgtcagtggcatgaggatcaagaccgctgtcattggggctgtctatcggaaggccctggtgatcaccaattcagccagaaaatcctccacggtcggggagattgtcaacctcatgtctgtggacgctcagaggttcatggacttggccacgtacattaacatgatctggtcagcccccctgcaagtcatccttgctctctacctcctgtggctgaatctgggcccttccgtcctggctggagtggcggtgatggtcctcatggtgcccgtcaatgctgtgatggcgatgaagaccaagacgtatcaggtggcccacatgaagagcaaagacaatcggatcaagctgatgaacgaaattctcaatgggatcaaagtgctaaagctttatgcctgggagctggcattcaaggacaaggtgctggccatcaggcaggaggagctgaaggtgctgaagaagtctgcctacctgtcagccgtgggcaccttcacctgggtctgcacgccctttctggtggccttgtgcacatttgccgtctacgtgaccattgacgagaacaacatcctggatgcccagacagccttcgtgtctttggccttgttcaacatcctccggtttcccctgaacattctccccatggtcatcagcagcatcgtgcaggcgagtgtctccctcaaacgcctgaggatctttctctcccatgaggagctggaacctgacagcatcgagcgacggcctgtcaaagacggcgggggcacgaacagcatcaccgtgaggaatgccacattcacctgggccaggagcgaccctcccacactgaatggcatcaccttctccatccccgaaggtgctttggtggccgtggtgggccaggtgggctgcggaaagtcgtccctgctctcagccctcttggctgagatggacaaagtggaggggcacgtggctatcaagggctccgtggcctatgtgccacagcaggcctggattcagaatgattctctccgagaaaacatcctttttggatgtcagctggaggaaccatattacaggtccgtgatacaggcctgtgccctcctcccagacctggaaatcctgcccagtggggatcggacagagattggcgagaagacgcggatcttggtcacgcacagcatgagctacttgccgcaggtggacgtcatcatcgtcatgagtggcggcaagatctctgagatgggctcctaccaggagctgctggctcgagacggcgccttcgctgagttcctgcgtacctatgccagcacagagcaggagcaggatgcagaggagaacggggtcacgggcgtcagcggtccagggaaggaagcaaagcaaatggagaatggcatgctggtgacggacagtgcagggaagcaactgcagagacagctcagcagctcctcctcctatagtggggacatcagcaggcaccacaacagcaccgcagaactgcagaaagctgaggccaagaaggaggagacctggaagctgatggaggctgacaaggcgcagacagggcaggtcaagctttccgtgtactgggactacatgaaggccatcggactcttcatctccttcctcagcatcttccttttcatgtgtaaccatgtgtccgcgctggcttccaactattggctcagcctctggactgatgaccccatcgtcaacgggactcaggagcacacgaaagtccggctgagcgtctatggagccctgggcatttcacaagggatcgccgtgtttggctactccatggccgtgtccatcggggggatcttggcttcccgctgtctgcacgtggacctgctgcacagcatcctgcggtcacccatgagcttctttgagcggacccccagtgggaacctggtgaaccgcttctccaaggagctggacacagtggactccatgatcccggaggtcatcaagatgttcatgggctccctgttcaacgtcattggtgcctgcatcgttatcctgctggccacgcccatcgccgccatcatcatcccgccccttggcctcatctacttcttcgtccagaggttctacgtggcttcctcccggcagctgaagcgcctcgagtcggtcagccgctccccggtctattcccatttcaacgagaccttgctgggggtcagcgtcattcgagccttcgaggagcaggagcgcttcatccaccagagtgacctgaaggtggacgagaaccagaaggcctattaccccagcatcgtggccaacaggtggctggccgtgcggctggagtgtgtgggcaactgcatcgttctgtttgctgccctgtttgcggtgatctccaggcacagcctcagtgctggcttggtgggcctctcagtgtcttactcattgcaggtcaccacgtacttgaactggctggttcggatgtcatctgaaatggaaaccaacatcgtggccgtggagaggctcaaggagtattcagagactgagaaggaggcgccctggcaaatccaggagacagctccgcccagcagctggccccaggtgggccgagtggaattccggaactactgcctgcgctaccgagaggacctggacttcgttctcaggcacatcaatgtcacgatcaatgggggagaaaaggtcggcatcgtggggcggacgggagctgggaagtcgtccctgaccctgggcttatttcggatcaacgagtctgccgaaggagagatcatcatcgatggcatcaacatcgccaagatcggcctgcacgacctccgcttcaagatcaccatcatcccccaggaccctgttttgttttcgggttccctccgaatgaacctggacccattcagccagtactcggatgaagaagtctggacgtccctggagctggcccacctgaaggacttcgtgtcagcccttcctgacaagctagaccatgaatgtgcagaaggcggggagaacctcagtgtcgggcagcgccagcttgtgtgcctagcccgggccctgctgaggaagacgaagatccttgtgttggatgaggccacggcagccgtggacctggaaacggacgacctcatccagtccaccatccggacacagttcgaggactgcaccgtcctcaccatcgcccaccggctcaacaccatcatggactacacaagggtgatcgtcttggacaaaggagaaatccaggagtacggcgccccatcggacctcctgcagcagagaggtcttttctacagcatggccaaagacgccggcttggtgtgagccccagagctggcatatctggtcagaactgcagggcctatatgccagcgcccagggaggagtcagtacccctggtaaaccaagcctcccacactgaaaccaaaacataaaaaccaaacccagacaaccaaaacatattcaaagcagcagccaccgccatccggtcccctgcctggaactggctgtgaagacccaggagagacagagatgcgaaccacccaaaacacgcacaccctgcccctggtgccctgagacagacacacagcctcacgcccccaggaatgcaagtggtttcctggtgcttcccacggaggagttttggcagccagacttctggaggaattggttgtatagaagatcctagtgaccaaattcagcctactgcctcggatctctccagccgaagtctgtggactgcaagtctttgagatgcttctggctcccatcacctctaacatccttgtctgggtctaccaggaacgcttcatttccttggggctgcagttttgtggttgaggggcctggagaaaatcattttctccccttggcagtgtcccagggccctggatggtcctcttaccaacatctggtcttccaggcactcaaaagctgggaaccagcatctcagcgccagctctaccagttctcgttttgggccagaggcagcctctgcactcccacgcctgtcctcctggaagggacctggttggactaacggctaacctggacctggaactgtagggccaggggattgtctcagggccgacgttccacctggggcttccctccccacccaccccgactccaggctttcccttttttcttttgttcaacattgtaagaacaatcaatgctgttattactgatcccaccatgattgatgtggggtaaatattaaggagatggcctcatgggaatttgaccttgactagaaatagagactgagagtgagcaaccagctggaaggtactatgccagtcctagcagaaaaatgtgttaggggcctggcccaaagcagtgttggttgcttacagtgttgattgattttgttcttttttcttaccacctcttttctttccctctcatggtacctgctcatggttatgaagctttcaaagtaaagaacacgaaatac

SEQ ID NO: 934 - DNA, 5582 bp, Homo sapiens
ccaggcggcgttgcggccccggccccggctccctgcgccgccgccgccgccgccgccgccgccgccgccgccgccgccagcgctagcgccagcagccgggcccgatcacccgccgcccggtgcccgccgccgcccgcgccagcaaccgggcccgatcacccgccgcccggtgcccgccgccgcccgcgccaccggcatggcgctccggggcttctgcagcgccgatggctccgacccgctctgggactggaatgtcacgtggaataccagcaaccccgacttcaccaagtgctttcagaacacggtcctcgtgtgggtgccttgtttttacctctgggcctgtttccccttctacttcctctatctctcccgacatgaccgaggctacattcagatgacacctctcaacaaaaccaaaactgccttgggatttttgctgtggatcgtctgctgggcagacctcttctactctttctgggaaagaagtcggggcatattcctggccccagtgtttctggtcagcccaactctcttgggcatcaccacgctgcttgctacctttttaattcagctggagaggaggaagggagttcagtcttcagggatcatgctcactttctggctggtagccctagtgtgtgccctagccatcctgagatccaaaattatgacagccttaaaagaggatgcccaggtggacctgtttcgtgacatcactttctacgtctacttttccctcttactcattcagctcgtcttgtcctgtttctcagatcgctcacccctgttctcggaaaccatccacgaccctaatccctgcccagagtccagcgcttccttcctgtcgaggatcaccttctggtggatcacagggttgattgtccggggctaccgccagcccctggagggcagtgacctctggtccttaaacaaggaggacacgtcggaacaagtcgtgcctgttttggtaaagaactggaagaaggaatgcgccaagactaggaagcagccggtgaaggttgtgtactcctccaaggatcctgcccagccgaaagagagttccaaggtggatgcgaatgaggaggtggaggctttgatcgtcaagtccccacagaaggagtggaacccctctctgtttaaggtgttatacaagacctttgggccctacttcctcatgagcttcttcttcaaggccatccacgacctgatgatgttttccgggccgcagatcttaaagttgctcatcaagttcgtgaatgacacgaaggccccagactggcagggctacttctacaccgtgctgctgtttgtcactgcctgcctgcagaccctcgtgctgcaccagtacttccacatctgcttcgtcagtggcatgaggatcaagaccgctgtcattggggctgtctatcggaaggccctggtgatcaccaattcagccagaaaatcctccacggtcggggagattgtcaacctcatgtctgtggacgctcagaggttcatggacttggccacgtacattaacatgatctggtcagcccccctgcaagtcatccttgctctctacctcctgtggctgaatctgggcccttccgtcctggctggagtggcggtgatggtcctcatggtgcccgtcaatgctgtgatggcgatgaagaccaagacgtatcaggtggcccacatgaagagcaaagacaatcggatcaagctgatgaacgaaattctcaatgggatcaaagtgctaaagctttatgcctgggagctggcattcaaggacaaggtgctggccatcaggcaggaggagctgaaggtgctgaagaagtctgcctacctgtcagccgtgggcaccttcacctgggtctgcacgccctttctggtggccttgtgcacatttgccgtctacgtgaccattgacgagaacaacatcctggatgcccagacagccttcgtgtctttggccttgttcaacatcctccggtttcccctgaacattctccccatggtcatcagcagcatcgtgcaggcgagtgtctccctcaaacgcctgaggatctttctctcccatgaggagctggaacctgacagcatcgagcgacggcctgtcaaagacggcgggggcacgaacagcatcaccgtgaggaatgccacattcacctgggccaggagcgaccctcccacactgaatggcatcaccttctccatccccgaaggtgctttggtggccgtggtgggccaggtgggctgcggaaagtcgtccctgctctcagccctcttggctgagatggacaaagtggaggggcacgtggctatcaagacgcggatcttggtcacgcacagcatgagctacttgccgcaggtggacgtcatcatcgtcatgagtggcggcaagatctctgagatgggctcctaccaggagctgctggctcgagacggcgccttcgctgagttcctgcgtacctatgccagcacagagcaggagcaggatgcagaggagaacggggtcacgggcgtcagcggtccagggaaggaagcaaagcaaatggagaatggcatgctggtgacggacagtgcagggaagcaactgcagagacagctcagcagctcctcctcctatagtggggacatcagcaggcaccacaacagcaccgcagaactgcagaaagctgaggccaagaaggaggagacctggaagctgatggaggctgacaaggcgcagacagggcaggtcaagctttccgtgtactgggactacatgaaggccatcggactcttcatctccttcctcagcatcttccttttcatgtgtaaccatgtgtccgcgctggcttccaactattggctcagcctctggactgatgaccccatcgtcaacgggactcaggagcacacgaaagtccggctgagcgtctatggagccctgggcatttcacaagggatcgccgtgtttggctactccatggccgtgtccatcggggggatcttggcttcccgctgtctgcacgtggacctgctgcacagcatcctgcggtcacccatgagcttctttgagcggacccccagtgggaacctggtgaaccgcttctccaaggagctggacacagtggactccatgatcccggaggtcatcaagatgttcatgggctccctgttcaacgtcattggtgcctgcatcgttatcctgctggccacgcccatcgccgccatcatcatcccgccccttggcctcatctacttcttcgtccagaggttctacgtggcttcctcccggcagctgaagcgcctcgagtcggtcagccgctccccggtctattcccatttcaacgagaccttgctgggggtcagcgtcattcgagccttcgaggagcaggagcgcttcatccaccagagtgacctgaaggtggacgagaaccagaaggcctattaccccagcatcgtggccaacaggtggctggccgtgcggctggagtgtgtgggcaactgcatcgttctgtttgctgccctgtttgcggtgatctccaggcacagcctcagtgctggcttggtgggcctctcagtgtcttactcattgcaggtcaccacgtacttgaactggctggttcggatgtcatctgaaatggaaaccaacatcgtggccgtggagaggctcaaggagtattcagagactgagaaggaggcgccctggcaaatccaggagacagctccgcccagcagctggccccaggtgggccgagtggaattccggaactactgcctgcgctaccgagaggacctggacttcgttctcaggcacatcaatgtcacgatcaatgggggagaaaaggtcggcatcgtggggcggacgggagctgggaagtcgtccctgaccctgggcttatttcggatcaacgagtctgccgaaggagagatcatcatcgatggcatcaacatcgccaagatcggcctgcacgacctccgcttcaagatcaccatcatcccccaggaccctgttttgttttcgggttccctccgaatgaacctggacccattcagccagtactcggatgaagaagtctggacgtccctggagctggcccacctgaaggacttcgtgtcagcccttcctgacaagctagaccatgaatgtgcagaaggcggggagaacctcagtgtcgggcagcgccagcttgtgtgcctagcccgggccctgctgaggaagacgaagatccttgtgttggatgaggccacggcagccgtggacctggaaacggacgacctcatccagtccaccatccggacacagttcgaggactgcaccgtcctcaccatcgcccaccggctcaacaccatcatggactacacaagggtgatcgtcttggacaaaggagaaatccaggagtacggcgccccatcggacctcctgcagcagagaggtcttttctacagcatggccaaagacgccggcttggtgtgagccccagagctggcatatctggtcagaactgcagggcctatatgccagcgcccagggaggagtcagtacccctggtaaaccaagcctcccacactgaaaccaaaacataaaaaccaaacccagacaaccaaaacatattcaaagcagcagccaccgccatccggtcccctgcctggaactggctgtgaagacccaggagagacagagatgcgaaccacccaaaacacgcacaccctgcccctggtgccctgagacagacacacagcctcacgcccccaggaatgcaagtggtttcctggtgcttcccacggaggagttttggcagccagacttctggaggaattggttgtatagaagatcctagtgaccaaattcagcctactgcctcggatctctccagccgaagtctgtggactgcaagtctttgagatgcttctggctcccatcacctctaacatccttgtctgggtctaccaggaacgcttcatttccttggggctgcagttttgtggttgaggggcctggagaaaatcattttctccccttggcagtgtcccagggccctggatggtcctcttaccaacatctggtcttccaggcactcaaaagctgggaaccagcatctcagcgccagctctaccagttctcgttttgggccagaggcagcctctgcactcccacgcctgtcctcctggaagggacctggttggactaacggctaacctggacctggaactgtagggccaggggattgtctcagggccgacgttccacctggggcttccctccccacccaccccgactccaggctttcccttttttcttttgttcaacattgtaagaacaatcaatgctgttattactgatcccaccatgattgatgtggggtaaatattaaggagatggcctcatgggaatttgaccttgactagaaatagagactgagagtgagcaaccagctggaaggtactatgccagtcctagcagaaaaatgtgttaggggcctggcccaaagcagtgttggttgcttacagtgttgattgattttgttcttttttcttaccacctcttttctttccctctcatggtacctgctcatggttatgaagctttcaaagtaaagaacacgaaatac

SEQ ID NO: 935 - DNA, 5732 bp, Homo sapiens
ccaggcggcgttgcggccccggccccggctccctgcgccgccgccgccgccgccgccgccgccgccgccgccgccgccagcgctagcgccagcagccgggcccgatcacccgccgcccggtgcccgccgccgcccgcgccagcaaccgggcccgatcacccgccgcccggtgcccgccgccgcccgcgccaccggcatggcgctccggggcttctgcagcgccgatggctccgacccgctctgggactggaatgtcacgtggaataccagcaaccccgacttcaccaagtgctttcagaacacggtcctcgtgtgggtgccttgtttttacctctgggcctgtttccccttctacttcctctatctctcccgacatgaccgaggctacattcagatgacacctctcaacaaaaccaaaactgccttgggatttttgctgtggatcgtctgctgggcagacctcttctactctttctgggaaagaagtcggggcatattcctggccccagtgtttctggtcagcccaactctcttgggcatcaccacgctgcttgctacctttttaattcagctggagaggaggaagggagttcagtcttcagggatcatgctcactttctggctggtagccctagtgtgtgccctagccatcctgagatccaaaattatgacagccttaaaagaggatgcccaggtggacctgtttcgtgacatcactttctacgtctacttttccctcttactcattcagctcgtcttgtcctgtttctcagatcgctcacccctgttctcggaaaccatccacgaccctaatccctgcccagagtccagcgcttccttcctgtcgaggatcaccttctggtggatcacagggttgattgtccggggctaccgccagcccctggagggcagtgacctctggtccttaaacaaggaggacacgtcggaacaagtcgtgcctgttttggtaaagaactggaagaaggaatgcgccaagactaggaagcagccggtgaaggttgtgtactcctccaaggatcctgcccagccgaaagagagttccaaggtggatgcgaatgaggaggtggaggctttgatcgtcaagtccccacagaaggagtggaacccctctctgtttaaggtgttatacaagacctttgggccctacttcctcatgagcttcttcttcaaggccatccacgacctgatgatgttttccgggccgcagatcttaaagttgctcatcaagttcgtgaatgacacgaaggccccagactggcagggctacttctacaccgtgctgctgtttgtcactgcctgcctgcagaccctcgtgctgcaccagtacttccacatctgcttcgtcagtggcatgaggatcaagaccgctgtcattggggctgtctatcggaaggccctggtgatcaccaattcagccagaaaatcctccacggtcggggagattgtcaacctcatgtctgtggacgctcagaggttcatggacttggccacgtacattaacatgatctggtcagcccccctgcaagtcatccttgctctctacctcctgtggctgaatctgggcccttccgtcctggctggagtggcggtgatggtcctcatggtgcccgtcaatgctgtgatggcgatgaagaccaagacgtatcaggtggcccacatgaagagcaaagacaatcggatcaagctgatgaacgaaattctcaatgggatcaaagtgctaaagctttatgcctgggagctggcattcaaggacaaggtgctggccatcaggcaggaggagctgaaggtgctgaagaagtctgcctacctgtcagccgtgggcaccttcacctgggtctgcacgccctttctggtggccttgtgcacatttgccgtctacgtgaccattgacgagaacaacatcctggatgcccagacagccttcgtgtctttggccttgttcaacatcctccggtttcccctgaacattctccccatggtcatcagcagcatcgtgcaggcgagtgtctccctcaaacgcctgaggatctttctctcccatgaggagctggaacctgacagcatcgagcgacggcctgtcaaagacggcgggggcacgaacagcatcaccgtgaggaatgccacattcacctgggccaggagcgaccctcccacactgaatggcatcaccttctccatccccgaaggtgctttggtggccgtggtgggccaggtgggctgcggaaagtcgtccctgctctcagccctcttggctgagatggacaaagtggaggggcacgtggctatcaagggctccgtggcctatgtgccacagcaggcctggattcagaatgattctctccgagaaaacatcctttttggatgtcagctggaggaaccatattacaggtccgtgatacaggcctgtgccctcctcccagacctggaaatcctgcccagtggggatcggacagagattggcgagaagggcgtgaacctgtctgggggccagaagcagcgcgtgagcctggcccgggccgtgtactccaacgctgacatttacctcttcgatgatcccctctcagcagtggatgcccatgtgggaaaacacatctttgaaaatgtgattggccccaaggggatgctgaagaacaagacgcggatcttggtcacgcacagcatgagctacttgccgcaggtggacgtcatcatcgtcatgagtggcggcaagatctctgagatgggctcctaccaggagctgctggctcgagacggcgccttcgctgagttcctgcgtacctatgccagcacagagcaggagcaggatgcagaggagaacggggtcacgggcgtcagcggtccagggaaggaagcaaagcaaatggagaatggcatgctggtgacggacagtgcagggaagcaactgcagagacagctcagcagctcctcctcctatagtggggacatcagcaggcaccacaacagcaccgcagaactgcagaaagctgaggccaagaaggaggagacctggaagctgatggaggctgacaaggcgcagacagggcaggtcaagctttccgtgtactgggactacatgaaggccatcggactcttcatctccttcctcagcatcttccttttcatgtgtaaccatgtgtccgcgctggcttccaactattggctcagcctctggactgatgaccccatcgtcaacgggactcaggagcacacgaaagtccggctgagcgtctatggagccctgggcatttcacaagggatcgccgtgtttggctactccatggccgtgtccatcggggggatcttggcttcccgctgtctgcacgtggacctgctgcacagcatcctgcggtcacccatgagcttctttgagcggacccccagtgggaacctggtgaaccgcttctccaaggagctggacacagtggactccatgatcccggaggtcatcaagatgttcatgggctccctgttcaacgtcattggtgcctgcatcgttatcctgctggccacgcccatcgccgccatcatcatcccgccccttggcctcatctacttcttcgtccagaggttctacgtggcttcctcccggcagctgaagcgcctcgagtcggtcagccgctccccggtctattcccatttcaacgagaccttgctgggggtcagcgtcattcgagccttcgaggagcaggagcgcttcatccaccagagtgacctgaaggtggacgagaaccagaaggcctattaccccagcatcgtggccaacaggtggctggccgtgcggctggagtgtgtgggcaactgcatcgttctgtttgctgccctgtttgcggtgatctccaggcacagcctcagtgctggcttggtgggcctctcagtgtcttactcattgcaggtcaccacgtacttgaactggctggttcggatgtcatctgaaatggaaaccaacatcgtggccgtggagaggctcaaggagtattcagagactgagaaggaggcgccctggcaaatccaggagacagctccgcccagcagctggccccaggtgggccgagtggaattccggaactactgcctgcgctaccgagaggacctggacttcgttctcaggcacatcaatgtcacgatcaatgggggagaaaaggtcggcatcgtggggcggacgggagctgggaagtcgtccctgaccctgggcttatttcggatcaacgagtctgccgaaggagagatcatcatcgatggcatcaacatcgccaagatcggcctgcacgacctccgcttcaagatcaccatcatcccccaggaccctgttttgttttcgggttccctccgaatgaacctggacccattcagccagtactcggatgaagaagtctggacgtccctggagctggcccacctgaaggacttcgtgtcagcccttcctgacaagctagaccatgaatgtgcagaaggcggggagaacctcagggtgatcgtcttggacaaaggagaaatccaggagtacggcgccccatcggacctcctgcagcagagaggtcttttctacagcatggccaaagacgccggcttggtgtgagccccagagctggcatatctggtcagaactgcagggcctatatgccagcgcccagggaggagtcagtacccctggtaaaccaagcctcccacactgaaaccaaaacataaaaaccaaacccagacaaccaaaacatattcaaagcagcagccaccgccatccggtcccctgcctggaactggctgtgaagacccaggagagacagagatgcgaaccacccaaaacacgcacaccctgcccctggtgccctgagacagacacacagcctcacgcccccaggaatgcaagtggtttcctggtgcttcccacggaggagttttggcagccagacttctggaggaattggttgtatagaagatcctagtgaccaaattcagcctactgcctcggatctctccagccgaagtctgtggactgcaagtctttgagatgcttctggctcccatcacctctaacatccttgtctgggtctaccaggaacgcttcatttccttggggctgcagttttgtggttgaggggcctggagaaaatcattttctccccttggcagtgtcccagggccctggatggtcctcttaccaacatctggtcttccaggcactcaaaagctgggaaccagcatctcagcgccagctctaccagttctcgttttgggccagaggcagcctctgcactcccacgcctgtcctcctggaagggacctggttggactaacggctaacctggacctggaactgtagggccaggggattgtctcagggccgacgttccacctggggcttccctccccacccaccccgactccaggctttcccttttttcttttgttcaacattgtaagaacaatcaatgctgttattactgatcccaccatgattgatgtggggtaaatattaaggagatggcctcatgggaatttgaccttgactagaaatagagactgagagtgagcaaccagctggaaggtactatgccagtcctagcagaaaaatgtgttaggggcctggcccaaagcagtgttggttgcttacagtgttgattgattttgttcttttttcttaccacctcttttctttccctctcatggtacctgctcatggttatgaagctttcaaagtaaagaacacgaaatac

SEQ ID NO: 936 - DNA, 5801 bp, Homo sapiens
ccaggcggcgttgcggccccggccccggctccctgcgccgccgccgccgccgccgccgccgccgccgccgccgccgccagcgctagcgccagcagccgggcccgatcacccgccgcccggtgcccgccgccgcccgcgccagcaaccgggcccgatcacccgccgcccggtgcccgccgccgcccgcgccaccggcatggcgctccggggcttctgcagcgccgatggctccgacccgctctgggactggaatgtcacgtggaataccagcaaccccgacttcaccaagtgctttcagaacacggtcctcgtgtgggtgccttgtttttacctctgggcctgtttccccttctacttcctctatctctcccgacatgaccgaggctacattcagatgacacctctcaacaaaaccaaaactgccttgggatttttgctgtggatcgtctgctgggcagacctcttctactctttctgggaaagaagtcggggcatattcctggccccagtgtttctggtcagcccaactctcttgggcatcaccacgctgcttgctacctttttaattcagctggagaggaggaagggagttcagtcttcagggatcatgctcactttctggctggtagccctagtgtgtgccctagccatcctgagatccaaaattatgacagccttaaaagagaatccctgcccagagtccagcgcttccttcctgtcgaggatcaccttctggtggatcacagggttgattgtccggggctaccgccagcccctggagggcagtgacctctggtccttaaacaaggaggacacgtcggaacaagtcgtgcctgttttggtaaagaactggaagaaggaatgcgccaagactaggaagcagccggtgaaggttgtgtactcctccaaggatcctgcccagccgaaagagagttccaaggtggatgcgaatgaggaggtggaggctttgatcgtcaagtccccacagaaggagtggaacccctctctgtttaaggtgttatacaagacctttgggccctacttcctcatgagcttcttcttcaaggccatccacgacctgatgatgttttccgggccgcagatcttaaagttgctcatcaagttcgtgaatgacacgaaggccccagactggcagggctacttctacaccgtgctgctgtttgtcactgcctgcctgcagaccctcgtgctgcaccagtacttccacatctgcttcgtcagtggcatgaggatcaagaccgctgtcattggggctgtctatcggaaggccctggtgatcaccaattcagccagaaaatcctccacggtcggggagattgtcaacctcatgtctgtggacgctcagaggttcatggacttggccacgtacattaacatgatctggtcagcccccctgcaagtcatccttgctctctacctcctgtggctgaatctgggcccttccgtcctggctggagtggcggtgatggtcctcatggtgcccgtcaatgctgtgatggcgatgaagaccaagacgtatcaggtggcccacatgaagagcaaagacaatcggatcaagctgatgaacgaaattctcaatgggatcaaagtgctaaagctttatgcctgggagctggcattcaaggacaaggtgctggccatcaggcaggaggagctgaaggtgctgaagaagtctgcctacctgtcagccgtgggcaccttcacctgggtctgcacgccctttctggtggccttgtgcacatttgccgtctacgtgaccattgacgagaacaacatcctggatgcccagacagccttcgtgtctttggccttgttcaacatcctccggtttcccctgaacattctccccatggtcatcagcagcatcgtgcaggcgagtgtctccctcaaacgcctgaggatctttctctcccatgaggagctggaacctgacagcatcgagcgacggcctgtcaaagacggcgggggcacgaacagcatcaccgtgaggaatgccacattcacctgggccaggagcgaccctcccacactgaatggcatcaccttctccatccccgaaggtgctttggtggccgtggtgggccaggtgggctgcggaaagtcgtccctgctctcagccctcttggctgagatggacaaagtggaggggcacgtggctatcaagggctccgtggcctatgtgccacagcaggcctggattcagaatgattctctccgagaaaacatcctttttggatgtcagctggaggaaccatattacaggtccgtgatacaggcctgtgccctcctcccagacctggaaatcctgcccagtggggatcggacagagattggcgagaagggcgtgaacctgtctgggggccagaagcagcgcgtgagcctggcccgggccgtgtactccaacgctgacatttacctcttcgatgatcccctctcagcagtggatgcccatgtgggaaaacacatctttgaaaatgtgattggccccaaggggatgctgaagaacaagacgcggatcttggtcacgcacagcatgagctacttgccgcaggtggacgtcatcatcgtcatgagtggcggcaagatctctgagatgggctcctaccaggagctgctggctcgagacggcgccttcgctgagttcctgcgtacctatgccagcacagagcaggagcaggatgcagaggagaacggggtcacgggcgtcagcggtccagggaaggaagcaaagcaaatggagaatggcatgctggtgacggacagtgcagggaagcaactgcagagacagctcagcagctcctcctcctatagtggggacatcagcaggcaccacaacagcaccgcagaactgcagaaagctgaggccaagaaggaggagacctggaagctgatggaggctgacaaggcgcagacagggcaggtcaagctttccgtgtactgggactacatgaaggccatcggactcttcatctccttcctcagcatcttccttttcatgtgtaaccatgtgtccgcgctggcttccaactattggctcagcctctggactgatgaccccatcgtcaacgggactcaggagcacacgaaagtccggctgagcgtctatggagccctgggcatttcacaagggatcgccgtgtttggctactccatggccgtgtccatcggggggatcttggcttcccgctgtctgcacgtggacctgctgcacagcatcctgcggtcacccatgagcttctttgagcggacccccagtgggaacctggtgaaccgcttctccaaggagctggacacagtggactccatgatcccggaggtcatcaagatgttcatgggctccctgttcaacgtcattggtgcctgcatcgttatcctgctggccacgcccatcgccgccatcatcatcccgccccttggcctcatctacttcttcgtccagaggttctacgtggcttcctcccggcagctgaagcgcctcgagtcggtcagccgctccccggtctattcccatttcaacgagaccttgctgggggtcagcgtcattcgagccttcgaggagcaggagcgcttcatccaccagagtgacctgaaggtggacgagaaccagaaggcctattaccccagcatcgtggccaacaggtggctggccgtgcggctggagtgtgtgggcaactgcatcgttctgtttgctgccctgtttgcggtgatctccaggcacagcctcagtgctggcttggtgggcctctcagtgtcttactcattgcaggtcaccacgtacttgaactggctggttcggatgtcatctgaaatggaaaccaacatcgtggccgtggagaggctcaaggagtattcagagactgagaaggaggcgccctggcaaatccaggagacagctccgcccagcagctggccccaggtgggccgagtggaattccggaactactgcctgcgctaccgagaggacctggacttcgttctcaggcacatcaatgtcacgatcaatgggggagaaaaggtcggcatcgtggggcggacgggagctgggaagtcgtccctgaccctgggcttatttcggatcaacgagtctgccgaaggagagatcatcatcgatggcatcaacatcgccaagatcggcctgcacgacctccgcttcaagatcaccatcatcccccaggaccctgttttgttttcgggttccctccgaatgaacctggacccattcagccagtactcggatgaagaagtctggacgtccctggagctggcccacctgaaggacttcgtgtcagcccttcctgacaagctagaccatgaatgtgcagaaggcggggagaacctcagtgtcgggcagcgccagcttgtgtgcctagcccgggccctgctgaggaagacgaagatccttgtgttggatgaggccacggcagccgtggacctggaaacggacgacctcatccagtccaccatccggacacagttcgaggactgcaccgtcctcaccatcgcccaccggctcaacaccatcatggactacacaagggtgatcgtcttggacaaaggagaaatccaggagtacggcgccccatcggacctcctgcagcagagaggtcttttctacagcatggccaaagacgccggcttggtgtgagccccagagctggcatatctggtcagaactgcagggcctatatgccagcgcccagggaggagtcagtacccctggtaaaccaagcctcccacactgaaaccaaaacataaaaaccaaacccagacaaccaaaacatattcaaagcagcagccaccgccatccggtcccctgcctggaactggctgtgaagacccaggagagacagagatgcgaaccacccaaaacacgcacaccctgcccctggtgccctgagacagacacacagcctcacgcccccaggaatgcaagtggtttcctggtgcttcccacggaggagttttggcagccagacttctggaggaattggttgtatagaagatcctagtgaccaaattcagcctactgcctcggatctctccagccgaagtctgtggactgcaagtctttgagatgcttctggctcccatcacctctaacatccttgtctgggtctaccaggaacgcttcatttccttggggctgcagttttgtggttgaggggcctggagaaaatcattttctccccttggcagtgtcccagggccctggatggtcctcttaccaacatctggtcttccaggcactcaaaagctgggaaccagcatctcagcgccagctctaccagttctcgttttgggccagaggcagcctctgcactcccacgcctgtcctcctggaagggacctggttggactaacggctaacctggacctggaactgtagggccaggggattgtctcagggccgacgttccacctggggcttccctccccacccaccccgactccaggctttcccttttttcttttgttcaacattgtaagaacaatcaatgctgttattactgatcccaccatgattgatgtggggtaaatattaaggagatggcctcatgggaatttgaccttgactagaaatagagactgagagtgagcaaccagctggaaggtactatgccagtcctagcagaaaaatgtgttaggggcctggcccaaagcagtgttggttgcttacagtgttgattgattttgttcttttttcttaccacctcttttctttccctctcatggtacctgctcatggttatgaagctttcaaagtaaagaacacgaaatac

SEQ ID NO: 937 - DNA, 5780 bp, Homo sapiens
ccaggcggcgttgcggccccggccccggctccctgcgccgccgccgccgccgccgccgccgccgccgccgccgccgccagcgctagcgccagcagccgggcccgatcacccgccgcccggtgcccgccgccgcccgcgccagcaaccgggcccgatcacccgccgcccggtgcccgccgccgcccgcgccaccggcatggcgctccggggcttctgcagcgccgatggctccgacccgctctgggactggaatgtcacgtggaataccagcaaccccgacttcaccaagtgctttcagaacacggtcctcgtgtgggtgccttgtttttacctctgggcctgtttccccttctacttcctctatctctcccgacatgaccgaggctacattcagatgacacctctcaacaaaaccaaaactgccttgggatttttgctgtggatcgtctgctgggcagacctcttctactctttctgggaaagaagtcggggcatattcctggccccagtgtttctggtcagcccaactctcttgggcatcaccacgctgcttgctacctttttaattcagctggagaggaggaagggagttcagtcttcagggatcatgctcactttctggctggtagccctagtgtgtgccctagccatcctgagatccaaaattatgacagccttaaaagaggatgcccaggtggacctgtttcgtgacatcactttctacgtctacttttccctcttactcattcagctcgtcttgtcctgtttctcagatcgctcacccctgttctcggaaaccatccacgaccctaatccctgcccagagtccagcgcttccttcctgtcgaggatcaccttctggtggatcacagggttgattgtccggggctaccgccagcccctggagggcagtgacctctggtccttaaacaaggaggacacgtcggaacaagtcgtgcctgttttggtaaagaactggaagaaggaatgcgccaagactaggaagcagccggtgaaggttgtgtactcctccaaggatcctgcccagccgaaagagagttccaaggtggatgcgaatgaggaggtggaggctttgatcgtcaagtccccacagaaggagtggaacccctctctgtttaaggtgttatacaagacctttgggccctacttcctcatgagcttcttcttcaaggccatccacgacctgatgatgttttccgggccgcagatcttaaagttgctcatcaagttcgtgaatgacacgaaggccccagactggcagggctacttctacaccgtgctgctgtttgtcactgcctgcctgcagaccctcgtgctgcaccagtacttccacatctgcttcgtcagtggcatgaggatcaagaccgctgtcattggggctgtctatcggaaggccctggtgatcaccaattcagccagaaaatcctccacggtcggggagattgtcaacctcatgtctgtggacgctcagaggttcatggacttggccacgtacattaacatgatctggtcagcccccctgcaagtcatccttgctctctacctcctgtggctgaatctgggcccttccgtcctggctggagtggcggtgatggtcctcatggtgcccgtcaatgctgtgatggcgatgaagaccaagacgtatcaggtggcccacatgaagagcaaagacaatcggatcaagctgatgaacgaaattctcaatgggatcaaagtgctaaagctttatgcctgggagctggcattcaaggacaaggtgctggccatcaggcaggaggagctgaaggtgctgaagaagtctgcctacctgtcagccgtgggcaccttcacctgggtctgcacgccctttctggcgagtgtctccctcaaacgcctgaggatctttctctcccatgaggagctggaacctgacagcatcgagcgacggcctgtcaaagacggcgggggcacgaacagcatcaccgtgaggaatgccacattcacctgggccaggagcgaccctcccacactgaatggcatcaccttctccatccccgaaggtgctttggtggccgtggtgggccaggtgggctgcggaaagtcgtccctgctctcagccctcttggctgagatggacaaagtggaggggcacgtggctatcaagggctccgtggcctatgtgccacagcaggcctggattcagaatgattctctccgagaaaacatcctttttggatgtcagctggaggaaccatattacaggtccgtgatacaggcctgtgccctcctcccagacctggaaatcctgcccagtggggatcggacagagattggcgagaagggcgtgaacctgtctgggggccagaagcagcgcgtgagcctggcccgggccgtgtactccaacgctgacatttacctcttcgatgatcccctctcagcagtggatgcccatgtgggaaaacacatctttgaaaatgtgattggccccaaggggatgctgaagaacaagacgcggatcttggtcacgcacagcatgagctacttgccgcaggtggacgtcatcatcgtcatgagtggcggcaagatctctgagatgggctcctaccaggagctgctggctcgagacggcgccttcgctgagttcctgcgtacctatgccagcacagagcaggagcaggatgcagaggagaacggggtcacgggcgtcagcggtccagggaaggaagcaaagcaaatggagaatggcatgctggtgacggacagtgcagggaagcaactgcagagacagctcagcagctcctcctcctatagtggggacatcagcaggcaccacaacagcaccgcagaactgcagaaagctgaggccaagaaggaggagacctggaagctgatggaggctgacaaggcgcagacagggcaggtcaagctttccgtgtactgggactacatgaaggccatcggactcttcatctccttcctcagcatcttccttttcatgtgtaaccatgtgtccgcgctggcttccaactattggctcagcctctggactgatgaccccatcgtcaacgggactcaggagcacacgaaagtccggctgagcgtctatggagccctgggcatttcacaagggatcgccgtgtttggctactccatggccgtgtccatcggggggatcttggcttcccgctgtctgcacgtggacctgctgcacagcatcctgcggtcacccatgagcttctttgagcggacccccagtgggaacctggtgaaccgcttctccaaggagctggacacagtggactccatgatcccggaggtcatcaagatgttcatgggctccctgttcaacgtcattggtgcctgcatcgttatcctgctggccacgcccatcgccgccatcatcatcccgccccttggcctcatctacttcttcgtccagaggttctacgtggcttcctcccggcagctgaagcgcctcgagtcggtcagccgctccccggtctattcccatttcaacgagaccttgctgggggtcagcgtcattcgagccttcgaggagcaggagcgcttcatccaccagagtgacctgaaggtggacgagaaccagaaggcctattaccccagcatcgtggccaacaggtggctggccgtgcggctggagtgtgtgggcaactgcatcgttctgtttgctgccctgtttgcggtgatctccaggcacagcctcagtgctggcttggtgggcctctcagtgtcttactcattgcaggtcaccacgtacttgaactggctggttcggatgtcatctgaaatggaaaccaacatcgtggccgtggagaggctcaaggagtattcagagactgagaaggaggcgccctggcaaatccaggagacagctccgcccagcagctggccccaggtgggccgagtggaattccggaactactgcctgcgctaccgagaggacctggacttcgttctcaggcacatcaatgtcacgatcaatgggggagaaaaggtcggcatcgtggggcggacgggagctgggaagtcgtccctgaccctgggcttatttcggatcaacgagtctgccgaaggagagatcatcatcgatggcatcaacatcgccaagatcggcctgcacgacctccgcttcaagatcaccatcatcccccaggaccctgttttgttttcgggttccctccgaatgaacctggacccattcagccagtactcggatgaagaagtctggacgtccctggagctggcccacctgaaggacttcgtgtcagcccttcctgacaagctagaccatgaatgtgcagaaggcggggagaacctcagtgtcgggcagcgccagcttgtgtgcctagcccgggccctgctgaggaagacgaagatccttgtgttggatgaggccacggcagccgtggacctggaaacggacgacctcatccagtccaccatccggacacagttcgaggactgcaccgtcctcaccatcgcccaccggctcaacaccatcatggactacacaagggtgatcgtcttggacaaaggagaaatccaggagtacggcgccccatcggacctcctgcagcagagaggtcttttctacagcatggccaaagacgccggcttggtgtgagccccagagctggcatatctggtcagaactgcagggcctatatgccagcgcccagggaggagtcagtacccctggtaaaccaagcctcccacactgaaaccaaaacataaaaaccaaacccagacaaccaaaacatattcaaagcagcagccaccgccatccggtcccctgcctggaactggctgtgaagacccaggagagacagagatgcgaaccacccaaaacacgcacaccctgcccctggtgccctgagacagacacacagcctcacgcccccaggaatgcaagtggtttcctggtgcttcccacggaggagttttggcagccagacttctggaggaattggttgtatagaagatcctagtgaccaaattcagcctactgcctcggatctctccagccgaagtctgtggactgcaagtctttgagatgcttctggctcccatcacctctaacatccttgtctgggtctaccaggaacgcttcatttccttggggctgcagttttgtggttgaggggcctggagaaaatcattttctccccttggcagtgtcccagggccctggatggtcctcttaccaacatctggtcttccaggcactcaaaagctgggaaccagcatctcagcgccagctctaccagttctcgttttgggccagaggcagcctctgcactcccacgcctgtcctcctggaagggacctggttggactaacggctaacctggacctggaactgtagggccaggggattgtctcagggccgacgttccacctggggcttccctccccacccaccccgactccaggctttcccttttttcttttgttcaacattgtaagaacaatcaatgctgttattactgatcccaccatgattgatgtggggtaaatattaaggagatggcctcatgggaatttgaccttgactagaaatagagactgagagtgagcaaccagctggaaggtactatgccagtcctagcagaaaaatgtgttaggggcctggcccaaagcagtgttggttgcttacagtgttgattgattttgttcttttttcttaccacctcttttctttccctctcatggtacctgctcatggttatgaagctttcaaagtaaagaacacgaaatac

SEQ ID NO: 938 - DNA, 1856 bp, Homo sapiens
attgcgggcggcggcgttcggagtcgccgggagctgccaggctgtccgcgccgccgctgcggggccatgatccggaacgggcgcggggctgcaggcggcgcagagcagccgggcccggggggcaggcgcgccgtgagggtgtggtgcgatggctgctatgacatggtgcattacggccactccaaccagctgcgccaggcacgggccatgggtgactacctcatcgtaggcgtgcacaccgatgaggagatcgccaagcacaaggggcccccggtgttcactcaggaggagagatacaagatggtgcaggccatcaaatgggtggacgaggtggtgccagcggctccctacgtcactacactagagaccctggacaaatacaactgtgacttctgtgttcacggcaatgacatcaccctgactgtagatggccgggacacctatgaggaagtaaagcaggctgggaggtacagagaatgcaagcgcacgcaaggggtgtccaccacagacctcgtgggccgcatgctgctggtaaccaaagcccatcacagcagccaggagatgtcctctgagtaccgggagtatgcagacagttttggcaagtgccctggtgggcggaacccctggaccggggtatcccagttcctgcagacatctcagaagatcatccagtttgcttctgggaaggagccccagccaggggagacagtcatctatgtggctggtgccttcgacctgttccacatcgggcatgtggacttcctggagaaggtgcacaggctggcagagaggccctacatcatcgcgggcttacactttgaccaggaggtcaatcactacaaggggaagaactaccccatcatgaatctgcatgaacggactctgagcgtgctggcctgccggtacgtgtcagaagtggtgattggagccccgtacgcggtcacagcagagctcctaagtcacttcaaggtggacctggtgtgtcacggcaagacagaaattatccctgacagggatggctccgacccataccaggagcccaagagaaggggcatcttccgtcagattgacagtggcagcaacctcaccacagacctcatcgtccagcggatcatcaccaacaggttggagtatgaggcgcgaaaccagaagaaggaagccaaggagctggccttcctggaggctgccaggcagcaggcggcacagcccctgggggagcgcgatggtgacttctaacctggcagaggccctggccggccctccccctgctctgcttctgcgccttctgcgtttggacataggactctgcagggccgccctctctaactggcctggctctggaagggctggtgaggactctgcctccttgcctgcctacaaggtgcctggtttgcagcaggctctccgctctttccagcaaagctgctcagagagggtgtccagcacagtggagaggccggaagtgagacgggcagacggcacctgcagcctgaaacgcaccgctcctgcgtgcgcccccacctggtccccggatgcccccaccacctggacagaggccacactgactgcccacccagctgtggcgggaggtgcagagcagggggctttagggagcagtgactgcggtcacccctttagttctctgggtgtagaccacaccacctcccactgggcaccccccaacacggtgtcctgccacccagcgcctggctccaggaaaacacgcttgccttccttcccggcagcttcgccactctccttatggactctgttctgtttgtacatggctgacggaaatctctttggtacaaccgaataaagcctggtggcagtgctgcgcggggctcccagccaat

(The sequence listing continues in the following parts.)

What is claimed is:

1. A plurality of polynucleotides, wherein the plurality consists of polynucleotides that bind specifically to nucleic acids encoding no more than 100 breast cancer markers, wherein the breast cancer markers comprise PTCD2, SLC25A20, NFKB2 and RASGRP2.

2. A plurality of polynucleotides, wherein the plurality consists of polynucleotides that bind specifically to nucleic acids encoding no more than 100 breast cancer markers, wherein the breast cancer markers comprise PTCD2, PDE7A and MLL.

3. A plurality of polynucleotides, wherein the plurality consists of polynucleotides that bind specifically to nucleic acids encoding no more than 100 breast cancer markers, wherein the breast cancer markers comprise PTCD2, PRKCE, GPATC3, PRIC285 and GSTA4.

4. A plurality of isolated antibodies, wherein the plurality comprises antibodies that bind specifically to PTCD2, SLC25A20, NFKB2 and RASGRP2 polypeptides.

5. A plurality of isolated antibodies, wherein the plurality comprises antibodies that bind specifically to PTCD2, PDE7A and MLL polypeptides.

6. A plurality of isolated antibodies, wherein the plurality comprises antibodies that bind specifically to PTCD2, PRKCE, GPATC3, PRIC285 and GSTA4 polypeptides.

7. A plurality of isolated breast cancer marker polypeptides, wherein the plurality comprises PTCD2, SLC25A20, NFKB2 and RASGRP2 polypeptides, or antigenic fragments thereof.

8. A plurality of isolated breast cancer marker polypeptides, wherein the plurality comprises PTCD2, PDE7A and MLL polypeptides, or antigenic fragments thereof.

9. A plurality of isolated breast cancer marker polypeptides, wherein the plurality comprises a PTCD2, PRKCE, GPATC3, PRIC285 and GSTA4 polypeptides, or antigenic fragments thereof.

10. A plurality of polynucleotides, wherein the plurality consists of polynucleotides that bind specifically to nucleic acids encoding no more than 100 breast cancer markers, wherein the breast cancer markers comprise SLC25A20, NFKB2 and RASGRP2.

11. The plurality of polynucleotides of claim 10, wherein the breast cancer markers comprise MIPEP, PLCB2, SLC25A19, DEF6, ZNF236, C18orf22, COX7A2, DDX11, TOP3A, C9orf6, UFC1, PFDN2, KLRD1, LOC643641, HSP90AB1, CLCN7, TNFAIP2, PRKCE, MRPL40, FBF1, ANKRD44, CCT5, USP40, UBXD4, LRCH1, MRPL4, SCCPDH, STX6, LOC284184, FLJ23235, GPATC3, CPSF4, CREM, HIST1H1D, HPS4, FN3KRP, ANKRD16, C8 orf16, ATF71P2, and PRIC285.

12. A plurality of isolated antibodies, wherein the plurality comprises antibodies that bind specifically to SLC25A20, NFKB2 and RASGRP2 polypeptides.

13. A plurality of isolated breast cancer marker polypeptides, wherein the plurality comprises SLC25A20, NFKB2 and RASGRP2 polypeptides, or antigenic fragments thereof.

14. A plurality of polynucleotides, wherein the plurality consists of polynucleotides that bind specifically to nucleic acids encoding no more than 100 breast cancer markers, wherein the breast cancer markers comprise PDE7A, MLL, and PTCD2.

15. The plurality of polynucleotides of claim 14, wherein the breast cancer markers comprise ZNF669, SNRP70, MGC35402, GSTA4, ATHL1, PRSS23, and TMEM80.

16. The plurality of polynucleotides of claim 14, wherein the breast cancer markers comprise FLJ40432 STX5A, PRKCE, MTMR11, TNPO1, MGC3731, FKBP5, C3orf62, IRS2, GPATC3, SUSD1, CCM2, ZBTB7A, RAB11A, GSDML, MAPK9, DRG2, PDZD8, LOC339804, PPARD, DDIT3, FAM113A, RHBDD3, TIMM44, ATP6AP2, ME2, PRIC285, TNFSF14, ABCA2, EML2, Magmas, EVI2A, USP37, GATAD1, CHN2, PSCD4, CHTF18, SFRS8, DICER1, and PIAS1.

17. A plurality of isolated antibodies, wherein the plurality comprises antibodies that bind specifically to PDE7A, MLL, and PTCD2 polypeptides.

18. A plurality of isolated breast cancer marker polypeptides, wherein the plurality comprises PDE7A, MLL, and PTCD2 polypeptides, or antigenic fragments thereof.

19. The plurality of breast cancer marker polypeptides of claim 18, wherein the plurality comprises ZNF669, SNRP70, MGC35402, GSTA4, ATHL1, PRSS23, and TMEM80, or antigenic fragments thereof.

20. The plurality of breast cancer marker polypeptides of claim 19, wherein the plurality comprises FLJ40432 STX5A, PRKCE, MTMR11, TNPO1, MGC3731, FKBP5, C3orf62, IRS2, GPATC3, SUSD1, CCM2, ZBTB7A, RAB11A, GSDML, MAPK9, DRG2, PDZD8, LOC339804, PPARD, DDIT3, FAM113A, RHBDD3, TIMM44, ATP6AP2, ME2, PRIC285, TNFSF14, ABCA2, EML2, Magmas, EVI2A, USP37, GATAD1, CHN2, PSCD4, CHTF18, SFRS8, DICER1, and PIAS1, or antigenic fragments thereof.

21. A diagnostic panel consisting of one or more polynucleotides and optionally at least one non-polynucleotide component, wherein the polynucleotides bind specifically to a nucleic acid encoding a breast cancer marker selected from the group consisting of ACAA2, SLC25A20, SREBF1, and MRPL40, and to no more than 100 breast cancer markers.

22. A diagnostic panel comprising at least one antibody, wherein the antibody binds specifically to a breast cancer marker selected from the group consisting of ACAA2, SLC25A20, SREBF1, and MRPL40, or a combination thereof.

23. A diagnostic panel comprising at least one breast cancer marker polypeptide selected from the group consisting of ACAA2, SLC25A20, SREBF1, and MRPL40.

24. A method for detecting the presence of breast cancer in a patient, the method comprising:
(a) obtaining a biological sample from the patient; and
(b) detecting the level of expression of breast cancer markers in the biological sample using the plurality of polynucleotides of claim 1, wherein a modulated level of expression as compared to a predetermined cut-off value for each breast cancer marker indicates the presence of breast cancer in the patient.

25. A method for detecting the presence of breast cancer in a patient, the method comprising:
(a) obtaining a biological sample from the patient; and
(b) detecting the level of protein expression of breast cancer markers in the biological sample using the plurality of antibodies of claim 4, wherein a modulated level of protein expression as compared to a predetermined cut-off value for each breast cancer marker indicates the presence of breast cancer in the patient.

26. A method for detecting the presence of breast cancer in a patient, the method comprising:
(a) obtaining a biological sample from the patient; and
(b) detecting the level of antibodies directed against breast cancer markers in the biological sample using the plurality of polypeptides of claim 7, wherein a modulated level of antibodies as compared to a predetermined cut-off value for each breast cancer marker indicates the presence of breast cancer in the patient.
